United States Patent Application Publication US 2014/0057251 A1 - sequence listing, part 29

SEQ ID NO: 30612 - DNA, 3354 bp, Cannabis sativa
  modified_base (3214)..(3255): a, c, t, g, unknown or other
  modified_base (3309)..(3315): a, c, t, g, unknown or other
agttctctgaaaacagttgtttaatagttatttttatgttgttttatatagttgttttcgaacatctggaacatacatgacttagcacgtaacatctatgtagtataatattatgtataagttctaataatattgatgattcatacaataaacatagaatcagactttttttttatatattttttcgaagttttttttttctttttatatatttatgaattttatatttttacatgtctttcagtagttttttttttcatgttgttttcccatatatagtagcaacttaaaaatattgaaaagacaatatacttttgtaaaaaaaaaaaaatggatatccctaaaattataaactttttatttgagtatttatggaatattttttttaattagatagtaatatgagaacttaaatgaaaatgttaacgtacaatgtatgttatgtggaaagtcaatcttaataaataatcatgcattaatgacaataatagtagtaaaggaaacaaagcatttaaaatgaaagaaaatgaagggaaaaaaaaaagctgggttacaataaactcttacgcggcttctctgctttcttctcccactttttctgcactatttactctcctccattccctttcacaaaaaataaattgagaaaaaatagaaagaaaaaaaaaaacaacagaaagacaaggagagagagaaggagagagtgactcatctctcggaagacggagatcgacctctgaagttaccattgtttggtctccgaagaaaaccccctcacaatgccttccaattatcattttctttttcttctttcctgctcttttttgtttggcttggcctcttctaccaccttcatttctggtatatatattcttatttttattaacgtatcaatttgaatcaattgggttaagttttaaatctaatttattattttgtgaattgttgcagataatgtttttgagtcccatggctccacatctcgttcccttcttcaagccaaaaagagtaaccacttttattttggcttgtatatatttttatgttctttctagatttgtagatttgttttgtttctattccaaagttttttaaacaatgaatttaataaagacataattagcaatgtagaaaatttgatgcctctttcatgaaatgtacatgtcttgctctgtcatgaaaaccggaattgaaatatttatgtataagttctaataattcacatgcaatattatgtatctcttctttatttagtgtgcagtgctatgttgaaaatgatatagaagaactaagtagtttagcttgttccctttttcagcttgcaacataaactttgagtcacaaaactatacaatcatcacaagcaaatgtaaagggccccaatacccacctcagtcatgttgcttggccttcaaggaattcgcttgccctttcgcagatgccattaacgacgagaacagcgattgtgctgccaccatgttcagctacattaatctctatggaaagtacccacctggcctctttgccttgcaatgtagagaaggcaaagaaggtcttgactgcactgacatacttgaagcagccaaacaaaagactagtgcagctcatataacatacactactccatccacattgcttctcctgcttttaactgcattttctctgttattattcaatttgttctgagataacaaaacatcaacaaatctccacacaaacatatatatatatatatatatatactttatattcattttctcttcttttgtcgttgcttatgtagagactgttctctttttaagggtgtggttcttcttttttcattttccattcttcagaaactttgtatactagaattactgaaacatatagtttactagacaaacgaatttgactttcccatgtgtcctaattagatttttgtcttcttatattactaatatttttgacaaagtcatcacctttggtaaaattaaggtaatacacctaaaacacatatttaacattctttggtggtatttttatgtgctataagccacacatctttttcctaatgtatttatactttatcaaaagtctatatatatgagaataatggaccaaagaattaagaatatgatttatattgtatggttttgtcaattgagttctagtacatatattcattgatcaaatctggatcccacaataagatgatttagatatgcacctgacgtactattgtttgtctatactagtagataatatattatcaaaagttgaaatttcaatctaattcagcatattaatttttgctttatcattttgttaacacattattagatgatgaagcttctgctagttttttgtggctgtggatttaaggaataaaatattatgaagcttcacagtcacgccatttattcattaattaggaaagtccaaataattctattagttaatgatagattatcattcacaaagatttttgttttttggtacggatgtaatttacaaagttaaacttaaatcaaagtaacattctcataaaaaaaataaagtaacattaataaatttagtaatatgttctattataatatgtgacaaaattactttacttgtatggtagttactagttagtttagatgggccactaaaataaaataatttaatattatatagatgtgtgtttgggtgtgaaaagtgtgtacatatcaaaatttaaaattttgtaattaatcaatgaaattttcgtgcacataatcacaaacgtgatgcgtcccctacagtgttttccttttgtttagtagaagatcctttcgttttgtaatagaacatatattattagtaaatgaatggtaatttctatagtacctcaaagagtcgatcttgtagatttctattttctttcttatccagaaaaaaaaaaaaattaatctattttattttttttgatgatcgtgtatgtcgtagttatttagggctatatgtaaattttaaaaaaaaaattgaatagtttacaataccaagaattagatttaaagaattacttaccacacgtataagaaaaaataatcgtgcgtgcaacaaaatatataaatattattttcggcattgtaaatttttcaaatttttttaaaaatttacaagtagtgttgaatgattataatgtacgttattgtctcaaattatctaataatctatcactactaaaaactgttacttttagtgacannnnnnnnnnnnnnnnnnnnnnnnnnnnnnnnnnnnnnnnnnttttagtcacaacaaaatgttacatgtgattaaaacataatatttagatacaannnnnnnctaatttagttttagtcacaacgagtattgtgactaaaa

SEQ ID NO: 30613 - DNA, 3202 bp, Cannabis sativa
  modified_base (3151)..(3164): a, c, t, g, unknown or other
gcacaaatacagatttttaaattttccaatccaatctgatccgaacaagtacaaatatccacattttgcgtattgaattagattgaatcatacatattgtattgaattaaatattttatgaacgcccctaatacaaaccataattttaaaccaaattaataatctcttctcatgaattggatttgtttagttcaagcataattggtctagtttagttttaaatttataaaaaattaaaatttcttacaatttcgtgatatttgaaaatgtcacattaattcgtaataattttaaagccaaatatttactttctcgttatattaaattataccaataataattatatatatatattacaaaatactcctataatacatttacacttactagtataacactttctttttgtcccaacacctatatatatatatatatattgagaaatagaacttttatattaatcatcctaaaaagtgataatacatatccccattaccttattaaaaaactcaatatgggattatacttatagtaagaagaaaaagataggtatataggttaatgatgatgatgatacaaaaacaaacaatatttgtttattaatttggccaaaactttttacaacttttgatactgcaagaaaaacaacaacactactataccactactttttggttaagcaaaacaaagttaaaactagaaagaaagaaaagaaaacaagtcttgtagaaaccgaaaaatgattcttcatcatcaccatcatcatcatcataatgtatatatatatatatatatattcttaaaagcctttttattagtgacgcacgctctctcttctcttctcttctttgttcaaacaacaagtcttttttctctttataacttttccttcccttttacgcgtttttcgaactacaaaaaaagactacaacaacaactactactactattactactaccacctttttccatcctccatgctcatcatcatcatcatacttattcattaactcactctttttcctttgtctttttccttcacccaagatacccccccttaccaagttgatatttttgaaaagttgaataattaattcctaatctttttttctttttctaattcaagaatattgtatgtgttataaggttagattgatggtcaaatacaacttgagagacccgaccaccaattttgtctttctccaataggaagaaagtttggcaatggaataagcaagagaaatgaaaattttgcatagtctgctctgtcattttcttgtcgattgcatcacaatctcagaggcaactagttttcacagtgactaatttgtagcccaaaggaatgtatgagtgcttagatacaagtcggtaatatattgtaagttaatgcttttcttatggagtttgtcgactcacagttattacttgcatgtgtaggtaaagaaaaggctaaagttgagcagcaatgagttcggagctcgaagatgattgtacatgtcaagatggtaagatctggagagttcggtctcgggataacttaggcatattttgtagtcactgtgcgataaagttgtaaagtttattttgaacatgtaaacaagttcaaaagcgagatttcgacctttttgtataattatatatttatagttattaaagtttaatgttattcaaaagttttaatttgtcatgaattttgagaaaacattctgagcaaagaagtgcacaatagttaaaagatcactagcgtgcctatttattagggcattacaattttggaaccaccaggttgtttaccgaagaccgtcaagacatgtacaatcatcataagagataagctcgacttactgttcagtaagtccttacttatttagtaagttttgtgattagtaaagcatgtaaggaagcataatagttttatgattatttatttgaatacattgccttaaaacccataagtacggtatttacaacatatatgatcgttgtctgacctacttgacttatgggtttccaggccttacctataatatgaatgcccaaagaaacacgagaagtcgtggtaatatggttgagacaggaggcaatcagagaggtcaaaatccttcgaatccccgtggatgcggtagaggccttgaaagatttcaaggaggtggtcatgaaaatccaccataagctcctcaggatcgggagcaaaggtttgcagaaataaaagcctgaatccaccaacaagacgaagaaattcagaggctgagacagcagggtccttctgcagtgcctccaccacaaatgcatgctgctttggttccaacggtgcaagcataacaacttgttgttggcaaccgtatggaacctttgtatgaaagatttcgcaagtagacgcctcaagtttttctaggaggtccagacgttatgaaagctgaatggtggctcacagtaattgagagaattctgaattttatgggggttcgggaatgaccaagtgacttgtgctaccttttagttccaagaagacgcactcgtgtggtgggagatggtatccctcactcgggatgtcactacactgacttgaaaagaattttaggatttatttaatgctaagtataataatgaggttgtttgcaacgctaaaaggaaagagttcactaaatttgttcaggaggaagccatgtcagtgacagattacacaaaaaagttcgattgacttgccaagctggcttcgggcatagtgcccacatattttagcaagaaatacttggcaggattgaatgccaagattaggcatgatctagtgattacaatgaacgacaccagctacgctgagatggttcaaaaggctcttcgagctgaggacacaatggaatttctacaaagagccctgagggtctccaagtgtttgtgggaccaccacctttcctacttttagttatggtaaggacggtggtgatacccatgctgatcagaagagaaagatctttccaacctctagtggttcgggacagagtaaaaggttctgtagaaaccaaggtagaggcagacgtcagggttattcttatcctgagtgcccatattgcaagaaacatcatcatggggaatgtactcgaaaggcatgctttgtgtaatatctccacttcaagcctccattgggcccttnnnnnnnnnnnnnnatggctcttatacacgagtaagtcactctggctgcttc

SEQ ID NO: 30614 - DNA, 1916 bp, Cannabis sativa
  modified_base (245)..(255): a, c, t, g, unknown or other
aattatcaaattaaaaaaattatatttaattttttaaaaggcaatatttttattagtggggctatagcccccatataagcactactgggtccgtccctgtgtatatatatttatgagtatgtttacaatatatctccttaaaaggaatgctaagcactctttatctatttggttatcttaaattttttttttgtctttatcatattcgtttacattgtaaatatttaagatattttataaaattnnnnnnnnnnnaaaataatttataatataaaatgcagtgtacaaattatctatttcacacgcttgaaatacattgtttaaaccctgttttcattgtgttatattttttaaaattttgtaggatattttaaataattatagcgtacatgactacaaaaaaaattaactaaaaaattattttaaatatcaaaacaaataaaaatgtatcattacattctttttaaatgatggattatatattttttttaatatttattataaaaaggaaagtttctttctatccattattgactcttacaaatattttcatattgtgcactatcattacactattttttcttaaagtgagaaatagatgatgaagacaacacattcgttgacatgatcttatcccaaaaataaaagtataagaaaacaaaaagaaaaatagatgataaaaaaacaaaagaaaagagaaaaagagaaaagagaatgtgtacatactacataataatgaaaagaaaagaaaggctaataagattttggctaatttggtttttgcaatgtatcaaattataccatatcaagttcttaggtggataaatttttttttctgaactattgatattgttagatttaaatttttttgtctaattatactaatgaaagtttgattttgacgtgaattacagttcagggggcatttggtacatgttaaaatttaggagtataatttagtagatattaaagtttgtagggtataatttggtgatatcaaagtttaggagcacgatttaatacataaaaaatcattttattagtaaagttgaatagaatttgacaaaaatctttaaatctaataatctcaaaagtttagggaaatttttaacggtataaataattcgaggggtataatttggtgcatgtgaaagtttagagagcaaaaattgtaattagtctaaaattgtatttcctgcacttttcaggctgctaaaaattattctgaattattgagattattgatttaaagactattatatacttaattaaggaggtgtggaaatatgaatactaataccactacaattaatatatcactattagtataattaagtatagaagaatataatcatgttaaaaattattagtgtctattttagtataaattattaaaattaatgtattgctctagactaaattaatgcatttcaataaagcattgctatggtgcctatcactactacaatgagacaccttataaatagttagcagctttttataatatttattaaagtaaaataagtgagatccgatattgtgcatcaacaacgatattacacctcataagagtgctagacaccatgaatgttatttagcatttctcattgtgcatcaacaacgatattacatttcataagagtgctagacaccatgaatgatatttagcatttttcaactctatattgagtcttacttattttactttaagtgataaatctaaaattttgagtttgtaactgatataaactcaataattttttaatgacataagtactcaatgtttgtaaaactataatttttctcaaattttgtcaatacagattctgttttgaattcattaaaatgaaatttaaaagtaactgacactacatgtttctgttcaaatccaatgatatagaatttaagtcttatat

SEQ ID NO: 30615 - DNA, 1998 bp, Cannabis sativa
aaaagaataataatatatgtatcaataattgttgcatcgtgatgcataatcatatatgatgagctcaacaatggatggatgttgttaatagtactatgtttttttttattattattaattttgtgataaagtttttacaatcgatctcatcaaatattactttatgtttttttttttgaaagagtttaaaggatatttttgccaacataaatttgtaaacatttatttttgtaatcggatctaataattgtttatgttattcaaaaaaaaaataatgttttagtggagaattttttcttttttctttggatatatagtggagaaagtactcaaatttagtaaagtaagaatttttttttatacaatctaaaaagactatacataaaatatatacaatcataacacattttactaatttaggtataaaattatagttttttttagcaatgtataaaatatacaaaatcatagttgaaattttggcaatccttgacttttataggccaaagcatctgacgtgttatccctttcacatgatgtgtgatttttaaaaataaaataattatgaaaggatttttttttttttttggaaggatttgaaaatcactttttttaaataataaaatcacattaaaataaacaaaattgctattttattttcaatgggaccgggattgtatttggaaaaacacaaaagaaagactaaaaatatgtgtatgaaaaccgtgggagaaaggactaaacgaatcattgctataatcctgatccccttgttggcacacacacagctcctacctagttcataaatcaaactcagattgagcgttttaatgaaacaaaacaaagagtgactcagattgaaacatgacaattgtgcggttaacatccttaacgattctctggtttatatctatactccttcttaacccttcactctccggcgtcgtccatgcacagttgcctgaaaaacacgtggccctcttcgtcttcggcgattcactatacgatcccggtaacaacaattacatcaacactactaatgactacagagccaacttctgtccttatgggaagactttttttcgttttcccaccggtagattctcggatggtcgtctaatacctgattttatcagtaagatttctacgaaactctgtatataccaatacatcactttatttagcagatggttttctaattaaaatctctgtttattactactttttaggtgaatgtgccaaacttcccttgattcgaccatatttagagcctggggtttccaactatgcacatggggtgaactttgcctctggtggggctggagctcttgttgagagtcatcatggttttgtaagtaatcttaatttatctgcccttcttaagcttgatcatcatgatcagttaattcgttttgaatcctctgtttgcgtacttcattaatgtttaggtggtagatcttcatactcaactaaagtactttaagaaagtgaagaagcggttgagtcaaacactaggccctgcaaaagccaagaaattgatctctgcagctgtttacatgtttagcgtgggtggcaacgattacattgaccgttttacggctaactccaccgttttcaacaagaagtataagaaagaatacgttggcatggtgttaggcaatgcaacccaaaatcttcaagtaatggatggataccatatatagccctttctttaaattcatgattgtatatctgaaaaagggttatggttaataagttaatgcatatatattttttgttttaatcaggaagtatacaaaagaggaggaaggaaatttgggtttgtaaatgttccaccattgggttgtcttccaggcctcaaaatgcttaaaccatataataaaagtggttgctatgatgaaattacatctctggctaaattacataatgcgctacttcctaaagtcctaaaaaagatacagagtgaactttatggtttcaactacacaatttatgatt

SEQ ID NO: 30616 - DNA, 2480 bp, Cannabis sativa
gttacattttctgtatctgttcgccttaaaaattatcttaaagttggttataataaaagataaaattattaaaaattaaacttagagtcatatttttactactttaaaaaatataaagtctattttatattttaataaaatagaaagtacaattaataatttttataaaatataggtccaaaataataataacaactcacaacttagaattcaacttataaattaaaataaaaaattatttatagtgttacataaaatgtttcaatctcacaactattgtttgtgagaagatccatccacatggattctattttatttttatttttttttctaaatgtcacttaaaagaaattaaaacatatttatataactatatatatttttgtgacaaaaatagtggtttcatgaatcataccacaactatatatagaaagccagctgttggaaggcattagatgaattaatgtatatgtgttcatttttgttttaagaaataaaggggaaataatttaattttttgatgattatccaaacatgaccattattttgagattattgcactaagcccatttaagagaaaagtggatccattgatttgcaggtatatagtattaaaagatgtagtgggatatttattgtccttatttgaaattttgatgatgatttaactatatttaatagggatttatttttggaataattacaccacatattaaaatatttaattttttttatttttatactgtaaggcggaattttttttaaaaaatactgtgtaagttttatacagtatactgtgttaagttttcactgttgttctactgttgttttttagttgttccactgttatttttagttgttctgttttgtgttctactggtgttttataaacacacaatatttttaaaaatattttcgtgtgacagtatttttgtaaaaattatcccaaatttcagtatttttgtaagtttcccaaaaaattagaccctaaatggtacttttaaaaattattaaaaaaatatgtatattttaaaatatattttttatttgggcctttaaaatagatggaccctaagcgcgggcctactctgccttaacttaggatcagccctagtatatatataagaatggagaagtttcaaaaattattttttttatatttatttacaactttacggtataaaatttttatttagaaaaatacgttggtaaagtttaaaaattataaaaaaaaaatacactttacttagtaaaaagtaagaataaccaaaatacaacgagaaatcaacatcacaacaagtataaatcaactataaataaactataaaataaccaaaaaataatatcatgacaactataatacaatcttaaataaattataaaataacaaacaaataacagtttattttttctactgaagatgtatttttgtaaataaaaaatttaaagcacaaaaaatgaaaattttctatgctactatatttttgtattttttttttaatttttgatctaatatgtaatttttttttcaaaaagaattaggtgaattaatttaattgatgacgattcatgaattggctgactataattaatttgttaataaaagttaattattacataattgacaaaatattcaatataatgttgtagtcagttacctaattaaattttcttattgtataaatattttgacaattaattatgataaaaattttgattgaatgtctcacctattgaaaataattttcaaggtcgctcatatatgcattcttccataacatcatttattttgtatatgttcaatttatataattattcttcatatatatagaattgttcatatatctataaagtaatttattctaacaccttattcatttgttctttaattaaaatttagaattagggattgcatatggtataaatagccttattttatttaattattattattattattattattttgtaaaactgttacaaaaatataagtaacagccttaatctaatggaatagaacaaccaagatttacagctcaatacaaaatacaagagctaaataatgattaaagaaatattacagcacttgtacataaagttataagtgaataagagaataaagtaaaagaagatatgaagagaactcaaagaaatattagaatacatttaaaggtatgacaataacataactagtttaagtgtaagatcatgaggaatgaggatcactgatttgaataagattcaagacttttctacaaaagccccccctattaatgagactcctaaatattttcaaaaatgtgattttttttttctatttacaaaaataccctaccccattttttttaaaaaaaaaaattaagcaaaaacctattttatatacaaaaattaggaaaatgacaaattttgtattgaacctcacccatctcaaagtcaagtcttattttgttaaatctctctcaagctcgaccacgtttggt

SEQ ID NO: 30617 - DNA, 2800 bp, Cannabis sativa
aaaaaaaactctaataatgataaaaaaaaatagtcccctaacatattttgttgtcattctttttatagaaaagactaatataatattgtctatttttagcaataaatttttcaaattacctacaatttaaattaagctcaattaaaaaaaatagacaaattttgattaaaattttatcgggaactattttttataattttaaaaaacaaatggtctttttatattttcttaaatcagagaatccaacgctgataacaacttctacaacattttcacccagatgatgagaataataagcacataagagaatgaaagagaaaaaaaaaatgcacttcttggacagagcattataatttttaaaatatacatacatgagaaagaattaaacagcatctgaaaattttaacaaaggtttagaagaactggccgaagttgtcgaagcagaggagctccctgtaacaacagtacttaatgaataagattcaagagaagctatattgaatgtaggcacagcatacattggcacaggcaattttggcggcagattaggcaaagcagcttcaaaattaagaacactcatcacttgctttatagagggccgacatgttggatcaggatggcagcaccacagcccaacaaccatcacgcactccatttccttttcattgtattccttactaacaattcccttatcaatggcctcgacaagttggtttctcccataaagctcccacacccactccaccagcattactttgccttctcttgcatttagtacaattggctttcttccacagcagatttcaagtgccaccaccccaaagctatagacatcagactctttgctagccttgctggtagtaaaacactcaggagctaggtaacctcttgttccagcaactattgttgtgtctaagcccatttcatggtcaactagccttgctagcccaaagtctcctaatttagcattgaagtttgaatccaacatgatgttgctagatttgatatctctatgcaccacacactgttcccattcttcatgaagatacaagagagatgaggccaaaccaagaactattttatgccttgttgcccatggtagcatgggtttttccccgaataggtgtgtatcaaggcttccattaggtaaatattcataaacaacaaggagctcgtctcgtttgtggcaccaaccaataagttgaaccaaattcctatgtcttaaacgacttataatttttacctcagaaatatactctttcttgccctgccttgaacccttagaaaccttcttaactgcgacttcagtgttggattcgcttaacatgcctttgtagacacctccaaagcctccctctccaagtttcccatcttcagaaaagttgtttgttgcttggcttagctctcgataggtaaaccttttggggccagactctctttctaattccccatcaatggaaacgtcataatcttcctcctctgcttcttcgtcaactgatctatttctcctaaacatgaaccacaccaaacctactccacaacatagaatactcaaacccacacccaaaccaatccttaatgctttttggccttttccacccctcttggtggatcccaaggttggatttggagagctcgggagaggagagttggtattattattggcaataacgaggtccaaggttgagttaaatgaccaagagaaaacttgatgtaattgaaatcgggtacctgtagctgctgagaaacccactcttacatgttcccctaagaacctcaaatctactacatatgaaaggctagtgttttcaccacttactgtagcattacccgcgtagctgagaaacacagtaagattttgagaagtagagttataacttaccctagcatttgcctttctgcttccatctttcatatcagtttccacagcggcatatgtttttgagatcagtgaattgacatttatgccaacatgattaataggactaggatcccaatcatttttgaaagtatcaaattctacggccacaaaagggctagcaatactagaatcgttccaaaattcttggcttgtcaatccgaggcatccgccttgtgatcggtctgggattttagattcaaaaggggcgatgaagaacgccaagccatctccggtctccctttcgccgagtccattgatggaaaatgtgaaattagtagtgaaatctgtaacaagttttgttttgggatcccaaagctgaaccggcttgttgtacgaccctcgaccatagctgtcgataagagtagcatcaactctattcgttgtgagttctagagtctcgtagtttgaaatgcttgcgttcttctccacttcaatttcacttttgttttgagggaagctgaaggaaactgaagaggttttctcgagtaggaataagaagaagataacaatggttaacttgaggagaccagtaaaattatatgaccttatgatgtactccattgttactaattcctgttgatgatcaatacagttatagagctggaagagtatagttatttaatgaagagggtagttgtatatcaagggatctctttgtcttagtcttagtttttctttgtttgataaattcttcgtcaacagctgaattggtctgtttgaaactttaattggattatatatgaatagacgaagagtcgagtatgctatatgatcatttgagagaaaaatagtggtataagagagactgctattatatgtgtttaaaaaattctccaaatttgtgtaaccaatttctagagacttagcattgttattagt

SEQ ID NO: 30618 - DNA, 4973 bp, Cannabis sativa
agggcataaaatccaacacaatcaatgctaactcaaccacttttttgtataatgtatcgtgatcggtggtaattttcaagtcccgaatgatactggcattcagtccccttacatatttttgtttccgagtgaagtccattggtactagatcgccagggaacttggataaacgatcaaattccaatatatactcgtccactgtcctcttcccttgagtcaattttacaaaattttccatgtgcaaagttttgatggtaatattataaaatttttcctcaaacagactcttgaattcatcctaagacatggcactaacatctcgagtttgtctcacaatatcccaccagacgcagacatgctcttgaaacatgaatgctacacaatcgactcattccgttcccgttactcccatgttatccagaatgtgggtaataattctcatccactgttctgctttaataatgtcagtacctcccaaaaattttagaggttgcagcttgacaaaacgctcaaaaattgagacttggtgcagcagtacaaatccagggttacccacgactggcacaggagctggtggtaacacttgttcaactggagctgcctaggccggttacctaaacaagcgtaactcatcttcctgacaaagtataatgcttcgcatttcgaggaacatttgctgccagtcggcatgtggattagcattattaaccccgcgttatctctcaaattttttggaggcataggcggtgctgatggattggtttggtcattaccagggtttacaagctcgccctatggtctagttgattgattagggtccattttctctcaaatagccctgaaatcaacaacctcggtgagtcaggaactaaaacaactctcacacacttattgccttaactctaactcatacatactatttctcttttaaaataaacatttatcaatttaattactactcatgatttcatataacattttattttctagatgctcatatgctgcttataatggaaagcggtaaacatttaatcataaaagtagttaagcatttactctcaatacttactggaccacgagtcgagcttgtcgttgacgatgattgtacatgttcagcggtctataagaagtttaaaaactttagcgctctgataccaaattataacgctctaacaataggaacgtcacgcgcactacgactaaatataaactaatcccgctaaaccggaatctactcaagctaagagcaaaaattaaacttttaaaatacagaataaaaataataacttgtagttaataaactttacaaaaacatccaaaagtatacatcttaatgcgggatcctataaaactttttcaacatattacaagttattagtacacgccgacctaagcagtaaaagtggagattacaacattttccccctagtagacccaactctcgtggtctagcttagcctgaacatgtacaatacgctgcaaaagtcctcaatctcatggccgatcagcaactgacttaccatttcatgcacaatagagcacccgtgagccaaggctcagcaagacagtataaataacagtacaaatatcaattaaaatcacttaagtattagtgccactgcacctattgtctatttgacatagacctacgtgttacgctcatgtgtcttgttacaataaggccttagattggtttatctcaattttgattaccaagtctaacctaattatgcctttagcgcataattctttatttcaatatatacaacacattattacattcttaatcacttaaattctagagtaataaccttaggtcacaaaaccgctaaatttagggtaataaccctaatctcggtttctcacataacataaatgagcgccactgcgctaaactctatgtgctagtttactgtcttacctagtaatccaagtatgtgtagattctaaatttccgagtattcctgagtaagcgccggtaatcctagtcacatattcttggaatttcacaaatagagttaattccaaattcatttttacacatatacataatttgaattccatttataaatcaacatatatagcccaaaacaagctttccaactatactaagaacgtccaaaatggagttccaagtcaaaaattatggcaaaaacgagagaaatgaaaaccccaggaaacatgagcttcgttgcggcgaccaaggccctcgccttcaacctgctggagcctcgccaaggggagccatgccgtggtcgcagcgatgagccttgaaacccaaaatttctaatttttcaaagcttcaaaaatcaaccaatttcataccaagactcaagcaaaatcattcctaacctcaagttctattccacaccattcttatccaacattaacaagaatttaagcctaaaacaaagctcaagatcaaagccaaaacatacccaaagcatggtgcacaacaacataattgcacataatctcacaagctttgaaactcaaacattcaaagcaaagtcccagaaattcaagtgttctacccagaatttaaacaccaaattttcataccacaatcatctaaaacaatctaaaagcattaattacaaacctaatagcactagtacacaatatcactaaaatctccttaaatctcagcaacatgcatccacaaacaaagaacatcaagaacatccagaaacacaattaagaagctttgaatatcagaaattaaagtaagaaaaagatattaaactagctaccttataatctctaagttcccaagcaagataatccacaccaatttcaagctttttccttccaaaaatattttgaaacacaaaaatggagagggtgagagagaggcggtttgggagaagaaaaacctagaaaataattttcaatttgataaaaatctgatttttttgaataataacttatttggccaaatgaccaaaatgcccctaaggcacacatattaccatatacacataaaaaaggcaatcttgtcattaccactcacacacataaatcacataaactaaatttattcatttaacacataaattcataattaaattctaaaaatatattttcggtcccaaactcggttcggcctaaaatacccggttgtgactataccgtgctgacttgttagaaattacctacaaaaagacaaaataaacataccatataataatatagtccataagcacaatatactataaaattatgattttacccttctcgggtcaaaattacgaaaaatacccctgacacactaatgtgggtcttaaaatgcaataaatcataataattttacatattaaatcatataacaatatagtttctcattaattcttaattaatctagttagggttgctatttcggttattaaaccttaggttattacatatataataaagcttaaaataagttgatctaaaatttacccctataaatttcctaatttatgaattcctcatgactccactataaactcagaattgcactcttgattacatagaactctctatatctccaatatagtcacgctatgtattatccattgttacaatcaaaataattattgatcctcaatagatgatctacatagagtagagacaaacttagtattttaccctttaatgtattttatgctttaaacacttagctacttgtaaaagatgtttttgtaaactagtataattactaaaattagtcctccaccatttattcttgttaagccaaattcaaaggagattattgtttcacttctaaataattatagaagctatagatgtccatatctatgattaacactcacactcaattgaactactgagcacccactatgtaagcatgagctagtctaacgggtaagctagtaatgaacaaatcaaataattgtaatcttatttaactatcaataaaagactagagattatttttttactattatctattgcttggttcacaagtttatttcatgattatttgtttaatatataaattttgataaattttgaacatataattattcacaattatagtgttgtcaccatagtgaaaaataattgtgattatatgcttcaaactatttaagtcccatgatttatcaatgcactgaatttatactgatatgataattaacaatatggtttacttacacttatctaagtgaaatttcttttctaaggcattagacaagtaaacaaggatcggatgaatagattttacatcggactggaccgatattgatagtagaaaatgatatcataaacttactgttatatcttttttagttcaatatcgcttagttgatcataaattaattgatctcaataatgagattattatactttaagctaattgtataattaggttgtggttttatttagggcataaaacctaatagtgtgtatttcaataaagatatatagttgctcttatatgttaatgatatttttcttgttggcaagagtatcaaagtaacaaactcaaagtgcagttgaatgtgattttatatgaaagatcttggaaaagccaagagaatacttggtattgaaatcgagaggccagaacctagaatcacaatgctgcatcaagagaaataccttgaaaaggtacttgaaaaattaaaaatggacaaggctaaaattgtgtcaactcctctagcaccccatttcaaactgtcttaggatcaatgtcccaaatccgagaaagaaaagaaagaaatggacaaagtaccttacactaatataggtgacagtttaatgtatgtcatggtttgcactcgaccagatttgacacatgcttttgggtgttgttagtaagtatatggctaatccaggtgaagttcattggaaagccttgaaatggatactgagatatgttcaaggaacaataaaactagccttatttttggaagaaagtcagatcaaccaacagaggtttatggatattgttgggttttatgccc

SEQ ID NO: 30619 - DNA, 2036 bp, Cannabis sativa
catgttggtaacctgctattacaggtcaacaaaaatgtcaccattatggttacaataaaaatgtaaccattgagtagtcacccattattagtaacaacaatatataaataaaaaaaacttaataaattgatatatatgtataaaggccgatttcagtattttcggttagtttaaccgttagcggtttttttggttttcagttccgtcaatttcggttctgacggtgttcggaaggtcggtttgaacagtttttttaattttctagattttatgctcagccctaatttaaatgggttgtttgtgcattttcctgagcttgcgatattggcggtaaagggtaatatggatgctgggaagataaaatctcaacaaatcgtcgagtttgtgattactgtggtaaattcagagattgttgttgttgtgaaaaatttaaagattgttgttgttgtgaaaaattcggtgattgttgctaaaactgaccaggacaatatatagattttgtgtactaaaaaatttacccggagaaggttgctgcattgaacccccaaacatcatcggctgctgagatatgaactcccaaattgaccaaacatcagcttttgtgactgtgatcttccaaagaaattagagtaataaaattgaggagactgggaggagcgtccaaacatgttcgaaataagaggagattgggaggaacttcctagcatgttaggagagaactgttgagtttgctgaaacgattgttgttgtggccttggacaagatgcactaccttgaggttgtgttggtaaatattgttggaggaaactctcaaatcgcgggtcatacaaattagaagtgtcgtgtcctggtggaacgtgttcacgcaatatcttaaacatctcagccataataccaacatcttggaaaagagtaaaccatgcttgagattgagtttgactttgacttgaagagccaaatgttggttttttccccttttttcctaagttgtaaccaactcctcgaatatagtcactcctctctccaaaatccttgcccataaccttatgctggatgttagacgacagctttgaggatccaaaatcactgcctaattggctttgaagtctgcttctagccatctcttcctccatttcatgggtcaattcgtcctaaccaaaaaaaaaattaaaattcaacaatgtgataattttaatgaaaggataaaacattagggtaactcacccatttttctttagcagcatcattgacccaagctttgtccttttttctagtatggctatctttccatgtttggaagacatatttatctggctccttttgtattgctattagtgttagattttttaaaagttataattttattaaaagaattaataattcacttacaaattcatgacgctgagctgccattgattttgtgccttgagttgaggtgtacttcatttgtaaactgtttttcttattttgattggaacactctataaattttgggctcaaaatcatatcaataatctctttccaatgctctcttgttacatactcaggcttagcattgatagccacctccataatagtagggttaccttcgtaatatttttgaaactaagtatgaggcaacggcgatggctagaactggtcaaagattatgagtgcgagattctctaccatcctagtaaagcaaatgaggtagcagatgctttaagtcgaaaaggactagggcaagtctatgaactaaagaagattttaacataattggctgaggatatgactagagcaggaattaaatttgtgattgggaaacttgccaatattaccttgtagtctgatttgttggaaagaattagggtggctcaacaaagtgatcctgagttacaggggcataaggagaagttagaggtcaggtcagcaaaagacttttcattttcatctgatgggttattacgatacaaaaacagaatttgtgtaccaactgataaagatattagacaggagattcttgatgaatctcatactacaccgtactccttacaccc

SEQ ID NO: 30620 - DNA, 1486 bp, Cannabis sativa
tttttttaatttaatattttcttctattttattattttgttgcttctattataaaataaatggctggcttctacatgcatatctacatgcaataatcacttttgattatatatattttcttattttattatttgattcattaataattataatataataaaagttccataatgactattaaaatatttcaaaatcattattcattagtccttcaataaattaaaaaaaataaacaaataatcagcattcatcattagtttatttgatacttttttttgttcttatattataaacttgtatgattgatcgattttcttctttttttttttttttatttctttctattaatgacttgagcatatatatgatcttttttttatgatcatcaaggtactttcatattcacacaaaaaaaagtgtatgatattatcaagttatttaaagaataatgataataacaagaaaaaaaaaacctttttattttattattttttttttttttgctctctctctctaaaattgtatccaacaatgtagatttttcttttcaacaaaatatggaatttttttcaactatttattgtgagctatatatatgtatatatatatttttggatggaactaattaaagttattgtgaactaatttctaaatgtggtgtttcaagtaaattcgaacaaatatcaagtagcatagaatgaaagtctacctttgaaaaaaaatattaatttataaaataatgttgagaatattttgtagaacattctgtataatgtgcaacactaatctagagttattgagccgttattttctttttaattcaactattactatttcataaatacatttttgagttacacaagattcaactacagaattcttatataggcaccctaataatcttttattgccacttgagctagcgtgaagtggtgagtgttgaaatactttgaattgaatttaaccttaactaatttatgagaatcaaataataaaattaaaaattaacagaagtgtatcggaatccattgaattaaaaaagtatgatcttttaattttacatcaaaaatttctctggaaccttatattgtcctgatgatggtgattcaagagtatgaaatgatatgatacgatgtaaaatggggaccaatacttatttattaatgactgtaaaaataataattaatcttttttgacaatttctaatttggcacttcatcaaatcaaaaaattatcttaatggtatttacatattaaaatcatgataattatgcccttaagttataaattttattctaaattagactacacatatttcactcatttatatgatgatccaacacatattttatatgtacaattataatcccaaataattatgccgtttatgttctcactagtcaagatatattatagggtaaatactattttggaccatgtattttgcaaaagttaccgattaaatcctctgttttgttaaatgaca

SEQ ID NO: 30621 - DNA, 2634 bp, Cannabis sativa
ttaaaatcaaaactaaaagtttccttatcgatagataacatggcaataccctaaatatcataaaaacatgaaaatctagggtaccctaaactgccccaatcgggtagacactacaagagaaaaaacaagtctgttggcacgataaaaattatgccttaaagctccatttttcgtgccaatctacttttagacacgacatgtcatccccattctgtgttgcctaaaagttatctagtggcacgacatttaaatgtcgggccaaatagtaaatttattttaaaaaaaataataatatattattaatataaacaaatttataatatatatattatattaggattaaacttttatttagtaatataacttaaaaattatttatatgaatctgaataattaatataaaaaaatatatttgttcaagaacaaatattattagtgcatacacattatacatatttatatagaaatatctcttaaaaagatgaaaaatattattacaaaataggaaaaaagagtatttgaaaatactttgaaccactgatacaaatagtaaccacgtcgaagcccttgaacaaccgtccgaccaatgtgttgcctcatccaaaacccatgcgccaccaatcggaaacaccttgaaccaccaatccacccctgctatacgctttgtcgtacacccagcgccattgagcatttcttgtcaccattgggcctcctcttcaaaaatccatgaaccaccaatctgaaacaccttgaaccacccgtccaccactgttatacgctttgtcgtacacagcgccaccgagaatttcttgtcgaattgagctgctctacaactacggggtgtgctagatctgcttaaaccggtcgcttgagagagattatgccaagatgagtgtatgagagacatggagataaaaaaaaatagaacaacagtggagagagatgagttgaaccagataaaaaaaaaagaggaagaaggtaaatagtagtggaggcggctagggttttgtttgtgggttgtaagtttgagataatgttgcttttatatatgtgaatatataagaaaaacaaaaaactaataaatgataaatataataaaagtaataatagttttattgagaagttggagtgaaaattaggagtcttgtccaaatattttaatataatataactataattttttaagcaatataactatgttattttaaaaataataaatttagaaaagtaaaaataaagagaaaatttgagagaagtgagacttgggacccgtgttgttatattagtgtgtagattgtgttaagaagttgggcaccacctattgtggtgccaaattagtggtgccaaatttaatcgtgccttttaacctttattcttgtagtgagaccggatcccaactagaaaatcgttttctaaacatgctgcaagggggaaccagtagactggtttagtgcacgaaaccctaaaaactccaccacatgctcaaaactacccaaaataatgcaaaactctttagagtacctaaatataccataacaaacttaaatcatgcaataaaccccagcaataacctcagaaactaaaaccaccatcgatcgaagagcaaaaatttaagctcttaagctcaaactttgtctaaacacaccaaagacaacaaaccaaacttaattcagctcaaataacatcaaaataacttctaaaaatcataaccaaactcgaactaaacctacaacaacccaactcaaaaatcttccatgaaaacctaactttcaagcttaaattcaaagagacaaagaggggaaatcttacctcacaaattactaaagttacagctgctaaatttctctacaattggtctaaaatggagatggaaactgttggattcctttagttcttagtggccgactctatggagagagagaaagacaatatctattctttgatttcattttaatttttttaagtaaatccttaatctaattcagcataacccaaattcactgaagacaaactaggtattaccattaacatcccaaataatatcacaataaaaagctaacatgaaatgacctaaataccgttttcttcactaaaagaaatcttaaaacctaggagtattatggtgcaaaaccaaaaccccgaacactcctgatattttaaatatctaactaaatcaccccactatttctaagatactaaaccaattctaagtgactctataggccaaacatcgcattccactgttaccgagcataaaacatgaaattcataaaactttacatatacataattattaatgcacctagcatccaaatatatttccgtaattgagaaaatattttcttaaggcctatttctgccaataagtcttaatttctactaagagacacaaaatcacataataataattaaatctcttaattatctactaattaatttttatgatttaactatgcggttattacactaaaattcttgtctattttagaatttatggagttttttttttttgttttcaaaactcaatttatgtagtactaactgataatttttttttttttaataaaaagtccaatttcaattttttgtccaacacctttggaccagccccatatatataaataatatatatat

SEQ ID NO: 30622 - DNA, 1285 bp, Cannabis sativa
acgtcaacttaagtagcagcagacctggaacaataggggagtgagtcaaagttaaggtcctaataaggggggaaaccaaaacagaggcatatcaaattcaaatataagaacatctgatgaatccaatggctattataactgtagaaaacttggacactttgaaagggagtgttatttcttcaaaagaaataaaagatacaagcatcatagacatgaagactctaaaaactcaaacctaacccttctaaatctaaacaagatttacatgatgcaaatttaagtaatggaaatgaaagtggagaggtttacatagcagggtcatctttatagctgacatggtattagattcaagatgtacatttcacattactaacaataaaagttatatgtttaatgatagggatcaaagggtggaagactgattcttgggaataaattgacatgtgacatcaaaggctcaggatccattaaatttaagatgtataatggcctgattaaaaccttgacagaagtgaggtatatgcctaacctatctagaaatttaatttccctaagtgttctagatgagttaggtgtctagattaagacaaagataggaaaatgaagctttgttaaggagctctaactatcatgaaagggcacaagaatggaggtctctaccacctaaaaggaattccagttgcaccctgcaacatcacaacatagtgaaatagaagagcaaaatgcaacactttggcacgggaggttaggccatatcaatgagaaagactttcaactcatgagtgagcaaaaactgttgggtaaggataaggtcaataaacttaaattttgtgaatattgtgctccaccatattgaaattcaatactgccactcacaacacaaaaagaattcttgaatatgttcactcagattttggggtcctaagaaaataagcactcatggtggatatgtttattttctatctgttgttgatgatattttaaaaatagtttagatttttttaaatagaaaaatgcggttttttataaattcaaacattgaaaaaacttagttaaaaatataactaataaagaaaccaaaaacattaaaaacagacaattgattagaattttgtaatgataaatttaataattattacaaagagaatggcatacatagacacatgacaatgaggattacaccccaacaaaatggggtggcaaaaagaactcaacaaagtgagatgcttgatgttacaactaggattgttacaaaggtttctagggagaagttgccttgatagct

SEQ ID NO: 30623 - DNA, 2561 bp, Cannabis sativa
  modified_base (766)..(768): a, c, t, g, unknown or other
  modified_base (1557)..(1566): a, c, t, g, unknown or other
  modified_base (1831)..(1835): a, c, t, g, unknown or other
acaacaacaaaaatgctagaaaaataacatttatcttatatattattatctcagtttattttttatttttaaatatatttgctaccgaaatcgttttgaggcaaaaatataagttctaaaaatattgaaacgtaaaagagataggtaaaactgattctcaaaatcatgtgagggtaggccctatgtcttcagttattacataataataataaccgaagacataaagcatttatatcttcgattattttgtaataaccgaagacgtgaggcttgttttttttttaaaaaaaaaaaaaaaattgtatttatttaattaattctaaattatatattgtaaagcgccaactaagagatttgttttgggaaggaaaaatattgacaaagtaactcataaaatggtataaagcttataattacttttttaatgtgtttttctaaactcttaagtatggagcttattggacacccccttgacctgctgcatcattttattatcattatccttttgtggttgaatctattacatgttttttttttttttatagatcctatatattacatgtttaattgcactacttttgtagaaattagggggtgacaaaatagattttgacacggcttacgaacacgatataaattttacgcgttagggttagaaaaattagacatagatcgaaaacagatggacaagacttaacacgaaataaaaatggatcacgacccgcttaacacaaatttgatacaatttttttaaataaaataaaannnaaaattattaataataatataactatgtaaaattatatatttagtgatttaattgttgagttaaaaaattttaaatttaatttttttaaaagaaaattgaaaatatttttaaatttttatttttttattatacataaaagaaaactatatatacataaatgtatataagtttttaataaaatcttaaatttatcattttctctataactctagcttcagtaatagaaaaacatgtaaaaatggatcaacataagcacgacataattttgtacagatccgattagaattgagaaaattaaacacgaatcaatacgcctgacacgaaataaaaaaataagtcaaataaaatataatacgaatatgacacggtgacatgttttaccatcctagttgaaataaatcaatcatattctcaattaacagtattatattttaatcaatgacaacttgaaaaacgacattagaaaagaatgaaatattaggtttttaagtggctaatttgaatgggcatgctcatataaatttgtgttatggtagctttgctctcacatttaaaaccaaatttgatttcaataattaataaaggctggtactacttgcccaatatgttacacagttaggaccaaacctgtttagttttttaaagcatgtttggataaatggagtgatctactcatgatccttttataactaacccaagggcccatgactaactacactattaaattagaggacctacctacggtacggtagtgtttaagtttggggattatttcacaaatacacaannnnnnnnnnaaattacaaaaatatagtttcacagaattttaaatatttttgcgattttttttattttatttacaaaaaatataattttttaatgttgtactattgttaatttgttgttgattttttgttatatgtatgttcttttttattgttgttttgatattatttagatgatattttcatgtaatttttatataattttcttgttgttttcgtgtttttatggaaaatcgtaaaaatataaaaaaaaaatatttaaacgtaaaaatgtaannnnnttttacaaaaaatagtgtcttatgtaattattccttatgtttgtgtgtgtcgtgttgatctagtccatatttatccaaatttttagaaattgggtcgtgtcgtgctgtgccacaaaaaaaaatggatcgtacagtattgtgccaacatttttaaatggtaggcccaatattttcgtgtcatggtcaaattcgtgctatgctttgcttgtgtcggtccatatttcttaaataggtcagcccgtttttatatattggcttaaatcatggtttactttttcatatattttctttttttacaattacaaaattatatgtatattttataggaaaattatagtaaatgacctcatatcttagtactatgtaagtaaatattcttattttaaaacttgtagagaaatgacccttttacactatttattatttatgttatcttttgctacatgaataataataataataatttttcatattttattttagaattagaagcaaattacttaaagatcatgatatatatactagtgttatactcattttttgcaaaaataaaataaaatggctactcttgcacaaggtccacatgccaagagtaccttgaggacactcaagtcaaccctgagactttgaccaagccttataaatatcaaataagttaagacatcctacttgagggctccatggcacctctaggagactcgaaaacattgaccaaccatttagtgt

SEQ ID NO: 30624 - DNA, 3982 bp, Cannabis sativa
ttttttttttaaatggtgaaataaataaaaaggtagggaaacaccgtactaaattttgtttgaatgctagttaatttttgttggtagtctataaacaattgacagctgttgtttgtagacagtactttgtctgtcccaatctcttccacttcacatcatatcatagttgtaatgaaatgttatggtggtggtcttactgtaggaccccaccccaccccatgctcctccctctctctctctctctctctctcaaccccacaaactaactaggcctctctctctctattatggccccatcatttcactaccaccctcattttattttgtcctttactctcacaccattcttcatcttctctctttttagggtatatttggttttatgggaaaaaaagaataaaatgtttaatttgattctaagtatatgtttgattatgattttaagtattcggaaaattctttagtttaaacctaaaatggtatgtgtatgttttgtattttttcatgtgacaatatttattgtaattgtttaaaatatttgaatgttttttaataaattttaaattatttaagatgttgaaattgaagctcgaacactttgatggatgtatgtaaaaaaaatctttatatattaaaagtggttatttaatgacaagtctttagctggttacattcaagtaccactaagatgtatcagggcttgaaactcttctatttgtggcttggtatgaaaaaaaatatatatatatatatagtggaatatgtatccaagtgtttgatttgtcaacaaataaaagttagaacattagagacctacgaatttactacagcctttaacatttcttgagtggaaatgggaagacattactatggattttgtagtttgatttcctagaaacataggcttgtatgacttgttttgggtattatagatcgattcactaagtcagcacactttttgacagcgaagacaacatatacagtggatcagttacataattgtatgtaatggtgatagttcgtctccatagagctctgaaatccattgtattagacagagatctaaaatttacttccaagttctaggagagtctccaaaaatctatgggcacgaaactgaaaattaatacagtttttcattcttagactaatggccagtccgagagaacaatacaaatactggaggatatgtttcgagtctgttatggactttgtgggtacatagagcaagtatttgccattgataaaattctcctacaataatagttatcagactataataaggatggctccctatgaaatgttgtatggaaaaaagtgtcattctctgatttattgggataagattggagaaaggaataatatctaggtctagaggcagtacagaggatcaatgatgctatcgagaagatcagggctcgaatacttgtttcttagagtaggtatataagagctatgcaaatccaaatcacataaatataaaattttaggtaagagattatgttttcttataggtttcacctatatgaagggtgtaaaacgcttcagcaaaaaggacaagttcagccctaggtttacgggaccattcgagatactaaaaagggttatataggtagcctaccgattagctttaccttcagcattgtttatggttcataatgtctttcacgagtcaatgctgagaaaatatgtataagattaaactcatgttctgagttatgaaaccttggaactgcaactagatttatcctataaggaacaaccaattcagattctcaacaggaatgataaagttctaagaaataaatatcattggttaatgttttatggaggaacaacaaggtggaagaagccacatgaaaactagagttcgacatgaggacgtaatatctagagatgttcaagttagatttgggagacgaaatcctttatcgtagaaataatttcaatgactatatgattagacatgaaaaattaataattaattaatagttatagtaaataaaattaaactgtaattaaatgtgatattatgtataaagactatgttcatatattattattgataatatttattaattattaatctaatatatttattataaaaatatttgtgataatactcttgatataatgaatttattaaaatttaatatataattttataaataaaatatgtaggtttattattttatatatatatgtatatttattctttatttttaccatgtacaatttgtatataaaattataaatatatttggcatagttaataaaatgtataaactatacataagtttctatgtgcctacaatgtaactaattaaaataaaaatatatagaattataagtttttatgtgcctacacacgactcacacaatattctataaaatctctataattgtgtaataatattgtatttttctgtattgtaataataggcctattatttctaaatgcacatattaatccataatttattgtagtattaattgattgttaattttctatgtctaattatatatacagttaatataattttttattgggggcttatttttacactttaaaacaatttttttttgtatttttacgaaattctatatagaaactcatattgcaactagcgctgcaacctaaattgtaacaaaaaatcgtatagaaacccttactgcaactaacgctgcaaccactttagaaacccaaaccgaaatttgaaaaaaaaagttaaaaaaataatatatggggtaattctccttcttattattattagacgattttcaataaaagatataaaaattatagtatatttgacacaaaaaataaatttgtatgtaagctcactatttataattatattccgatgcaaaagatataaaataagtaaaaaataatttattatgttgataattttttaatattttattgagaatatataaaaagtttatgtatattttattgtttaaataataataatgttgtaaataaagaaaatacattttttttaaagtcaattgattataataattagtgacattatagtaaataaaaaaaaatagcttttattgtggatcaaatttgacacaaagttatttcttctactaaatttggcacatgctcaaattttaacacaacttttagcatgtgtcaaatttagtacaatttttaaaaaattcattggagtagtaattttccttaaatgtattaaaatataatagtacaccactttttagcattctattaaagatgatcttagagcactcacaacaacctcttttaaagttgtacatttgggctgggctttttgatacgacatggaaccagcatgagcacgggtgacacgagtacagcacgacatgaaagaatatggatttgggcccatcacaacatgaataaatatgggcccatgctcgacacaaataatatggacttaagcactacacgacacgaaaagtacgaaggaagacacgaaaacatgaatttcttagcacaaaagcacgacataaaatacaaatttaaatccataaaataattttttatttagtaattcttctactctttcatataaaagtattttatttaaatgtattttcatttagtaattcatccactctttcatataaaaatatgacacgaacataatttttttttcctgaaagaaattatgttaaatattatgtacaactttatgtggaaatttagtaatggaccacaagtatggtgatataaatttgattattaaacatgtaattatagttttttttttatttatttttttttttgaagctaattttaattgaaacagtctatttgtgctttaaaatatagaaactaatttgaaaagtaaaaaaaattggcaatttttcataggccgtttaggcccatttgataaatataggtcaataatttcataaaaaattggctggtctatttaggcccggcacaagtccgacccaacacaaataatttgtgcttatgggc

SEQ ID NO: 30625 - DNA, 1684 bp, Cannabis sativa
atttttttaatgtagtatgtatataatttttatttggcatgctacatatatttaattattatatattttattggcatataatttttatatattttaacaaaaaaaaaattattatttttatatattttaattgtataatatattatttattttaaatagagttattttctacataaccccaatactttcacttggctagcaatcaaccctcaaaattaatttttcggggaaaaatcttcaaaactcatgttctgttaacaatttgtcattttcatttattttgacctattaactgtcacgttgaattgtccaagtgtacatagaatatacgtggcacaattttattagtccacataaataattatttaaaaatataaaaataaaaataaaatctttacaaatcattttaatcaaaaaagtgaaaaaaaataaattcaaaaatttcaaattaaaaaatctttttatttctttctttactttacctcacttttatttttttttttttttttttttctctagaagcttcatctctttctttcatcatctctttcctcttcatctaactcaacaccaccacgccctactcttttccttgactctttctttttcttttcttcttccatgttctttttcacaaagagatcttcagaatttgagtttcaggttccaggtttggtagattaagaagggattttgtaatgttcgttgcttggaccggaaacggacaataatggctttaattttggtaaagataatgaaaagatcgctattcatgctcatcctttctcctccggtttgaagcccagatttgagatctcactctcatctctggtaccccactcttgcctcccctcatcacaattccaaaacccccaaagcactatcgacgatggcctccggtgttggcagagaacacctagaaatctctcacctttaggatctctcggtttctctctttccatgtggatataaaaaaaattattttaaatttgatatagatttgtttatttttgtggattttagatttgagatgtaggtttgtttttaatcatggaaggtgcgggtttgtttagttgtgtttggatctgagattttaatttttgtttgagtcgtggtggaggtggcagtagaatggatcaaagcataggttgaggtggtgctgggcaatgttggtttaggtggtgaatctagaaaagaagaatgaagaagcagattataaaaaactctgaaaaaaaaaattgtgacagtaaaatgttaaggacactataaatctgaatttagccctaattaattcatgagaatcaaacaataatttagagggtagcggaagcgtaccggagtccaatagaatcgatctttgaatggtatgatcttccaattttgcagtgaaatctttctttataacctttgtctcttgatgatggggtttcaagagaatgaaaagatacgatactacaaattggggaccagctcagtgaactcctttgttttagtgctacggactgcctcattgcagtgacgtcccgagtgagagacaccattttctgccacatgagggcatccttttggaattgaaacgtggcacaggtcacccggtcattgtcggtgacaccaatataattccgaatcctttcaactaatctcaaccattattccaccttcatgacatcgggatctcccaaaa

SEQ ID NO: 30626 - DNA, 2207 bp, Cannabis sativa
ttgtaaggtagctagctagtttttgaactttgatcatataccaataataaaaatgcaatatcacatgtgtaacaggcctatttctccagtagaattgcgaaagcttgggagatgtccattgacaccagaagaagcagctcttgttctagccggtattggctttaagcgtggaacttatatttatctggctgggtctcaaatatatggtggtgaacccaagatgaatcccttcactagcctttatcctaatcttgtcacaaaggaaactcttctcactcctagtgaacttgcaccttttcaaaatttttcttctcaggtaaattattcttcactcctagagcatctttaatgaataaatatattgtatatgtattttattagtcatattcataaaattaaattttaattgtggtgtataatactgtggtctaaatttaacacatattaaaaattatgtcaaatttaaaacaaaatatagcctgaccaaatttgacaccacaataaatatcattttttacgtactagattggccctcattaatataattaataatattttatactttagttttatatacttttaacaaaaatttaatgtttttcatttaattttttcaactttgtatttaaatattttttttttacttctagtgtattgaaatacactcgtaaaatttaaaccaaatataacattaacttatttttttagcagattttaacacaaaatttgcacaatctaataaaaatcgtcttatgatatcataatcattggcgttaactaatattttaatgaattagtggcttatgtaagtacagtattaggaataaattagttttattattaataattgttgcatgtgtaattaatattaacagtaatattaatatggtatctataataatttatagtaaaagttatattgttgtatgtaaaaaaatgtgcaattttagtgtttatattactcttattattaagttgttatttgtacataatttttacttgagttgtatttattccccaaccaatatttttgtgaacatatgacataaaggactcaagggtaggtcacttaggcttaaggctatgattagtaggaagaaggaagcctaaaattaattgagagtcaatgaagaatggagaatataagagaaggagaggagagtaataattcttttatgttatttgataggaagggtggagtgattgtagaatagataattactataatttttaaaattactattttatccttataattatttttaataatatttgttgagggtatttttataatttacaataattgaagaaagataattccaatgcttctattattagagggattctaaattggggattggagtggatttactatactctcaccccttatttctccccttaaatctcttataaaacaaaagatttgttatctcctcccacctcttatttccacctcttcacttctccctcctactaaacattatgtaagccttcttttaactattgcctttcttttcaattatgacccccttacaattattgtttcctattttaatatttaatatcacttattcttatcaaatatattaaaaaaattaaaaaaaacaaattatataaaataattttaattaagtaaaagtgaaaatttatgccattaagaaaattactttaagtagataatttacttattaattacaattattcttggtttatactatatagatttattttattcaaattatttatttttaattcaagtctaaaatgataataaaaatagattttatgttatttatataagcttgtttacttgttttttcattatttttaaaatacacaaaaacaacaaaaaaattataaaattacagttgttcggaattttaaacaattttatattttaaacaaattacagaaaatacggtcttttgatgtatttttatgttctacttttgttaatttattgttgattttttgttgctactttgatgttgtttagatgttattatcctgatactttcatgtatttttcttgttgtttccatattatttttatataatattgtgaaaatgtaaaaaaaaaaatctttgaatgtaaaaaagaatttttttacaataaattatgctttatgtaattatccattttttatgcaacatattcacttttgtaataataagaaaaatacacaattacatttatgctcaaaact

SEQ ID NO: 30627 - DNA, 2799 bp, Cannabis sativa
  modified_base (2258)..(2259): a, c, t, g, unknown or other
accgaccggtcggttataaaattgtaaaaaccgaccataaccgaccaattttcacccctaggtggaggagcggtatgcatattaagagttgtgaccaaggcaagtggaggaacaagagacttgttaaaacatgtgtcaggtgcagatgtgatataatataccaacaaatcatcatcctccctttgacgagtaagagtaggtgaagacaaaaaataaagtgtattttccacaaaagtaaaatcgatggaaataagatatttgttaagatcgagataataacatccatatcctttctgaagacgagaataaccataaaaaacacactttaaagacttaggatttaatttggtgacatgtggagcaaaacaaacaccaccaaatattagatgagcaattggaaacaatgacttactaggaaaaagaattttaaataggatcacattactaagaacagaggatgtcatgcgattgataagaaaacatgttgtgaaatcggcatcagcccaaaacaatttaggaacttgcatttgcaacaagagtgcacgtgcaatttcaagaaggtgtctgtttttacagtctactacaccattttgggatgcagtatcaacgcaagaagcttcatgagacatgccattagaggtcatatatgattgaaattgagtagatgcatatttcttggcattatcacttcgcaaaatacaagcaaacacattaaattgattttgaatttcaacacaaaaagcacaaaatacaagcaaacacattaaattgattttgaatttcagcacaaaaagcacaaaatatagaaaacaactcagaacgagttttcattaaatataaccaagttacacgagaataatcatccacaaaaataacaaaatatttgaatccaagtttagacaaaataggaggaccccacatatcagaatgaactaagtcaaaaagaacactagcatgcctatagactcgaggactcaaaataacacgatgatgtttggaaaattgacacgacccacaatttaatgaagacaaattactatattagggacaaaatttcttgagaaacggaaaggatggatggcccaaacaacaatgagcctcaaaagcagaagcaacactcaggacaagcaataaagattggtggaagtgaattaagaacatacaggttgtcaaattcatgttttttacctatagtcgtcttcgtcataagatcctgaaacaaacaatgatcgggagagaatgagaagcaacagtatagattacgagtgagttgactaacagaaagcaaattaaaggacaaattaggtaaatgtaagactaatgacaaagtgagcaaaggtgtaggagcaatagtaataaatccaagaacagaagatggtgatccatcagcaaaggcaacagtagaagtgggactatgagactgaaaagtggaaaagatactgaattacctgtcatgtgatctatggcaccagaatcaatgacccacaatgtgaaaagaagacatgcattagagttacttgaatcactgtgacaaaaggagatgaagacttaagtgaatcctgatatctcgagaatgtggcaaattcatttgcaaaaataagaatcaaattgtcagatgcatcactggtgcttgcaatattagcagagtgtttttgcttatttttgaactataaatttcttcactcaaacttggtgtgacctggtttcttacaataattgcacataatgctcccggaatctagtgttcgattattaggtcctggtaaattacctcatttgtatccacttggagtagagtttttccatgatgcagaattgttacgactcaccaagacgctattaagaggagttgaagaggtagtttctatgcaaaaaacacgagtaaacacatcttgtaaagaagtgacatcagaatcagaaagaacctgttactttgaaaagtaaaattcaaataagagtcctacaagaaaactcatgatagccaactgttcttgttggcgctgttgaactttcacatcaggactaaatggcggtaacacaataagctcttcataggtttttttaaatgccataaagtaattaataagagattgatcttgtttctctacaagataaaagactttgcaaacatcatacatatgagattagttgtcttttctagaatataaaaactccaagcaatctattaattctttaaacaattcacaatgattaatcaaactaattatctcattatcgatagaatttcgaatttgaannaacaagcgagcatcctcacgtagccatatttttcttgaatcgtctttttctttgagaggattatcagtcaagtgatcattttggtcaatactcctcagataaagtcgaattgtctaaccccatttcaaataatttgaatcaatcaatttatggtccgtgattttagacatcatgggtaccacatcagaaacaaccactgattttgggtatgattttgtctctgccataatctcgaaagcaaaaaaaaaaaaaattgaaagagaaaagaaagaaagcaaacaccaaagaaaaaacatccaaacatgaaaaagtcaaaagtatcaaaccacaaaatgagaagaaccaccggagacagatgcaaggaggacagggaagggccgggagagtgacgaaaactggttgtcaccgaaaaaaaggtcagatgcacccacacgtgccgacacgtggggagttggggcggcagaaagtggtggcgcatggggcccacgcgcaatgtttctaactaccagacttcggggttttgctaatcggctgttggcc

SEQ ID NO: 30628 - DNA, 6423 bp, Cannabis sativa
  modified_base (334)..(346): a, c, t, g, unknown or other
ttagggtgttaatcaacatagttgtgagtaaatctaagatcctggtaaaataatttccaacaccattctcactggtaaacgggtcgaaagaatcacatttagagagatctaagagagtatactcaaagatttcactgtaagagctctaagagaggaaacactgtgttcttcgttcttaagttaatacaaattaaggggagtaggctattaccgaactgctcggggccgaacctctttaaaaaccttgtgttctttatttatcttcctattttatacctaaatcatatcctttatcacttattattaagcctcactgtcgttggctaaaagcgannnnnnnnnnnnngtgctttcattgagagcaagaatcataaacttgctctttaatttaagtctactcataaacacgatggttgtacaaactcgtaggggtgtgatcgatcaagtggatccactagcagtagatcccacactgtagactccagggaatgcaatggtcccaccagtcattaatcttgaacaaccaatcacccaaccaccaaccgtgggtcaaggtgtgacgtctcctttggctggaatcacacccggtgtgcaagagactggaaataccagctcagcagccgatctaggtactcccagcactgggattcctttagcgacaaatgcccagacaaccattggagatgacaccgagatcgaaaacctctataattctcttggactaatgcaaggtcatactaatactttgcatcacgatcaggaagagctccgtgttgcagtgagcctcacgttcgaggagcaaaggcgtcagtttgccgaatggagggatagagagatggaaacattgaaggctcatcaagcagccatcgatgactgaacaagatagggcaccgtattaatacgaagagctaccaagttgcttatcagcaacccgcgtacactatcccgttcggcggcctagacaaagatccagctggaaacacttcccaaactctgaacggtcagccgtcatatccccagtcacaagttccacgtgtgggccaagcggtaggcaaccagaccgtatctggtaattcgtgaggaggggttatacctaattactttgccaagacgagcggttctggccaagtgctcagccaaaccaactagtcactaatgcaacctggtgcatctgtatttaatagactgggaacagctcattatctcagagatgatctaaatagaaggagagagttagacgaacaatgtgttctaccaaccactcaccccgggcccgcactcaagatctagctcaaagagatcccaaagtgagattggtcggccaagaggccgaacaagttcatccatccgttcaagcacggttagatgaactgaaaaacatgttccaaggtctggtcggtcaaaagctcaatgatctcgagttggaccgagcacgtggatccccatttactccagagatcaatgttctagagctacctcacaagtttaagatgccaatctggaagatgtataccgagaaagaagatcccctatcacatctcaaatattttgaaatgtaaatggacttgcaagggaaggctttctccttggaatttcatgcacaattctcttcttctcgccaactcccgttacatttagaggacctcgtcgaagtgaagaaaaggccagaagagcctctctcagcttatatcagtagattcatgacggagtcgatgaaagtggcacggttaactgaagaagggaaattagccgccataccggggggaatcaaggttctcggagagctttggaaggacatcaagaaagatggtccataagattctatgagtgaattccttgatcacgcagatggtttcatcaagctcgaagaggccattcagtgagcagatgtcgagcttaaaccgagccaatcacaagctccctcacttggaacatctgttcaaaagccccagtacccaagcaattcaagctcgggcggtaaatgatctaacaacaacagcaggcaaggcaatagaaaaaagggaaagttcgctggcaaagtcgaacagacccttagagaaaatcattctaaattcattgctttctctatacttaccaacgatttggagaccatctacatggatactcagtcagtagttctgtataagaaacctgctcccatgaaaaaggacataagtaagaggggacatgtccaagtttttccattttcatggagattatggtcatgacagcaacgaatgcaacaacttgaagcgggaaattgaattcctgataaggaagaataacccgtacgtgcaaaaatatgtcaagaccgataagaaccagagggccacccaagcagacaatgaacaagatttacaaccaccgccagtagatgggcttttgcaagtcatcattggggcccacacatagttggagattcaggcaaagcctgggaaaggtatgcccaaaccttacagcatgagcaaaaagaagtggtcttggccgtcgaagaaaggaaaccaaaaataccacgggtaggggaacccaccataacattcaatgaagatgatgctatcaaggttagcttcccgcacaatgattcgttagttatgaaagtgcagatagccaacaagatagtagcccaaactatgattgacaatggagcctcagcaaatatcctgttcaaaacaccatatgaaaaaatggggctccaaatcaaagatatgattccctgcgtccagcccgtaaacggtttcttcggccagagcgttgcacctttagggcaaattcccctacccctcactgttaggcaagctccaaagagcataactgtgatggcacaatttttggtgatggatgttccatcaacttttaacgtcatgttaggccgaccagccttatatgacctaaaagttgttacatcgatattcgtgccttaagtttccaacaaagaatagggtagggtgctagagaggaaatcaagaagttgcacgggaatgttacaaccttgccctaaacaaggctaaaaaggaagtatcctctagtcagagttcagacaagggaaaggacagtgccaaatagggaaccgcaaaaggcgaggacgaagatgtggattcccgacttggggaaccaaataaaaatgttgggccagtgaaagaactagaacagattggaattgacccaaatgtcccaaccagaaaactcaaaataggaaaaggtttgctgctcgaagtaaaattagcactgataaaatttctaagagcaaacctagacatttttgcctggtcgcatgaggacatgatcgaaatcgatccttctataatttcacattccctaaatatcgatccaaactttcggcccgttcaacaaaatagaagattgttagacaaagaatgggccctagcattaaaagaagagatagaaaggttgtgtaacaacaatttcataattgaaactttctacccggcctaggttgctaaccccgtactagtgcccaagccaaacaaaaaatggcgagtatgcattgacttcatcgacctcactaaggcatgccctaaagactgttttccacttctgagaatagatcaacttgtggatgcaacagcaggacacgagatattaagctttatggacgcctatttggggtacaatcaaatcaaaatgcatccactggatcaagaacacacaagcttccaaacagatatgggtctatattactataaggtcatgccatttggtctcaagaacgccgaagctacataccaaagattagtaaataaaattttcaaagaccagatctgacgaaatatggaagtatatgtggatgacatgctcgtcaaatccaggaaggctggggggcatatatatgacctggatgaatgcttcaaagtcctcaggaaatacaacttgaaacttaatcccctaaagtgctcctttagagtcagctgaggtaagtttctgggctttatcgttaacgcccgaggaattgaagctaatctagagaaaattcaagccctcctggatatgaaatcgcctacaaaaaccaaggaagttcaaagttaaactggttgaattacggcagtcaatagatttgtttcaaagtcaacagacaagtatgttccatcctttaacatcctacgaggaaataaacaatttgaatggacggaggaatgcgaaaaagcctttcaagagctaaatatgcaactcgcaaaacctcttgtactctcaaaaccactggacggagaagaattaggaatatacatggctgtcacagaacatgcagtaagtgccgtactgatgagagaagagaacaatatccaacatccggtctactacatcagtaaaagactcattgaagctgaaggtcggtacccattgatagaaaagctcacttattgcctaatcctagcaacaagaaagctaaggccatacttttaggctcatcctgttcgagtgtacactgaccatccattacgtcaagtattacaaaaaccggacgcctctagacaattgctcaaatgggcaatggtattgggccattatgaaatcatcttttagccccgaccaacgattaagggtcaggccttaacaaattttgttgttgaatgtacgggtaaagaagagagcactttaaaaaataacctagagccagtgcaagtacctcagccgagcaatagtaaagacaagccaacctagaaattacatgtagatgggtcggctacacggatcaactgtccggtgtaggaatcgcccttgtcacacctgggggcaacacctggacgctccagacaaattcaggtttaaggcatccaacaatgaagctgaatatgaagcccttatcaccagcctaaaacttgcttgagaattgcaggtcaaacacattgagatctgtaatgactcacagttagtggtaaatcatgtatctggggagtacgaggctcgcaggaaaaggatagcctatctaagcaaaatacatgatctgctcgcacacttcaaaagcaatgctctcaaacaaattctaagggaagaaaacacaattgttgatgcattagcccaactcgcgagcagtaacataaatgataagggtaatctaatccccatgcaatttcttgaaaaacctagtatcattggcacggaggaaatcaaaatgattgacacatccccaaactggatgatgccaatagcagcctacctcaacattggggaactcctagataataggaatgaagctcggaagatgagaagaaaggttgtgtagtacatcattgtagagagtgttatgtatagaagaggattctgcatgccactactcaggtgtgttacacaagaagaagttgcacgacttttgtcagaagtacatgatggattctacggcaaccatgcagctaggcaaagtttatccaagaaaattctaaggcaaggttatttttggccaaccatgattgaagattccaaggcctacgttaagaaatgtgataaatgcctaaaattttcagagatacctcgtgcaccgcccaacgaactaactcagatgcaaagtccttggccttttgccatttgcgggattgtcctgatcggatagttacccaagggaaaaggtgaagtgcagtacgcagtagttgcagtagattactttaccaaatggacagaagtcgagacacttgcaactatcacgtccaaaaaagtgcaagacttcattgtgaaaaatataatttgtcggttcggattactgtacaagatagtctcggacaatggcaaacaatataacagtcagtccttcactaatttttgtgcgaaccatgggatcataaaaagtttctctgcagtggcacatccccaagcaaatggtcaagtcgaagcagtcaacatgacactcaaagataccctaaagaaacgacttgaagatgccaaatgaaactggccggaggaactccctaaagtattatggtcataccgcacaaccgagaaaacaacgaccgaatagacttcttttgccatgacatatggttacgaagctatgttgcccgtggaacttgaacctccaacgattttttgttgcgatttttggtttcttttatatacaagtatttagtaatttttgtaaacacatcataactaaattaatagttgaacttatttgatattcatactaaccgttatatataaattattagtgcaaggacctatgtactactcgatgatggtaccgagttgctagatgctgtgatgttccgagatgttacagaaaatatattctcatgtactgtagttcaaaaacataggttgtttgttcaaaaaactgtggagaaattatcggcccaaaaagggagaattcagttgtatgtagatcaaacccgaatgatgagttcaaagtacaatcaattcaccattcaagcagctgaaccaatggacgattaggaagaagtttcactatactctttt

SEQ ID NO: 30629 - DNA, 3178 bp, Cannabis sativa
tcctttatatatatatagattagaaaaaatagccgcaaaaatttgttaacttacgattttgtaggagtgccctcttggctattaagtaccaagtagatccgttacgtgccacataagacacaggtgccaatatattattgggccacgttaaatactttgttaaaaattattttaaaaataaaccaaattaatttaaaataaaaagtagaaatattaattttaaaacattaaaaaataaatcttcttttaaaaaagtaaaagaaaaatgttactgttgactttaaatttggccaaccgacattgaaatcgtatttatgacatatatcactacgtgtacacaataagaacaagtaaataaagagacacgacattttatagtggtttggtccccttagctagcgggtaatgacctactcccttttggttgtattgatacctaagataataccactcagatcacaagtgttgtggattctaaagcggctctcttacgattacaatagtgagaatcaataggcaaatcttaagtaagagagatgagagagatctagtctcttctacaatgcatgggttgtgtagaatagaaagagagagatctaggatttaagacttagagattagggtgcttgagacctagggaaattagatttaatttgatgctctttatattgcaagagaataataggttaatatccctaaaaaagaggaaatataactatttgttacataataaaataataaataattaatatgttaattaattcccaataataggtaaataactgatagttatcccctatttttgtgggtcggtaaagctccattcgtagcttgtagtgctttccaggatgcaagttgcgcaacaagtgcctaccagggtcaaggttgcacaccaagtgcatgccagggtcaaggctgcatgccaagtgcttgccggtatcaaggctgcacactaagtgcctgccaggatgtaagctggtcagcccttgccttgctggagattgaccgacctatgctagccatagggccgactagggggtgtgtccagacccctttaggtactcagttcgttgtctcttcattctgcttaagtattcagactactcattaactgatatgttgtgtacgatgacttagctttcttgcggataagttatactccacgtggtattaatcttgcccacgtggagatgccacgtcatgtgggtaaaaattaggataacattttcttaatacagattttcgttaacgattatgagcctattttcgtaatagatttgacacagaaattatgagagatctaagaaagaataatagaaacaaaaataacactaggtttttacgtggttttgcagttaactctgcacagtccacaagtcaatcttattcagatttttctgatacagaactagggtccttcacactcagtgtattacttttttttctataagatttttcgtctccctttttttggataatctgcccatatttatattaatataggttggcagttaattacatttaagttcaaatcctataacaatattccccgaaattatggactttaattaggatccacatacataaataaatgtagttattatttaaaaatttcacagctgtaatttataccgttttgaaggaagtcaacgttgacgtggattaggacacgctgccagaggtacctcgctgaggtgtctcacctagtacatgaacaacttggtttattcataagccttccaacaaatggcatgagcatcagtgtactgagcaaatttaagaacggttctttgaccataaggccttgcagactagacaatcatgtccttcaagttacttcacttagttgttataatgtatattatacgctaagtgttctaatagttaattcgcctcgtcaacacctctttacatattgcgaggtagatgcctcactatgcattgtctatgtctttcttgagattatgtcctttgatgcgaaatggtttctcatcaatacgtgaatcaatagtttgtacatccttgtctcactaaagactgtgcaatccgcgagttataaatatacatactctattaattctgcatttaatgagttattccatttaatatttaatgatatagttatcaatatatttgttgattcatattccctgagactgacacgtgtcaccttctgaaacacagccgaatttcgggtataacaattgcctcttaaaaagtcattttcaatgaaaagtactttttaaatgattactgagggtatatttgtcataatccattttgaaaacatgcatgcattgattttgatgattttgtggtttcgagggacaattagcattaatgagccatcctttccacttcttttccatttttatccactggatcttctacatcttgatctagcagttactaagttcaaagtataaaacggtaaagaatccattttcaccatttttgtcttttcaaacactcaagctttttttaaaaaaaaattcatcccgacttcctaaaaccttgcatgccttccttatccctgacattctttctgcgaatttactcggatttgcttttcgacctcaggtgttcaaaaaactcatcacgtcgctcatcccatctcagtttgaaaattttttcactactcgacttcaaacagtaagtgtctcatccttctccccttttttctttttttttttgggttatgattctcttgtatcttgtcactccgtttggtttagcgataagggtttatgttttttgggtaatttttagggtctaggcatgatttaggtttatcatattcttttagcctctggtttaataaatttcatccacgaatggagattgttcttttttgtagaaatgtcccaatctagttcagaagtttattctccagaattcttagaaacagaatatcctaaacaattagccctcccatacaaacccagaaatttccaaccaagctttttgcaaccagatgactctgtttgattctaaaaaacacttgtaccttaatctttggagaaaacaaaaaatatgcccagaagaattccaagaaaaactctttggaaatggcccaagttgacaaaatgtcaacttgggcattgggcccagcaccaatttgacctgggtgctgagtcccaattctaaccactagacgaatctatttgtttcccaaaag

SEQ ID NO: 30630 - DNA, 2632 bp, Cannabis sativa
tcgaatctcaattatttgtttgctatcaataccacgtattattttgctcttctcgtttcggaaagtattatgtatataaatgtaaacaatttagttaaaatccagacacatagcttcgcccctgtttgcttgtgaagtttctttctgaaaattgaggagaacatggtttcttgattatttgttatttttatgataacgggataaccattttaatttattgttgaagtttttgtttgaaatctttaagatttggttctatatgtttttggaatatatataatgtatatgtaaagtcaaaattgggggtgaatttttaattgtagcgtttgtgatgagttggtgcagctgcaatggttgcaggtgccagagacgccgatgtgtctcccactataattgggtcacttcccaggaaagaggctgctctattggaggtatttataaatatttatttgtgtatgtatgtatgtatattgtatagcatccacgcttcccatttgtccaatttcattgtatgttactttattggttgaattcaatatcattcagttaatatatattcttgatggttttgtattcattttcagtctacaatagattaatataataaattttattaggattattggattggatttaatctatatagatttaatcatcaagaactgacaaaatgtgaaccataaaaatggcaggcatgcatatactaaaattttgtataacctgattttggttctctgaattaatggttgattttctgcaattataattttgcttatgtgtttgtgaaatcttaaacttgtttggggaaaaaaatatactgatttttgcttgatgtcaaacaaatgatttttcaaaaatttcttgtcaaagtaaatacactggcacataaaattacagtttctctattagagattctaatttcataatagaattgatcaacagattcatgactccatacaagctctatttccagatagagaatgtttcacccttgtgctgcctttgaacaatgaagctgagctccaacgacttgatcaaatttcagtaagtatttatggctctaatgatttctcagtctatcttttggtagtagtttcttttaatgataaaccttattggtcggttggttttatagatcttaatggtttacaattttcttttattaagaaaagttggtagtcatgcaattcgctatgactgtttcaaactttttcttttggtagtcatgcaattcactacgattgttttaataaattttctgttaggggtgtgtgctgaaacagtctttttatatgcagttgaacaagctaaggcctgaatttaaatctgggctagatgcattaacaaagtttatttttgaaagaacaaggcctaaataagttggggcaaccataatggctggtccaattcttgttggtattacgcagtcttatcattttaatactactgcaatggtaatattattttatagtgtgtatataaacttgaaatgcagattctattgttgttttttggtctatgtggagtttttctaatatttatatatacagttttcataatgagtattaatatataataatgagtttattgtttattgatatttgcttgtaatgattatatatatatgtatatatatatatatgcagggtgctaattggggctcaggggagattataatgtgataacgaggtaattgacaagtttgattttagaaattaacaattaatttagactaaatgttgttacttaaactattattatacatatttaggacaaagaccacaacatcaaaagaagaatgtgctttagtttttttactgtatgaagttattatataaccttttcatcttactatatttgtgttaatgatagtgtatcttttagtgcaaaaaaaaaaaaaaaaaaactttgagttggagcttccttaaatgaagtaggaagagcatgatgaagaaaaataaaggtatatgggataagtgatatctaaacacttctaagagttttgttctaatatgtgtttttttgtttcctcaaatcttgatcataactgttactaaattattgatgctaattgtaaagtttttattattgatcaagtagaatgttactatttttgttataatacatgagtaataagtgttatgattgttgctattaaattttgcattatgtaattatagttaatttttaagatacatgatatataagttttaggattgtttatattgataattttagtattatataattagttaatagaatcgattattaattttatataagttttataaatgttatttaaacttttcttgtattatttatttactattatataacttatttctatttgttatgatatattttctcttggtaaaaaagacttggagttgagtgagccaatgttattatactgaatagtgtctctaaagagactttggattggattttcttaaaacgcaggcttctttctttacatatatatatatatgtatacattttgcttgcccgaaatcccaaaagaggcaagtatgagattatcacattgggtcattctttgtattgtttgttgatagactgtgcggcttcatcatatattaaattcgtttatgttgattgttgcattccattcttt

SEQ ID NO: 30631 - DNA, 1869 bp, Cannabis sativa
  modified_base (1385)..(1391): a, c, t, g, unknown or other
tcaccatgatcactcctttggttgccaaaggcagtcttatatgtgatgctataagacaaagttttcaacattttagtaagattgataggtgagccaacttttgaggctatatcttttacaatattaaaggactcttcttctctaatggattgataagttttaaccctagatgaggttagaagctcttgcacacaaatctttcttacctctttccaatactgaccatgtggagcaaatgtaaggtcagtgccatcatatgacaagattcgtgtagcaagagtatctggtcttgatgcaagagcattatcatggactttcaagacctctttagcatactctcgtgatgaaactactacggttggaacttgtccgacttcgaggtacattataggtccatgttttttggccaagtctctgaatgtttgatgaggcaaaggacccaaaagttggtgcaagtttcccagaaagggtagtctccatggacctgggggtagttttgaagctgggttatttcttgtttgacctctcttcaagagtatgctcaccaaaataaacataaaaactgaaaagagaaggacttggaaagagggtcctatttgttggaactccatgtggtagagagtgatgatagggcttgaagagcttaattatttgtttgtgaaaacaccaaataatactttgttctataaataatatattattagtgtacgataacttgagagtttcgtcacttatgtactatattaattaaagtttgaaaaagtaagcttaattaaggttagttaagtaataaagtttataacgttccttaaaaaaaaggttgttaataacgttctggttagggcaactataggaaactatattgagctataaagccagcatgtttaaatttttcaaattctataactaatagatgagcattgctatttgacactactttcaggtggtatcttacaaattgttagtgctatttcatgctaatttattaatctaaatttatgacaccatattctaaattatactaatagtcatatgatacacaggtggtgttaattaagcaccattggtgcctttaatgcaccttactataaattaaaatttatcaattcataacattggctattcgcacccttcaaccaccctgcctataactggatctttagtgttattttaatctaatgaaattaataataaagtagaaaatgtgcaattagaagattctttggaaaaaaattatgtacttagtgggatttttcaaatacaaaaggaccaaaaaatctatgagagtctaggtaattgagtgctacagagaatagagactttaacggtatgtttggtagaagaaaagtgaaagaaaagaatatatatcactacaagaaatgtcnnnnnnnccagcacatttcgcaaactgcgctggcaaaaaatcaaaattttaccagcgcacatttgcagtggctaaaatttaactttgatcagtacatttacgcgttgggaaaagtcatttttgctagcacttttcattttgtgttagcaaaagttctaataccaacgttttgccaaccctttttaccaacacatccaaagtaattaaattctattttaccagcgcaataccaaacttttgccagcacaaattaaattgtgctggcaaaagagacatttcttagtgaatgtatagaagaggaaagtggtaagaagaaaaacaaataagatgtttgggtgccaagaatgtagctttatggaattaaaagagatgttagtgaataagcttttcttattttaaaataagctgcagaggacaattggtttgagcagatgagttcaatgatgtagtggttgaaaaaccgtgtttttgcaaatgtcagttgt

SEQ ID NO: 30632 - DNA, 1290 bp, Cannabis sativa
atagttcaaggggaatttttaacggcaaaaaaaattcatgagacatgatttagtatatgtcaaagttcgagagaaaaaattgctaattagccctttttttaaaatcaaatatgatgttattcataaactttcatcaagtacaataaatttcaaagcaaagcatcaagcacactaaacgtacaatctgacaaaaaatataatcatctaaccatacaatgaacagccttatttgcagtttaagaaaaactaaagacacatttgttaaagaagacaataaaatctgacaatcgtatgaaagtaatccaaactgagttgacatttcaatagtacttttgatagcctgaacacaactaaagcatcagtttcaattccacattagaccactgccttttttgatcaaactcaatgcttctttgactccaaatattatctccgcaattttaagttagatcgccccaaaccggtttctagaaattgcttcgattaagtggccacaagattcacgagcaatacacccgaaaccaaacttattcaacattggtttccttcaacgctcaataacattgttaatatcatctactaacaatacacttgtctttcgtaattgagcattaatccattgatcaagaacgactctaaccgcacaacttcaaaaacaacaagtcatttctaacctaccatgttttgccaactctcatatatatatatatatatatatatcaaattaaattatcgtatgtactcatttaaatgaggctattaagcgtaagactgaagacggtctactagtgaccaccagaccaagttattgttctatttgatctctgcaaagcattggctcatgcaaattaattaggtacaagtagtacatttagtggtggatccacattaaaacgaggtagacagttgatcttaaaaaattgataaaaaaatatatatgtaatttagttaattattacgatacatatttataacaaaaaataatatttataaatataatattaattttcgtgcaataattatgctaaatttcaaataccatacaggtaaagcttaaaatcttttgaagaacattttcttttaaaattacatccccttacttcatattcatattccgaatctgccactgaacctttattgttaatcctttgcaaaaaaaaaagtactatattgttaatagcattaattagtgcccacctaactacttaggaaattagcttgagctattataaaagtctagctactactaaataaatcttataaagtgtttttttttttttagaaaaaaaa

SEQ ID NO: 30633 - DNA, 3014 bp, Cannabis sativa
acatattgcaggagaaagcaataatgcccaaaagaggtacatgaaggaaatgaagaacttgcagtctgccttttctctagaaccttccaagaaagtaaagaatgaagaacctccgattataatttcgcaggaagatgaaaaagatttgaggtaccctcacgtcgatccattggtaatcaacatccagctcgctaacaagaggataaaaagggtgctagtggacagcaaaagtttagtgaacatcctttacaggaaaacactgaaaaagatggggcttgaaaaagctaaattaagaccttgcatggtgattctttgcggatttactggcgacagtgtcgccagtcaaggaataatcgagcttgcattaaatttgggcaaagcacctttatccaccataataatgcaagactttttggttgtcgacctgccatcggcttacaatatactgttgggtcgtccattattaatcggacgaggggcagttagttcgatcaagcacttatccctgaagtttcagacaccagtgggtgtgggagtagtgcgaggtcatcagatgttggctcgcgaatgctaccgcatagagctacaacataaaaaagccggtcaccaccagtcttgacagaagaaggcgagaagaaggatgaagatgttgatcctcaaattcaaggtgaaagaaacttattgaaagcaattgaagaattggaagaagttgttctggaccaaggaaatcccacaaagtgtgtttacattgggaggaagaagaacctggatgaacaattgaaatagcaactacatttggcagctcgcactgatctaacccggcagtctcgcctagactcaattccacaggtccttagtgaatcgcctacagaacatgagatagttcgcaccctcgactctattaactctacgtcgaaggtgacattagggtcctagggagtctttgatttacgtggcttgggagatattatttcaaaatccaagttacctggttcaaaagcaattgtgaatttgggtaaaaatagtggtttagccaaaggaatagagactggaggttcaggccaagcagcatctcccaagaaacggcgtttgccttcagtaatttcttgcaagaagcgtctgtagtgactagcagtgtcttcctgatgaattttcagtaagtgttctctaattctttcatcatttacctttaatttggatgtgggttttgaaactttgggtttgtaagggatggaaatttcagtaggatactcaatttctaaatcttctaggcgataaacttctaaaccagattgggacattgctgcaaggagaaagcaatgccaattcccggaagaaatttatcaaaccagaggttggtgaatttgagattctggaaaacctacacactatctaaaccccaacatttacgcatacacaattcagccctaaaaattgctaaaaccaaatgatataacagcgatgctgaccaagatgtggtaattaaactcagaaatacaacatagctaacttgtaagaaaataagaaagaaaatcacttactgtttgaagttggttttgggatgatgaacggctctacactctgtgaatcaacgaatgacgtgaagatccctccaaatgcttgaagtcgaaatttaaatcagatgaaactcgtagaaaaaatgttaatgacagagagggcatgcaaattttcgagcaaatctggtgatggtttttcgacggagaagcttagagaatttttagagtttcaaaaatggaaagggtaatgcaaagatggtttttatttttattttatactctcggattaatctccgttagactaggaaatgatttgatcctacgggtagaattttaaaaagaagtggaaaagatggtaatttaatgctaatgtacctcaaacccacaaaaccgccaaaatcagaggacatgcgctttttcaaaaaaagattatgacaaatataccctctataatcattaaaaaagcactttttctttaaaaagaacttttcaagtatacctgaaaataatttggctagcacttcagaggaggacacgtgccaaacttggagaatacgaattaacaaatataatgaaaattatatttgaaaatgaaataactcattaaatgcggaattgacagagtatactcacaactggctgactgtaaggtcttaagcaagataaagatatacaaattgttgcctcgtgtattagtgagaaactatacgacatcagtagtgcaagacgaggcatcaaccacgctacgcatgaagagacatcaacgagacatggtgactgttaaggcacttagcgtataatacacattatacaaactaagtataacactcaaacgaatccaaacaactaaagcgaggcatccatctcgctataggaaggcacactcatggtaccttcactaattaactctagacatctttcaatgaaatccatagctccgtcgagtcagctctctcaaatagaagctgacattcaaatgatattgactgctgaacttcaccttgtcaccgagaattgcaattgtcagatggagtgttatgtctttaagcgcagaaatgacaaggtttacattatcaatctcggaaagacatgggaaaagctatagctcgcaaccaggtttattgttgctatgttcccagcgagacagaacgatacgctttacaacatatttaacacacatttacattgacctggtaaaagttgaccaataacagatgtgtgattttcaaatattaaccgcatttattttacgtgggatataatcaaatcccacaattttaggggaggatggttgtaaaatattagtcaaatttgtaattaactgccctcctatgtaattacaaatagagcatgttatactaaaaaagggacaaaaaaattcatgagagagagagccctagaactgcaaaaccacttaaaaaacccttgtgttcttcttatttttctttactacttttattttctgtgcaaatccatcacgatttaggcttaaatata

SEQ ID NO: 30634 - DNA, 1629 bp, Cannabis sativa
tttttttttttatatttttcatttctatcttttttttcaacaattctaccaattatgcccctatcatctaacgatactccgactctccattcaactctaacttgtgtagctgtgagagtataatcggtaatagagttataaaagtgggcacatttcaattgaatttaaaataaagctatttttggttaactaataaaaaaaacaggtatatttcatcttgcccttttttttatatataggtacattaactaaattaatctctaataaaattttattcaaatatacttttttttatgagtattgtacccaaactattcttacacactcacataattaagacataattttaaacataataaatttgcgttatttgtagatggatgtgtaggtttatagaaaagttgggacaaaattttaattaataaagaataaaaactatcgtgaaatgatatagataaaattaatagaataattgaaaaaagagataaacataattgattttaaaagatagaataaaaattaaaaatatcaaattaaaaaagatatgtaatgttatttcctaataatttttctacttataagagatttttaacggtatacatcgcgtgatcctaactatatacaatatgatttttctcataaattgagacatcattatacttgaccaatattatatgtaatttttcatatttatatatgtatttatattacacaataaaaaacaaaaatcatacatttttttttttaaaatataaaaatcatacatattttttgtcttttcactttcatataaattaatttggctttcatagcagtcctaaattatggcgcagcatgcatacaatacaccccctacctattattttgtattttttgtaatttacaataatattgtatatatatatatatagactttgtaaaagaaaaaaaaattgtatacgacatcttatctaccatttcaaaaataaataaaaataaataaaaatgaaaaatcttatctagcactagtaatatctacctataattttctttttatttggaatatataatggaccatatatgtccacatacaataaatatagaaaatataaggggaggtggcaagctctcgatccatataatattatagggtaagtttatatatggggtattttagtaaaatcttatttatttcagtatttgaaaaaaaaaaaattagtctaattttttttttataatcgtgtatattatagttaattaagatcatcggtaaatttttaaaaaattcttaatagtttataatactgaaaataagatttacatattttattgtacgtacgactatctttttcttacaataccgaaaataagatttatatatttacaatgtcaaaaaatttcatgatcgtgataaataataactgtataaattttatttttatcactgtaaactattcaaaattattttctaaaaatttataaataattttaaataattacaagcgatcattaaataattaaactaaattttcctttttaaatatccaaataggtaaagatctaccaaaacaaatataaagatttaaattccaatattatataaaaaataaataaaaaaatgtagaataatatatttggtgtcgtacgtat

SEQ ID NO: 30635 - DNA, 1995 bp, Cannabis sativa
  modified_base (61)..(66): a, c, t, g, unknown or other
aatttctcttttattattggttattagatcaaaatttgataatttaatatttttaaaattnnnnnntatagttaaatttgtttagtaaccattcgtggataatacccactaaaaaataatccatatatatatataattgaggagcacatagataattgaatatatataaatgtgccttgcggccaactttgaatggaacaataaaattatagtaatgacagtaaaatcaatgaaagatgactgatgaaggtcattagtagggttgagtcgacaattattaaattagaaaaagtaaatatgggataggaaagtacgtagttaaaatctataattggaacaaagcaaaacttgtgggattatctttaaaataataaatttttcttcaagttaacaattatataagataggaaaattctacaatacacctctttaaaatagatatattgatacaccttcatttatttcggtatttaaaaaactaattggtccaatttttttgatggttatatacattatagttatttaagacatctgacaaaatattgagaaatttagaaaaagtttaacacgttaaaaactgtgttcaaagagtttattgcactcgtgacttttttatttttacgtgtataaaatagatggtttaaacaataatttcgatattgtaaattattctaaatttctccaaattttgcaggatgtcttaaataactataacgtacacgactataaaaaaaattagactaaaaaattcgaatagataccgaaacgatcagaatttgcatcagtacacccattttgattgggtgtattgtagaaacatcctataagatatattctattaaaaacacaataaaaattaattgcacgacaaaaaaaattacataaatatttatagaacaagtaagatatatatatatatataaaaacatacaataaatcaaaaacctacaattttattgtaaaaataatgcaagaatgaatataaaacattaattatataaataattatttatttattatttatatattacttctttctgaagctcgaattatttaatttccaaaaatttcaataaataattatataatacagatatgttatatatacagtatttgttacaatagtaacaatattcaacaaacacatttcaaactagaacaatttacaaaattaaaaattagaacatagatgaaattagacaaaaaataaacttagctcgagaatgaatgaatcatgaacctttattaattgaatagtacgtagtacacaatgagatttgtctaagaatacaactaacacaatgaaaaattacaagaaatatctcacaatgagagaaatcacttcaagagtgatactcccattacatccctccatacacactcaatgtgatcttggactctctgtctaaacttgacactaaaatctgatgtatgattcttggacattacatgagagactagaggcagttttatttaaagatattggtggggctctctataagttggtgacaaatcaaactattataactaacaacaactttcttcagattcatctaatgagtgataagatggaattactgacttgacaggggtttggtgagtttcatatcaacaattccaccttattcgactcacttgattcttgatgcaaatgaaatgagtgaggacactaaatttcctaaatgctcaacatgtttggacagggcctaattaaatttttctctggttacactttaagggaaaatatctacagggttattgcgtgtgcttattttcttcacttgcatctgcttggatgatacaatatctcttataaagtgtaacttaatataaatgtgttttgacctctcatgaaacattgaattttttatgagatgtaaatcactttgatagtcacagtaaacattgatatcctcatattttaaactttactactctgttaacccttttagccatatagcttctttgatggcttctatagcaaccatgtatcag

SEQ ID NO: 30636 - DNA, 1783 bp, Cannabis sativa
agaaattcttatgttttattgtcagttcccacagaataaaggcaaacccaaagaaaatacatgctataattgatacgttgtctttaaagaaacataaggatgttcaaagtcttactggaggatcgctgctctcaatagattcatttctaagtccactgataaatgtatccctatcttcaacatctttctttgaagcaaaaaatttgagtggactaccgaatgtgaagaagccttctagaaacttaaggagcatttggctcagaccccaatactgtcaaaatcggttaaagtaaaattgttgtacctgtacttggtcatatataaatatcacataagtgttgcattagtgcgagaagaagaaaacattcaagcaagagattgctaggcgcgtagtccaggtatccccttactgaaaaattgccattcttcttatcgattgcctctagagagcagagaccttactttcaaggccattccatcaaggtactcacgaatcaccctctctaataagttttatagaaatcaaaatcatccagaagatattgcttatgagctatggaacttagccaaattgacatccattattagccaagagtgttaattgagggtcaagatttgactgatttcatggttgaatgttccgcgatcaatgagaacccaaaagagcttatgtcggagttatcagtgtggaaggtatatgtagatagagcctcgaatgagaatggttttggagccgacgtaatcttaatttctcctgaagggtcaccatcttcagagtgccctctgtttcctcttcgacttttcaagcaatgaagtcgacataaagccatgatagttggacttcgtctagctaaggaagtggtggccgagaatattgaggtccacagtgatgctcaatttatattttatggtgaaccaaatctcaggcaaagaccaaactaaaggagaaaagatggccacttatgtatcccaaacctgagagctactccagcatttcaaaaggtacaacattaggcaagtctccaggaccagaacgccttcgctgatatgctagccaagctagccatagatttggaaaatagaagcctacagggttgtactaatttcccatttacctacaccatgcatataaacacttggggtcaatgccatagaccaatccacgtcctggataggacccatccttagatatttaacttcaggagagtgacaagctaagaaggcaactgtcaggaaggtccagtactaagctctcatatatgttataatagatagaaggttatatcgaatagggttatctatgtggtattcaaagtgcatatccaagaccaaaattagtacaatcatctacgaagtttacgaaggcttttacagagatcacacaggtgagtttgtccaagaaaacttgaaaattttctaatatttacacaatgttattttcataacatcaaatattgtctacatatgtgtttaacttcacttatttattcatttaaagcatttgtcaattaaaattagctttaagggcactattctcaacatatgcaagaatgataacatattagccatcatttggaacctctcgtttgaaaccttcaaacttccaaaaacttctcaaggccaactatatcaaacatgctctttctaaattctctggttgaaacaatccagacagactatgagcctaaggtgtaatgtgtccagtgtccggtactttagtgggcctatcatccagtgggcaccactagcgcgtccttacaaaggttgacaacactatgtaatt

SEQ ID NO: 30637 - DNA, 1336 bp, Cannabis sativa
tttatgatgaaggagataccttgttatttgttatcatttcctttaaattgaaatatttgactataataataaccaaatgtaagtgagaaatgatataatagagattttcgtaccaattaaatatattatattagtatgacattaaattacattattaatattaatcatattgaatatgatggtaaaataaaccaaaatattatatagtagtgtgtgatattatattacacgtctattatataataaagttttggagatttttttactactttcgtaaaaaggtgttttggtatgcctttttgtttcacatatagaattttttttagtttattttttttaataatcgtgtacgttgtaattatttaaaattatctgtaaattttcaaaaattttaaataatttatagtgtcaaaaataaagtttaaacaattacttactgagagtataaaaaaaataatcatgcatgcaataaaatatttaaattttatttttgatattgtaaattattcaatatttttaaaaaatttacatgtaattctaaataattataacgtacacaatcattaaaataaattaaactaaaaaactcttatagatattaaaataaataaacgttgtgccaaaacactctttagtgtaattagacttaccataacatttttatatttttgacatattaatgtaaaattcataaattttaatttagtctcactaagtaattttaagtgagggctaatagcaatttgcaaaattgatacctaataataatgttctactctataaaattagttgagttttcatatagagtgggataatggggacaaagaccattgatggatcacctaactttagtaactgaattcatatcaatatcaactgtaatctccctaaattaattaattgatatttttttattaaatattcattaataaaaatatatatttaataggaagtttccttagcaaatttgattacatgatttaataaattctcaccaaagtttttatctttgacatttgattaaaattatatgacatgaccctttctatttcttccccacaaagaaattatctatttttcgcattttacacccaaattaaaactaaaaatccttacttttttcccggaaacttagtgacactttcccgggaaaatagattttttttttcttttttattttccctgggttagatagtgttaaattcgattccttccgacactagtagaaaaaaatttgattttgtttttcctttcttttgttgaaagattagatttttatttcgtatagaatgggacaacagcaatccaaggatgagcttctgtatcagcaagttag

SEQ ID NO: 30638 - DNA, 1870 bp, Cannabis sativa
tttaatatgagagaaatcaataataaccttcattattaacaatcaataatttatgtcatcatgaaatggtgattgatgagattatatatgaaactcaacccttcgtcaaatcgagagttgtgtttgttgatgatgtggttaatttgaggtaaatgtttctggtaaataccatcatttggattcgttaaataatatgtgggaaaaaggctactgcatctgcaaagagttgattgtttagaaactctaaaatggtgttataatcatgccataagagttgattgtttggaaagccacggttaaatttaagagcattgctattagacattcgtggtacttaacactatgataaagtgtggttttataattagttagtgattttttataatatttattaaagttaaacaagcggaatctaatattaagttgtaccaatagtgatattataccttgcaagggaagggtgttaggcaccgaaagtacctagcttttagcatttctctaaatttaatgtgatccaagcaatcaacaaatgaggaggctttaatggtgtaattgttagtgatatccaacactttctttcgttgtgttatgttgattcttgtcattttacctttcaggaaaaaggcctatacattagctcaattttgttttagagattactttgaaagtctccctgaggtggatattattggttgtggctcatccccgctcccagaagtcacttggtcttgagaagtctccctattggccctagtcttcgcttttcctttccctttgctctcctccgtttggaaaacaatcttaagttgagaattcatttgcactagggatgtacgtacataaatttttgtaaaccgtccaacttaaataatctgcccaaatcaaaccgagataacccgacgaaaaatacaaattgaaaaacctaacgaaaatataacccgcccaatttttatattggactggttaaaaataataccaactctctcaatcaactcgaactatcttgaacaacctgattaagaggatttatatatatgtatatatttatatgtctattatatatatttatatattgtataatttatattactatttaaaaaaatattatgttgaaactaatatgttttttttatggtggttgatttgaattttgaatttaatctatatatatttgtcacattattataattaattaaaatataaaatcgaatgtaaaaataaaaaaaattaaaaaatattagtggtcggtttgaacaggttaacccaaccaaactgaccaatatgttactattctattttttcttaattggatggcttgcacttagatttttgtaacccggtctttacattaggttgaataataaaatgtagcataaagcaaccaaatcgactgacgtacacccctaatttgcactcgatcttctttttttccggctttggtacaactacccaagttttgttcttccggagtgaatctattttctcatccatggcctgaagccattttgacttgtttccacctaaaattgcctcttcgtagcttctagattcttcaattttagtttgttgtattgctgcaaatgttattaagttcgcttctgcgaacctcgctggagggtgaatcattctccgggttttatcacgcgccaactaataacctttcagacttgtctacatgaatccttctaaaacttttatttggtctttgttatctttcaactctacatcaacttctgtctgagcattgtctttcggttccatactagcttccgtttgtgaaccttcttccaagagtttcattctgtaatccacttccatgcatgtagtgttcttgtttcttgttttttctacattacatggagacacacta

SEQ ID NO: 30639 - DNA, 3517 bp, Cannabis sativa
aattacgactctgtgtcgattggctaaaaaactagtcaacattttagtttagtcctttcattgacagcttaagctaatatctcgaagcttttaccgaaaacaatggtgtttaccagacgatcatctgaagaatgagctgacgagggtgttgacaatgcccaccaagtcctattggtgagcagctttcctggaaactgtggcgagcaactgccacatcctagtagtggaggaaacaccaccattgggcataccatcgcccaaactaaagctgatgggaaaactatagcttggtgtacagccacagctcccaccatgggcacaggcacaattggtggtgcaatctatagggacaatacaagatattttcattttgactgatgaaggcacaagtcattccaatgccttaggggtattggcgcctttaggccaagacgtaacgagccctatatgtatattcaagagataaatcctaatatcgatcagttgagggatgcaattggctaagtgcaaggaccatgttcaaactgtgcaccaatacaaagcctaggctcaagcgactcttcttgagagtcttggcaaaaaaaggagagaactccaatctttgttggatgaacatgctcaagagatgagaaggtgtcaataaactatgaatctacatacttgggaagtggctgacttgatctggagttatgcaagcaagacaacaaaggtttaggcactcgtgccatcaaccaacaagcccaatgaccaacagatcaatagcaaggagctgcctatccctagggaccaacaacaaagggtggtctatgaaccataccactgtcttaaagatagggaacatgcatgtaaggagtcatcattctaatagagaccctggcaacaataacaacaactttccactctctatagatgaccaagtcctttcaaagcaccatatgggaagagaaaacaatcataatgttttgatgaggctgaacggaggaggaaaccctagtaaaaacagtgttagccaacatgggaacaaacgaaggccagccagcaccgagtttggcaaccaaggaataatcaaccaaaaactagaagggaagacctcgaagtcactagttaatattttcctaactaccctgatggccatgaagaagataaagctaagagtaatgctaacaaccaaaataataatggtaggagaggctgctaccaaaggccaagattagtctttaaccaaatgggagcctaaggggttgaagatctttggaataccattataagaaattaggcaaattaggaaattagggacaatcgaggcttaaatcacgtagctctgcatgagacgatttgagaagatcaggtcaacgaaggctttagcagcgtccaaccacaagtcgttatagatatggttatccaaccatagttagacgtgctaacccgctttgttagggaccttaccgcaccaaaaccaacacacttaaagttagacaaaaggagagagtcttccttctcacaaagaatcaatgaccttccaatcccaaccaagttcaacatgctggcctacgagatgtacacgggtaaagaagatcccctcacccatgttgagaacttcaagattcagatggatctctaaggaataaaggaggacctcagatatcgtgtcttcctcgcgaccttgacaaacatgacacaagaatggatctccaaattagctcgagggaggatcacttcctaggatgagcttgtttaactattctataaattctcttttgatcaacaaatacccacaaaattggctgacttagtggccattaaacaaaggccaaataagccactccaatactatatttagcgctacatgtaagaagcatcaaaagtaaaaactgtaagtgacgatgaaaagctagccgtggtcatgggggcatcactatgggaggttgactatggatagacatagggagagacctgacccactcctagaaagccttcctcgatagagctaacaaatttattaagtcagaagaggctgaacagaataccaatggccttgaccgtgccaaaacttcaagaatggagcgagttttagagatcaaggctcccaagttgaaagggtaataaaaataatggctcaaaaaatgggaagagtgccaacaatagtaatgatgttaataactctaatgacaataattgactcagaatagtactgagcaggtaaggcacgaacccatgaccataaggtatcacccaaagtactgacttgagtagcttacttgaaccatatatattaggatcagagaagaggcaagagaaagagcatccaaaggatacttggaagcttcacattggtggctcttctattgaacaattctaaggagcttgtcttaccttgaccactcttgaagggaagtacattcatatcgctatccacttaagattcaccacttccaaataataaagcagaagatgaagaactcatcgctggtttaaaattagaaagggaagataatgcaattgcgaatgctttggccaggctatcaagcattaccaaggtcaataaggccaacattttccgcgttaagtatcttctcgaaccaagacatctttacatagtgacatgaagacatggtgggcataagtccaaccttcttgagtttgctcttaaattgaaaggaccttacgaagcagtagaggcaattccccctagaacatatatgtttccacggtatgattccaacatgaacttggtactagggcctcgctattggaacaaagtacacctctgatggtactagcagtaaagttgcttttcaacaactacttaagctatgggacaatcccaccagcaaagtttgttttcttttaggcatgtgtgcccaacttgatgtacttaggcacaatttcccattttattcatcaatataagttttaagttatttttcatataacaacgaagctcgtatgattgttattgaatctatttatgaacctaaaatactcacttatctcgctaactttagtgacttagtcacataattttaagagtgtatgtgttgacacaaaaatttggccaatattcgttcgcttgattggtgagaggaaaaataatttttagtaataaatggagagaaacaaacaatttatagtagttcactcctcatgtcgcggcgataatggacatacatctactttcaatttttattgctcaagagaattataagaaactgaccaaggcaaaagctctaatttttagagagagagtgtagagagagattctctaaccttatggggagttagaagaatgtgaaaaaatgagctagaagagctctccttttatagggaagggagtgctattaaaatattagtaaaataataaaaaaatgtgaaaattaacttttgactaatcttggccattgatgattatctaatggtgaaatattgacttttgataaaatcaacaatttttgtagtttgaatctcgttcattggattatttttggagaatctgtcaaaaaattgcattgtattgggg

SEQ ID NO: 30640 - DNA, 1991 bp, Cannabis sativa
tttataatcgcataatacctttcctttcaagagaaataaaaatacgacataaatatcacaattatcgagtagattaaaactaaaaatcaactcattaaaatggaaacaaaataaaatcaaatcaactcattaaaaaaacttttaaattcctttcaaaaaaacgcttaaatataataataaatagatttttttttgaaacatagtaaatagatatttgaatattattattattattttgtggatacataaaaaactctagatatttttctatctatatatctaaattaaattcaaatcacccgtattataccaaaaaaaattatttattctttttctttaatatatagagatataattgagattttatatattttttctttaaaaagagatatacgtgaaaaagtaagagaataataataataataaaaaaaaacagattcatctatatatagatatttttacatggctaatttaagagaaataataacaatggaaaaaacaagtgattatgttccagatgaattactgctcaaaatattcattcgtatttctgatcttccatctctgattcaatgcaccaccgtttgcaaaatttggtactccctcatcactcaaaatcaatttattcctaattttgttcaattgcttaaccacaaaccacgccgccgatacaataatgagaacgatgatgatgagattatcatgccatacacaattttgttcagaaacaagatgcgatgctcttattttccaaaacaattttatcaagtatattctggagaatcaaaaatcattcatgaagatattatgaaacaaaaacatacatatgatactgatgatgaaagacattggccttgggaatgtggttgtttaagtgaaattagggccacattccatgacatgttgttggtgatgagtgcacgtattcctcaaagggaattttacatttgcaatccactcacaaaaaaacgtataaatctaccttatcctccattatcaaactccagattggtatgcttgtatggattagttgctaagccaaaaattgaatatgatcatggggccaataatattgatgagctatacaattacaaggttgttattttagaacatagttgttatcgtaacagagatatggttagagtattaaccttttgttcaaatactagagaatggagtagttacaccttttcttactcttccttgagtccaactaattggggttcaatagaaaatgatgaatcgttctctattaaagagccagttacgagtagtaaaggaaatatttattggttactgaccataggaaattatatgggagtgtataaagttaaaggaataatctcatgtaatccatttagagaagaaactgatccaaaacggcttcgtttcattgagtttcccaaaggttgtgttgagacacatggagtgaattacaggaagagaatttgcattggaattgttcgagggcgattgcgattatcgttgattaagagtgatggggttggattttttcgtttgagaatttgggagtttgatgatgatgatgatgatgatggtgaattatggtgtttggttcatgatgttcgaattagaaaaacagttaaaatgaatcagacatttgtgcttgcttttcatccaaacaatcccaatgttatcttcttatcactaaaatatcgattatacatatatgaagtgaaagaagacaagtatagatttcatggtagattcccaaaacttacccattataagtatgttatgaagaataatctccataactgcttaggtgtgttcactcttctacaccctccatcttcaattccaaagcctccacatccatctccatggtatatgcattaatatcccaaggcttatcttattattagttttttcttttttagttcacagttaattaatgtgttattcttatttagttaagagatacaattttttgctattattataagatttattttattctttaaaataca

SEQ ID NO: 30641 - DNA, 1312 bp, Cannabis sativa
aactaagcggtctttacactagaggtcttgacttgagttgttttcttagttcaagccatgatgggtatatctggcgatgaagcaacagtggcaatcgtctcggcaagggcacactcccgagataactcaatgggcaccccctctggtatgatattctcactagagggagggatgtatgcccactctctgggtagataagagtgtatccctcatcttagcttccaaatgtgtctattgtaagcttcatcgcttatcatctcctgataaagatgagagggggtcgtggtcttattgctataatccttgtacccatacaaggtaggcggagacgacttgagaaaatcttcaaatgaaagttgaagaaggtcttcatttactcggtggtcacctccctaatagtctccataatgtatctgcaacaaggaaagtaatgctattaagttatccatgaaggactcacctactagtaaaaaaaaaagagaagagagaaagaagggatacattcatgaaattcatgctcacaagaaataaagtgtatcaaggcaacaatcgctcatatagctaaagtaaaatacaatgaagacaatcatacatggtcaacttttgggtgctattctcaatagagatcttaaaaattttaactaagtgtatatcaagcttgcaatacatgaaaagtgtatacaaatgcaaaatgacattaaaaaagcaatcacaatcaacccccacaaccatggattggggtagtctagctagcaataaccccactcggggtaaagcaaagtatcaccctcaaaatatatatatctttgggtatacccgaacgtacttaactcagagagggtttactttggggtgattcacccgacctccatgtggtggtctcgaggtggtgtacccagaccttcacatggtggtctcgagacagttcaccccaaccacaaaccatcatcctctcagcgtgcaaacaaatggtcaactcagggtgcttggtcaagtcgaggtagaccacaccccaactcccaacatggggtaccccgagaccacacctcaaaaccccactcagggtattatcaaaaccgcactcgggatattctcaaaccccatctcagagtactatttaacaccccatttcaaggtgtggctaaggcccccatctcagggagaatcacatccaaacttgaggtagagttcaaccctggtaccccatctcggggtgtaccccaatgttacgaattttatgtttattacgcaagtatacgcaatcaagtagtatctcacgcaagtgagatcgaaccacagggaattggattaa

SEQ ID NO: 30642 - DNA, 1193 bp, Cannabis sativa
tttttttttttttttctgttgttggttaaatgtcattccattccatgtgctgatgtgccactatacctgtttgttgatctaataagcaagaaatattacttgaaatttttcagcggacaagccaaaatcttggtgtaggatacaatgccccggagtgcaaaagatcagcctatacactgaagagtgacgtatatagttttggagtggtcatgcttgagttattgacaggtcgtaggcctttcgacaggtattcatttaattattggtgtttatctagtctactaagtagtgtattcttaattagttttgtttctgcattttctttagttctagaccaagagcagaacaatgtctagttgtatgggctacaccgcggctccatgattctgattccctgacaaacatggtggaccctgctttgcgtggactctacccaccaaaatcagtttcacgctttgcagatattatttcccaatgcgttcaggtgagaaccaatgcagtatgcttgctacaaactggataattcttatggctttgcttaaacttttatttaaatttgtatttggtctgcaaagccctgatcaggcttggcatttaagttcgagctttgtgcaaggttccaaatgcacttctgtgtatgtttgagcttggtgcgatgacagaactgtctgctcattaattggtctaacattcatgggtttagggattattctttcttttctttttctcatttcatgtgctttgtctaacattcatctcatatgacacattagacggagtttgaatttcggccgcctatatcggaggtggtgcagtcattaatgcggttggtgcagcattcaagtgtgaatatgagagaagattttcgtatggatgactacgaccattgatttaagtagtggaaaagtggtgtatacattgacattgttaattgggaagaattaattaaaaggaaagctaatatttatcttcaccagttttgatttgagcccttcttggatcaaatttttatctcattattttgctgaaaatttgtacacatcatgttatggacaccgattggatgaaaaaaaaaggaaaagaggactgttcataatattctttaacccctttttctttggtacaatatttagtcaataaattattaggatttttcaaaaaaaaaaaaaaaaaaaaatggattgggatatgta

SEQ ID NO: 30643 - DNA, 3269 bp, Cannabis sativa
  modified_base (52)..(65): a, c, t, g, unknown or other
cataaaatgatttctgatctttactagttagtaaatctgattatattgaaannnnnnnnnnnnnnggcacaaaacccaacagcaacatgctcacaccctaaaatattttaggcctataagcctttgtacaactttttataaggtaatttctaaagtcttggctaatcatttaaaaattgtttgggataaaattatttctccttttcaaagtgcttttgtatctggtcgagtcatctttgacaatattcttattgcccaagaaattgtgcatgccattaattctaggaaaagtggtaagactggttgggctgctctcaaacttgacatggccaaaacttttgatcgtgtcgattggcattatttagagagtgttatgttccacttcaattttccacctaggtttgtttctcttgtaatgaagtgtattactactactaccttttcattttttgataaatggttctgttagtgggtttcttaagccttctaggggtattaggcaaggggatcctctatctccttatctttttatcctttgtgcggaaggtttatcctctcttctcagggccaaacaagatgcaggtttgcttaatgaaattactatctccaggtctgctccttctatttcccatttgttttttgcgaatgacagtcttatcttttgtgctgccaatcgtacttcctgttccactctttaggaagtttttaatatttactctagggcctcgggtcaagttattaacttatcaaagtcctctattctcttctctcctaacactcagccagatattcacactctttttttcaataatttcaatcttgaagatagaccctttatatgtaaatatttgggtcttcctcaatgtctttctagatctaagtatcactcttttgctttcttaaaagataaagttaattatgtgcttaggggttggtctgttaagtgtttttctagggcaggcaaggaggttttgctaaaggcagccatccaggccattcctgcctatgctatggcctgctttcgtttgccggtcaaactgtgtaagggtattgaagctgtgatggccagattttggtggggttccacaggaaactatatgaaaattcattggaaatcttggaaatttttgtgtcaatccaaatttttgagagggatgggttttcgttctttagttcattttaaccaagccatgcttgctaaacaagcttggagaatattcaaaaatcctgcctctcttcttgcttcagttcttaaggctaggtattttccccgtacttcttttcttgaagctaaacctggtcataatccttctttcacttggagaagcatattatggggtaaggacttgttaagttcgggcctaatttggaagataggtgatgggagcaatataagaattatggaggatcattggcttcctcacaatagggttaaactctttaactctgataatgtgcctccctccccttttctttcatatttcattaatagctctggggcttgggatgtttctaaacttaacaattgctttagtgaaactttggttaatgaaattcttagtgtccctattttgggtttgcaagataaggatgacattatttgggggcatgatagttctggggtgtttagtgtcaaatatgcttatcatttagccttctctcatcaggatatccctcattcatcatcttttaccaactctaagaaattttggtcaaaaatctggacctctaaaatacctccaaaagtgaaagtgtttgtttggagaatgttttctaatgccattcctgttgctttttctcttcataaaaatgtgttattgattctcctctgtgtcctttatgtgagattcaacctgaaactgtcaagcatgcttattagattgctccagatcgaggaaagtttggaagtcatcaaggtttgctacttattattatcaatttaagcatcttagtttatatgatttttttcttagtattacacatgaattggataaggattatatttgtatcttttgttgtttttatgggctctttggaatcaaagaaataatgtttttcacaataagcagtctcttcaaccgtatgatacttatgattggagtgttaacttttactttaagtatttggatatgcagcaagtcactgtttcatctagtgctcctaatatggatccgccagccttgcaagagttgcctactgagatatctttccaaattttcactgatgcaaccattgatactaactgaagaaagtgcagcattggggctgttgtgttgaatcatttgaaccaggttgtagctggttttgcaaagccttttacgggatgtgttcccccggtggtagctgaggctaaggcaattttgcaagcactacagtgggcctcctttattcatctccttgttgatgttcttaaaacaaattgtaaatctattgtagataagttaaattcttgtaattggggctctagtcttttggatgatcttctattatgtattaagaacttattatcttcctgcctaaatcaaagcttggtgcatgttaaaagggagtctaacactctagctcatagggttgctaagtggggttttgggcttgataatgagtttttgtggaatggttctttgccttccctttagtcttgtgtgtcttgtatgattcctttgtaatacacaagattttatttaaaaaaaaaacaacaattatatctcaaaaaaataataattgatttattaatatttatattaataaactaataaaaaattaaaataattagataattagggagagaaaaatataatttattacataatagtaaaatatcaatttatagatttattaaataatagtaaaatatcaattagtagattatttatgctttaataaaatattaaaattgagagaattaaggaaagaagagaaaaatagttttgaagtgattttagaatgacatgtcaccgttgttgtaaatatctacaggttaacaacaattaactctcaaaaaaataataattgatttattaatatttatattaataaactaataaaaaattaaaataattagataattaaggaaagaaaaatataatttattaaataatagtaaaatattaatttgtagatttattaaataatagaaaaatatcaatttgtagattatttatgctttaataaaatattaaaactgagagaattaaggagaaaagagaaaaatagttttgaagtaattttagaataccatgtcactgttggaagttattttaccaggatct

SEQ ID NO: 30644 - DNA, 3388 bp, Cannabis sativa
cacgtatggcattcacctctcacaaggtaaatacactactaatttactcaccaagacacacatgttgcattctcacaacaccccaactctcagttggtgaaaaaatcaacatcaatgatagcaaatggtttgattagcctacattctttagaagtgttttgggggggctccaatacttgagccttagccgctctgacattgcttttactgtcaataagttgagtcaattcatgcataatcctactcaacatcactggaatgtatgcaaaccggtgttacggtacttaaacgggacaattggacatggcattatgttcaaacaatccaaagaattcaatgttgaatgcttcaaggatgccgattgggatggatatgttgatgacaaaaaatcgacaattagttactgtgtttatttgggaggcaatcacatcacctagtgctcaaagaaataaaaagttgtcgctaaattataaacagaagctgaatatagagccctctcgcaaatagccctctcgcaaaggccactccattcaacaatttgcatatctaaaaataactactcgtcgttgatcaaccacgccaagtttgagggagcgtgtcaaaattaagagtggaccttacctcacctgatcatgccttgtgtgtggtgtgctggcatttttaattctagataattccccaatcatgagctgtcgtagaattgttctagaatctcccaaaagcatgggattcccttttctattgtagcaaatcattgagcaagggaatattttattgttagggaaaatattttattctttgtactatatatacacccacctattcgttgaaaataaaatattttttggtaatgtaaataaaaagatgaatggtgtattgtaaaaattgtgcctaaaatagagaattttttttttttgataaagtgttttaataaatagagtaaacaaactcttgggagtgttataatccactagaaacgattttgttgtgcattccaattgtttggaatctcatacaaagcgattagtaaagcagttattattattattattattattaattttattattattttcaaatagtaaacaaatagttattatgatgacagttatatttgatacttttagtgaaaaaattaatctccacatcttgaaattctttattaaattttggaaattaatatttaatttattttatcaatttttttattaaaattataatgtatgcatagttttattatatatgtcacaccatttttcttttatatagtaaattattgtatatatcatttgcaactaaaatcacagttattattgcttatatttgtgtcaattaattagtctttaaaaatactattttaatctttatttgtttaatatataacatgatatttattttgaattacttaagcaaagtatattttgtatattgatacatgagttgagttagatattattttttacttttattattaaataattttaagttatcaagttatttgagttaagttattgatgttattggatttataataattatttaattgattgaatgaatgctcgtggatctactacaaacactaattgcatttaacaagataagttattttcatattttccttttagtttttttcgattgaaaatattttctttatggtaactattgttagtaatttttataatttttatctattgatgcttattttagttatttgtagtaaaaataatgattaaatttacaataatatttatttatttattatttttatttttcatcccactaatatgtagtttgtttatgtgcagttaaaatactaattaatgtcccttcaagcttttacaaaaaggataacaagctttcaaaaaaaattacgtgaggctaatgacattggattgcaatctgttatttctttttcaatgaagttttcctactctaatgatttttaagatcattgttagaagtttttacaagtttatcatccagatttccaagagtgtccttaatctgtgttgctcaaggattagttgtgcatacttggatgaacaacttgtttggctaaatatgatgatctaggtttttgttggatgtatagaaatattttgataatcatgacatgacatgtataatatttatttgactagcttgtataacgttattatatttttaaatgattttattcattgctttaaaaaaaaaaatttgggtgtatttcaaacaattactcatgatttttgtaattaaaattaatcatgatttggataaaataaatacaagttgacaatatccaccaaatcggtaccaaaaaaaaaaaaagtacagttacagaacacatatacaattaaacaagtaaactataacaataatcaactgacagaaagggggaagccgatgccgtgacgcttggtgggaaaaacaacaaacaacatactgcaaaacacaccaatcgcaacgggcaacgcagtcagaacctcctgggtctgatccgatggcttcggataaaagcaactaaccacattctgatcaaacagcgcaacggccacaaacacaagcaacgacatgaaaccatgcatgaaatcgataaaacgaagacgatatttcaaagcctccgcgggcggaagtgttgtggtgtttgatccatcaatgatccacaaccctcgccacgtggcgaagccgtaacagagatcaccattcttgtccttgaaactatctgtgaagcagagcaaaaacgacgacgctccacatagggctacgaggcccaccgtcattgaccggctgaccgggtcgcactgcccttggtttgtgaaaataggggccaagagctggaacgccaaaaccgtcccggtcggtagaagtttggctaagtgggctgtgctttcaaacgtttggcttatggctttctggactagagtttttgtgggtgcaacggcttcatttttcaagagtgggagcttttgttcttcttcactgtcaacgacgtcgtttcttgaatttggcagcgattcaaccttaatttccatggttgtagtactactgctactatatatatatatgcttctcacaataccctttttagtgttaattattatatatgataaccagcttattttttcacgaaaactaagtaactatatatatatataaacctgcaatatgattgagtaaaggtacagagattcaatttgtttgtttaatattgttattttagtggtccttgcttgcaaggaataatcagattatatatctaataatataaatatatttatataaaagacagttttttttagtttttgaaatgaatataaaagatagcttgaagataatttgggttacgtcttacgtttatcattgctttgaaaagaagaaagagaaaaacttataataaaacaca

SEQ ID NO: 30645 - DNA, 2301 bp, Cannabis sativa
ttttgccaccaaaaataaagataagggggttaagtgtataaaaatcaaaacataagggggtttcgccgcaaattgctctataatattatattgcagctataagtaccatatattaattcatattgatttgaagacttataatggcaaatcttttgtttcctattgacctagattactgcccaatcgtgaaaagtttagaaagaagaaattagtactttttactgaccaaatagctagctagtaattaatgaatactactagacgtatcatgtgtaatcagagaacttttcacatcattgcaatgcagggtacttgaagtagtgcagatatttaattgctgttacaaaacatatatttatatatatttagaagggtatatataccttgacttttttttttgaaccctgttgttttggagtactttttctcaaaaaaaataactattaccttttttcatgtgtctcttaaaatataattaaactctattataaaggtatagtacgtttacataaccagctttgctagctaatacaaaacaaataattaaagtacttgattaacaaatttaactaatatatatcaaatttaatagtagtagaccatcacaaaaatatatatgtatataaatagaaaaaagatttagttaatttgtttaattaaaaaaataaatatatgtatatgtatagttggtggtggatatttagatgaatttaaatgaaggtcgttttcagattaaggtgttgtcgtttttgtgcatgttttgtacacgcattccagtactactgctgctgatcactgcatccccaaattttgtcaatatttttcttgaatttccctctaaattataatataatatatatcttctctattaatttcatcacttaataattggtgtaaattttaataaaaagaaaaaatcaaacttgttaaggctttatataggttaaccaagccccccaaattttcgcttgaacgagtgagctaattaagcttaatttattatttgataaaacaatgaagatattaagtggcatttggttatgaggaatgaaagtaaaagaataagaataaaaatagatttaaataaaatttaagatgcataaaaaaaattcacgtaaaaaaaaacacataaaaaattgataaaaaaattattgaattttttttttatcttgtattgaaatggctttctcttccattccaaaataaaatataatcattccattaaaaaatgataaataaatcattccaatactttataaaatgtaactaaacaaaaaaataaaataaaaattacttcttttttattttttaacaaaaataataatatatatttttttaattttcacactttaaaatagttttttattttatttttacaaaaatctacgtagcaacttacataactacacggaacaacttaaatcgtaattaaaatttacataacaacccacaacccaagtaaaatttactgaattccaatactataaatttaaaaaataaaataaaaaatatcacatgtatttctaaaaacaatccaatatacatgtcatgaataaggagtgattttggctggtctctgtcggtctaatattgataattaattgttgttgtgtaagtaaattaattagtgtttggaaaatatgtatgtatatgtatagtgtactaactacttatttgactgtaagaactcttacttgaatagtgatagttcgatcatgtcgtttctctcgatcggtcacggcacaatcttcaaacacgtgataataattaattgaatatgaatatatatattttttataatttattaatatttatttgcaacaatcaattagcatatttatgtaaatttattaaaagctaattaattaattaaagcaatgggtacgtatattattactaataaatttctgcaccattggcagactcagctttttcccgccaaataaaacaaacattctcctccaaacagctaaaaatatttatatatatgagaatctttaataaactattattatcaactctctcatctcatctcatcatctatatatatacatattacacacaggattatatttatatatatgtacgtgaagttatcatgcatgatcatatgtacttatgctactatatatattaatatttcagtaccatgaatacatctatatattgatcaagcttttagaattgtatttttagaagtgagaatatgaaactgttttttgtcattttaaaatttaatggtgtttggcacaaattttttaaactattttaaaaaaatttcttactaaaaaaaatcaatat

SEQ ID NO: 30646 - DNA, 1189 bp, Cannabis sativa
  modified_base (1105)..(1126): a, c, t, g, unknown or other
atttattgattaattaattaagatctatatatataggagaaatatgagacggtgacatggcactctacaatcattccaattaccttaatctattctctccttaattttctcattttttttttaattttttattatatttttaatttttttattaggtttataaaatttattgattaattaattaagattaataataaaatctattctaaaattattccaattacttttatctattctctttttaaatttctcatttttctaatttttatttggattataaaatttattaattgattaattaaaaaaataataaaatctaaattattaagccataaatcggctgtttaggtttataaaatgaccatctattttttttttttaataacttaacttagtaatattcacacaataatcttaaacctatataaatgcctacttatctcctctccaacaacactcttcctctcccattctttttctgtgttagtttcttagctagcttgtagccaaattttttcactactatttaaaaacatcatataataatactacatcttctatttttctttcaataaacattatattttaaagttatatattagtttaacgcacatatttattcatctattttgtattcacattaaactagaaaaaataacgggctagtttcacaaatatgcattatatttaaaataagtatttttttttatctaattcttacccattttcaataatacgtttacatttttttttttttttgtagatccaatatttttattttctttttatatttctcaattattattaatctttcgagtttagatattcttcatttaatattgtatgagttctctatgtatttatcaatttttaatatttcatatatctattcattctttaattctctagatctactattacttaaagtgttaatttttatttaaaatcattcaaaatacatcaatctattattttttttttaattcttatatttttttttaaaaaattattggtaaggcagtttatttttttttaaaaaaaaaattgagtatgagtaatcattacaaaaaattgctagtaaaaactttttagtcacaatataatnnnnnnnnnnnnnnnnnnnnnntttagtcacaacaaaatgttacttctaactaaaacatagtatttagttacaagttgtcactaa

SEQ ID NO: 30647 - DNA, 1977 bp, Cannabis sativa
  modified_base (862)..(862): a, c, t, g, unknown or other
ttttttcttagttttttatgattgcgaaacatcactaaatgtttctatatcgcgaaacatcactaaatatctctaattcacaacatcgccaaatttcgcgaaaccacactcaaattttcatgatgattagcaatgttgtgcattttacagtctcatatcacaaatacatcgctaaatatgcaaaacaccgtcaaatatcagtaatcatcgctaaactttattcctaacctccgatttggtctatcattgcaaatatatcgctaaatattacaaaatattacaaaaaattagaaaaccaaaagaaaaaaaatgcataaaacgagagagactatgagggaagacaatgacgggggcttgcaactaggattctaggtctgtgtgttcaattgtagggcatctgggtcgaggttcaatgccggagagtgagagagttagagagagaattttttttgaaatgtaagggtatttttcagaggaaaaggtattaaaagtatagatatactatttctaatttaagcatactaagtcaaattaaactggccaaaaatatttgagaactatgtcatgcgctacgtaaacaccaaatgatatttacataaaagtttaatttttataattaagatgaatactaatcttacatttggccaatttggcacaactgtgatgtggggaaaaacagttgtgatgtagggaaatcagttgtagcagaactatagaaaaaagttgacctaagtgtttggtaaattaaaaattttaaaatgctgcaagttagtaagattcgattataataataatattttaatcgatttcattaaaatcacaaatatatatatatataaaaaatatgttatataaaattttnttttctatatatttttaattaattctttttttatggtataaatttatatgcatttgacaaaaataatttttaatatgattaaattatatttttatcaattgtaaaaaaattataatttaaaagaaacttaggttgatattgtttgttaatagtataaatataaatataaaatatctcttaaaacaaaataaaaaattagaaatttaaaattatttattttaaatattttttccttaaaaaaaaatatttttatattttttgtaatatataataaataattaaataattattaataaaaaataacttattatagtcttttaatcaaagcagttttttctaaaagttgggttgtatcaactttagtttttagttgtaatttttccataaatttttcaataagctgctttttaactacttaccaaacacctttttgtcacaattttttttgagaagtagcttttagttttttaaaaaattgtgccaaactagcccaacaacatcaaaatatataatgattaaattcttcttcttcattgacatctcttttagcttaaatttttgatcaatgattgagtaatctgctggtcaacgtttaccaactatatatattgattagtgaattaattagtttttctttttatatatttattcttctaatacaatttcttatcaaatgatagtgcatcttgttgccacacacaccataatatatatgttctaaataattaatacaaatatatatgtttttttttgcttggtaaaaatacaaaatatatgtatatatggatatgccaatctttgtcaactccacttacgtgccattgtggcattgttgaatttagaattgtttagaataatatgcaataatactaaaatcttaagtacatatgttataaatatatataagcgttggaccaattaaaatatgcatggtacatcaaataaatataaagttatatatgatattgaaaaaggggccaaaatcttgcctttctttttttttttttttttgagttttggggtgaattagttaaacacggtttctctctctcagctttatcatgttcatcctcttattaaattagtcttatgacaatacatagacaaacattacc

SEQ ID NO: 30648 - DNA, 2529 bp, Cannabis sativa
  modified_base (27)..(30): a, c, t, g, unknown or other
  modified_base (280)..(284): a, c, t, g, unknown or other
actaatcagattgtaaagagttttatnnnnggcataaaacccaacaatatcaacattagataattatttttttatataaatcgtaatttaaatttaaattagatgttaatttaattaattaattatactttatgataaatttattagttatattacttaaaatatttaaacttttatactttgttattgtaataaaattagttatatatatttttttataaataaatttaaggggctttttcatttttacacttcaaaatattttttttttgcatttttnnnnnattctacatagaaacccctattgtaactagcgctgcaacttaaattgtaacaaaaaattgtatagaaagtcctattgtaactagcgttgtaaccactttagaagtccaaaccgtaaatttaaaaaaaaatgttaaaaaaatagtatataagataatatctctaaatttaaaattaaatcaaattttatatatttaagaaatataattaaattgtattaaatttaattttattattactatttaaattaataattaagtaaatattttataagctgcaaatgaaactttcctatatttagtgaatggaaagcctaggggttgtgtggtgcctacaaggggattgaggcaagggtgtccgctctctccttatttgtttcttttttgtgcggaggctttgtcttccctgctgcgtcaagcggaatttagtggtgatttgatggggtttcggtgttcccgttctgggcctcgggtgtctcatcttttcttcgctgatgacagtttgatatttggtagagccaatggaagggaggcggaatctatccgtcagattcttcagtgttatgagtatgcttctggccaacaagtcaatttcgataaatctgctatcacattcagtccgaatgttctacatgcggatcgtgcaagtgtattgggtattttaggcttagggtcagtagccactcatgataagtatttgggtttaccaacagttattggaaggaacaagaagcggacttttgctagtatttgtgataaggttcaaaagcgagtgcgaggatggaagcggagtttcttttctgctggtggccgtgagattctaattaaggctattctacaagctgtcccaaattatttgatgagtatgttccagctgcctgtggcgacgtgtgataagcttcgttcaattattcttcagttttggtggggtacgaagaatgataagcagaaaattacttgagtgaaatgggagaatgtgtgctagccgaaatccaagggggccttaggcttcaaggatcttgtgctctttaatcaagctatggttgctaaacaagtttggcgcttgttacaatcgccaaactcattgcctggccgtgttttgaagcataagtactttcccaacacgtctattttggaggcgaaagatcgacaaggatcgtctcacttgtggtcaagtttgatgtggggtttggaattattgcaaaagggaatgaggaaggttgtgggggatggcctgagtattaatgcctttcgggacccttggcttcccagggctataacgtttcggcctatttcgccttctcctcctgatagtgtgatggttaatgatttgattggcgtggatgggacgtgggatgtccactctttgtctcaatactttttggggatggatatcaatattatacttagtatcccgttgcggagtggtctctgtcaggatcgatggtgttggcattatacttctaatggttgttatactgtcaagagtggttatgcagttgctcttgaaatgtcgagtgaaaggaatggtagttcttctgtgaatcaagctcattggtggaatgggatgtagaatttgagggtgccacaaaaagtaaagatttttctttggagaatgtatcatcgcgctcttccgactaattcccagcttatcaagcgtaagcttcctattcagccgacttgtcaaaggtgtggtgaggaaggggagactccggatcatgctttagtcttttgctcttcattgcgacctttgtggtctaagcttcggatttggaataggctaactcgtggtagcactgggtctttagcggaattgctggtgtttctatttgaggtacttgatccgaatacttttgctttgttgtctatggtttgataggaactcggtgttgtttgggaaaaagccatctagattggatgtgcttgatgaattagctcgggaagcttttgaggagttttagggggtgggtgtgggggttggaggccagccgttgggtgcttctatggcttgtggagttttgatgggggtcgggtatggtgaggtggggcagggagtgatgaggaggggtaggtgtgaggagaggcgggtccattggtgcccacccgggataggggagtttgtgttgtctgtggatgcggcggtcaccctggggagggggttcgtggggtttgggggagttgttcgaggtggtgagggggtggtgtgggcggcctgggctatgggtgccgtgggggatttccaagtggc

SEQ ID NO: 30649 - DNA, 1947 bp, Cannabis sativa
aaaataaaatttataaaacaaaaaacagaaaaacaatgccaacccttaacttttataatgaaattatatctccaatacatatttatttatctttttgggaataggtgtgtcctagctagctatatatttaaatgaaaggagcaatcaaatgttattggacaaacaaagaagaaaccacatcccaaagttgaattattattattattgagtctataacgttaaagaaccaaaagtagagtcatttatttttatttcaagccaacataaatatacatgtacaataaaatagaaaatggacaaataacagaaatgacaacctgacaaatggataaaatgaaagaaggctcaactcaaaggacatgtgactatgattgttctttactttgttctttttggttttgtctattatattaattaagttatcatgaaactaatcctcatcattaattctcaccaaaatcatggtaaccatgtgtatacccatacaatttcacagctcaaagggacactacatgctattgataatcttgataattataataaccttaaagaataattcattgaaatacccaaaataaaacaatacccataaatataggccattatgataccctcctagagagattgcctcccccatgacagacacaaaagaataaagaacaaccatattttgatcattaatatataatatcattcaattggattttgctaaaagatactaccggtatttagtacttttctcagtgtcatatcattattagtataattaagtattcaatctcatataacttaaagaaataaattttaaagaatattgttaaccaatcataaaacgacatctatagaaagtattaagcactattaatgtctaataacaattctttaatcaattataccccctctctcgacacgtaataatattattgaataaattttgccatgattggtataataacaacatatattatatatctgtttctcactactagaaagtaaaacaaagcatttagtgtatatataatgtttattgattgattacaagaacacactttctttttctataaccaaatattgcatttcattcctttgttcaaattcaaaattattttgtctttaaacacctttccatatcatctattaacttaattaattaacatttcatttcttgcttttcaagtattttttttctttagtttaaacaaaattatgtgttatattcctatcctatgtattggattggttgcaccaaacgtagagttataaatttaatttatttttaaaaatatatatttattgatgaagaatgagctcattaaatccaaagcagatactaattattaaatgacatagtgaaggccaatttggagcaagagaggtaggtgctttatatgtactcaaaatcactttttttgcattataaatgataagtaagtattaattgatgtaactaattatactgtctcctctattattcttgcaatgaacgaaatataatgaattggcccacttagctctttttttaggaccatacttaacttttgtgaagtgaaattcttgttgttattataaatttataatggtcttttgaggcacttcttgtatatataaaagtatgataaaatataagaaagttataccatttttgtatttagtgtagattgtttaaaagttgtaaaacttattttggagctaatagaagttaagatttaccggttatgggaattaggattattctcggattattgatttaaggtatttattgaatgttgttgtcatgacacaggatccgagatcgtcaagctttgtttccacttaggtcggcatgcacgcttaatttctggactgaggtaagaaaagtttatgcaccactaaatggttatataagaaacgattataatcgttagtgtctcaattaagattgtgattaatgatatgtaaatgtgtgac

SEQ ID NO: 30650 - DNA, 1757 bp, Cannabis sativa
gataccgataatctccgccatggttggaccaaacctgtcctacctagagtaaaggcttcaatcacatgaccggtattgtccctggctatacatcccaatccaaaacgtccttcttgagtaaacaaagccccatctacattcaccttgatcttgttcccattgggtctctcccattgctcagttttaaccccatctgtagcaagatgagatagagaaaaacctctccgttcttgagcaattttatattgatctaggcatgatcttgcagatgcaactatacttactgcattagagactttttgttgtcaaaccacttcgttacgggctcgccaaatagcccacgccatcactgctaattcctccaattcaacaatccttccacgatttacagcccccagtagccaagtgtaaaaatcaacataaaaaacattaccaacatccactgaagatctgttccagcaggatctcgcaacagggcaagccacaagtgcatgaaaaatagtctcatcttcccctttgcaaactggacagatgggactaagaggaacatgtctcttaagaagttgaacacatgtcggcaaacaaccagaggcagccctccacaagaaattacaaactttaggaggcactttaagatcccagatagatctccataaattcgtaggttgaacagtaggccaagcacccttaagcacttgaagatttttataagcactttggaccgtgtaatccccatgtttctcaaacttccaacaccaccgatccgtgtcctaaaatatttcaatgttcataatatattaatatttgtatgatttaataattaacaacctttttctaatatttcattggcaaagtcctacttatgaaagtagtctttaacatttttctctctaaatatttatatataattttcaagacaaatgattaggctaagattaagacttaaaataaaagtcccatttcattgttatctttattggatcccacatattaatatgtaaaaagtactagtttcacatatttttatttaaacaatataaaatattactgatcaaactcaaattttttattttattaaataataatttaaattatattttttaaaatggtacagaataattttttaaattctatttagattatccatcaaaatttcaaattattttatttttatttcttgcagcgcaaaatctgtgagcctttgacttcttattaagtacattttgttcctatttttttatttggtaataatagaaaaaaaaatccttaatattgcatacttctctacactaattgtgaagaatattatttttagttataacataaaaaaaccttttcttttcttggaataaaactatgtttgaccatagatatttattttttctaacaagatatttagatttgtctactttattgtcattattatttcttttgaacaaaattattattatataatgaatataagattttttttttcatctaaattataatttttgtagagttttgtttatgaatattttgttactaaaattcctttaacattatacaaattattataaatattcatgttcagttaaattttatttgttcatttttttaaaaataatttacttatgtaacacaagttataaatataattacggtataagaatctatttaataatttttaattacttaaaatttaatttattatttgttgtgtgcttttaaatttagtcaaattaacaattaagttaacataatatcaataaataaat

SEQ ID NO: 30651 - DNA, 8744 bp, Cannabis sativa
tctctctcttataaaaaaattagtagcattcctcctatatatacctctctcttacgtgattaataaacgtagtattttttaagatgttaaataatttgcatatttcaacgaggttgatatcttgttatttttcttttgaatttataactatctttttaaaactttattgttattttatagttattttttattgtttttaggtgtttttttattgtacagttgttatttattctatgtatatttttttaatagtgtatatttttagtttattttagacaattttttttgttatatatgtgcgtttattttgttattttatgctattttaagtagtttttagaacatttttttgcaaaatttatttagtttattcatgtgtattttttatggtataaatttttttagtttatttttgataattttttgttattgtatgtgtgttgctttgtctatgtagatatatgtatatacgagtgcacttttaatggaaattaccatgaataggtaatattagaacaatttgaatttttacgattaatttttttatttaattagaatttttttttatttttatattatatggactagattaattcatcaactgaaaaaaaaaatattttgtttatatcaaaaaaaaaaaaaattgcaatgatactaatttttttgttttcgttaaagggtcaatgatacaaaatttaatgcaattaatttctttctctcaataacatgtccattattagattacattttatttttgttgttcaaggaaactactaaacaaattaagatataacgtttcaatatttgatatatattttttaaaataaaataaagaaagcatcttaataaataaagtaagagagaaaaaacttgtcctttttggagtttttattattattttttggttacatttttctgaaactatttttataattataacttcactctctttctctctcttcaagatggctttgcaagtcctcccataattggctcttttacacattttctctcgctttctctctcactttctctctctacccggaaaattgagcgtccttgttttctctatctagatatgtttgagtttaacactttgtgctgtctttaaagcttttactgagatctactcctactagtactactcctgcctctgtaaggacaactgagatagagattggcagagacgaaaattaagattaaaaaggaaacaactttacaaggtaggctaaacattttttattttttattttttatttttttcatttaattttcttttccgaaaaccctaactcacgagtgggttcttctgtacggaggcaataccctgtttcttgtttttctggtagtaattgatttgattgaactgtcaacatattttggaagttgtgctaatgggttttttggggtttatactcttcttgaggttgcgccagatgagatccatggaagctggatttttgagattttgtattctggttttggattacacccttttttgggtttgagtttttttatcttcttatgcaattttaaatcttggttattctgcttttttttctttgaaacatttgtcatcttgttttctgctatttgttgagtttgtttgaagatctgatgtgggatcagtttggtttaaattcaatatgcttcatattagatcactgttatgatagatgtgagggatatttgtgctaggtttgctgttcaagtatattgtttcatttcagctagataagaatacttgaagtttccgaaattctgcctggttaattggctaaaggtttttttgttaaactcacgaattgatgttcttggtgaagctcatgagtagtcaacatttttatagttattgattgataacaatacgttcatcatgctgcttcgtttccttattatttttttttaatagactttggctttacttctatgaagtttgactttgtgatgtttcttcaatattaaatggttttaagacctaacctgtgtgtctttgccttattaaacactaattaacttctacgtttttttggtttactttgtttgtttttggtatgtaactgatggaatgtattgaatcaggattggcaataaagctgggacaaatcgtgtcctttaattgtggttgtttctgtggaatagattcagtaaaagagcagagtttcggctgttctctgcaattcaagttgttgacatatagtaattatgttgaggagatgaataaaaagtcagttggtgcttcaaagttactgtacaactgcattgaagtgggattgattgagattatcagattggtatctgatgatcacagctagtgtctacagttgttgtggtgactgttatgaagaaaatctagtaggtttggtccgagcagctgtgttgcaacagcctgtgtaatcgctctgtttggtcattgctggtatgctggtatgcttgttattttctccaagggaaatggactagcacctttttcttaactgatttatttcaattggtcataatagtcactggtgctgtgttcgttggaagcacgtttaaaagacttatgagacttagcttcttactaaggagggtcctttttgaaagtgcgagtcaagtattatattgtacgggttgttttgtgttggtttaagtgtcagtaaatatggaaacttttgttcatcgcttagctccttttgctgtacctgctcttctgatttctattggatatgttgatcctggaaagtgggctgcaaccattgaaggtggcgctcgttttgggtacgatctgttagcattgatgcttgtttttaatttggctgctattttatgtcagtacctgtcagctcgaattggtgtggttactggaagggatcttgctcaggtattgtttatgtctactgaatctttattaaagatataactatcaggtgtattagattggggaggataaattgaccagctgattttgctattattgtgaagattgtacattaatgggttgtctattgtgaagcttaagcttatctgtcttatttagtttcatttgtttaattggtccactatacagtggactggttgaggagtcggtgagcactctctctgtattaactggataaatatgcttggacactttttaaccttattatgtcaatagatatgcagtgttgaatacgacaagtggacatgcttattcttaggagtacaaacagagctgtctatgatattgttggacctcaccatggtaattatgtccttgataactaatgtattgatgatgtgctctatcattgtctcactctcttttcacctttaaattatggtagaattctaatagcatctgtaatttgtagtacttatgtaattactcatttacttttaatctttgatgtatgattgttctacttttactaggtcttgggcattgcacatggactcaatcatctgtttgagtgggacttgttcacttgtgtctttttgactgccattgatgctgttttatttcctcttttttctaccctgctggtaaggatatttatggtcagtgcacatttatgttataataacatttttcgctattgtctacaaattttttctgtttccttccattttcaggagaattgcaaggtaaaattcttgtgcatatatgtagcaggcctcatattgctttcgtcagcttttggagtacttgtcaatcatccggaaatgactctttcaatgagtgtgcccataaaattaagtggggaaagtgcatttgctttaatgagtcttcttggagcaagtataatgcctcacaatttctaccttcattcttctattgtacaggtatttatctgtgtcggacacaagtggataatattctgcaaaataagctttgctatgcacatgtagatgccttttatgtatgtcaattgttgttagggttgataacttcttgtcggtgactcagtgtccacgtctcttgtacttcgtgtcgttattaggttcagtttcagaatcttttcaatgaaaggatgtttgacctgattttctcttttcttttgcatgtgttattgtgcatcataatgtggaatttactttgggtgtataaattactagcttatgttttattttcacccttgtttgggtctttatacatgtaaatttcaccctttcttggagctttgattgtttcttgccaatgatgcaatgcatgatatcatcataggagaggagttgtttttgaaggtggaagctattggtgggaaaattcatagcctctaaaattttatgttgattatcatgtcaagttatacctgcctttcaccttattcacaccgtttctttatgtacagagctttctattattaaaaatgagtaatgatgtgtacactcacacaaactcgacacactttcgtgacaattgacttttaacaagtgggacccattttaaatgaatacaattggttaatttttcttcacataagaatgtgtgaagtttgtgtgtacatgtgtgattccttgatccacaaaaatttaaccttgaaaaaatataaaaaaaatgtgattgagttatgataatatgttttgaatttgtctcgacatattagatctgagttacagaaatttgttctttttgccccacaatttatgttggatacatgaaaattattatgctcactcgccttattttcacagcaccatcaaggaccgtcaaacgtttctaaggatgccttgtgtcacaaccatttttttgccatcctatgtatcttcagtggcatttatgtggtgaattatgtgctgatgaactcagctgcacgtggtttctacagctcaggcctcgatttgcttaccttcaacgaagcattgtcgctagttgagcaggtctggatttttttccatcaggatcttttcatgttaaaacttgacaattttaatgaactcctttaaaaatctttctaactcaatacaggtttttaaaggtccaatagcaccaattgcttttctattggttctgtttgtatcaaatcaaatcacagcattgacttggagcgtgggtggtcaagctgtgttgcatgaattcttgaagctagagattccgggctggctgcattgtgctacaatcagaattgttgctgtaatcccagctctttattgtgtttggagctcaggggctgaagggatgtatcaattgcttatattcactcaggttttagtagctttgctgcttccatcttctgtgatacccctattcaggattgcaacatcaagcccgataatgggggtccacaaaatttctcagatgtttgagtttctatcccttgtaacatttattgggatgcttggcttgaagattgtttttgtcgtggaaatggtgtttgggaatagcgattgggtagttagtttgtggaatgtgggatgtagtatgtcagcttcctatgcagttctcctgttcattgcttgtgcaacattttgtttgatgctctggctggctgctacaccattgaaatctgctactgattttggtgctccggtgttgaactgggatttaatgaaggttaaacctgattcatttacaaacaaagaggatattgacataaccaagagcagatatcatggagaggcacatgttgagaaacaagagccctcaccagtcttagggaaggctttggatagtcgatctgatagaactggtgagagttttgattttaatttacctgagaatatcatggagcctgatcaggatattcaattgagcactgtagaggataatagttctattaatgcgtattctagctcttcagtgttcgatataaaggagtcttcaccagtagcagagacagttgctgtctcgactgtagtgagtgaagtttcaaatatcacagtaattaagaacaatgaattaagatcaggtacaaaggaccctgttgaaaagattgttggagttgaagtagatgtacaagctgataaagatgatgacgagggagacacttgggagaccgaagaattatccaaaggggttcctgggacaccatctacgcaatctgagggtccaggatcatttaggagtctcagtggaaagagtgatgatgggggaaatggtgctggaagtctttcaagacttgcaggactgggtcgtgctgcaaggcgtcagctagccgcagtacttgacgagttttggggacaactatatgattatcatgggcaagcaacacaagaagctagggcgaaaaagctggatgtgttatttgggatggataatacaaaggctgcctcttcctccttgaatgtggataccactacaaaagacatttctggatactttccattggttagaggatctgatcctataactaactcgagtttgtatgactctcccaaacagcagagggtgcaaagcaatttagattcacaatatgggggggcgcagaggggacagttcccatcagggaccaaccacatgcaaatgctggataactatgtgcaaaatagccgtaatgctcttgattctagtgagagacgatttttaagcgtgcgcaacctaccatcgtctgagagttggggagattatcaaccagctacagtgcatggttatcagtttgcatcttatgtcaatcgattgggaaaggaaagaagttctgatcacttgaatggtcaattgcagtcaccagcctttaaatcctctgccattggttctggaaaccacagagattcatttatattcgctacggggcagaaattacaaaatgggttaagtaccagtcaggcctccaatttgcagaatctactagcatctcgaaatagttcactgcagactgaacgcccatactattctcctggacttactggtactgctgagaatgtggtaaactcagccaatacgaagaaatatcatagtttgcctgacattcatcgggatctgcatgcctctgataagattcctcagtggcagcaaagtctcagtgggtttggatcatcacttggcagaacgggttatgaacaatcccagtttgcaaacactggagtgaggacaggagctcctttagcatttgatgaactgtctccatcaaatgtctacgggggtgctctgtcatcaccactaaatactagttatgatactgggtccctctggtctaggcagccttttgaacaatttggcgtagctgataccaatcgtattgttgataatggagctggaagtagaatgggtactgtaaatcaagatgctgcttcctttgcaaatgcagaggctaagcttcttcagtctttcagacattgcattgtaaagcttctgaaactggaaggttctgactggttgtttagacagaatgatggggttgatgaggatcttattgttcgtgtggctgcaagagagaaatttctttacgatgctgagaccaaagatacgaattttgggactcacatgggtgagaatcagtactcatttcctgagaggaaatattcttctctcaagaacatggattcaagttatccccattccacattatcctctgtcccacattgtggggaagactgtgtttggaaatctgatttggtagtaagctttggggtctggtgcatccatcgagttctcgatctctcccttatggaaagccggccagagctatgggggaaatacacttatgtactcaatcgccttcaggtaaatattgaatcccgtactttatacaatgtaaattcgcaataccatgaactctacgatttattggtgataatttctctaccatgaaagtagttattgtttttcacaatacatttccaattccacaatgaatagttaaatatcattcttccgtttatgctgaaagatttcctgttgcatttctgacctatttatgtactagtttttattatctttgaaatgtggataatgcattcttagcaatctgaacttacatttttcatcaacaggggatcattgatgtggctttttcgaagcctcgaacgccaatgaccccttgcttctgcctccacataccagcatcagcacaacagaggtttagccctcctgtcacgaatggaatgttgccaccagctgcaaaacctgcaaagggaaaatgcaccaccgcagttgtgcttctagacacaatcaaggatgttgaatttgcaatctcttatcgaaaaggccgaacagggacagcagctggtgatgtagctttcccaaggggaaaagaaaatctagcatctgttctcaaacggtacagacgaagactgtcaaacaaagtgatctgtgctcctgaggggtctggttcgcgcaagatgtcaacttctgctgcaccttatgtttcttaactttgaactgttctgttcacctctcgactgtggtcaaatattgagctatatgattttgggaaatagctcatgttggaatcttcaactctggaattgaatatagagtggtcggtcggtggtgattgtattcggaatcttcctctcattatgtatcaaaagtcaacaacagctgcaaaagttttatttgcatgtaatgttaatgtatacataggataagaatcactggacatgtaatttgcagcagaattaaaagaaatgggttagaaaatggtggtggaaaaaggaaagaagagaatagttgataatgccaatttattagtgttggttgcttatgtgactgttctttacactaacataacggcatatataaaagaaaagaaaaaaaaacaaaaaaaaaaaaaacccaggtttggctttcttgtgtttcaagtttcaacaccgcgaacatgctacatttgtctctgttttctttt

SEQ ID NO: 30652 - DNA, 4463 bp, Cannabis sativa
attgcacaaactcttatttacatcttataagcaccaataatggcctcaataatttctatacagttatctacaaactgtcaaaccattctctatcattactttttactttttttggcattactaccaatatcattctagttttaacattcttcttcagctgctgcagaagctcggctggttgctgagactttccattccatatcagattatttctccttctccatatcaggtacacaagtgttgttatgcatgcagctttgatccccttcttgaatttagattgccttgctttgcgtatgatctttatcaaattcctcaaggtatctgcctgagtgtgccactgaagccattccttcaacagttgaaagcattgctgagaaaattgacactgaaaaaacacgtgatctatgttttcttctgcaatattgcagcaggggcatatgttcgaatcaatcaccttgtattttcataacctgtctttagtcttcaaccagttcaacatagctaaccaggttagaaaagtatgtttcgggatgttgagccgtgaccacacttcattactccatttcactctttcatgttcttgtgccatgcttctataaccagcaactactttaaaattagctcttgtaaattcctctctctctctcttgtacttcctgtaatcacaggcccctcttcaatcaccactactttaatcttcttcctctcctgcattttgtgccccaacaggtctttatagtactgaagaaaagctgcagtgatcttatcatgatcctcaactctttcccctctcgcattaacaatagagagaatcctattttgtcttcttctttctctaacacttgagtggaacaaagcagtgttagaatcaccttcctttaaccaattagccttagctttttgttgcagaaaagatgataacaccttatgtttttctgcatataattcccgagcctctctctcttgatttttccattcaggattgagaggatcacttgccaggttttgttgacattcaatcatccaatgtttttccttcaattcatcactatatacattagaaaatccctgtttgttgattgcattcagcaccggtttaaggcttcgtaacttcttaactacttgaaacattttggtaccaatgactagtttgcaccatgcttcaacaatttgctcatgatattgagggtaactagaccacattcgaaaatatttaaacggtttcctaccacttggaggcgaaggatacaccgtcaatattgccggagtgtgatcaaataacccttctgcagtaaaaattgcttcagcatatggatacattcccagccagctttgattcgccaagactctatctatctttggaaaaatcctatcatccccttgttgctttttactccatgtgaagtagctcccaccaaatttcacatcctccaatttacaattcagtacacagtttttaaaagcagtaggactataatgtgcccttttgccaatcctttcacccttctctaaaatatcattaaaatcgccaagcacaatcaaaggttcattcgttttcagcccaactagttcatcccaaagtcttctcctctcttcttccttattacaaccatagacaaaagtgacaagaaacttattccttttgtccacagtagtaatagacagatgtattaattggctagagcaccacaaaatatccaccataaaactcagcggattccaagccacaattatttgacctcctttatgccaagcattattcgctgtaaaacaccaattagaaaacattcgaacatataaagctccaagacttggagccttaactctcgtctcgaggagaccaaccaaaccaacattatttttcgcaatgaattgcttaacttcattttgtttatgttgattgttgattccccggacgttccaacttagaattttatccattgcattgaggaggttctccccctcctccagttattaccactgcaagcctttcttcatgatcccgaacttcaaattcctgtagcttttgtggtattatcattctgaagtacaacaaactgattcggtgatgatggatcagcaggagctgtctgctctttaggtctccaacccttcacaacctgcttaaatccctcttcatccactactgtcttcacctcatcgttaccctgcctttgcttacctttgacaacccattcttgcttctttgcttccttctttctgcactcctcagtagaatgccccattcctttacaatgcttgcaaagaataggcttccattcatatttaacaatcactgatgcatcctccccatactcattttcaaagtagatcaggccaggaaattcttgttccagtgaaacctctatgaggattcatggaaaaagaagtttatccctttcccttgtaacctcatccaccattattggttttcctaactgacctattatcttaaacaatgatttttgaccccaatatttgagttccaaatcctctaattggatccaaatgggaatagttctaatatcttcttttttgagattaagattgggatcccaagccttcataatgacagaccttttattaaagaagatatatccaccagctagaatctcatccctatccttaatacttgtaaaacgaatgagaaaaatgccataagaaatcatacctatcttgtccaccttgtccctctagatccttcttgcaaagccttcaagaacagatagtggtggattagcaccaaggacatagcacacaattgctgattgccaatatgacacttcctcctctatatcatccatagtaatcttcactttctcatccttcttcgaatgaacaaatgctgattccaagctctgcattactggttcagctcgcagaatcggaggggttgtgttaatgccttttgagatagaattctggcattccctgtttgcagcaaggaaataaccaaaatcagcaactatctcatcctgttgtttgatcaatttcagtgatgaatctggagataacgtttgcaccagatccacctctgttctgtcttcatcttcatccgagaattccatgggttccacaccaagaatttcttccattgatttggtcttcataacatcagcagatgaattcggacctttctttttaggttttctattggagatttttgactttcccacagtcttggacctcgttttcgccattgcaccagctcagagagagctgcaaggaacaaagagagagagaaaattgattatccattcagcaacatattaaagttataaaatctttaatcaatgattgctagtacagttcactaatgcccgttctacggtacaagtaatcttggttcgggttactgaagtagtgagatatctaagtgaaagtgttgtacataatagaaattatatgacaaggacctatatgaataaagttgtctttattaacatgtcgtttaccataaagacctaattcatatcataacgatgatcaatagtagatcgacctaactcctgagttatcatgaactcctattcatgttattagtttctttgattcgctcgttaaagtttctcagaaaagatgattcttaaaacttatgttttgagaatctaataatatgatggttggaaaaatgatctacaattatggaatttttactttcctaaggaatcaaatgtcgattctattcatgtgttcattttagtactagaaagttgcacgcaaattcagatgaaattttgaattatatttccattagtgaattaatggaactaaaggataacaaagtaattaaaagggtaaaatggtatttgaccaaaactaattacgaccaacacatggaaggctaattactgtaatttcttatatcaatggacactgtagttaaactcagtaaatagaatgctataattactaagagttcaattttatatttatattggaataatcataaaattaataaacaaacattatttagttaatgggtcaataaatccatattccaaacattagtatcataatttctattgtacacccaagcaaggaagtcatacattcatatacatatatcgtcctaccttacattcaaaaaaacaataaaaaccgcaataaaactcttacagctttgaatatttcaaatgaagatatatagacaccgaaaaagaaaactcatagatacataaatcaaggttgagaaaaattaaagctactaatataaattgttaaaaatttataaagaatgatatgaattatatatgatcaaatataaatgcgaaataaattaaacatatatgcattatgaataaaggattgaaatacccttaattattaatttttttatttttaatcccatatgagttttgaatctgcaaaagaaagtttgaggagcatgatttggtaaatatcaaagttcggggagcatgatttaatatataaacaatcactgaaagagtaaaattgaa

SEQ ID NO: 30653 - DNA, 3079 bp, Cannabis sativa
  modified_base (3025)..(3030): a, c, t, g, unknown or other
gacttgtttgtaatttcaatgccataatttatattatataattttttttaattcaaattttaatggtaattacagttctgggacttcagctggcgaaagaaaactcatgccgacgattaaggaagagttggatcgccgccaactactatacagcctactaatgccagtaatgaacctgtaagtttcaagacattttaattttaatttaatattatttaatgtatttaatcgatgaaaaagcgtaactttcaagtaattaatcattagttatttatttttttattaacttgaattattatgctatgtacagttatgtgcctggattggacaaaggcaaaggactatattttctgttcataaagtccgaaacaaagacaccgggtggacttgtggcccgacccgtactcacaagctactacaaaagcgaacacttcaagacccgaccttacgatccgtacaatgtatacaccagtcccaacgaggctattctttgccctgattccttccaaagcatgtacactcagatggtctgtggtttatttgaacgcaacaaagtcctacgcctcggggcggtttttgcttcgggtcttattcgggccatccgtttcctccagctcaattgggcccaactcgcccacgatatccgaaccggatccctgaattcgaaaattactgacccggaattgaaagaatgcatgaacagagtcatgagacccgactccgaactcgccgatttcttaacggccgagtgttccaaggacgattgggaaagaatcattaccagaatctggcccaacacaaagtaccttgacgtaattgtgaccggagccatggctcagtacatacccacattggattattacagcggtgggttaccactggcttgtaccatgtacgcatcctccgaatgctatttcgggttaaacttgaacccgatgtgtaaacccgcggaggtttcgtacaccatcatgcccaacatggcctacttcgaattcctcccacacgacccaaaaacggcgtcgtctaaaaccgttgactctaagctaattgagcttgttgacgtggaagtcggaaaggaatacgaacttgtaatcacaacctacgcaggtttgtaccgttacagagtcggcgatatcctccgagtcacggggttccacaactcagcacctcagtttcacttcgtgaggcgaaaaaacgttttactcagcattgactcggacaagaccgacgaggctgagcttcagaaagcagtggagaacgcgtcgaagcttctgaagaaattcaatacgagcgtagtcgagtacaccagctacgccgatacgacgactattccgggtcactacgtgatttactgggagttgctggtgaaagaggcggcgaactcgcctgatgaggaagtactgagtcggtgttgcctcgagatggaggaatcgcttaactcggtgtatcgacaaggacgagttgcggaccactcaattggagcgttggagattcgggtcgtaagatccggaacatttgaggagttgatggactacgcgatctctagaggcgcgtcgattaatcagtataaggtaccgaggtgtgtgaactttactcccataatggagctattggattcgagagtggtatccacgcacttcagccccgcgttgccgcattggacgccagaaaggagactgtagtttaatttattattaattatcctattttggatcaagtcaacgatttaagttaattaactatctttgtttaatatttatgggttaggtttttgctcttatataaaattttattttattttttttttttataaggaaaagagagaaaaagaaagtgtaatgtttgattaggacgtttcaaaggtcaggttttgtattttggttcaattaacatgttatcaagaaaaggaaatgatgtgactctcatgttatgctctttacttatggctttattggaaaaaaagaaaaggtgatgttctaattcagtgaattgtgtcattttcacttagtggaaaaatcgggtatggcaaaaggtataaaagctctttctttctgaacgcagaccattaagcacggcagcctaacgaaaaaaatttagataaatatttaagtataattttctgtagataaatagttaagttttttttttttttgttgtaataatatttaaattataattttaaagtttttgtttactgttaagtgttaagtaaattactaatgaattttaattggtctaggtcattaattttttttttaataaaaatactaatttaaatgtatcaataaaaaaattacatgtagataatgacttaacatttaacgactaagtacttacagagttttagaaatataacttaagtattattatcgcaaaaaattaaagttgagtatttatttgtaactggaaatcaaacttaaatatttataccgtaaattcttctaaattataactttttattttttattttagactctcaaaatgtatagattttaaacatagccctaacccgcatatatttaagtctaatcctcatcataactctatccgttccgtggattcattgcatgaaattatttgatcttttcctattaataattttgtctggtgaaaaaaccactttgtctgtccactttgcttttatagtctatataatatatgaagtgttttttttttaattattatttaataaagacttatgagtacaatatccatggtaacaaaagtggattattgcataggatgaaaagtaatccatcttgagttaattttgaagaataagcacttgaacaccactttcaccaaaggggacagcactaacagaggagacattaacctgaatattacaaaccccaattctctacttgtttctaatcactatgtcagatgtgattaattggtgaaagtaagtacaccattcaacaaaataattgtaactagaaaaagtaatattaaactacattattaacaatatattagacatatccagataaataacaattaatataggtgacgtttggtaacnnnnnnttaatcagttttttgtttttaaaagtggaaaagtgaaaatatttttcaa

SEQ ID NO: 30654 - DNA, 3119 bp, Cannabis sativa
  modified_base (400)..(403): a, c, t, g, unknown or other
tctgaacagaacaccacatatacccgcacggacgaagtcctcctagccgagcagtggacaatccgaacagcatatcaacacttagcaacttcaacacttgcttcgcgaagcacaaaagcaatccctataaatctgggatcgtatcacagagatatggcaagctgtcctaatccctcaatcggtgtattatatatatgtaatgtgtaatcttaccaattatagaaattgtaaataaaagggtaaccttccctcaagcacatagccctataaatagtgatttattctcactaggcagggagggagaaggatttaagagagtatactcagagatgtcattataagatctttaagagaagaatctctgcattctttgttcttaagtcaatacaaatcaaggggnnnnggctattaccgaactgctcgaggccaatcctctttagaaactctgtgttctttatttatcttttcatattatatcttaattattccacttatcgcttacaattaagactcattgtcattggctaaaatcgaggtcaacattttggtgctttcattgagagccagaatcataaattcactctttacctcaaattttcataaacacaatggtggtacaaaattgcagaggcatggtcgatttgacaaatccaccggcagtggatcctgcactgtaaaatccaggaaatgcgtgggttccaccagccatgaatcctgaacaaccaatcaccaaacgtgggtcatggtgtgatgtctcctttgaatggaatcgcacccggtgtgcaagagactagaaataccagttcaacagccaatttgggtattcctaatactggagtttcgccagcagcaaatgtctgaactaccgttggagatgacaccgagattcacaacctctataatgctcttggactcatgcaaggccatactaatactctgcatcatggtcaggaagagctctgtgctacagtgaaccttgcatttgaggagcaaacacgtttgttcgtagaatggagggataaagtggtggaaacgttgagggcctagcaagcagccattgacaaccgaaccaccgtattgatacgaagagcctatcaagctactaatcagcaacctacggccaacatcccactgggcgagtcaaacgaagatccagctgggaacgcttctcagaccctgaacggccagccgcccaaccctcagtcacaggttctgcctgtgggccaagcagtaggcagccaaaccttatctagtaatttgtcatgagaggttatacctaataactctgcccaagttaacggttctagccaaatgatcggccaaaccaactagtcactaagataacctaatgcatctttatttaatagattgggaacaactcatgatctcagggatgatctaaatagaaggagagggttagaagaaccgtatgtctcgccaaccacttagcccagggctcgtacttaaaatccagctcaaagagatcttgacgtgaccttggttcgccaagagactgaacaagttaatccatccgtgcaagcacagttggatgaactgaaaaacatgttccaaggtctggccggtcagaggaacaatgacctcgagttggaccgagccgtggatcccctttctctccagatatcaatgctctagagtttccccacaagttcaagatgccaacctagaagatgtatactgggaaagaagatcccttatcacatctaaaatatttcgaaatgtaaagatctataaggagtacgaggtgatgtatgctgcagagtttttcttgccacactctcagaagccgcccagcaatggtattttatgttgacaccgggaaggttcaactcttggaaggctttctcctcggaattccatgcacaattttcttcttctcgccaactcccattgcatttagaggacctagtcgaagtgaagcaaaggccaggaaaaccactccaagcttatataagcaaattcatgatggaggagacgaaagttgcacggttaaccgaagaagggaaattaatcgcgatacggggggcatcaaagttctcggagaactttggaaggatatcaagagagacggaccagtagattctatgagtgacttgctggatcatgcagatggtttcatcaagcttgaagaggccattcagcgagtagaagttgagcttaaaccgaaccaagcacaagctcaaactgctggaacatccgttcagcaccctcagtacctaagcaattcaagcttgggcggtaaaaggtctaacaaaaacaacaataggaaaggcaatgggaaaaagggaaagttcgctggcaaaatcaaacaggcccatagagaaaatccttccaagtttactgctttctaggtcctgacagaagatttggagactatctacatggctactcagtcagtggctccgtacaagaaacctgctcccatgaaaaaggacataagtaagagagacatgtccaagttttaccgtttgcacggagattatggccatgataccaatgaatgcaacaatttgaagcaggaaatttagttgttaataagaaacaataacccgcacgtgtaaaaatatgtcaaggccgatcaaaatcagagggctgtccagacagacaataatcaagaattattaccaccaccggtggatgggcatttacaagtcattattggaggcccgcacatagctggagattcaggcaaagcccgggaaaggtatgcctgaaccttacagcacgagcaaaaagaagtggtcctagccattgaagaaaggaagccaaaagtgccacgggtaggggaacccacaataacattcagtaaagaggatgctgtcaaagtaaatttcccgcacaacgatccgttggtcgtggaagtaaggatagccaacataatggtggcccgaaccatgataaataatggagcctctacaaatatcttgttcaaaacaccatatgaaaaaatggtgctccaacttaaagatttaaccccctgtctttagcccatatatggtttcttcggtcagagtgttgcaccactagggcaaattcgcatacccctcactgttgggcaagctctgaggagcataactgtaatggcataatttttgaaattg

SEQ ID NO: 30655 - DNA, 1619 bp, Cannabis sativa
gaggggctctcggcagtggaggggcgccggtggtgttgggttccatcaccgtgtgtgagagagagggagatggagtgagtgagatcgagagagggagatggagtgagtgagatcgagagagggagatggagtgagtgagacggagtgggtgagtcgtgagggtttcagatggagggaaaatgatgagcaaaatagagggaatgaaaaatgggttcgatatagagggggttttaatttttttaaccctatacccgacggttttgaaccgtcgggcaaagaatgggccacattttaaaattgtggcaaatactttgctcgacggttcaaaaccgtcgggtataatttttttaaaaaaaaaatttgctccgcatttttaaaccgacgcttaatctatacgagtgataaaaaccgtcgcctatagtgtattataggcgacagtttttaacactcagataattttttcagcgacagttcaaaaaaaaagcatttttcaaaccgtcgggaaatctgccttttgtagtagtgatgaatgatcattacgtacccattagaactttatatccatcaactgatttgtaacaaaaaaatgactctcgatttgggcacatgtgataggtgcatctagaatcgagaatccactccatgttcattgaagatcctgagatggagaacaattcttggtctgtggaacaatcatcgccatctttaacgattgtatcaaaatccttcccgtggtgatggtgtcggaagtccttcctatctccagtgtgagacttgttttagccttgttgctctttgtacttcttgcaagatctttgcaagtgtccaaaccttccacactactacaaaattaggctttagaggcggtttttaagggctttcagcgtcagttttggcaaaatttgctaccgacgctgtaggggtaaaaacaaccgacgccataggacccctatggcgtcggttattatgaaataaccgacgccatgaagaccctatgacgtcggttgtttcatataaccgacgccataggacacatatggagtcggttattatgaaataaccggcgacatagggtcttcctatagctttttttttttcagctttacaattttgtattttagcataatatatactattttattattaatataattaaattaagtataaattatatataataaccataagtaaaaattaaattgaaaagttgaataaatacacatctacattactctaagtgtttgtatattagctatcttattattaatattttatattttatattatgtgtttgtatttttaaagtatattagtatcatttttataattttttttagtatactagtatcatttttgtagtatattatatctttgtaaggaaagggctaaactttgtatgaaattttttaaaaactttgaacattaataatttttgattcagctgtccgttttaggccttttttttttaacttgggtatttttttgcgttctacgcaacccaaacagccaatggcggtttggccaaccaactttttcaaaaaaatgttgttttgtatactaaattcatgttatgcacccctttcacctaattttttgtgttttattttgctattttactt

SEQ ID NO: 30656 - DNA, 2095 bp, Cannabis sativa
tttttacattatatcaaaaatatctaactcaaactgaacactcagccaatgaaacaacccaagcccacatagtgtaaaaatgagagattttttttaattagatataaaaattacgcatcgaaactcaaattttcccaataatacttattcatgcataaaatacccattaagagtgcaccttttaaaaaacaatggaacataatacaaaaaaaataaaaacaatggaacgaagttaagcataaaaatgtatgatctacttactcaattcttgttgatctgcatttcaaagagctgaaactgtctgaggagtagactgaaacagttataagtgaatcattgtttttattgtaaaacaagcttcggatgacttcaccaggactaacattcataaaacaaagtctctcatttgtctctgtaataagaataggcaacaaaagatatataacatagtttccttaacagaaacaaatttgaagcaatatggatgattccaaaaaaacacattaaacgttaataattccagcacaattcaactgaagatgcaattaaaaacggttaatcatgttgagaggagaaaaaacggcagtcttccgggattaatggtgatgtagttcatcactataattccgctctacatttaacaaaatttacattgatgtatcatttttttttaattgtaatttacattgatgtatcattaatatgtactgatatcatcagcaacggccaaataaaactagttattagatagatcttcaaggaggcatttcttgtttattatttggtgtagtagttccaaaataacttcttttttttttttttttgtgaaggaaatatatattgccagtattaatgtccatatcaaagaacactccataactgtgaaccaagtatacctagtactataatcatcataagttcataactaatattatcagtggtcagcttgttcttacctctacaaaaagctgcacaaactccagaatatgcaagagcgaagacaatgtcatgtgcagaaactatctcaatgattttcgctctctttgatagcaacggaaattcagataagaattgccccttgggatcatgagtatcatattcatcctgatgaagaaaaaaaatatataaaacctatgatcctaaaagagttatagcacttctagaaaaaattcattaagcaagccaattgttggaaaggcatatagtacaaaattaatatatctcttgcttttggtatttgaagtagaatgacttgtggtgttcttgattaatgcaaccaattagagcaaataagttgcactaatcataaaatttattctccagcttcacatagtagtactcagaatctaaagttagtacaacgggtaagagaaaaaagggcatgtaaaaccagatgttatgtccttaatcattcacggagataaaaaagtaaacatcaggaaatatttttcccgttgcctttctccaacaatagatgccgatcgtttcatttaagaaatatttcttgttctcacaaattgattcttcgggttatggtggcaatctgaaaactataggatcttcataataataagaatcaaactggaaaaataatattttatacacaaatagacatgggtttcgatggattttagactggttattttttatggcaaacaaattccagtggaaaaagaattcacctaaaaaaaatagtacgaaatcattcttaatactagaagaactagttagtttggtgcataatgaaaagtaaatcaacatacagtgaggcgcatattacggaacctctcgagggcattgctggtgctaaaagcacgatcacgcttggagcaaatctcacgcctttgcagcttcttcacacagtttacgaatccatcggcgcggggtctcttgttagctgaaacacggcgaaccgagcacggtcgaggacttgctgaaatcctcctcccaacttccatttgtttccttaacaaaatttcagaaaattggtggaatgcgagtgagattgggaatggagtgtatggacttgacaacaaccctaacccccttcccgccctcctaaacaactctcagcatacacaccaacaaatcctaa

SEQ ID NO: 30657 - DNA, 957 bp, Cannabis sativa
gttattgatttaattgggcagtttcaactatagcaatttaattattatgacagataaagttaaaaccttcagaaaaaacacaacaaggtgttaaaattttactgaaatttatttattatatatatataaataatatttgtatatatatgtatgagtgtcaaactcaaatctttatgaaaattgtaaatgacacatttagacaaaatagataatagtacaaattcatatatataaattattttatttaattatgtaataatgtaaagtaaggttgatttgcatatcttattaggtgtctttaatttgtttttcacactatctttttaattttacctatatatgtatatattattataacatatagatacatataagtcaaggtagctaataatctatatatctttttgattatatatgtatataaaaaaaaaaatagagtagtgtgtggttttcctttgtggtttttgctagtgtcttcttctctagtaaaaaactaaaaataagaacaaaaataaatgtgggtcaattgtgaatttctgtactttatatgggcccctccaaaaaaatcaattttggacataatgtttgataaaaaattagagtaatttggtacgtaaatacttaagtttaacttttggttgtaaatatatatatttttagaattttataagtacatgactgttaagtattaactcattattcgtgtgttatttttttattagtatatttaaactaatttttaaataaaaaataaaactctaatgacttgaattaattagggattgtcatatgacaatttacttgacacttgacaacttgataattacataaggtctaaaattataacttaagtattattatcggtaaaaattaaacatatatttatttactattaaaaattaaacttaaatatttatattataacttacttcgaaaatgattaaaattaggtaaact

SEQ ID NO: 30658 - DNA, 2272 bp, Cannabis sativa
gagagagagagagagatttggggttctcggggcgtgggaaaatggagcaatggtccgtttgggttgagggtagccagagcacagccgttcgtcgtgggggttggggccaactggtatggttggagaagaagaagaggaagaagaaaaaacaaaataaaaaaaaaaaaatcaatgattttaggttttaataatttcttttactttttaaattattattaattaaaattataactttaaccaataatgtttcaacacgtggcacttttaaaataaacaaacagaccaataatggggactattactaggttataatagaatgagaaaattagggactaacaaacttataaaaattttgaccttagggactattactgccaatttttgaggttgtggacttatcaacatcaaacataagtttttgaagacttatgctgcaattttccctaatagaataaagaaataaagaaaaaaaattgtctctcttacatttactattaagtgatgagaattaatggtaagtgagtcattcacttatatttgtttacttaatttattaaatttaggaaatgaaaaacttgattaaataaggaagaaaagaaagagagaacttcccacaccaattttctaagaaatgctattaagggtaatggctttaatgttttatttgcaccccataaagttataagtacacctcattttaataatttttattttatacaaaatataaatctattttaatttttttttcttctttttatattcttaaaaaatatatctataaagtaaaaataaaatatattttaaatattaaggtaaaaaaattaaaatagaaaattatatgaaattttattagaaaaaattttaaaaaatcatacatgatttaaaaaaaatgtgaaaataaaagaaaaactaactattaatatcaaatgaaaatattgtggaaaaaaatttcaaaaaaaatattaaaagtgatttaaaaaattaatttaagttaattattttttaatattagggtacacttataactttatggggtgcaaataaaatttcccttcccatatatgaccacattaccatattccctataataaccctctcatttgaaatcccaaacccaaaccgccccttctctctttcccctctctttctctctttctctctctatctcgcataccctcaactgcatgcacaccggacacagacggagaccgcccacacctgtccaccgcaagccgcccacacccgaccgcccccaccgtccacgcagccgacccccaccatcggcccatcagaccctacacaccaaacaaaagagaacaacacataggcatcagccccatcagacccaccatcggaaccatcagatcaaacacaatttttttgaaaaatcactcaacaccatcgggccccattggacccagcatcgggtgccatcggacccaatgagaataaaatttccaacacaagcatcaaaccccatcgagtccccatcggaccgattgggtcttcgtcttctccaacccattcacatgagcatcagacctgcatcggactgcatcgggcctgatgaaaatcacaggtccaaatcgcaagcaaaggggcgccgtcacaattggtttgagattgggtccaccgtcgatattagggggcgtcgtcaccgtgggtttaaatcgatgggtttgggatgggttcattgtgggtttgggcgagaggaagaaagaggaggcaatttgggtgagaggaagagagaggaggcggtttgggtttgggatttcagatgagaggggtactatggggaatatggtaatgtggtcatatatgaaaaatatggggtttatgaatttaggaaaaaaaaaaataaggtattttatgcatgtttttttaaattttcgtttacataacactaaagggaatgttaaaattttggaataatatttaacatttttttttatttcatataaatatgatttttagattggataccaaatatttataaattgtataaatatattataaggagtaagtcgtgcttatctaaaaatgagagcatcgtgttcctaataatattttgtatctatatccctcttcggaatgcaaataagagaaagaaaagggaaatttaattttttatccttaaggggaaatttttcccttaaacctaaaatactctatggtctcgtttggaacgttatattaggtcgtattgtattgtattatattgaattgtattatatatcatatttttttataatattatgttaaactttaattt

SEQ ID NO: 30659 - DNA, 3455 bp, Cannabis sativa
  modified_base (2071)..(2097): a, c, t, g, unknown or other
gtatattaacaaaagtcgagatcctaattccaaaatattttactgttataaaatatcacaaatagttttttgtacatgtcacatagtgaccacaaaagttaactcaaagtatttccaggccaaaatcctccaggttgtattgtcgcgatatgtacaattagtgcggagctccatactcactgctcctccactttagtttttcccatacctacacatataacacactggtgagtcgacagactcggtaagatatacataaaatatataatatattgacatcctgtaattagactctcatacatccatttacagagcttatcgaatgcttaagaacgttcctaactagggtacgacctctgtaccacatacactacgtactcacgcggtactagtgttggtagggtataactcgtacctcgagtaccactaagtattgtaccacatgcactcagtacccaactgtactagtgttggtaataccggatcgcatccttagactgtaccacatgcactcagtaccattattatactagtgttggtagcttataaaacaaataattgcatgcatatattatccatacacacatacatatccatactttatgcttatcttacctcgtttccaaattcaagcgtgccggtcgacctgaatggaaactcaagcgctgagcggaggccctatgtcacaaccgtaaaaatcggtaaacaactttctaaaatttttttggggatccaaacttaaaactaaaagtctcccaaataaacaaaagcataacagagctctaaccatcgagaaaacccaagaaaaaccctaaaacgggtaacccgtccaaaaaacggtaggccgtttttctgggtactgcaccagaataacggtaggacggaaacaacctatcgttttttactgcagaaaaacaaaggtcctcatttcgacccaaaatcaacccaaactccaccaaatgctcttaaacacctagaatcaacaagataaaccaaattcaagcaattaaaccaggtatagtacaaaatttcataatccaccattgttgagccaagttggtgttcaaaactcaaaacttgcttaacccaaccaatacatgttaaaactactacaaacaagaatataataaccctataacactgcagcaaacacaacaactcaaaccctaacttatatagtagctaaacccattttttacatgcttaggctagaaggaacttgaaagaaaactaaaaagaataacttagggttcatacctcaacttgaacaatcacaaatccttgcataaatctcaaagatgaagcactaaatttcaaccttccttgctttctctagggttcgaatggtaagggtgaaaagaggtggtgttattctaaattttccttttttctagaaataatgagataataccttaattaaacatctctttttattaattacacaccagttgtctattaaagaaaagggacactaatcaccatgaagtaaattatcaaaatgcccctcttaagtatctaacccaataaatggcctagtggtaaaatagtctaaaactaataaaatttatgtacaccatttacataaaatttatgtataatgcacatatatattattactaataacatagaaataactgagttaaaaataaaaaatcgatctcacacactaaatatgtatggtaatattttttataataatcaaaattttaatattatttaaattttatttatgaattcaaaaatagtatttaaattaatataatagaaggaataattcaatcacaccaactattttttaagttatcaacattacccttatattaaagtagttatattactaagagaagaacattgtaaggttaaactttcaaaataaataaggtaatgtatatcattattctcttcctagtattaatctattctaaatagtcctaaaaaagtatgggttatattttttcttcatcaagtatttaagataaatgatttcatttgtcaagaaaaaaaaatgaatgatttctataatataaaatcttaagtatgaagatacaatcaaaataataataataataannnnnnnnnnnnnnnnnnnnnnnnnnntaataataataataataatctttgattttttttgttttgttttttttttttttctgttgaaaatatctcctccaaattccattgttagagattggatacacatatatcctaaaaaaagaaaagaaaagaaaaagatatgatacatataaattattaatatcttgattaccagcactcccaatcatgaattaaataaattacttaaatgctacaaagtaataatataattacttttgatacaaatatataagaacctatttgagtgttttattaataaaaatttcttttaaaaaaattgcaaagaaaaatcaaataccagatatatctcatttttgctcgactatgatccaaaaaaaaaagatgattggggattaaggatcattagttctctttgtaaacgtggctactgggccgggcctaattggtccaagcccaaaacattaccaccaataaataaataaatgaaattattacaaatgcaaaataatagaaagaaaataaaaacgttggtaagtcgcaacacccaacttttctcgctcttacgataaaaagcaaggtgagatatatataatacaagacaagtcagaaatctgagtacagagccggagcctctcatcgattcagatcccactgtcgccggcgatcgccatgttctccgccgttcgatccctccctctcctcactttagcttctctttttcttcttctctcgccgactttcgcttccgattcagatcacaaggtgagctttgatccacttctttttaccctaacatcttaacctaatgtttgactattagatcttgttctttatgcctcttctgtcattgaatttcgtttggatctatgggttattacccgtttttctgctcctcaattgggctcgtttgtttttttttttttttgtactttcttcaagcgtcggtagcctttaattcttgttctttgagcttttaatgtgcatttttctaagcaaagttttgtgaatttgggctgagtggaggaaatggagtcatgggtgttctttgtaagggttagatctcaactggggttttttttgtttttgtttttgttttttatattgttatttatgcagttttcgttaaaaaataaatgaaaaaaagactagtgctaggcattccacgtgggagtatagctgagcgtgatggctgagctgctggcattgttgggatcatggtcaggagttccagtaagatttggatagtgagtggtctatgagtttttggtgatattcttacagttatggtattggggtttttgttatttttctaaatgccggagtcctgaactgtgttgacgttttaaggcacatttgctttgttttttttttgttttttt

SEQ ID NO: 30660 - DNA, 1378 bp, Cannabis sativa
gtttaggtagttatgctagttatgccgccaaattatgccgccaaaattccgccaaaattttggaaaattttggtttttgtggttaagtgttacaaaacgtaaaattcaagtggtttagccgccaatatctcttttaattacaaagggattttgttgttggacagtttttacctcataagtaatatcagatgggattatgtcgattgatttgataaacaaaatccaaaaagttatgtcgatttgagctctaggcgttttactttaaagaattcttcaaattttaaagaaccagccttagaaacaaaaactcttccatagtagatgtacattcattttagagaatgtgcacataaaatatatacaccaaaatacattacaagtagatacaaaattagcacattaggttcaggcgataacccacggcttgtcgagatcaaccagttggatatgtgggttcaattgcacaacttacaatcaggtaacatgaccctgagtgtagttacaacgcttgagaatttcatcggtacattcattgaatcagatcctaacaactttgtgggtgtttggcgtgatttcctcgagttcggatcaatgtcgacaaaccaataaagcggaggatgaaagttagttcgtatatgtactttgatgcggattcaagaagcaggagaagataacatgtatttgaggctcccaagtatagttggtcgcaacaagaatgctgttttggggtttcttaaagagagaatgaggaagaggatcaatggttgggagggtagatttctgtctcgggctgggaaagaggttctttttaagactgtggttcaatctctcccatcgtacgctatgaatgtctttctattccccatcggcacttgtaaagaaattgagaggatgatggcaagcttttggtggaagtcgaataataccaatagcaatggcagtggcattacttggatgagttgggatagaatgaccaagcataagtttgatggcagtatgggctttcgtagcttgagggatttcaacttagccatgcttggtaaacaaggttggcggcttttatttaatgtcgattccttagctagcaaagttttcaaagctagatattacccacatggtgactatctaaattcggagcttgggtcgaatccgagctttatatggagtagtatctttgctgcaaaagataccgttaaacttggtctgaggagaagaatcgggtctggtacaactgtgcaaataacaactgatccatggcttcctgtttttgataacccaataccagcccctgtggtcgacggacttgataacttcactgtcaacagcctttttgaagttaataatcgaagatgggatgaagatattgttgggttttatg

SEQ ID NO: 30661 - DNA, 1959 bp, Cannabis sativa
  modified_base (58)..(59): a, c, t, g, unknown or other
ttctgtttctttattgatgataaataaaatggattacattaaaatggagttttatttnnggcataaaacccaacaggaaattctacattccacaatggatttaaaagcacaattaaaggtgagaaagtgaacatatgcatatatgtttatggaattgacgacaccaaactaatcttccccagttcaagtagaggcaaacaatcaaaccttacattaagaaggttggctagggcgattagtgagtcaatttcagagttaaaatcaacgttcgccactttactcctttggaaataatcactgggggtggatgatttggaaagtgacgatttctcaggcaaaaggcaatttgaagaagatcgttgaaggctggggtcattcactgctagaacttctcactatgtttttttctcaaggaaatttgaagtcaaatgattaaaaatctaaaatcggggaaaagtggtagattgtatctttcaagggtatttatacccaaggtggctatccacgtgaaaaagaatgaaggatccaagatcgtacttccaagagcacaaacacatccaacgacttagaagtccaaaatccaagcgtgtcaatcaattaatagtctttggaattgaggcgcaaatcaataatgaaaataatattctcgatttttgtgccaacaatgaatagctgtcaaaataaaaatctttcctagaaagcaactcttcagtagacgtgctcttcatctaccagatgactgccacgtgaacccacaaacactgaagatagaagttcaccttccatgaccaattaacacttgcaaagtaataaaaatgttacatttaaacctccacatgtccactcatatggattgggtcaagcttccacaatacgcaacattctggaagcttggggtaaatgttatgctcatttttggaaaggaacaggtggatttcaggtcaacatctaaagcccactagtggatccaaataagataatttgggtcaagcccaagtcaaacaagaccttttagaaaaataccttagcttcatgtctagacgagcttccgccaaggatagccgaaatccagaagcagttccagtactacaatctcggaaggccaaatagcgtgttcctagaagactagtctagtttctctttttattcaagcacaccgaataaggaatgaattcttcttaaacctcaaatggaagatcgtgtgaagctaaaaaggaaaattgcctaaaatggagatcaagtaattaattcataattagttaccacagttatacgacacgtattgacaacttaatcatatcctatctgcctagtcagcacatcgatccctacatgggttgtgcctcacgaaacatccatacattgtgtattttcatgtaaactccccattaaagggaaaagagaaactaagtataattcttgtaaacactctaaatatcaaagaatttatttagattaagggttgaattctcttgcaatacttgctcatgcaaaaatagagaacatatactcattctattcccaaatattattcgcttaaatacataatagcatcgactcgtggactaaggcttggcaacaccctaactacgtaaaaactctaagtgtttgttctgtttctttcattcttttaattatttttttttagttttaatttcttataatttgttttccaaaagtctcagtaaataatttgcatgcgggattttgagtgagatacctagacatgtggggagtcacaacctaaccctacgcctatatatgcatagttatagacttaggtgagaggtcatttcctttcctctctaagttcctttagtctcatactttgacgtcacaccatttataaaatttcatcacacatatattagaacatttcaatttaaggaaataaaataaataattaattttgtgataaatgaatattttatattcattaaatttggacaaaattaatta

SEQ ID NO: 30662 - DNA, 3063 bp, Cannabis sativa
atcttttagtttgtgccattaaaatcttgtgtttggtatcttagaaaactattcttgtgatcacataatgaatgtgtgtatgttgtttaccgaatggaccatctattttgtcaatgacaaaatgaattttgtattttttaaaagggtacaaataagatcaccaaaatagtattgaatcataaaaattttaataatgacaatttttacactgaatatgctcaccaaaatttcagcttttgatcatacgagtttgtgggattttgcagataatttggttagaaatgctgactttgaggaaggaccacacagactctttaactcttccaatggagtactcatccctcctaaacaagaagatgccacatccccacttcccggatggatcatcgagtctctcaaagctgtaaagttcatcgattccaaacacttcaacatcccatcagggaagtatgcagttgagctcgttgcaggaagagaaagcgccattgctcaagtcatcaggactattcccaacaaggtctattctctctctttcgttgttggtgatgccaagaatggttgccacggttcaatgatggtggaagctttcgcagccaaagacacaatcaaagttactcatgagtctcaaggaaagggtgttttcaagactggaattctgaagttcaaagccattggtgacagaacaaggattacatttttcagctcatattaccacactaagaaagatgactttggttcactttgtggtcctgttcttgataatgttaaggttgcccctgtagcttagatagatataatcttgttgagcagcttgcgtaatgtgaaattgtagagattttggaacattttaagtccaaaaaaaagagttgtatattagatctttgatgatggtgagaggttaaaaccatatgtgttctgctatagttttatgagtgaatttggttcttccttcaaacagtgttacttttaatggaaaaaaaaattatgtatttgaatgaattatacattgtcctaatccaaatattgggattgaataattttagttacttttaatcagttttcaattagttcttgtgggcatataaacattgtcattttggatcatgtttacaagtgttgccctgaacagaacagatcaaatgcaacaacacctttgacttttaagaagattttatatgataaaaactaaaatcatttcacaatcataatacatatataccacaatatcaaattttaagaagaataaataggatttgtctcctagttttgcctcgtaaactattttctattgcaatttttctttctgaaaaaataaaatttgttataaataacttttcgtcttcattttcttaaacaatttattgatgtaacactaatatgaggttaatttaattttattgaagaatccggaaaaataaaaatacataaatagtagtctaataatgaattataaaaatatgtatatatacttttacagttaatatttgtatatttaatataaataaatggaatgtcaattatacatgtaactcataactatataagtaaattattataaaaataaacataatgaaagaatggaatatttgcaaccaattgtgtaattcgaatgaaacttttgtaataaaaaaaaaagttcaagaagcaaaactaagagggtggacattgtcatttcggttcttgtttacaaatgttgtccatgaatagatcaaatgcaacaaacacctttgacttttaagaagattttatgtgataaaactatatcatttcacaatcatatgacattataaatatacaacatattttcacaagagcatatactacaccacttaagttggaattaacttaagattctcttataaagcaatcctcaccttgctgtttagtttttactttaagaaacagagtttaccaatctcacttcttttctactttctctcaacaacttttggaagataaaaacagctcttgagaatctataatatcatattctgtaatgttcaataatcatatattgatgtgagatgtacaacatccaacagatatgccacaaagtataaataatagtagttacaactagtattaagtctagaaaaaattgggttttacattgatgaactaacatgctttattattgcttctttgtttttctttcgcgtatttattaagccgaaaactgcttcttattatcacagtgttgcttgcttcacttcactctcatctaagagcccaacaaggcacttctccattaagaattcagcatttacccaagcatggtatttatctgaaaaatattaaggatcacaaacaattcatagtagagcagtagttttcgattagttgaaaacgagaaggagcacaagtgttactaatgacaaaatcgaaagaatatagttctattcggtaattagatgacagcagaaaaaaggatactgaacaaagctgtacagtctttccccacagccttctttaacatatcgacacctgaaagcaaggcagcacaataaatcgatatgtaatatgtatgctgaattgtatagatatagcttcaccataaataaaaaatgtgattagtgtaaaatattatccttacctccagggtggaatctcatgtaaggagataaattatatacccggcctttaagaacagtccacattgaaccttctgtttggtgttgtttaacttctttcatggaaataagcctcttatttgattgcccctttaaatctgaaccaagtttaatgaagttaaagctaattcaaaacaatgtcacgatacaacaatacacctatcaactcaattttactatctcttcaactcaaagcaagcatgcattaagctgtaaactcaattatcacaaagttttcgaagcaatgatgaccgaaaagtatctctgaatttcaaagtcagctatgatactgaactaattgaatttgtaagaagttcaaatcaaaatgaaaacatacataaacttccccaaccaaaaaaggaaaagaaatactacacagcagagtcaattgttgtccccttatgaaagactatgaatgaaccatggttggtca

SEQ ID NO: 30663 - DNA, 2694 bp, Cannabis sativa
tagatttacatcttctaactattttgatgtcttaagtattgttcttattaactacttttgttttgttagaactattgagtggtactgctttagtgactaattgtacatacaaggttaaggttagtataaatagaaaagtcttgggaaaattgtagtaaactaagctttaataattaaacaactagtaatgacaagcacaaatcacgaacaataatcgaaaaaaaaaggttgaacagagtatggaaaaaccagaaacaattaaagttgttaaacaataaaatcaacgccaagatatatactattttaagttcgatagatcgatgtgatctatggctctactccaattctggaacaccaccaaattctctttatttattttttttttaaaactcaaatcctctttattgattgagcaagaataggtacaatacagttgagatcgattctctgattagttctcttaaagtgtgtaaccctcacactcttacccaaaaatcttcttcatcaataaaatattcttcttacaaaatctaaatccaatctctctcttttctctgtacctctcagtcttttctctctccaattctcaacttaatctgatcgtcattttttgaaatgttaaatgttggtggtatttataggcttaagatcaagatcctaaaatcagtggttgcaagaagttaggttgttaagttagttacccaataactaacttaaccaactctcatctgagcaaggtctccacgtcagcctaaggaagagtgcatcagggagcgagtatgaggccttctggagtcacggtccaaggcacttgctaaggacctttccggataggaaagagccaggtggaatcaactatcggggactaccttctaggatgaacagctagccatctggaactcctttttggaggaggactagcttttctgaagacctttcccgaaaagacaaaaaagccttccaagacctgcatccgcaagtcaacaactttcctggaatgataatagcttcttggagacttttcaatttggaggaaacaaattccacctagttacttcaaattaaatgtatgatgatgaagaaagaatgcaaccatcatggttggtgttctaggaatctcagtatactaacttccaagattgatcaagttcaatttattaagaccttagtcccaacatcagcaggattatcttctattatgaccttctctaaatcaaccagactttcttctatcttctctctaatccagtatagtcttatatctatatgtttgttattttcatgataaactgggttcttacagagatggatggatgacggactatccgaatacacagtcactctccctttgatttattttaattcataaagaatttgccgaagccataatgcttccttgaatgcttcctagttgccatgaatgcttcctagtaaccatagactataattgggcctccagcttatacagttttgattgctcaagaaaatataggaaatggttgatttttttggtatctcagtttgaggcatagtcaacgtccacgaactcttttagctttaattctccaatttactttctcataggttagattataatcccaagttccctttaagtaccttaataacaacttgtgggccttctaatgttcaatagttggatcggacatgaactggcttaggatgcttagagcatgagccatattcggtcttgtactcaccatcacatacattaaacatcccaagaccatagcatatggtacatctttcatttcatctttctccttcaaacatttagggcattattcctttgaaaaaacaaactatcctccaaatagaatggatgtacgatatgcatagtcgtttttttttatgatttcaaaataaaatcaagcaacaactatgttaattggagttaagtttcatttttttcaagttgatttactgttgcatcatcatttcataatagttttattcaatattgcaggaatttattttggacagcagaaaaagagaaaatacttggacaaaaaatgatggttttagtttgttgtgtaataaattatttaaaatgtttcataaaagttgcatttcaattttttcatagtttgataacagcaataaaataaaaaatgacaaaaacatggttcagaactagaaatacaagaattgaacagaggaaaggaaatagagtaagtttctattctatttcataaatataatttttttttgttataaaaattagtgtcaaaaatgttcggatacattactaacattagcaataacagaatcaaaacagtttcaaaattgttgccttacactaataataatttcaaaatcacaagaaaaagaagacattccattcctagtcttttgcaatggacaatttgatgatcgaatgaatatttatgaaaattatgaagctagtggacattacattttaatcaattataagtatgaagaattacaacggaagctgaaagaggtcctggaatgcaaccaagaaaacaccgttctgcaactgcaatatcaagtgaaagaaggataccaaccgttgaggataaaggatgatcaaggcctgcatttctacatacaactaaaactgaaggaacccagcttcacaacatatccattgtgtgtgaatgtcatcaacaacccaccaacaaccatcaatcatcgttcttggaaaatagtaat

SEQ ID NO: 30664 - DNA, 982 bp, Cannabis sativa
ggaacacgaattgaagaaattagtgacctggtgtatgacatctatcgctgccaacaacatcccaatatttctggtagaatcctggagtcattccatccggtcccaaagacttttcaggatgcatttgaaacatagctttctttacttcttcaggtgtgacatgctgtaataactcagccttttgcaagcttgtaacaataggtgaaatgccatcagtcacacaatgataatcaaacactagaagaagtaaataactcatcaaaatagtggacaatgacattagccaaacccccttcccaatcaacccaaacaccagaattgttcttcaaagagtgaatagtattgtttttctttctagaagtggccttggcatgaaaaaacttactattttgatcaccctcacgaagccaaagctgcttggaatgcttccgccaaaacacttcacgttgattataaatctcagcaagagaggcctgggcatttttatacttcataactgaatcatgatctttgcttctttttaatttctgtaattcttttttacaggcagcaatgtgatcttgaaaatttcctgtataatcccgtccccacaacttctccccacaaacttttatttttctattataggccgacccacacacatctcccagcagtcagcaacaacctgacaacaaagaggttctcggagtcaggtatttttgaatttaaagtgagcattcgacttggtgaaaagctgagacgataactgaagaagtataggagaatgatcagaaacgaatacttcgagattaaaaagctgggcagaaacaaacctctgatcattgttacttttaaatcaatattattaacagaggtaccaagaaattccacttcatcagtgaatctccataataaagcaatgccgccattatggcctctaacatcaacagataacatgccctcaaaacccacaaccactttcaaacgatcaatcacatggttc

SEQ ID NO: 30665 - DNA, 4032 bp, Cannabis sativa
aattagataaaagtccttaaatccaacaatctcaatagttcagataacatttttaacgaccttaaaagttcaaatggcatgatttggtacgtgtcgaaattggaggggtaaaactcctaattaaccttttttttctatcaagttacaatctctatcaattatcatataatactgtatagagttttgctttcataattcttttcattcactattcttcttttctttcgcatttctctctaccattaagcaactaatttgttgttaaatagtttattaaagcatctgatttggaggaagattaaattaaagtttgatgagaaagcaacatgattcaccaaaccaactatggaagtggtgattactagtattacatatgcataaaggactttgatgattgtataagtagaggggaataggagactattgttgttaggccaatggtcaatccaatcgcaatgactgaagctttaagatgattcctgtaaggcctattgcctaatacgtacaattgggccttgtaatgtggtactggtgggccctattagtaagtactagtaggggccatgttgcacctaatattttacttgttatttttcttttcattcacacctactcttactttttcttgttgtttttctaatagacaaccaaaacttggtatttgggtagattatagatcaagagttatagtttggattatgataggactttcttccttaaaaagttaaaaagaatagaaagttggtcatctttcaagttggcatctctctccttgtgaaaatgtaatatttttttatatataaaaaaaaagaaaatattttaccaacattttttttttgctggaaaacaaatattataccaacatttaatggaagttcttccaacatctcattgcttttaactttcttcacttttatgacaatcattagaaaagagggtcatggggaaaagaagtaatcatttttttgtgccagttatagagacattacatgtatactagctctttatagagaatttgtttactatatacatataaagtcatgtccagattcagttgaaactctctttccattgattctactatacaagtacaaactgtcatttataatggagaagaaactttttcgtgcttagtcaattgatttttgctcttcattattcataaaacacatagggaatgtgtccataatagcaaatcttatttatatcacttggtaatttgagatataaatctaaattaatttcagtgtttttcaaaaataaaaaggaaaaattctatcaaattgtcatctcaataatcattgaacacaattttcaatagcattttcgtatgagcattgctattgggtactgtgcctaacacccttaagacgtttcgccttacgattgactagcgatactccctaaaaaattattatattaaattatatgagacccaatactaaattagactaatagcgatattgacacataggagggtgcttgacaatagagtgctctttaacatttaatgtaccatatttgattagtatgtgtttcaataagagaaagcaagttgttcaataatatttttttttctgggtcatcatcgtaagttggaattgaattatcgggaggacccatgacttggtctatgttggcgtaggtttcaaaacataaaatatcgtatactatcgtgggaccccatccaacacatgaatgtttattatttctatatagaatgtagtcatatcttggttggtaatatcataaccataaaatatattaactataatttattccacttccatatctaatgtaatgcattcttttacctctcatactcaaatcttttgtattataacttattatattattattattattattcaagtacaagaaatcactttgccaaataaaaaaaagagtacaagaaatcattttatagtaagaatattacttttagaatttctcttatgaaatacaaaattaaatttttttttagagaaaaattactgaaaaggtaatattactttcggtatccattttatttttagagaaattgcggcgaaaattcttaaaaaactcactttaatgaaaataagtcttcaatctcaaaaaataacagtaatagtctacaaactcaaactcgagactcttataagtattgattcttttgctctaaaaatatcacttgttgatgatattaaattatagtataagttctcaaaaagtttactttgatgcagataagttcctaatcttaattgaaaaattataataaaagtcttcaagctcaaaattctcgttaattcacgggtgctcaatttaagagctctgtttgtagttcttaatattgtcacgtatcaaaattttattggtccacatcataaaaaaaaatattaaaaactttaataacttttttatttcattttcttgaagattaaaaaacattatatattttgttcaaaaaaaaaaaaaaaattatatataaaaaattataaacttttacgatttgctacccactcttttcggtggtggaagcttactgctgaacagtaccattccttcttcttcaccttcttcctcagttcatttcactatcccagaaaactaattaagcaaaaaaaaaaaaaagagatgtaattgtgatcggaatcggaatcgtgaccgtgatcgtgatcttggagagaaatgaagcttttttatttttttcttctttatgtttctaggaaaacgagaggtatggatagagtatccggtagagaaaaagaaatatgggtagtggtgggaggagggttttggttggccaattatttgacctcggcttttctagtttaaagttcacatattttttttttctagagcggcccctcttattaagggaaattggtgagttttggtagagtagatcgagactaggcagattgggctggggtaaacgagaagaagaagaagaagaatgaaaaaataaataggaaagataaaaaaaaaattataattaattagttttgaaaattatttatttatttattttaagttaaaattataatttggactaataaaatattaatgctagtatttttagaagcaacaaacagagcattcaatttagtatttatggactaacaaaaatcttaagtttgggctattattataattttttgagattatgaacttatttacatgaactttttaaagacttatgtcgtaattttatatcaacacctggtatttttagaacaattaacaaatctattaaaataataataaaaggacttataaagtattttgaagacttagctctaaatttttaaaaaacttttacacgaattttccccttattttttaatgtgatgtattgcttttgtggatggaaatgaaggcatcatcttggtaattgtatagtcattatttttatgggtcctcagtcaagcctagcccagcttaactctctctctctccctcatttgatcagatgtattttgtcaataagcaacactccaacaatcattgtctgcataacatatgaaacaaatgtgggtttctcctgatgctttcacatgggttttagtgatatcttaataaaaacaaaagcttgtgctaccattattactattattattaattctacttctgctaatttcaatagaacagaaatagttgctcaaccattaagtcatttgtgagcaataaaccaaaattcgcactgtctcttgtctctctctcatattatttgcttcatatgtggttatgtttatattattatactacatttcttctgagaaagggcataggctcattcaaagggtttgactgaagtatatagttccttggtgtaattcttttgacctttgtcttagtccaaggatatggttttgttgtggcaagaacacttcgaccaagacaatggcatcctgaactgctgatattccttcattgaaatcatggtatttttataattcctcttcccaactttcttattccttcaaacttaaccaaattctccataaatttatcacgttgtttttcatcatcttttttttttttttt

SEQ ID NO: 30666 - DNA, 1627 bp, Cannabis sativa
ttggttactgcctgtgataatgatatcatctacatacactagaattagtgttgtagatgtcttggtatgctgaataaacaaagaatgatctgcctttgaaggagtgaaaccaagagagagaagacagtgttgaagtttctcaaaccaggctcgaggagcctgcttcagtccatataaagctttgtgaagcttgcagaccaagtggggagaatattcatcttcaaaaccaggaggttgaatcatgtaaacttcctcttgcaagtcgccatttaaaaaggcattatccacatccaattgcctcactgtccaatcttgagcaatagccaatgtaagaacaaccctgattgttacaggcttcactacaggattgaaggtctctgtaaaatcgaaaccagattgttggtggaaccctttggccaccaacctagctttgagcttattaatagacccatctgcattctccttgatcctgtacacccatttacatcccactggtgttctccctgcaggtaatggaaccaaagtgtaggtaccatttctttttagagccactatttctgtgtccatggcattgttccaatgcttgttttgtaaagcttctttcaaggtgagaggctccctacagaccatataggtttttggcttagaaatacaagatttggctctggttttcataggatgaatgttacctgaggaagaattagagatagttgtgctattgtttggtacaacaggttgagattcagggagagtctctggcaatgggataggcacaggggattgagactgagacacattctcagctgagacaccaggtgagatttgttgttcactagtatcagggtgaacttcatgacactattctgtgatggtattaggtggagtttgaggaacaggagcactaggtctgggagtaggatagtttgagagatcaggagaagtgttatggacattgggtatgtgacaagatgtaagacaggtatctgacatggaaacaggtgtgatgggaacagagagtttggcatgagggaagttatgttcatcaaacacaacatcccttgagatatataatctcctagaggcatcaaggcacttatagcctttgtgattcagactatagccaacaaaggtacaaggagtggatctgaattccagtttgtgcttattataaagtctgatattgggaaaacaggtgcaaccaaatgttttgaggcttagatagtctggttttatattaaacaaaacctctatgggagattttttgtcaagaagaggagtaggtaacctgttgtgaatgtacatagcagttcgaaaagcctcataagtggcatagatgcatgagcaagaagtgtcaagccattttccactatatgtctatgcttcctttcagctagaccgttttgctcatgagtggtagggcagggatgtctatgaatgactcctagttgattgagaaagggtatgaaggacctgtactctcctccccaatctgtttgtagggatttgagtttagtaccaagctgaagttcaacttctgctttgaaaatttggaacatttttaaggcttctgatttactctttaaaaggtaaagccaggtgaattgagagtacacatccatgaaatgga

SEQ ID NO: 30667 - DNA, 2769 bp, Cannabis sativa
agattagattaataatcatgattaattttctattcaccttgtactaagtagttggaatccaattttcttttgataatatatcaaaatttctttatgttaggcataaagtttttactattatcaaaaatcactaagctaattcatcttttcactactcgattcaagagttttattatgatctggacataatttaaaattagctggaaacaataacgaatttaacttagtaaattaattttgttcggtatgaaaagttgaaagagtatcacacttaattacaaaactttatgataaagttactaaacaaagctatcttatcaagaaaattgtaagaaaaaagcaaccacattatcacacacaaaataacgtagtactagtatcatagttatgttaattaataaatacttatatatatatcaagcttttgatttacttttatatttttcttaagttaattatgatttttttctttcaaactttgacatgtaccaaattatgttttctgaacttttttagccgttaaaaatttctcttaaactattgaaattattagatttaaagatttttgtctaatttcaatcaattttactgttttagtgattgtgtatgtactaaacatgctctccaaactttaatatctaccaaaacatgcccctcaaactttaatatgtactaaatcatgtcccttaaactttcgtgttaaattttttttactaaaattaaataaaaatctttaaatctaacaatctcaataatttaagaaaaaaatttaatggtcaaaacaatttaaaatgcatgatttaatacctataaaaattcatgaagaaaaaaatcttaattaactgtatccaccagatgaatcatattcttgagtcaaaaaagaatctcctgtcagcaaatttgtaatttcacactagtaagagacaaggacatgcatgcacacgtggcttagcgcgtgaaaaggagggacagtttctgcatggaagagctacagttcagatatttagatatgtagtatagtctttctttctctttctattgttgctggtttttttctattgattttattattcaaaattttaaataaaataagtaaaaaggtcaactagaggtctattgctagtccaaagtccaagctctccacaaaagacgccaccgcaataaattctagcacgtaaaatctcgtattaaataattcattttcgaagtgaaattcaaaaaactcaaacacacacaataaaataaccaaacttaagattcaaatttctccaaagaagcatccaagccaccttcttcttcttctaacacctctgttctttttagacccctttttcactctcacttagttacagtactactcttatagtgatctcctttctttgtcttttcctgatctacaacttctataatatatatatatcttctatttcaatatacaatctcactgtcatttccagttattataattatatttactcaaatggccggttttgattttctctgatctccttgagatcttcaaacactccctttctctttctttacacctcaatatataaaccccttaaatcttttgtatttttctgtatacattttcttataaatatatacagctttcttcttcagctctttctctctcctatctgatgatcagaagtttaatttatatatggaaagttctgattctgatcagatacaaaccctagtataattagctaggccatttattcaaattattatttttcttacaacaccaatggctgatcgagcaatggtttcttcttatgatcatcatcatcaaaaggcggtggttagaaaatcatcaattatgatcgaacgtaagccgttgatgctcaaggactatcttctcgacgatctaagttcgtgctcatccaacggcttcaaatcttttccaaggcgtcagtgctgctcgaccgtcagatttctcctcgagatcgatcttaaacagaatcatcagcaccgcagtcgtcgacataatcctaaagaacaaccaaatttggttaaggcaaagcgacatttccaaagtagcagaagcggtcgcttcaccatctcagtccttcaaagagcttcggatgccgttattaacgccgtcaaacaaatgccgttcccttcagttatgtcatccgtacaaaagagagccagaaaaggactcctgcccataagcctttcgaggaagctattatataatcgcttttggggtagaggcgccaataataataataatactgaagtcgaagatcatcatcaccgtcaagagatcatcagagaaaatatcaaccggtggagattgtgtcctgagctgccggacaatgatgatgatcaaaatattaccacgaaaaccgttatttcaagtagctcaagcggtaatagtaagagtaacagttggtgtgagagtgagtttactaccactactacaacttgttctagcagacaatccgaaaccattccaatcaccactttagctcatgaaaacgacgtgtcgcagaaggtcaaaaagaaagtagatcgtactagtactgtcggtgatgaggaggatacgacggagttaggaccaacaaccgctacctgctctcatcaacacgcaaaggtaattaacaaggattctttatttattattccatactttgcgtgcgtacactaataatatctctgtctcagactatatttttttttcccttgagttagccgaaattagtaatgagatagaattaagtaggatgtaaaagtgagtgtagcgctacactcact

SEQ ID NO: 30668 - DNA, 1437 bp, Cannabis sativa
acgaaccaataaaatgccataaataagtctccaaccatattctctaaacacactccttagcgggagtaactcaaaaaaaaatgagcttcaactatacagaaagtgactcttaatataatagaaaatggatagggaactctctatcactccaactttttgcaaaatgttggattttaatcaaaatcattacttttttttcattattttattaaactaatctacatttaacaaattcaaattataaaaatgttattacaataactaattttgactgaagtggagaacataagcagagtaacattaaggaaaatggctctctacttttaacactgtagttattttagctaaaatttggctaaaaaataaagagtgctctcagaaaagccatgattcaaaccaagtatacataaaacagcaaagcaataagcattaaaaactctacaacacaaactagattcaacgccatagacgaaaacaataagcttaggaaagtaccttccgattggctagaacttgagcctgcttctccaacctcagcagctgctttcggtacctccaaacttattggctttacagtctcagatgtcttatcaacaaactcagaatgaccagttctcttggtgtgtaaatcactttccttcaagatcaaacaaatcaaacccaaataacaataatcaacttcacatctttaaaatacaaattaacaacacaagtcttgatcttttctactgtagaactaaaaattaaacaaaatcaaaagaatattccgaattcccctaaatgcaagaatattaggaatgctaaactatgctaatccattaaaaatcaaaccccaaataataataatcaatttcacaattttaaaaacccaatttaacaacacaagtctcaatcttttctactgtagaactaaaaaaatttaacaaaatcaaaagaatattccgaatttccctaaatgcaagaatactacgaatgctaaactctgctaacccattaaaacttaaaacccaaataataataataataaccaattttacatttttaaaaaccaattcaacaacacaagtcttaatcttctctactgaagaactaaaaaaatcaaaccccaaataataatcaatttcacaattttaaaaaaacccaatttgacatctcaatcttttccactaaaaaactaaaaaatcaaacattcctaaaattctgctaatccattaaaaccaaacaaaaaaataaaacagaatcagcagtaagagagagtgaaaaagaagtaatacagtcttggatcggcaaggtttgccgcaagaagaacagacgaggttgagaacaggctcggttgattcagcaaagttggaatgagaagtaagttcagcgtgttgttgggcttcctctactgatctgaggagagcaccgcaatctccacactggagagaaacgccc

SEQ ID NO: 30669 - DNA, 1726 bp, Cannabis sativa
ttattgttgttgttgctgttttcaccttgtgggattgtagggatatggatcctttctattaagagatttgccctttgatgcaatccaattttgcatgtacgaacagcttcggattggttataaattggcggtaagctcctaattgtacattttatgatgtttataggtgtacaaatcagaagataaaatattggagaataacaatgactttagagaatttcaatgtttgctagtaaccaaaacgattataatgtgaatggcatagaagttggaaagctctaacgtattatcgtttttatatgcgtctccttgttaaatcttgatcctgtttttattggtattgtatgcaggtaaagagagagttgaatgatcctgagaatgctttaattggtgcttttgccggtaagatgatatttaaggcatgattccatatgcagccatctacacagttattataatagcattctattactacgtgtagaaatattttctgttaccgagttaaattatatgaatttttcagtgtaactggttcatatcgattatagactaagagtctaagagactctttgtctaccatgtctgaaatgtgaacaacattattcttgtgtatcctagctaacagagtgaataaactgtactctgaattagtattggattgtggttcataaagtaggaatgcaggggaaggcagtattgggacagaatatcattattagtttcgattactgataatgttggctgaaggcagataaccagagacaccattgttgtcctttgtaataatttgattgaatcagaggactatgtgctgttattttatttctgaaattttgtttgctatcaaactcacataagaatttgtatatatttacaggagcattaactggagctgcaaccactccccttgatgtgattaaaacaaggctgatggttcaggtagtgaatctgtgtccctcttatctagacataaattttacttactcttctaagcatatttgcacttttcagcaatttatgaagttttcctttcatgcaatcaaatagaactgttcagtttaaagccataatattgtttttcttttcttcttttaagggatcgggcaaccagtacaaaggtatcttagattgcgttcaaactattgtgagagaagaagggcctccagctctgttgaaggtatgcatacatttctatgttgtccttttctaaacactgtttttcaagtgaactcaagattgtaatgcattatgattctacttttcctgcagggaattggaccaagagtactgtggatagggataggcggatcaatctttttcggtgttctcgagcgcaccaaacggttacttgctgagaggcaacctgttgttcaacaagactcaaagaaggctaactaacatatagatgaagcaggacgcttacaaatagagttttaggtcttttttcattctattgttttcagctcagttcagttcagttttagttttatttattttattatttttcttctccccttctctaattccaggcgtaccatcatcttaagattcgtttatttggttttgactcgacaataaattgattttgagtatctcattttcctcgagaaatctaagacttttgtaattgactagtatattctcatttttttttaaatatataattaaaatagaataaagaaaaagactttttttattttaagtttcaaaatagtttttttttttt

SEQ ID NO: 30670 - DNA, 2196 bp, Cannabis sativa
tgtatttaggtataagatcacacgtggcgcatgattggtggtgcatgaacttctttagaaatgaatgtagtactgacagtgtgtatctccaaagaaagcaacgtgtcattattattactatatatatgcttaatttgagcataaagtaaaaaccgacattggcataaatttacagctaagacgcttaaattagaacccattttctctacttccattttctttctttttaattttaattttaatttcgtcagtaaaaagaacaaaacaaaattataaatatgttacgtgtgttatagagtttatatattattatgttgggaaccaaccagccaagaatatatttaattaaaattagaaaattaaatataaataaagctgcatgcaatgcatgcatgtcttatatatattatacacacataagttaatatgtacggacaatatattattaattatctgcatcccttgtctattaaaattctgtaccaaagaactttccaaatattaataagattattaataaaattattataatagctagcttagcttcttctactagaaaagagaaaaggaaaaataggaccacttatattagctatagtttgcaggtttttgttggaccttgtcatcaacagctataaatatatactctttttttttttatctaaagatacattacatatttacatgagtacgttatcgacagtaagtaattaatatataacatttatatatatataaaaaagaaaaccattttaattttctccacgctctacttaattaattaaaataatgtagatattattggttaaaattatttcacaaatatagacaagcaattacataacagttgtcgttaaacaacaagaaattatctattttggtgtttaattatatatggaaaatttacatttagggaaatttaaagggtggcatatattatacataaaagtgtttgtcagatgaagataatgataatggattctatttaattaaatattattactgccatgcatgcatgcatgcaatcaatatatatatagatagagatagagagatatatataagcatgcatgcatgataaagcagggatttatggattaggagagtttaattatattaattaatgagatgatcagagaggggtcatatatatgtccttttaaaaatgcagagttgggcagaaggagacaaattaattaaaagggtaaataataagtaatcagaaatgctaaaggtactgatggtttctaacaccctcgatcatatgtgaatatcgatattgatccaactaagtattggatctcatataatttaatagggtaaatagcggtataagtacttaaagttttgatttgtaagtggcataaaacccaataattttttttagtggtataaatacccattgtttgtaaaactgtaatttttctctattttcgtcagtacaagctccgttttaaatttattaaaaaatgatttggaagtaactgtactacatatatttttcgtccagaccaaataatttaaaatttgggtcttatatgtgtcttgtttaaaaaaataacaaagtctgtactgatgaaactagaagaaaattataaaaaacattgagtacttatgccattaaaaaaaatcattgggtttatgctgcttacaaacttaaaactttgggtacttatgtcactattaccctaatttaatataacagttttggggaaatatcgctagtcaatattcacaacgcgatatatcgagaaagtactaagcactattggtgactaatagcaatcctgataagtattaagtcatatatattgcttaattaatgaggctgcagaggctttattggcgggggtttcagtggtaataacatacatacatatgtgtgattaatttagatagaaatatataccattattatttataatataatagaaagcaataatattatttgaaattaaagagagagaaatcttgatgttgtttgggtagacaaaattgatcaggaattgtctgtcacaactgtgagtttgcagtcacattttatattttcacagaaagttgtacatgatgatccacgcattaaattggttttataattaattactttgtatatataggtttttttttttaacatgatacaaatattatttataacatgcactcgattgcaggttttttttatttttattattattt

SEQ ID NO: 30671 - DNA, 1124 bp, Cannabis sativa
ctaaactttgttacttatatgattagcgttatcaaaattgttcttttaattttgtgtagtgaatattaagattttttgttaaagaataaaattatttgtccattaaactttaccacttatataattgtgtctcttataatattagcattgttaaaaatatcctcttaattttatcaattagtaaaatatagacttcttaaactttcataaattgaactaagaagcatatttttttagtgacaaacaaaatagttgttttattctaatttagaatttagaatttagaatttagaatgagggtgtgagaaaatgggtggggaattagatgacacgtcactcctgctcagaattgaaagaggagaaactctttttttgtatggtaaatgacaaaggtacgtgtcttcatcaatgtttaagatttattattggactcattcaagggctcttttgcaattatcacaacctaagaatcttccacattttatcactactatttttaattttgacaatcctcaacccaaaccaaacctctttcattcagtagtcatcacatacaatacaatagttgtttatgtaaagaagacaccaacctaacccaacatagctaccacttttatgtgtgatttaaattaatgtaaatacgaattaaattttctattttcttaaataataaattaaattttatatttttgaaaatagtataaaataatattttaaacttaattttttatcaattttcttttttattaattagcctaaatataatttctagcatgaatagataaaaaaaaaaaaaataaccactctattataatacatctagatcaggttattattaagttttaatttaataaaaatttaactttaaagtattattcttatattgttttaaaaaatacaaatttaaattcattaataaaattgataatccaatcgattttttaaaaaacacatagtccaaaataataattaccctttcaattttaacaatcccaattatgcctagtttaataagtaaggtgggccaatttttttaattcaacttatataaaatatcactggtattatcttaagctccttattttttatttattatttttttatatagattaaaattatactta

SEQ ID NO: 30672 - DNA, 2666 bp, Cannabis sativa
  modified_base (59)..(59): a, c, t, g, unknown or other
ggatatctgcactttgcggattggattggattggatcttgcggattggattggatcggntattttatgaacacccctaggtgaatgtgaggtgatggaggatcacgacattattatagcaactaagaaagcataagtaactctcacagttactaatctaaaagttactcaaggacaagatctgtgagtaattatgttaaaagacatcgtgaccctaatcttcgcgagcaattaaactaaagataacctgacctacgtgagcatttaaactgtaatgcaccagatttacataatcaactaaatcaaaatgctggcgtacaaccgatggagcaacaacttgtggatcaaatacaattgcaagtaatatagttggaagataagttaaagaagtatcaggatggaaaatatgggaactattgggatatgactcaaacaaagagacaattattttatcctgatatattgaattcatgttttccttcaggattcaaaaaccctcatgtcgcacaatatgatggtacaacagattttgtagcgcacctgaacaactttaataccatattgcgagcaagcaatattttaaacaacttgcaatgcatattatttccaacttcattaataggagccgtaaatagttggtttgaaaaatttaccaaccattccataacttcttgggaacaattgtcgaaagattttataaagcaattccaagttgcgagagatcggagaccagaagtatcttcgttaaccaatgtcaaacagcaaccaggagaatcccttaaggcacacttaagttgtttcagtacgattgcacccaaagtcaggaatctgaatgacaacatttagttaacaacccttcaagctagaattacaatcgacttgtcaactgcatgggaagtatgggatgacttgcaaggttgtctaattagaaacattaatgagttcaatgaaagagcacacatttttgtaaggaaggaagaggtgcgaaatgaaattaagctgttaaagtctggctcgggagataaacccagcacaagtaccataatagcgagcactgtgaccacaaaagtaggaaatccatatcctattagctcgaataccaagaggaaggatgagtagagagactcatccaaggacaaaaaaaaaaaaaaaacaaaagaagcatgagaaatatgttcccatttacttagtatatactcaattgaatgaaactcgtgaaaatacctatcttgctaacaagaattaggttgcattttgcagacttgatccaatgagacatgcgagaaacaagcgagatcctaataaatattaccgtttcaatagagatatcgggcataccactgaagaatactatcaactgaaagatgaaattgagaatctcatctcacgaggttatttgaggcaatatgtgaggccataaggaaatgaacagagtctgcccaataactcggataactcaaggttacaacctctccctgttgagggtgagaatatcttggttatttttggagggccaaatctcgcaagaaacaacaataatgcacaaaagaggtatataaatgaagtgaaaaacaagacatcaactttcgctttagagcctttaatgaagttttggatcaattttttttaaagtgttgattgagttggtcctttatccagtaacgattcgtctctaatttttcagctattgtcggtagtttgagaaacgattttggtgctgaactcatgatcgattttaagttgtttgtgaataaaggttttttttaatcattaatggagttttttggtaaaaaaatgattttcaatttgtgatttattgttttatgagaagtaaattttggtttgtgtttcacgtgctaattcaaagtcttgtagtcgtaattaatgaaggagatggcgtgtttcaggtgtgaagtggtcagtttccattttcaattctcgtaagcaattatttttatattacggtatatgatgtttacgtgtcacgttataatatctatttaattaatgaaggttatttatgttattagataatatattaaatgtgtgtatttagatatgttgatgatgaatatttaaaccctttcccaaaaaaaagaaagaaaagaaagatagaaaaattaattacccgcttatttttttttgttgcacccgcctaaaatgtttgatttaataataaaattagtttttcttaaggggaaaaagattttagccgtgccatctcttgaggtcaaaagagtacatatctcggatctttggggtcaaatatgaaatattgtgaactttaaggaccaatactgcaatttacgaagggactgaatagataaaaaataaaaaatcgcgtcccgaacaatgttattatgttagacccaaagcttgttgcttatgaaacccaattcacccaatttctctctcgctgaaatggctccaattagctaaggtaatacttttcctcttcagcttcaatttcaactttagttcaataaattttttttctgtgcgtgtttatgtataatttgtttttgtcattctttcataggcatagatatttaatttggaactgttctctgcacctattgatcatatcacaatgcattagattctttgtgtgaaattcaatatataagtgaatgggtcttcttgaattttgattttattagattccat

SEQ ID NO: 30673 - DNA, 1841 bp, Cannabis sativa
atttgaaataactataatataatagttgggttataatttctcaactagccaatcaatattgattgaggaagtataattattcaaacttgttcaggtggttcatttgcctatctaagagttgaacttggggacttcgtagcattcatagcagcaggcaacataattctggaatacattataggtgcagccgcagtggctcgatcatggacctcctacttcgccactctatgcaaccacaaccccaacgacttccgcatcaaactcaacacactctccgaagactacagccacctcgatccaatagcggtcctcgccctcgccatcatatgcctcatcgcatgcctcagcaccaaaggctcatcacgcctaaactacgtcgcttcaatcgtccacattgtggtcattctattcatcatagttgctggcctaaccaattccaacacagctaactacaccccattcgcaccctttggaccccgcggtatcttcaaagcctcggctgtaatcttctttgcctatctcgggtttgactctgtagccactatggctgaagagaccaaaaaccccggtcgtgacatccccatcggcctagtcgggtcgatggtgatcacgaccgtgttgtactgtttgttatccttaactatttgtttgatgcaaccttaccaacagattgataaggatgcaccattttctgtggcgtttgaggctgttggaatgaattgggcaaagtatttggtagctggtggggctttgaaaggcatgactagtgtgttgttggttggtgcaattagccaagctcgttatgtgacacacatagctaggacccatatgattccaccttggttagctcaagtgaataaaaagactaagactcctatcaatgctactgtgactatgcaagttgctacagcagcagtagctttattttcaaacttagagattctagccaagctcctctcaatctcaactctcttcattttcatgcttgtgtccatgggcctcatcataaggcggtactacattagtggggtcactagtaatgtcaacagaaaaaagcttgttctttgcttagtggttatacttggttcttcaatagctacatctatttattgggccaatagtgagggttggattgggtatgtgatttttggacctttgtggtttttgggtacttgggcactttgggcttttgttccacaagcccggtccccaaaaatctggggtgtccctttagtgccttggttgccttctggctcaattgctattaatatttttcttcttgggtctatagataaagactcttttgtgagatttgctatgtggactggggttatgttggtgtactatttcttgtttggattacatgcttcttatgatagtgccaaagaatatgagaataagatgttggaggagggagatgtgtcttcagtggtcaaagattctgatcactctggtgttgctcttaaaagttagttcaagtttgtttttaggtttttaattaatgtaatattaatgctgtgcaaattgcttatgttatgattatggtgtgatttttcctttttctgttaataataaccaacaatactagtctaaattttaaattttaagtttttttgcctccctcatgactattgatgtagtatggtaatttgtttgttaactatttttccaataaaagtggtatattactatagtgtagcacataaaaaaaaagaaaaaactctagaagtaaggtattgtaaaaatttattaaatttagcacaaaatataaaagtgaagtttataataatatacatttcattgcatttaatttacaataataatgttactactattattaa

SEQ ID NO: 30674 - DNA, 1835 bp, Cannabis sativa
agatttcgataaaaattcagatctaccagatctctaccatttcagaccaaaaaacaccagttccaacaaatacgatagacataacgaaagcaaattacatactactaccaatgtctaacaaaatgcttaaaacacaacttacatattataatggtgtaagatttttgagtgattggggtgtgctctgatttttcaccaccgagagagagtgtcgacaatatcttagagagagagagagagagtggtggtagttttcagttttttttagagagagggaggggtgcacgagagggaagagagagggaagtttttttcaattttttttttttcatattttaacaattttttttttaaaaaaaaaatgtgaaatgggaaattcatgtaataaaaaaattaatttgtacaaattagaaagggggctaaaatttcatattaagaattttattagctgaaaaaagtaaaattcccaattcatattaaaaaaaaataaaaacatttggtatttataataataataataataaatcgtaacattttaaaattatttttataataataataagattttggtattagcttaatttaaattgattctggaaaagataaaaaaaatgatatattaatataacgtatccgattcccaatcaaatcagataacttttcactctcacttgaaagtcttatgattcctttataaaacacaagttcaaataaagtaggaccctttccaaacctttgctcttcttaccgattctacagcatcaaactcaccaccaccactacctacgaagaaccaagaagaataaaaaggagaaggagaagctgactctctctctctaaccgcgtcgccaagctctctctttcaattactctaggtatttctcgatatcacccttcttctccaattctgatctaaatcttaaacatatgtaagtcattatataatttgaagctattttgaatatttttatgtttgatcatctgaaatttgcttcatgttctagtccaaaatataatttaaatgtagtctaaattacaattactttttgacaagctgtcgctaatttgctctattaatgagccatgcttttattaacgctatcattggcattgatgtcctccaatttttccctgacagtgtggaattgttctttatatttattaatgacggaataatatttattagttttcttttgataagataatatttattaattagtgcacgcatatttgtttacacattttaaaaaatattgagacagtgtgagtgaatgagttcaatatatattttagatatacaaacaaagttgttttttatattgttttggctttaacttcggcttctttcttttctttggatattagaaaaggagacaacttggaattgaattaatggcaaaacacgaagagcttccaatcccagtttactcatctttggagcctgtttatggcgatggatctcaacttgaagaagctcagcttcgttttgaccagttcaaggctaagtttcttgagatatttggtcatcctccacatatcttcgctcgttctccaggtctccatatatattatatgtatataaattagtaaaactagtgtttggtgatggtacaagccatcatcggacaatcaataattgattttttttttattatttttgagtgcagggagagtgaatttgataggagagcatatagattacgaagggtactctgtgttgcctatggctataaggcaagacactattattgcaattcgaaggcgtgatgctggcgacactgagaagattttaagaatcgccaatgttaatgataagtaccaactttgcacttatc

SEQ ID NO: 30675 - DNA, 2651 bp, Cannabis sativa
  modified_base (670)..(673): a, c, t, g, unknown or other
  modified_base (1204)..(1205): a, c, t, g, unknown or other
ttatgagattttctatgaatgctaaaatataattaatttatcaaaaacgttcctctaaataatagttagaataatatgtgcatatttttgcacacattaatattatctttttcaacacaaaaacaggggtctataaataatatatcactattgtttggaaaaaaaatatataatattgtataagtggataacatttaaataatgtacaatgttttgcttaaataatgcccaatgtgtaaatgcaaagtcctttacttttattttttatttatattattatttgattttcctatatgaacatattgccctacacaaaagtatcaagtatatatgtttcttttctaagatcaaatatatttataggtatatttatatatacaagtaatttaagttataaatatttcacattaatttttagtagtaataatatttaaattatagtgtaattaaattgtaaggtgacaatccaaatttatgacttagaagtgtgcataaatcgatccaatccaatgacaaccgatcgatctaattacaaccgatcgactgctaaatattggatatccaattgtgattggatcgaattgaatgttatttttgaatatccaattgaattggatcggatttttattgaggtatccaaaaatctaatacatctaacatccaatcgaannnnttagtattttcatttagtttggatgagtaattagattttatattattatacgtaaaatatatatgtatatacaaaaattaatattaaaatttaactcttttattgaatttgatggatcaaatccaatacatagtggatctaaaatattggatggatccaatctcatccaaaaaatactaagtctaaaatattaaataaacctataaattaaaccaataaatatatgcgaaatacatttcaatctaacattcaatggatattggatcaattaaactgaaattaattagatcggatcaaatgataaaatttaaaatctaatatataattgaatcgaatctgaatagacaataaatactccacatattaacaagaaggtcaaataaaaatagggaatatctctagagctcaacaaatcgaaacagaccaataattatatgaactaatataaatgtaacacgtataggtagtggaccaaaagtaatagaaggttggtggaaaaatatattcaattaataaataataataataatnntaataattataataataataatgtcccctttcaatgaaaaaataataataaagctgttgtgttggtcactcacttaagtggtccatatgatattttaacaaaaatctagctacatagtgctttgtatgttaaaataactatgccaacttactaaaacagtacaagtacttttttgcttgaattgagacaatatatttcttaaccaaaataccttatagatgttgaagttataagcaatccctcaagaaataataacaataaacatttcaagaatctattttctttactaattaaattagggtagatcccatgaaaccctatccaccctcttagtttaatatttttgtttttgtttagtttttgagtaagagcatttcttatattagtgcttggagaaagtgcttcctgttgtggcaggatgctttggagattagttagtttattagtactttagttatttcagttaagagtttgttgtgaattcggttaggacatttagcttgttaatattctgtaaatttatttttcaattaacgagataagaaatacttttctctctctctcacaaacacatagatatggtatcagaagaaaccttgcctactgcttccatggtgagaccttccacacgctctcaagatggtgtttctccatttgcacctgagcatactcagtcaaaacctactccagatgttacttctgctccaattcttctatcgtcaatagctccaagacgacttcatacttccaagccacgatcttagatcgaatacgatacttctgattcacctgcaaatgtcgatctcaccacagagccctcacgtagatctcaatcctctctagatcgtcttgctcacaaagatgtgtctagtcctttcttcctcaactttgatgatcactctgccctcattcaggtgactacgttcctcaacgatgcaaattaccgatcttgaaagtgcgcatggccttggctccaaaaaaacaagactgcgttcactcttcctcgactaatactttaaaatgcaatcaaataaaaaataatattttctttctatttcattaccggtctaaagctacctaatattatgtagtgtggtagcctaattgtatttatttcgacattttggataacattaataattagtaacttatatctttgatctttttctcgaactattcgttatgaaggtaaagttctttaaggttttttttttattatttattttttcttcttaaaaggtggagtagtacaattaagctaaagaaataataatttaatatttaaaagagaaatgttaaaaaaaaatattattggtgtttagtaccattcttagtgtttgttgtggtattttaacacgcaagtatacatatcgttttaacaagtattactcacaaagagtgaggtcgatcccacgaggattacagttaagtacgttaaaattaaac

SEQ ID NO: 30676 - DNA, 2151 bp, Cannabis sativa
tattagcagtagatatgagatttgtgttgctcatcatcttttgtagtaccaatgtttgagtcaataatttaatttacatattcgtccgatatattatttcgtttttaggttaatatttttgctgttgtataaatctattattctatttacagttcaaatcgaacgtgtatttaattatatatatatatatatatattgataaagtgtatttgattatatttagattttgcatacattgaatttaaataattataagttttgtgtttacatgtactacaaaaaaattgaactgttaattttagtgacaacttttttgtcacagcataatttttttgtgagtaaatatgatttttagtcacaacaaaatgttaattgtgactaaaacataatatttagttacaaattgcccctaatttaattttagtcacaataagtattgtgattaaaaatacatttagtcacaacaaattataatttttgtgactcatacttttatccatggaccttttagtcacaacataaatcatgatttataattagtcacaatttttttcacatttaattacaaattttgttgtgactaaaattaaaatttttgtagtgatgacagtttgtgttgtgcaattcatgatccagttaacaaatcatgaaggaaaattcaaaccattgagcaactcttctacaaatctccaatcatccgtattataagctttataactcagattaattttaatcgcacacctagaaaaaatatttttccttctataattcttgatcagatcttggaggatgagaatgttgtgaggaatgaatccctactttataaaagctccttgatttagattaactagagaatgaaatattttctcaactcttttatacatgagcttagtgatgcctttgtagatggtactacatgctataagtttaaaattaatagctttacttggcataaatatttttggaactagaataatgactcattaaattgataaatagaataatacctgtatcaaaaaaatacataacggctttgctaacttccacaccggccacataagcttaaagaactctgagttatacccatctggctccgggcttttagaacaagggatactaaatatagcagtcttgatctctttgaaagtgaacgaccgaatcaaaccaagatgttgatttaaatccagtttatttccctgctccaagcaaacaaaatcaatccgatcagaagttgtattagaactatttatcattactggaaatgtcacttttaccagtacaatttgctactgcgctggtaaaagtaacttttaccaacgcattttgtaaactgagctggcaaaaaaatcaaagttttgccagcgcacatttgcaatagttaaaatctaacttttaccaacatttttcattttgtgttggtaaaagctctaataccaatgctgatttgccaatccctttgccaacacatcataagtaaatttcaatttaccagcacaataccaaacttttgctagcaaaaaaatgtgctgacaaaaataacatttattgtagtgcatatagctcttaaaatgatcaagaaaatgattcaccacctctgcataattgtctatcaaatgccctaaagtattcatgaaactagtgattatattctcctaattccttctcttcttcaaactagcatagaaaaaagttgtgttgtcatccccttctttaaccaagttattttgcttctctggataagtaaatttctaagaagtttttcctataaacagtactgatcagcagtagcctctttctcagaaaaaatacaagcttcatctctcgaattcgaatgaacattctccttaaccttttggtatctagccttagcttgctagcatgcttattgaatttcctaagctagtgcttcagtcttactaacttaaaaaagatcgagattaaaccaatccctctaactggtttgttttccataacagtgtgcttaaagtcattgtgatcagcccaaaagttgtagaatttaaacggttgaactcctatattctccataatagctgaggaaacaataataacacaatgatcccatatagtctcccaatgatcccagatttgtagcagagataaagcccctgttgagtatacaaaagtgaataa

SEQ ID NO: 30677 - DNA, 1611 bp, Cannabis sativa
  modified_base (1546)..(1549): a, c, t, g, unknown or other
acatttcgctgatgtagtacaccagtagttgtacccttcttcctctcgcactaatgtaacactaatggcatgatcaaacactacaaaataatggtacaactcctcaccttccattgagtttgatagaactggagccttagacaagtgctttttttgtttctagaaggcctcctcacactctttagtccattcaaactacttatttgttaaagagcaggatgcacttatctatggacttcaaaatgaatatgttgaggctgcgattcttctagtaacgctttgcacattcttgtgctttttttggagatggcatgtcactgaaggctttgatcttctctgagtttactttgattccttaagagctaacaataaagcccaagaacttcctggaggagacacaaaatttacactttttaggatttagcttcatcccatacctccagagaactgagaaggcttccttgaggtgtgtactgtgttcttcagatgtcttagacttcaccagcatgtcactgacataaacttccatattcctccaactggttcttgaacatcttattgaccagtcgctggtatgtttttttggtattctttagaccaaactacatcaccttgtagaactacacacctttatctgtctggaagctagtgtgttctgcatcaactatgtgcatttttatatgattatatccaaaataggcatccatgaagcttagcaactggtgcctggaggtggcatccatcatctggtctattcgtagaagagggaaatagtctttggggcaggccttattaaggtctaggaagtcaatacacatcctccatgtgctattaggcttaggaccaaaactggattggccaaccacactagatacaatgcttattagaggaagtcattcaaggtcagcttgtccacctccgcctttactgcttttgcccttactggatctaagggtctcctattttggagaattggtgtcgcatctttgttgatgttcaaatcatggcagatggtattacgattgatccttatcatgtcagaatggctccatgctggcacatcctgatttcttttgacaatacttatagggtctacatcgcaaatgctgacctcttctacatcttccattggttcaatcattctttcattccttacatggggttctaattcatcttcaacgtcctcccagacaacttcaacttctgcttgaatctccattctaggagcaataggtgcctcttcctagaccataaatatagtccaaatagagacattataacaactccttacgctcttttagtcatccctaaccactccaacacatccattgtcgtagggaaatttcatgcatagatgccttatagaggtaatactccaaaatttaccaagacgggatgtcttagtattgcgttatatgccgtcggatagtccaccaccataaaagtgcaatgtttgaaggtgcaagcattgttttctcctttgagggtgacatggagctggatctttcccattggctgttggaattattttaccagtatctagatnnnntaacaagtatgtttgattaacatcctaatatgaattctaaaaacaataaaataaacacataa

SEQ ID NO: 30678 - DNA, 1009 bp, Cannabis sativa
agcttagcttttttttttacagttttgctacaactgttttttctcacagcacagctatgctaaactgacccttagttatggtgatgtaacataatagagtttggagctgggacaattttattttgctgaaaataataataattgtaaaggtgttggtttatttattaattataattttcttttggtccatacacttattaagtaagaaaatcaccctacaattatgggatgacaacaatggatgtcgtggccagctacatatcaatctttcttaatttgaaccctaactcaaagtaagaatagaaacacgtgcacaaattgtcaccaaaaataatatataaaattaaataaatgcgtgaaacaaaaatatcaagggaaaaaacattattatctctgcctttcttccttgtctaatatgttcggcaatatgattatcctacgaaagaaattagttagaaaatatagagatcaatgaaagaacatgataaaaatgaacaaaataatatcaaaacaattataagcttatacaaaaagctataaatgattaaaacagattaagtagtgttacaactctaaaagtttaaaaaaaaaaaaaaaaaaaaatccaatagatgagctaaatagctcaaaaatttacctaatgaatagtgcttagctaaatatagctaagcgttattttggttttagtgcttagcaataattttttatttttttttataatgtattttattaattgtaagtgtaaaaataaataaatattatgtagcatataatattttattatttgtgtgtattataaagttattttttaaatagtttagagaaaattataaagaagttgatatatggtctaatgtaaatgtgtgaggtaaaataaaaagtaaagttttaataaggcattttaaagaatagagtaagatagctattgtgagtgctctaattaattttcttcatctatatacatgattgagaatctgagatgtagtgattgtgaggtctaatttctttt

SEQ ID NO: 30679 - DNA, 2235 bp, Cannabis sativa
  modified_base (1786)..(1794): a, c, t, g, unknown or other
ttagggcataaaacccaacgatatcgacatcgagtatttagccataaaaaggtctgataagtggtcattaagcacgtaatactgaattgagtgatcgcatatccttgactaaaggcatatcgctacacaaattcaaggatcataaagtaactatagaattcagttaccccttatgtagtttttggttgtacaactaaaattattgaatgaaactctaattttaatattttcttttaaacataaggtttagattttatttgtttatgtaaattaccacataaagtacattgttatgtaatgaatatatcgtaatacatggaagatatacttgacatataatgaggacctatcgctatgattcaatttttattatgtaatgagggacattgagtttaagagataaatctaaatgctgaccaagtgagagaatattagaatattttatatattaagtataaaatcaatcaataattttatatgtgtatataatacaattatatgttatattcattgaatttggtcacaattaattggttgatattctatatattgtcagattatgatttaccaaatatttgatttctagattttaatttctaaattaattgtcaacattaataagaaccacaccaaaaattgtgataaaacccgataccaaatatggcagcctccaagaactcaagaatttaggatgtggaactgcgacccaatgcttagttaagcatgaaccttggtatgaaggaagacgccagaaacgatgatggaaatctatttgataagtcaggttgaatgccacaaggaatactccttgataagttagaatagttctttcaagagctcaagaagaaaacctctcaaaattttattaaaaaataatccggttttccaaagtgtttataaggctttaaatagccaacttacaaccaagatacaaaaaagaaaactaaaacaattgaagaaacaaggaatttggtccccctccccctaaagaagactttttgactaataaagacaaaaaaaataggaaacaaaaataaaaaataagttgccaaaaatccaagttatgataaaaaaacgaaatcactcttaaatcacccttaaattgagtctacaattctccttcagtgttgaccacggtctcctcttgttttagaatttggatgactaagttgttgagttcctctttgaatctcttggctcgtgccctcgtcactggaccaactggaacttgacttgtatctttagccttagtgtcctcatcaccaccatcttgaaaaggatttgtccttaaatctttacttgcatccaaagggctcaaataaaaaacattaacagtagcactaatattatattctctaggtaaatcgagtcggtgggcattgtcattgattttttcaagcacttgaaatggaccatttcctcgagttagcaattagaacatctttgggtttggaatcgttctttcctcatgtgtaaccatacccaatcacctggctcaaacacctgcttgtgacgacccttgttagcttactttatgtattgctcggctcttctctctatgttgatgcgtgccctctcatggatttgcttcacaaattctgctttctttttgccatctaaattcaaatgctcagaaacacgtaaaggtgatagatccaaaggagtcaaaggattaaaaccataaacaatttcaaatggtgaaaatttagtagcagaatgcatagaaagattataagtaaattcaacatgtgataaacaatcctcccaagtcttaatatttttactnnnnnnnnnccctcaataaagtggataaagttctattaactacttatgtttgatcatcgatttgaggatgacaagtagtaggaaacaaaagttttgtcccaagttttccccacaatgttttccaaaagtaacttaagaacttagcatccctattggatacaatggttctaggcataccatgtaatctcacaatctccttaaaaataaatctgcgacattagaagcatcatcagttttatggcaagggataaaatgagccatcttagaaaatctatctaccaccataaaaattgggtccctcccacgtttactcctaggtaaacccaacacaaaatccattgaaatattaacccatggtaaactaggaataggtaggggtgtgtaaagaccatttggctaaaccctcgatttagcttgcttacaagtgacacatctaccacaaattcgctc

SEQ ID NO: 30680 - DNA, 2338 bp, Cannabis sativa
ctctctctctctctcttcaccttctctctcggactctaaagaatccaaggaacccaacaagttttagatcaattcaacaagatttcaggggtaatttctagtaggaattgcaagcaaagaacccaaggtaaccctggttcatccttttctcttgatttttgtaagaaaagttgggttttgatgcataagtttgggatttcggttctattaatgatatatgttattagaattgagttctgaggtttgagttatgattgttggtgtttgttttgagaaaatctggtggttgtaacatggttgtgctaggtttgagttttcaaactcaaacctagctcaactatggtaatttcgaattcaaaagtttgatgttgtagttttcagatgatttatgtttaatgttttctaattaggtgttctagaaagtttggtgtgatttgggatggaattgaagatgagaagttcgagtttgggtattaatatcctattttttgcacctggacgtcgcaatgagaatggatgacatgtgtcctacatttttgctacctgggcggagggaagtattcttagcagctcatgaatcgttaattaaaatatatgtaacactcggatgtttgaacaggttaatcaagaagatgtccgaccaagataaaaacttattcgtaccgagcaagccatataagttggcaatttcagagatcagtctcattcactacaagaaatgttactttcaccagcacagttcgctactgcgctaattaaaagtaaattttaccagcacatttcgcaaactgcgctggtaaagaggtcaaagttttaccagcgtacatttgtagtggctaaatctaacttttaccagcacatttacgcgctggaaaaagtcatttttgccagcactttttattttatgctggcaaaagttctaataccaatattgatttgccaaccctcttttgccaacacatcacaagtaaattatattttaccaccgcaatactaacttttgtcagcagaaaaatgtactggcaaaagtgacatttcttgtagtgattgcttccaagacacaaagacaatccctatattcgtgggatttagtaagagaataaaggcaatacgcattggtttccttttctttaaattgtaattatagaattaatgtagtttcctattttatttattaaaaattaaggaaaatcatttttcatgtaataagctcctataaatagtggcatgatcacactattgaggaggacaaaagaattaatccagagaaacactcaagagagaataccgatctaagagagaaaataactcagagatctattgtaagagctttagagaggaaaaatactttattcattctctcaagtcaatacaaagacaaggggagtaggctattaccattcttacggggtcgaacttctttaaaatttggtggtcttttttactgtttttgctttctattgtttactttatttaattactttattctgactcactgtccttggctagaagtgaactcaacattttggtgatttctttgagagcaaaaacacaagcttttgtcttaatcttgacaggttaacaggatagttgtacaaactcaaaagggaggccttactgatcaaggtgatccaatggtgacagatccaaacgtgaaaactcctggaaacacaaggggaccaccagggacaaaccccgaacaagttaatacacaaccacctacagtaggccgcgaagtgacttcccctctggctaggttcacactaagcgtacatgagactgggaacacggccaatatggctaccgatcagtgatgttaaatagaatggtataagacagtgacatagcactataaaaagagactcccaatcgcgataaaaataaagtgatgttcttacctactaatatatatatatttataagaaaggtataagacagtgagatagcactataaaatttctctaattagtattatttgttctttttaattcttttactttttaagttttctactaagcttataaatataaataataatttttttttattttatatatatatatatttaaagaaaaatttaaatatctaaccctaaattttctctaatttttaaaacatatataaccttaaatctatatatatatatataatgtttatatatctctctcatcaacactctttttcttcttcttcttttattttttgttttttaatccaattctccatctatctctaatcctattaagtaactattaattcttaatgtataatgagcattacatagcagtaacatcaagaccttgattttcaataggtattatcaatattctctctactt

SEQ ID NO: 30681 - DNA, 1127 bp, Cannabis sativa
cagccaattcatcatgaggtttcatcctcatcatcaggaggaccaccaaacgatggagcagaggttcatgtcatataccatcatccacctgatcattatggctatagatatggttatggtcaagggtatggaagtaactataatcataataatagtaatagttattggaacaaataccataatgggcaaggacaaggacaagaacaaccccaacaacaacatcatcaacaacaacaacaacatcatgagccagttgttgtgacaccaccagtttatgtgacacatagttacaacacatacaagccatcaccatatgtgacagagtatgagtatgtccggccaccacagccgccacggcctcagcctcagccgcagccacaacaaccttctcaaacacatcattatcagaataggattgagaggtactatgaagaccaaaaccagtattattataattacaacaacaacaatgtcagcagcaacagcagtaatggtggtggaaatatcacatcactttttagtgatgaaaatcccaatgcgtgtagaatagtgtaaaattacaaaagaggtatagtagaaaaaaggtttgggggggccaaaagggtgtgtttcttttacctgatatgatctatgaatgagtattgatgaggaagtttaattaatggaagaatagtgttatgagaagggaaaaaaacaaaacaaaaaaagttaatattattttctaataagagcatgtggaaaagaaagaaagaaattttaatggaaagaatgagattcttacttgttagtgctgaaagaatagattctggattccacttgggatgatgagaaggataattatagtagattacatactgcctagattaattcatttttgtatagaagaatccatatacaatgctatatagttttgtttagaaaccataatttgtagcccatcatttttgaaacacaactgtccctttttcttctttcatctttcttttctcatatatagtagttagctattcttttcatttgttcgaacaaatggtagctagcttctttggacgatttattgttatttttatatgtggtttaataaaataatcaaaacaaatatcatcagcttttatattagcatatac

SEQ ID NO: 30682 - DNA, 1980 bp, Cannabis sativa
ttattattattattttaggcaaatattgaatttatgaaacttatacatgtgatcatgtgaatctcgttttctgtaaactcttgaatattatcaaacattacacactccttcaaattatctataaaaataaaatatgaaaaatttaacaattcactcataatcacataattaattgaaaaaaaaaaaaattacctttttaaaaagatacatatatttttttattaatttaaaaatactacctttcttatataagagcttaattttttttttaagctcatccactaaaattcaaggttagctcctgataaaagaattttaatgtacttttattcatttcgacatacaagatacaaggtatctttttttgtttaattttatttatcatcgtatatgttatactatttagaagtaattataattttttaaaaattaataatttataataataaaaactaaagttcaaatattttattgtgcaataataattttaagggtaaatattattttggatcccgtgtgttacaaaagttagcaattagactctttgttttgttaaataacaaaatagaccctatattttccaaaatggtaaaaataggaccctaaactcaatttttaataattttatgttttaatataaccaattttaagacaatttttaacacaaacatatacaaaaaatataaccagctttgtcacaacatctctggatcagattattattaagttttattttcacaaaaaatgagttcagggttctatttgttcaattttaaaaatacatagtctattttgtcatttaacaaagcagagagtccaattgataatttttgcaaaatatagggtctaaaatggtatttaccctaattttaatatatgaacaaaatattaaatagtaagataatacactaaaatatttttttagtgcagtggaaaagtgtcatttaggaaatattaatagtttaattcccaacttatatattatatatatggaatagttccttcaaataaaaataaaaaagtcttcaaaagttattatcttttttgaaaaaagttgttgactcgcgaaagttggtccgaaggctttcttgtcctttcgggaagggtcctcaagaatggaaaggagttccgaataatcgactctaattagctttttctcatttgaaaagttccttcagtgagtaccttggtctgtgatttcggaaaccctcatataccctcccggaagcactcatacttatgctgacgtggatatctcactcaaaggagagttagttaagttggttattgcctaactaacttaacaatctcactttatgcaaccaccaactttagaatcttgatcctaagcttataaatatcaccaatgcttatcattttagatacaacgatcaaattgagttgagagataaaaaattgagagtagagagaaaaatgtatagagaaaagagagagattgtggttaggttttgtatgaagaatcttctgtagatggagaagattcttgagtaagagtgtgagaggtgaaacactttgagagaactcatcagataatcgatctcgactgtattgtactcgtcattgctcaatcaataaagaggatttggtggtgttccaaaactggagtaaagctatacatcacatcgatctattgaacttgaactaacatatattggtgctgattttgttgttttactactttaatcgtttctgaattttaatgctttgttcattcttggcttctttaattattgatggtgatttgataatcgtgtcattgataattgtttaaaatttaattaatttgattttacacctttaattataatttttcccacagtatatatctatatatatttagaaatatattaagtgtattcatacagaattgaacctttgaactttcaaaaaatttaaaaattattatcactccaccaaagaacaaattgttagagatattattacaatggaagaaaatca

SEQ ID NO: 30683 - DNA, 3852 bp, Cannabis sativa
taaaataatttccaacattaaccgtatatggccttgttcaacttgcagacataatcaggtttttctgtgtcaatgaagccttcgggctgggtcatatatacatcttcagtgagctggccgtttaaaaacgcattattgatgtcgacttgttgtatatcccaattatgttgagctgcaagagtgaaaactattcgaatggtgcaaggtttgaccccggggctatatggctcaaagaaatccactccgggagtttgttggaagctacgagcaactaatcttgctttgagtttattgaccgaaccatctgcattatactttatcctgaataaccatttgttagtaaccacagtcatatccggagttgggggtactaagacccatgttttctttctttttaaggcagaaaactcattattcatagcattgttccacttaggattagccaaagcttgtttgacagaaattggttctttttctgtttgaatatcagccaggtaaactttgggtttaaaaatacccattttggaacgagtgatcatgggatgggtgttgtgaggtggtgggggtgatgtggtatgagaggtgacactgtgggaatctggtataggtatattgttgttgtgagagatagactgagatggagaatgaccagacccgtgatcttgaatggataaattttcttgtaaagcatttgacctgggacttgagacattgtttataggaggtatgtgattggtaggtgttatttgggtgggaacttgaaagtcatttgctgaaatgggaagaacagtagtgcttttggaagagatagattttgggaacagatttttatatggaaattcttcttcattgaacttaacactcctagccacatatattctcccactaggatggagacatctataccccttttgagacaaactataccctatgaaaagacatttagatgaccggaatgagaccttatgagattgatagggccttagtaagggaaaacaagcacagctaaagatttttaacaaattgtaatctggtttttgttggaataatttttcaaagggtgatagataattgttgacaggggtagggagtttattaataagatatgaggcagatacaaaggcttcccaccaaaattctaggggcatttcagcttgggcaaggagggtcaatcccacatatactacatctacatgcctatgttgcctttccctttcaactctactctcccttgtccttgttgttggtgagtgtggggacaagaattcctaatcacaaaaccagcagctaataattgatttttgagaggagaaaattctttaccaagatcactttgaatacttttgattttggtattgaattgtctctctataagggcattaaattgattgaataaggatggtgcttcagctttggttttcataggaaaaatccatacaaatttagtaaaatcatcaacaagacttagatagtatttataaccatccatagaaacatgaaaagagggtccccaaacatcaatatgaatcaattgaaaaggtgtagtagttttattggctgtgggtttaaaactaaattgacgcatcttgccaatttgacaagcatcacagaaagttacatgtttacacttgacattaggagtaacatgagcaagaattttggctaaaactggcttggatggatgtccaagcctacaatgccaaactgaaacagatttagacttgtctagagccgggttgctagtggtagtgcaattaagagcagcaggaacactgctgagattttcttggctgatcttgactggtttttgaggcagggagggtgacttgaatggctggacttgaagcttgtaaaggccattattgagagtaccctttagaagaacttgcctcgttgtcttgtccttgataagacaacaaacatcattaaattcaagaataacatggttatctttgataaattgggaaatactcaatagatttttggttggaacatgtaggatatctttgagaatgagaaattgattaggattgttagagctaatagaatttgaaccaactttaaagataggcatagaattaccattaccaacaacaactttggcttttcctttgtagtccatgggattttgcagattttgagaatcggtggtcatgtgatgtgtggctcctgtatcgagaaaccaagcgccagagaggtcacttgtggttggagtttcagcaagattagcttgtggatgttctgaagatgtttcactgcctgggttgttggaaggtgtgggtcctgtgtaggttatgtcaaacctatgataacacttttgtgctgtgtgactggctttaccacatagctgacacactggcctatttccacagcctccccgattgcttgagtatccacttccccctctgttattgaacctctgaccacgaccattgtatccccccctgaaattgttgtttgttgaaagattggccagatttgcttgaacattagagagggtctcagtggtgtgttgctgtattcaaagttcatggctatgaagcatgaactgtacttcttgcagacttatgggattctcgtgagaggtgagatttacgacaactgcctcatattcttgacccaatcctcctagaatatacaagatcagatcatcatctgaaatttgttgtcccgcggtagcaagagcatcaacaaaattcttcattttcaagaagtattcttcaatggatagagatcctttcttggtggcttgaaggagacctcaaatttgaagaacacgagcacgggatcttgatgcaaatagttgagcgaagacactccatatctcagaggaggattggcaattaattacatgacccagcagttgttcagaaatggagttcatcaaccagtgcatcaagaattgatcaaatctttgccattgaaaaaagtctgggttggggagattaccttccagattctggggaggaggagggatagtgccgattatgtaaccttcaaggttgtaagctctggtggcagcaagaacaagggatctccaaaaagtgtagttggttctgtctaatcgtaaattgagcggaagcagattgttattgggaagtgcagcttgcatatggtggatctgttgtgttgcgttcggaggagctccattaccatcgatttgtcctccattgttggatgagttagctccagtcgacgccatagaagctctggtaccatgtgagaatagtagagagatgaaacagagtaaatgcagtggagaaatgatagaatggctcaactcaacatgaggagcagctactgatatttatagtgaatccaatattaggaaagtagttacacaggatggaaaaagctcagcacaagatcaagaatgtaaaatagttataacagaaaacgaaaataactaacataactgtctatgtaacaaacttatcctaatacagcatattggaactcacctatgctccatttcagtttaatatagcttgaagaattctgtaacagagcagcctctcctttttctgaacatgtctctattgcatctctcaaattaattaccttgttggatttattcttcagctcttggaaaaaaaaatgcttgagatgattatctactattttccagtaagaaagtttacataacatcattttatttgtctttaaaattccatgcttgtcaacataactagccaagtctcgaggtgccatgttaggtgccagacaatgactaattatgtccttttgagaaactgaccctaaccatcttcttcttcttaatatagcttctagaacatgcctaatgatttgattttctttgattgcctaattaatagcttcaggttaagttta

SEQ ID NO: 30684 - DNA, 1518 bp, Cannabis sativa
cataatcaatacaactaaaaggggagtaggtcctcatccatatctaaaggggtcaaacctctataattttgtgtgtactttctatctatttattattcctaagtctttattggtgattaatcagtgtttattagactctgagtcagttggtaattttttcaattaatattttagtgctttcattgagagcttgaacattcttaaaaatatctcatctcctttcacctgataatcaccatggtcatgacaaggagaagcatgtccactgaaccctaggatccgatggttgtggatcccaatgtctgagttccatccattgttgacaacccaaccaatcttgcccgaccacctcgggcaaacccatctatagagttctgactagaaggcccagttaataggcaagattaaacaagtatcggcaagttccgatcaatcctggttaacctgtctaaagtaccacaaagattcctttaacaagagctaccccctagggatatgctggagaaactgggcctagaggttgctaacctagtgtcattgagccccatttagacttgggggatgattctaagctagccaagctaagagagattttagggcaagtccaggatcattcaaacatcctccatcttgagcaagaagaaacatgtgctactataaccgatgctttcgcccaacagaaaagcgagttctaagaatagatagatcgacaagccgcgatcctacaagcccacaaagggaagttgaacaactagaatagggaggcaaatagattgattagatggttcaataaaagggctagatcccgggttgaagagccatcactcataaaggactcctttcgggaaaagtgttggttattcatatttagattttggtggttgtgtagatgatttaaattcaaattctcgctatattttcactttggctggtgcaactatattttaaaaaagttttcaatagactttaatcacatcatctactatgtatgttgagtttgtcgcatgttatagggtagctttgcaagctttttggttaaagaatttgattttagaggtatgactagttgattctattttctctcctatagaatctattatgataataatactgctgtcattttcaaagaataagagattagtagtgcttccaaacatatgaaaataaagtatcgcacttttagagacttggtcaagaaaagagacattgtgataaagtattacaagaccaagtcgatattagtagatcatccaagcaaaggattaagtgccatgttgtttaataaacatgttgttgatatggacattttataatcatttgttcatttggattagtgagagtttctttctctattatttgagattacatttatatgtaattttcttgtttattttatgaactacttggtttgttttgtgggccaataatttttattattgaatctttatgctttcaattatgttttgttatattctcgagaatgattgaattgaaaacatgtagttcatatcttgttgt

SEQ ID NO: 30685 - DNA, 8685 bp, Cannabis sativa
  modified_base (8343)..(8353): a, c, t, g, unknown or other
tggcgcaaggaggaattaataagttgagaatttacttagtgaattttagatctacttattgtaagctcggttatataggcccatcttgatctaaaagtaaataaatgaaaataatatttgcctcttgaagcctatcaaggtatcctcgagtcttttcgtatgttgtatacttggaatgataatgaccaaattcacatcttgatcttctagatattccaccacacacaaggactagtgcggggtagtaggataatagtgtatataaagttcttgtattctcaacacatgagcaaagaataatcttgttgtagtgatggatagaaaaagtttactggttaatcattttcagactttcagaaaagttacgaataattctcctatcttagaatttggtttatatagtatatgaaataaacccaataaaatttttatttaattaaatatttaaattcaaatcttttattaaatcatatttatttatttgaataataacataactaaattctgttatagatatttatattctataaccaattgagggaatttctcaaccacgtgagataatatctcaactactttttaaattcaaatacttatgtcttcaattaataaattaattaattaatccaaagacaaaactaatggggacactttatataggtggtgcatgagacacagtgcatgtggcgcctcccttgtcttggttaagacaagggatgtatttttgttcctaataacttttattttttcccaatttaattaatttgaaaaataaattatttattagaaaataaattatttctattttgcaaataaaaatagattttttttaagttttacatacaacttttatccctctccatgacattgtttcaaggtggcaatcctgggaccatggacctatattctaagctctactaaactaaattatttattgaatctcattaaccaaatcatcttatttattaatttcatgattactccactaaaatatggaattgaactcttagtaattatagagttatacttattgagttttactatagtatccattgatacaatcaattccaataattagcccttctagtgtcgcttcgtaattagttttagtcaaattaccgttttactcttgtcattacttctttatcctttagtatcgttaattcactagtgaaagtataatttagatctaatctaaatttaagtgcaactttccagaattaacacataaaagaaactaacacacgatccgttagaaaagtcagaattctataattatagatcatgtttcagccatccacattattagactcacaaaatagaagttgtaagaatcatcttttctaagaaactttaacgagtgaatcaaaaaaactaataacatgaataagacttcataattactccgaatttaggctgatctaccattgatcatgattatgatatgaatcaggtctttattataaatttcgtatttgataaagacaacttaattacatatcggttcttatcttatatattctctattatatacaacaccttcacttagatgtcatgctacattactaattcgaatcaagattacttacaccaaataacgggcatcagtgaaccgcattagcaaccattgattaaagattcctaaaatttaatatattgctaactatttttattcatggctaagtgatcttaattctctatacaatacaagtcacaaccttatgtaagaataagaaattttctaatatttatatatgaattatttaaaattaaacattaatgcattcatgcatatatcaaaatatccagttcttattcataattagatatatctttataggtttttcaggacataaaccttaataattgtattcgtggaccgtacataggtaccgttctgtcaaagtcatccgagatcatacgttttcgaaacctgcatctatatttctcatgaccaataataccacatttatagtaaatacatggaagattccatacttgaaatagttccataagctaacccttcctctagaggaaagaagaggccaaccaagagagattttaagagctgaacttgaacctgaaattttatgtatttagtggttgggaacccatttttccacagtttatcaatgttaaccactgtcccaatcttgtttgtaattttgtagcatttttcgaggtttaaaatcatgcgaggatctcataagcacaaacccatagtggcatcgattggaggtcagccgaagcccaagctccatcatttggcataggcttgacaattaagaaaccatcacaagcaatccacagtccatgcttaaccacctattgacactctatttgtagcatgaaatgtaaaacaaaggtgctcttagccacctcctgcatttgccaacccgatttaagcttctatttccaaaatgaaattgactaaagtaggccattaaaattaacattcgtagatatcaatcgtgccaccacagaccactcattgaggtcttttccaagctcattacctttggagttcatgactagagcaactttctctgagttagtcattacaagtttccctttgttatccaaagagagactcaaaacaacaaccacaactagtgtaagaactataggagggcggcgtatacaaagacccaaggtaacaaataaaccctaggccataggagggccaaaaaatatagaaaagattacatacgaacgaacatagtacgaagagaaaaaaattcctatccatttgatcattgcgatcaagttccctacatactattttaacattatttcggtccccaattagtttgataacaaaagtatagtatttaagggtgtttttatttttcaaagttcaatatttagttaattataaattaattacaatttgtaagttttagcttaaggagatatttggtataagttgttcaaaataatttaattaattggaataataaaaaaagagaatataattatttgaaaacttataattatgtttagttatgcatatgaaaatataattaaattactgttaataaaattgcattatttggtttaacacacaattaaataaattgttgaaaaaagttatataaaaataataatatattaaattcatagaaggaagattgaaagtaatatttggaacccacattttatttaagattatcttataagaagttaatcttatttccattctaataaaatttctatccttaaaatagaaaaaactcatacaaaacatactaaaatattatttcataccaaacagcccctcaaaatatgtgggtttaatctctgaaatccaaatgaaaaaaaaagtgtgttaaaaagcagcgtttgggagtagaaaagattgttaccacaattgtgtgaagacaactgagagtggctttagaattggaaggctgcgccaagagaaagttatggagaagaaagacgagacccaacaccatgaaccagagctagaccaggtagtaaatccatggcaggtatcggcgaaagacggaggcaagatagattacgacaagctaatcgatcagttcggttgccagcgactagaccagtcactcatcgatcgtgttcaccgtctcacctctcgccctccccacgtttttctccgtcgtggtgtcttcttcgctcaccggtctcattctcttttcatttcccttctcattttccgtgattgaatttcaattaaaaaatttctgattttgatgatttggttagtgtgcagggacttcaatgatattcttgatgcgtacgagaaaggccagaaattttatctctacactggacgaggcccatcttctgaggctctgcatttggggcatctcattccctttatgttcaccaagtgggttttttttttttttttttttctttatctgtgtttgtttctcgagaaagattaatttttctgtttggtttggtcctcattaatgatgatgatttctgttgcagatacttgcaagatgcctttaaggtgccgctggtcatacaacttaccgatgatgagaaatgtatgtggaaaaatctctctgtagaggaaagtcagagacttgcccgtgagaacgcaaaagacataattgcttgtggctttgacatttcgagaaccttcatcttcagtgattttgattatgttggagggtaagtcgaaaattctttacccaaaacgttaatggagaatttgattcacttttctttcttgtttttcaaagtgaaaatgttagtttggtcacttttgtaaacacaattacatttacaacatggtttgttagattcttcgtttgtcatttatttatttatatatatatacatatttttgtgtagtgcattttacaaaaatatggtgagggtggctaaatgtgtcactttaaataaggtattataacaactctacttttccttacagtaattgttttctttgtcacccgttctttacttgagtatctgtattatgtaggttactggaatttttggtttttcgggagaggatcatattgggaaaattagttttccaccaatccaggtataataaagatgataacagtggtggttgctttgaataaatttaagtgatttgtcaaattctttcatctttgtttctgggatgtttaaaacacattaaatttgttatatttgctgggttcttttgttcgtgaagagttacaatttgccttttacttggttagtgcaggctgtgccatcgtttcccagttcatttccacatctattccagggtaaagataatccccgttgcttaattccttgtgcaattgaccaggtatttggccggaccatttcttggaataatatagatttcatttatattactttgttttattgatttatgtccacatggcaagcacggggaagtttaagattgcatcttttcatcattcttacatgcctctgttttttgcataggatccttatttcagaatgacaagggatgttgctcctcgcttaggatatcacaagcctgctctgattgaatcatctttctttccagcattgcaggtatatgtgtgataaaagcatggactattttctgtttatattttctcctttgaacacatatcactaccatgaaacttactttgaggaactcgtgcaaactcgtggcaggggtttctttcatgtatttaaaagaaaaatggctgaacattgtataaatattatatctggatgttaattatttcattgacttaaagttttcatttttttaacttactgtgctactctttgttcagaaaaaagaaaaaaaaaagaaacttactgtgctacatttgaatcgtaaatatccagttatgagattttctttttcctttacaaattaaataactttctatgcaatctctcgtgctttttattttcccaactaattgcttatgcctttatcttcatcttaacacctccagggtgagacaggaaaaatgtctgctagtgatccaaattctgccatatatgtcactgattctgcaaaggatattaagaacaaggttaatttctggttcatgtagttggttgtttgattgtttctgtaacatcagctgcttattttctcatataatcatctctattatggttcccttagtaacagctgattctggtttgcatggttcctcttcaccttttctttgaatcatattcaatgaattcatgttatctctggctttatattgctgtgacaggtctatgaaagctctaaattttgctgtatatgcaggtaaacaagtatgcattctctggtggacaagattctatagagaaacacagaaagttaggagccaatctcgaggtattattgttgctcccctgcccttttttggaaaatgatagtagaaattgttatatgcttgctacaacatgttaactttcctttttagtaccaaatgtgttagtgtttatttgaaatttaaactagaaatggtgattagtctttaattgatagagttattgttatcatacaatttttcaggttgatatacccatcaagtaccttggttttttcctagaggatgatgcagaacttgaacacattaggacggtaagatctctgtcttattcctgtaaactggtcccgtgatggatatgcatgtatggcgtttagtaacgttataagctttaatgcatttcaaatttttgtataatgaaagtactgcttgcacaagtataacaatttatctcccatttctaggagtatggtgcgggccgcatgctaactggtgaggtgaagcaacggctcattcaagttttgtctgaaatagtagaaaggcacagtaaatcaagagctgctgttacagatgaggtatgcttctgcatcctcctgatcttaattacaacaccatatagttgcacttaaacatatattttccattctttctcacctgttaacagcattttcaagaaatgtgtgtttatccaagaaaatggaaatccatttctcattttcagggaagcatttggatcatagaatttgcaatggaatccaccaccccaccacttcccttagtattaatactgattttttttttttcttttgacagatggtggatgcatttatggcagtgagacctcttcccaatatgttcaactgaagtatgcatttaataatgtgccagttactgctcgatttttttctaaatataactcaaagcacagttttggaacattttctttttggagagtcccatttatataaatcacaattctagttgaacaccagtttgccatagttgattaaaatttcgactatgaaaacgttaacattatctcttttgattttaatattcttccaatttcctttcctgaaaacaccagtttgtaaagggttatttatatcctgagatatgcatacaattgaaaacatctatgaaaacgcttttgcccaatacaaattttagtgtaacttctcctaggaagaacatgaaagctctcataatagatattgactttagagtacaaatccttctttcaacaattaataataaaaatagaatttaccaatctagatgtggattagatcaagaaaatatggagtggagatccctttattttctttttctttttgagagcagtgtagattttaagaggtatttatgttctaacttggtatctctcttcgattaatgcaagcatttgaaccaaataaaaaaaaaaaaaccaaattattttttcaggaactcatgcaaactcgcagcagaataggtggattaataaagggatttttacaaaaaatactaaatttttggtaagtttatattactgctatacgacaagaattacatttatattgtcttttttttttctctcttttatactgaaaacaccaaaataaaaaatttaaaaatgaggcctccatcttgcatattcatggacagaaccactacatcaacaccaaaacagttggaaaacaatcattaatttcaaagaaattgagcaaaaacattgaaaatatggagtggggatccctggattttctttttctttttgagagcattgtagattttaagatgtatttatgttctaacttggtatcactcttcgattaatgcaggcatttggaccaaataaaaaaaaaaaccaaattattttttgaggaactcgtgcaaacttacagcataataggtggattaatacaagagatttttttacaaaaatattagattttaggtaaaagtttataattttactgccagatgacagaaattacatttatactgttcttttttctcttttatattatataaaaaaacgaggcctctatcttgcacagaatcactacagcaacaccagaatagtcgaaaaataaccattaatttcagtaaaattgagcaataacagtataattgacatcaaataaataatcatggctatatttgcaagtcatgattttataaaaactaacaatcttctgcacaacttcaataccagatgcaatagcggctatatttgcaagcccaattttaaaaaatcagaatgaaaaaacagctaaaataaaactaaaaaatacaaaaataaatgtaaaacaatgaagcagatataattacttagaaaagcataaaagaatcgcactttaaaacccttttgctagtgagcttgtcaaatatttttataggagaactagaacaaaaaaccacaaaaatagccatagagaaggaaaaaagaaatgtatttatagcctccatcttccacacccacggacaaaccaccaccgtatcacgagaacacctagaaaataaccattaattccggcgagatggaacaagaacagtgaaatcgacatcaaataaataaatcataaaaaacaactgcaaaacaacactaaaacaaatnnnnnnnnnnnaaaaaacaaaagaaaaaaggattaaaaaaataatcatcttctgcacagcctcaacattagatgcaatagaggctatatttgcaagcccagttctagataggggtgcttgcggtgcgagtggcgcggttttttactattttttttcaaaccaacccgcacatgcggattttttaatttcccaaactgcacatgcacaacaaaactaaaaaatcgcaaaaatcgcaccgcgaaaaatggtggggtgcggtgcggtttatgcggtttgtactatcactaaataattaaaatatcacaaatacaacaaaacttgagcaacacttgtcaaaaatacc

SEQ ID NO: 30686 - DNA, 1321 bp, Cannabis sativa
ccattgcttggatgatatagttccctccaatcctaaagaaaactctatcaacaaatgtgttccttacgtgttggctatcccctgaatcataaaggcaagcagaaacatcaaaatttaagaatttttttatttttacacttcaaaatagttttttttgtcttttgcatttttacgaaattctatataaaaccccccataaccactcacggaacaacttaaattgcaactaaaatccacataaaaactacctcaaaaattaccgaagcaacaaacaaaataatatatggaataatttttcaaaaattcatatggcaaaatcatgtatagatcataatttaggagcaaaaatcttaaataaccaataactttcattaactttctaaataaatattcaattcttaaaataattacaaaaagaaaaattagaaaaagcagctcacatcaataatgaagcctcatttgccaatgttgtctttgtctttgcggagttgcaaccttttttatctaagatttcatcatctatgtctctataaacccaacttgacaactcatgtatgaaaatggttacaaattttatgatttcttttttttttttttttttcgtttcttaaaactaacaaccccgcctaaccctacgggtatcggggaattataacaattgttacataagtactcaggaaagactcgaaccttagacttcatggacctgagtttctatgcttagggaagagctttagaagcttgattagctcgtaagtgcgcctgtcccgacccgaacacaggcatatatcaagaggagtcaatccattctgcaccaaacaacaaattctaaccattaatcttatgtttggtatgaaagaaaggaaatagatgggaaacaaaatgtaagagagaaagaaagtttatttctttcttgttgtttagtggacatgaaagaaagaaaattgatttattgatgtttataaaacttttcattccatttttctctccaaactggaggagaaaaatttcggtaggccccacttaatatttttctcctcacttttctcttgtctccatttttctttctcaccaaacactacctttttttttcctttctttccacttttcttccatatactttctttcctctcatttttcctccctaccaaacaaaggattaaagcaaagaaggattcagcctgtgttgttaccttgttttttaatgtcttatcagcgcctttgatcaataagagcttcacaacatctgttcttcgtgcttgaacagcgagatgtaacggtgtccatccatcctagtgagttctcaaacacgaatgaaatc

SEQ ID NO: 30687 - DNA, 2028 bp, Cannabis sativa
actgtagcgtgccttagcattagggcgttacaatttctgtcacacaaaggccctttaccctacaactattacaagacactggctgcctaggtattaaaccattttcaactcccatggaacttaataacaagctcaacaatgagtcaagaaaactcctaactagccctacccaatacagaagcttaattgacaaactcatatacctaaccataacaagacccgatgttttcttttctgtaaacaaactaattcaatatctttaagctccaagagagccacacctccaagcaactaattgcatactgcaataacgaaaaggaacacctagacaaagactcttcttttatacctccacaccagaaccaatacaccttcaagcttttgcatatgcagattggggagcatgcttggacactaggcgatccatctcaggttattgtgtcttccttggcaaatctctcatctcctagaagtccaaaaaacaacatagagtatcttgctcttctgctgaagcagaatacagagcaatggctggtgcagcttgtgaactaacttggctccattccattctccatggctttggcatccaaaccaagcttccatcaatactgtcctctgacaactcctctgacaacaatgcagtcattcacatctcaaaaaatatatctactacgagcacacaaaacatataaaaattgactgtcaccttatacgagaaaaagtcaacaatgacaacatcaaaatgaatcacattacttccaagtccaaacatagccgacatcctcaccaagcctctttttctcactcactttcacaatattgtatccaaaatgaatattagaaatctttatatttcattttgagagggcctaattagacttaagtggataaattagttatgttagttatagggagttagttaagtacttttatatacagtaagttaattgtcctaaccgactctacactgtttatatatacttatattgctgccattgtaatcatttgactcataattcaatatcaatgaaatcgattccactttctttcctaaagaactaataaatactgctcaaaaaattcttacaaaattaatgtggacgaaagtatcaaatctggtgtagatggtagcagaattggactagttgttcgagatttttagggacattgcatctctgccaagacttctttcatgtaaagaaatatgtgcgtgttaaatgcagaacttgttgctatcaagactggacttttactagcgaaagagattaatctcaatagcttcaccatcgagattaatctcaagtttaagaaatgctgattagatattgtaattttaaatgatattggtattcttagaactggttgcaactcgatctcttatgtggtttggaaaaccaatggcgttgctcaataatagccaaaatagttttaatttcgaaagtttgtgctttttaaaacgggattaattcgtgtattgagtgctgctttggaagcaagcaaacttgtcttttcttctctactttgtcactttttctttctttcttggtaattggattttatcaaatacacttcccattaatgaattaaggtcccactgctacactacagggaataatgatacacaaatagacattaactagtacattaacaattttcaatttccctcacagccttagagtattttaatggaatgctaaagaagtggtgtattgttatattttagtatatttaaaaaaaaaaaaatatattctaatagtgttttaaaaagtgtgttaaatttggtacaggttaaaaattgtgccaaatttaatacaaaatatagcattgtactaaatttaagtacaataaattttatctttttatttactatagtgcgattaattattatgattcattaatttttatataatttaatcttttttatttattacatttttattatttaaacaattaaaaaataaaaaataataatatttatatatttttaagaaatttttacatgaaaaatcacttttgcacaatttatta

SEQ ID NO: 30688 - DNA, 1538 bp, Cannabis sativa
aataatttatattaattatatacacataaaatttaatataacaataataatgttataataatatttttattaataataaaatcacatacaatttattttatacaatttcaatttaatataacaaaaataatattgtacaatttaaagtcaccatatatcatatttgtttttaaaaaataataataaaatcacatacaattaattttcattcatcaaaataaatgctaatttgtatattaatttctcttgtcatatagcttttctttaccaattttttaagtacagaaactaaatggaaaatattatattatcaatcatgaaaataagaaatcaaaaaaataaatttacaagtccaacctctacatcatttttgttttgtgaaccatgaccccagccacaaattcaatgaatctgaaccatcccaccgcctcagtcaacatacagataaaaaatagatatacatttacccataaatccaaacatctatacatatttcttgccaaaaattaaaacaaatttcatgtaaaaacatgaaatttcagaacaatcaccaaataaaaattggttgttttttattaactaaaaaaaatattattgaagcaaaataaatctaaaaaaatcaatccattttccctctaacatacacgaaccaaaaacctctgtgaaacaccaagctccgtcgaacacagacggccgaggtcaacaacgacgtcgacgagctcgaatgttgtcacctgcacaagagagatagcgagagagcgagataaagaaagagaagaaaagtagagaaataaagaaaagaaaatgagaacaagtgctgacctttgggtttatgggttgtggatctgggataagcatttatagaggttaaatagttgtctcaagcgaggaggagagacgccgagtcggagagatgctagaaagggaggatggcgagtcggagagatgcctgaaagggaagatggcgaggtggatttttggtcccattcgtcggaggagagctgcgcagccaagagagaaaacgagagaggtgagagagagcgaaagaataactgaataaaaaaaactagggtttgtgaaatgtccttttatttaccctatcttttataatttgttttttttttgtcattaaaaagtaagtaagaaaaaaaaaggctaaaaagtgggattggtagggtcattttaattttatttttaaaaaaattaatattttataattttttttttatatatataatttttttattaagtatacagtgacgcgcatggtgtgattctgaatacttttagagttgcacaatgaatgtcactatatatatttatattttaaaataaataatttttagtgacactttatagtttttagtgacacacattatgtaacataaatattaaattttactgtcaagcaatgtgtgtcactaaaaattaataaaaacatttagtgacccacattttttatgcatgtcactatagagtgtcactaaatgtgtaaattgtagtagtgctaatctctcatcttgattaatcttcgttta

SEQ ID NO: 30689 - DNA, 2301 bp, Cannabis sativa
  modified_base (2030)..(2034): a, c, t, g, unknown or other
  modified_base (2180)..(2187): a, c, t, g, unknown or other
  modified_base (2251)..(2273): a, c, t, g, unknown or other
tattttattttttatagtaaaataattcatctatttatttatttatttatttattttttttgaaaaaataacttcaaaaaacaccaccaatgaccaatgagtttaaaaggaccaagagctaaagaattggttaatattctaagactaaatagcggtataaatactcaaagttttgagtttttaagcagcataaatttaatgattttttagtagcattatttaaaatttgggtgttatatgtgtcctgttaaagacaataagaaaattacagttttataaatattatgtacttatgccactcaaaaaaattattggatttatgctatttacaaacctaaaactttagttacttatgccactatttactgatataagtgttcttttactctctttttgactctccacatatactaatgacaagtgtcatttattgaaaaataattatttacactaataaaatatggtaataatatctcactacaattatgttatgcttgcaattgtagcggaagatgcgtcgctcaccaattttggccatctattcatataaatgatatccacttctaataaataatttttttttttttggtttaaatgaacttttcatttattttttgagaattaaaaaaatgaagaaaagaacattttaagggaattttatttacatacaaaaacttataaagatattctattttaataatttttattttatatagaatttatatcgttaattatattagggttttttaactttttttctttcaattcatattcttacaaattaacctattaaataaaaataaaatatattttaaatattatgtcaaaaaaaaattaaaactaaaaattatataaaattttcttagaagaaaataatataaatatataatttagaaaaaaatataaaaataaaatcaaaatatgtatttatctacaatcatgagttaaacataagtataactcttacaaatatgtaaaagtattttttaaactgttattaaatttgtattatttctacaaatgtcattatatatattttagtgatatttttaaacagacaacataatcgtgtttcacacagtcattatactaattgacaaatattttttttgcattaatttatgatttttttttatttttataatttacaattactacattaaattatgccgcagacagtctactcggtggatcgctcaaataattgtaatttgctatgacgatatgctttcaaacttactcgatcgttatcgttataggtcaagacctacctgcacaatatggagtaaatcttagacgtctaccctaattaggggatatttcaaatgagtacgggtccgaatcacaggtagcaaaaactagctactcggtggatcactccaattaataactgtaattctctacgacactatgctttcaaacttactcgatcgttatagatcaagacctggagtaaatcttagacgcctgtcctaattagagggtatttcggaacgatcgtacgatcccatcaggtagtagaaaccagctactcagttgatcgctcaaataactgtaattctctatgacgctatactttcaaacttactcgatcgttatagatcaagatctgccgccataatatggagtaaattttagatgcctttcctaattagggggtatttcggaacgatcatatggtccgatcaggtaccagaaactagctaatcggtggatcactcaaataactgtaattctctatgacgatatgctttcaaacttaatcgttatagatcaagacctaccggcacaatgtggagtaaatcttaaaagcctatcttaattaggaggtatttcggatcaggtagaagaaactagctacttggtggatcgctcaaataattataattctctatgacgatatgctttcaaacttactcgatcgttatagatcaagacctaccggcacaatgtggagtaaatcttatacgcctatcctaattagagggtatttcaaaatgatcgtacgatccgatcaggtagcagaaacnnnnnactcggtggatcgctcaaataactataattctctatgacactatactttcaaacttactcgatcgttatagatcaagacctaagggcacgatgtggagtaaatcttgcacgcctatcctaattagtgttgggaatattttaccagnnnnnnnntttactaacatgtatgttgattaaaatccaaaatatgacttctctaaaataatgaaataaacannnnnnnnnnnnnnnnnnnnnnncattgattgcagcggaatataatggctc

SEQ ID NO: 30690 - DNA, 2395 bp, Cannabis sativa
cagcattgtgggaaaggtcacactaaagctggcagaggcagtgggggtcaatataactgagacaattgtcaaaattcaaattaagcaatttgctaacaagatattatataactcgagtctcttgttttccctcagattgtacctatggggcgagcgatgcttcttctgttttgttatctactctctacaattcttttgctaataatatataaaataatttcaatattacctcgtatataaaagtttattttttttttttcaatttaagccttattaaattttaaaattacaattgcatacgagacgtgaatttggtggggagtgttctcccgtccccattcctacttattttccatcgaaaacagagcgcggattctcctaatgggttggggacaggtgggaaattccctaatgtaaaaataaaatttattttaaaaattttaatgtataaaaatataattcaatatactaattattatacaaaacataacttaaaatactataaaaatgaaactaatatactaaaaaaaaaaataagaacacatattataaaatattaataaaaagataattaatatattaagtgggttcctatcaggacagaaaagagagtgtcatgcctatccctccattcagagacaagaaatgattcccgtccccgctctattccccatatagatggggcattcccgctccattaggagcggtgccggatccatcttaataggaaaaatatgcatctctaatttatatataacttataaccatgttaaataattctgcatcaatacccgcaatgtggatggtaaatacctctatatagatcaacaataacaaattcaattaaaaacatacatggatgagattaaatatcaatttatattagtatacataaaaataattaattaattagtacaagcttcaactttatagccacactcataagcatagtcaacaagttcttcaaactctttatcatcgttgatattaacatagccattgtgttcgttgtgtgaacgaaacatagctatgttagctctataaaacccagaagaagagccaagttccttaaacactttctttatatcattcttggacaatttcccatctccattcatgtcatgccttttgaacttactcattagttgttctttgctacattgggtttgaaccttttgacgttggactaccactgttttagtagcaaagtggacttgtataaccattttaattaatttcttatatatatatataaacacaagagaaattaataattaagtaggaagaagaaacaaaccaagtactaataacttaagtacttgtgtgttacaatattagtggttatgataggaaccccagctctcttgggttatatagtagcaaaaattaaatattttttgtattgattattaaaaaaagtttatgtatgtatagatgctttcccacattgttcatgctttgttattaggcacaagtatattaaaaaaatttaaacaaagatttaataattaaaaagttagagtgacttaattattattaatttagtaattggaaagggaaacacttgcctcgtttgagtcctttggtttggaatcttagatagttctttcattctatatatacatataaagttaggcaaaattactaattaattaatatctacatagaaatattataatggcttttcatttattttcatggaatgcatgtgtttcattttaatcatggagtaaaactttagcttaacaaaacaaatcccatgatcggtacagagaaaagaaacaatacttttgttttgtatgtataatatactattattgataattgagtgtggaatcttaaatattttaatttgataattatcataaatatcactacattcattgcaccacactcaaacataatgcataacagacagtacgagataccaaaaagcaatgaataatggtcttcttttaaagtcatcgtatttaatgtgatggctaaattttagcttatttattgatgataaactagcattttacgagacacccataatatctaatacatgtatttctatagattgacgattttttataatatttattaaagtaaaataagtgcgattcaatattttttttttttgagtgcagcgtaatggtattttataatcatatattgaggggtgctaaggagactttcttttacactctctctataaattagtgacaaatgtcatcctttgagattagtgtatttatacttaataattagacataatattattgtattattacatttatgtcattataataaaattaacctgctaattttttacttagagcaacttcaatgccaaaacttaaatttagtattaaatcaaaactaaaataatactattttagtactatttttt

SEQ ID NO: 30691 - DNA, 1504 bp, Cannabis sativa
ttatatgatctgctaataatatagcagactttggactaattaaacaaatgaaatttttttaatagatgtgtgcactaaatccatatagaaacaccacaaagaaaaagaaactgttattcaataaagtatctattttttctatcaaacagtaaatattggtaacatactctacatagcaaattcaagatgaggaaaagtgtaaataatgatactggaataaagagaagaaacttattttcagcatatgatctaatcatcttcaatatgtaatgtttaacaagagcatataaccataaaaatgtggatcatatctagagatttgcaagtagatagcacgacgagcgtacaaaaataattttttgattatgaaaagcacacaaaactagttgattatttctttctatgtcccaattaatcaacaatgatagaaaaaaaagtttgtagctttctaacaacaaacaaatagtctaacaaagaaatacttagccacacaaaattctccttaattggcataaaggaaaaaatagcagtgggtaacagagaaatattgtgttgttatgaaaatattaaagaggaaaaagaaagagtaagagacctaagtaatgtccttttatcaaacaggtgagagcctaaaatctaattatccatcgaatatcaataccatctgaattttctcacactatacgttgtcgtttcactcaactcaatctttcttcttcacactcttcaataaattagtgactaatttataatatgatcagaaattgtagtaagtggatgttccactattcatgctctgccatagaatcgtatagcgacgaactttttaaaaataacctaaacccattttacaagtccctttttttttattgtttatcttgttaagaaatccataagaaaagtaagaatagaaatagtataaattgtcaatgataacacaccgttgtatgacctatgaaagcaatagtctccgcccacacaatgtgttcactaaaatgcttcactctgattcttcactgcaattagattaacctaaaatagaaatgcaagtttaaccggactagaagtaaaaatcctaatatgatttttgaaaacatataataataaaaaaattaataactaaaaccataatcaagaaattacgaacctgtattgttttgaaaccactgtcaacttttaaagaaaaaaaaaaacaatcaagtacagaaaagggcaacaaaactctagaaaaaatttgagaaaactaaccccaatggctgaaatcggacttgtggagctattggctttactcctcccgtggagaacgaagctacctcgaaatgtttagaacgaagctcgattttttctctttcgcgcggtctgatttttttcgccatattcgcgctggtgtgctgctcattcaaagttgaaaagagaatatgataatgggctgctattattaattggggttttatttgggcctgatacaacaactactgtacctaaactaactgtttagttagtt

SEQ ID NO: 30692 - DNA, 4138 bp, Cannabis sativa
tttttttttttttgaaataacaagaggctgattaaaaaagaaaccgggaggggtgcaacacagcctaaaggaggtaagagaaccgcctagtcttcatctctcaacctaagagcaagctttgcgagggaatgagccttgtcattgtgctggcgctggacatgcatcaaagttgcttcagggaaactggagaggaaggttctgatccgttgaactagtgaggacaacgaagaattatcttgccaattaccattcaccttggtaatgaggttgaggcagtctgagaagacaaaccgaggttgcaaattggaagcaatacaccactgcagaccttcatagagagcttgagcttcagcaaaaaggggggaagacgctccaggcctgaaaatctttgtaaactgatggacttgagagagaccctgcataaaaaccaatccaaaaccagtggcagggttatgagtattaagtgcagcatcaacaaaaagtgtcgtggtagttggggtcaaaacttgatccaatactgcagagcagtgagtgaccgagtggtgggaggaagaggggatggcttgggcttcctggtagtcctgcaaaaaacttacaaccgattcttgaacattagcctgaggggagtgtttttgaaagaggcaggcatttctgatgttccaaatttgccagattataccaagaaacaagggaatttggtctttgggaagctggcaaagactgagaagatagaagtctttaatatcaagcctggaatggtcttgaaaaaactgcttaaagatggtataatgccaaatttgtttaactttggtacagtaaaggagagcatgagaaactgattctgcttcccccccacaaaaagaacaagcaggagaagggatagaatgtttaagaaacaggtttaaggaacatgggagaaggtggttgaaagctttccaagtgaagtgtttaattttaggagggattttcaaggtccaaagagttttccaccaatccttataagggttagggttggaagttgaaggagagggattgaggaccttggactgagctaaatgataagcagaattaaccgtgaatgagccagaaggatgcaatccccagatgagggtgtctgaaggtccaatatccaaaggaatggtaagaatagcctcagcctgataagatgggaaataatggtacaacttatcaatatcccaggtgcgatcatgagtaataaaaaaggagacagtggaagaggagggatgaaggggatgtaataaagttggatgtgaaatgtgggggatccagtttggggctgagataggtacatcattaccagatgagattttccaagtaaggccctgattgagaagttgggtgccccaaaggaggcttctccaggtaaaagaagggttatgacctttaggggcatggagaatgtcagagtgtttaaaataacgcgccttgagcagagaatgtaactgggagtcaggattggaccaaatccgccaagcctgcttggctagaagagcttgattgtgagaagtaagagaacgaaaacccaagcccccgaaaaacttagacgccgagagggcagaccaatttttccagtgaattttttgtttattcgaagaggagccccaccagaatttagctgttaagctttgaattgaggcacaggtggattttggaagtctgaaacaggacatggcaaaagaagggatagcttggatgactgatttaatgagaacttctttgccagcacgggagaagagtttttcattccaagaactaagtttagaggaagttttttgaataagatagtgaaaaacagagttcttgattctacctatacagtgaggaaccccaagatatttactaataaacccttcaccctggagtaacaatgaagatcgaaagtgtgtttgagaatcagaaggagtgttaggtgagaagaggatggaagacttttccctgttaacagattgacccgaggcttcatgataaagaagtaaaatgtggtttatagcctccgaggattgagaagaaacaggggcaaaaaccatactgtcgtcagcaaagagaaggtgggagaaaatgggagccccgcggcaaattttaatacctgaaaggagattggcttcttcatgaaggcgaatggcagcagacaagccttcagccacaattaagaatagataaggtgatagagggtcaccttgacgaatgcctcgcgaggaggaaaacaccgaggataactgaccatttagggacagttgataggtgacagtggagagacacttatggatgagggaagtgaaagtagggggggtaccgatatggtgaaggaagtgagaaataaaggaccattcaacgcggtcgaaggctttttccatatccaatttgatcgcagcccatcccactttgccatgcttcctagagtgaatggcatgaataagctcattggcaattacaatattatccgtgatttgcctcccagagaggaaagcactttggttatgactaataatagagtgtagaacgagtttaagacgattagccgaaaccttagagaggcacttatacaaagtgttgcagagactgatcggtcgaaaatcacggacgcttttgggatttttctttttagggataaggaccaatatagtgttattgatttgagaaaagtcagcatgattattaaggatgtggagaagaccctgagtgagatcatgaccaataatgtcccaatttttctgatagaaaaaagagtttaggccatctgggcctggagatttgtctccagaaaggctaaacatggcagttttaatctcctcggcagtgaaaggttcagcaagaaaagcagattgagcagaggaaagagacttggtgaccccctggagaatggaagagatggcggatggggaggttccttgagaggtaaagagatcagtgtaaaaggaaagaaattgggcacaaatggtttgagagtcatgaatgagggaaccatcaggaagagtgagagaccgaatgtagttgttgcgttttcgattagaggctttttggtggaaaaaacgggtattcttgtctccagcccgaagccaagcagcccttgatctttgtttccagtatatttcatcttttaggagaagtcgattaagttcagattggagatgagatatctgctggttataaaggtgggctgagtgattgttatttaataaccggtcaagatcagcttgagttcgggaaatttggtgcttaagggagggttgtgaagattgccaagacttaatagtagagaggcaagaagattgtttgttgaggaaatgctgaagagggagtgaggaaggggatgaatgagtggaccaagagtttcggaccaaggctgagaatgagggatcattaaggagatagttttcaaggtggaagcgagagtgatggaggtttctgaaggaggagtcttccaattggagtttaagggccctgtgatcagagccataaaagcccaaatggttgagagaagcatgggggaaaagagctttccatgaaggggtaatagtacaccagtctaaacgttccagaatggaaccatgacgccaagtgaatttgttgcccgtgcatggaagaggatttaaattacgagaatgaaggaaggagtgaaattggtgcatagcatgagggggaggaggggtggcagaattgcgatcattgagggataaataatcattaaaatctccaattactaaccacggtaataaaggggcagtatcaaataaacgattaagcaacgtccaagtaaaaatttttgaatgaacataaggagaaccatagaaaccagtgaaatgccagttgatatcattagaattatttatataacagtctatatgattaagggagtaagaaaccacggttacatcaatacaatttttccaaaaaagcaaaagacccccccctaacccattctaggaacttcaaaaacattatcaaaatgaagcttatacttcaggttgagtccccggtttgcaggcagcttggtttccataacaaaaagcagggtaggctggtgttgcttgaccagaagggagaggtgacggaacgctcgagaactccctaaacctcgagcgttccaactgcagagattcatttttctcggcggggt

SEQ ID NO: 30693 - DNA, 3286 bp, Cannabis sativa
attatattacaatatgtattctaatctcgagcagtagtgttttattgtgtgtggtgttttgacggttctctaccgtgcaataaagctccgataaaatggttcgattgagctgttttattctggaggcgacaaggttgatagtctgcttgcacaattctgaacaatgtcacgaatgttttaaagagagcgatctaatctgtgactcaacccaaattttattcaataaattgtcgagccttttgtacctctcaaccgatgggagccaacatttcttttttggcaatttgataaattataatatgtatatatatatatttatattgtgttatatattatatagttatttatatataatttttgtaaaaattcaaaataacttatttaatgcatgtataaaataaatttcgaaccaacttattttacattctttgcaatgtaatttatttgaaatttccaaaaaaaaaaaaaaaattatgagattataaatggattgtagcctatttatgcgttggaaatattaaaaatgaattgttttgaagcttattttatacacacgtaaaattaattgaattttcttaaataaatatattttgacaatgtaaattttttaaaattttatgaaaaatttattgaggatcgtaatatatttctataaaaaagatttgggatataatttaggctaattaagatttttgtcctctgaactttgacatgtaccaaatcacgccccctgaacttttaagttcgttaaaaatgccccctgaactattgagattgttaaatttaaggacgtttttctaattttagtaaaaaagtctaacatttatgaaagttcaggggccattagtacatgtcacagttcgaggggcatgtttggtagatatcaaagtctggggagtatgatttagtatgtaaataatcactgaagtagtaaaattgaatattaaacgaaagtccttaaatccaacaatctcaatagttcaggggacatttttaacgaccttaaaagttcaaggaacatgatttggtacatgtcaaagttcgggggcaaaaatcttaattagcctataatttatatacgttaaaaaataagatattcctactggagtgaaaagacatgctcctactaattttttttatatgagtaaatattattttggagcatacttagtattttataaaaatcattaatcaaactttttattttattaaatgacaactcaaattttgtgttttgcaaaataaaatactattatatcatgagtccaattttactcaaacttttggtaaccctaaccttaaaaaatttatagtctaatcttatccctaatctgttttaatcaaaatatatgtgaaatgtataaagatttacatgattcaaacattacctccttctattttatgcatattttttttttcattttcactttgtagatactattctaaaaaaagattacaaatatgttgtggtacacgtgcttttttcgattgttagtgagtgggataagttacatttataaaaaaaatacattaattttctaaacttacacactttttttttttcctaaaaagtatactttaaattcataatttaaatatttctcaacaaaaaaaagagaagcaatattcacaattaggtcccgtcttgagtaagtgaattaagcccgtgtctaaggttcatttaattaaggggcaaaaaaatttttcttttttaaattatatattttcttactaatttttaaaattataatatttttttaaataaaaattaaagaatatttttcatagtcaactatattttagaatcggctgttcgcaatagattaaatggcataaataatcacaattttcattaaatttctattttttttaatgaatgaattttacaaaaacgctgttgagacacatatgcacttatcaaatgatgtattataaaagggattatttcacaaatacacaaaaacaatataaagattacaaaaatacagttttacgaaattttaaatatttttacgatttaatttttattttatttacaaaaaatacgatatttttatattatactcaggttaatttgttgttgatattttattatatgtatgttattttttgttgttattttgatgttatttttttattgttgtactttaatatataattttgttttttttgtttgaaataaactatataaaattttgatcaaattaacattgaaaagttcaaaaccccaccattcctcaccttgattggttagtgaattccactcattctttatgggtgcttaattagaactttatagcactcgaaagataaaacgaggaggactactacttactttaatcaacctagattttatttcatttcatgaccaaaaaggacattttaataatttatcttatttaaaaagaaaagaaaagaaaagattcgttggcaattgtattatatattgtactagaaatatatagccaatgcctaatattaatatattccaatagaacatttaatttggacaggtcacatcaattattattaccattttattataagtactagacatgtaagtaatagccacgtgttaaggatagcacatggagttcttatgaaactgaaaagaactcgaacctgtttcttggcctctcgttgtgttttataggtaaaacactttgaatttttggagacaaacctttcaataattccggcaaagggaaacaccgttgtttgactaataagtccaccattattatgctactaaataccatgcatccacgtggaacaatcttgagcgtttatcatgatcatcatcatcatccatatttattattgttattattattaaatacatttttataattaatatttatatatactttctaagagtctctagaagaacaaacgtacgtggacaaaaacatcaacttgattaataattgaatattgttattggataccagtactatttagttagtactttctaaatattttattttacgattgtctaataatactctctaaagagtgatagttttggggtggtgcaagcattacgtagttctatacatatgatttctttgtttggtcaagtcattcaaagctgtaaaaatttgcttgctgagttatgtaccgttgaagttatttttattaaatgatctgctaatgtagtggctcatagctttgctaggactgttattttgtatcctgatcgtaccttcagtatggagtctgttcctactgatttgttaccttgtttggtaactgagtttgttggttaataaagtttaacattttc

SEQ ID NO: 30694 - DNA, 1281 bp, Cannabis sativa
ttgctattatacattaaaataaatataatttacttatcttttatgtcaaattgacatcacatttttttatattttttaattcaaaattaatagaaaaaaaataactttaatatttatttccacctcccaatactaatattacaaacataacatttattaagaaaaggtaagagatagatggaaaggaataatatttaagagagaaaagaaccaatgaagcattaatgatataatgatgaaattgggccaatcaagaatgtggtctcctccctctcttaaatgggcccccactccccaagacattgtgggccccaccaatccaccttaggaattgtatgaatgtacatacaaaaataatacaaaacaaatccaaacaactttgcttctcgaattggactctctcacactcaacacacactcacttagagagtgactgattttttttttattttttaataataataaaaataaaaaaaatcagtaacttgcatagtaaatatttatatttctcatccttttaaataaatatattaatttaatttttgacggtaataatattagttatatttctagaattttcgtaggtacttagctgttaagtgtcaattaatgaccacatgtcagtacctgattggtctatcattaaaattttactttgtatttaaaaattaatttaaatataccaacaaaaaaataatacatgcataatgacttgacacttaacaaccaggtagttataaaagttctagaaatataacttagatattattaccgtaaaaaaataaacttaagtatttacaccacaaattactctaataataagagttaatattgttttgaatttgaatatatgttttacaaaaactactgatcattgaaccatctatttttattaaatggcaaaatagactctatattttcaaaaatagtgcaaataggactatcagtttaatttttgacattttttcgttaaatataatcaacttaaagataatttcaagcacgaataaatgtagaaaacataatcagttttgtcataatactctacatcgagttagtatcaagttttagtttacaaaaaaagtaagtttagggtcttatttaatactattttaaaaaatatataagtcattttgtcatttaacaaaacagaaagtttaattagtaatttttacaaaacaagtctaaaatagaattgagtgattctataatgcacccccttaaaaggatgtactgatgtacccctacttatttcggtatctagaaaaaaaatttagtcta

SEQ ID NO: 30695 - DNA, 5702 bp, Cannabis sativa
taagtttcgatcaaataaatttttgtaggggatttttacaaaaatattgaatttttgataaaagtttacaattttactgttacacgacatttttacaaaaatactatctttttataaaacaacagtaaaataacaaaacagaataatttaaaacaaaagtagaataaataaaaaataaccgtggaacaacaataaaagcttaacatagtatacagtatgaaacttacacaaaatttttgaaaaaaaatttctctctacagtaaaaaaaaattagaaattttagtacgtagtgtaaaaacccttttttttagtgagtttttgtttttagttatattgtttttttgctcaatgctcccaacacagttaaatttttattgttggatcatatatatttctaataaaaaatcagttttattaactaatgatctttcaaattggcaaatgactcatcatcctctaattaaccaatgaggcaatgaacttccttaagaaaatgataaataacaaatcctcctttatttattttttatttgttttttgaatataataactaattttattgctgaaaaatcaaacaatacattggttattaaacaaggaggaaattacttccaatcccgaaaacctccttttctatctgtagtgcataatctcaccatgtgttgtggtattaccatttcgcattacatgtttgaagaacattacacccggaaagacagataacaagaacctaatagaactaaaaaacagcttctcctagacacaacctcaaaaaaaaaaaagggctaaaatgatgaaaacttcaggatcactctctacaaagaaaaataaagacccagcaaagaacaactttcggtgggagaggatcgtcttagttgcatgacagagagaatcttgtgcttgtgaagaggactccctcaaaaagaagaaaatattttaactgcaaaataaaaatatacatttattagtaaggaaaatatagaaataaaaataataatcataataaataattatataaaaaattaacaaaatattttcaatacaaattaattaataactatatacatagattgtaacaatagtcataattaaaaaataagaaaagtaaaaatattttttaaaaacatgttctataaaactgtttttatttttcaattaaaaattaaaattttgaaaacaaaaaaaaaatcacttttaatatttttttaaacattctttttccttaatcaatattttggacttcgatcagacttggacctaaatctcccccacggtcctggttctgaactcgacctctgaaccaaacccgaatttgtccccaaacttagacctgacttaaataaaatcaaataataaaaataaactttacataacacatttttattttctattttttaaattgaaaaacaaaaatagttacagaatgcattttttttttcaaaaacaaaaattttacttttattctgtgattaaaaaaaatagaaaataaaaattttaccaaacgcacttatattttttttttctgcttcttttttcatatgtgcttctaggcaatgttgccatgatgatgataatgatgataatagtacaatatacatcctaagatattcttttcttggattcttttcagaacatgttttgttcataagatttatatttattttgcattcaagttatatatattatatgacactctttcataaaaaagatataatagatttattataacaatataagttaattatttattgtcatgtataatagtttattattattactaattaaatatagatactgttaaaaaaatatatatttatatatatattaatttgcagctaacatattaggacaaatgaatattgttttccattaaacagcagaaaagaatattgtttagaaaaatcgattcccttttaattaattagcttagaaaacttcacctaattaaggagaataattaaaaaaattatattaacttttattataagctttaagaaaatgatatattaattgtgtctacataaataaatgtacttaattaattagtttatttgttatattctggctttcactttttacaaaatgaccagatactcataactcgattctcattgattagcatcgggggcggactgtccccctgaaaaaaaaaatcgagaaaaaaatgtatatgtattttaattagttacagcatctatttgtattaaaagatgatatttatagacataatagtaaccttggtgtaatggttaaggtagtttataaatagattagagggtgaaggttcaaatcccactaactacactttatatttttcccccctcactttaaattctgggtccgccactgattagcatcatatatatatatattgtaatgattatcattaattggaggaaagcacatacaaccttgcactagatcatatcactacaaacactacgatgagaataaatatatatataagagcattgttttaaggcaatgatgcttaatattattactaggtgaggccatacaaataattagtgatatttataaaatttattatattattaaaaaatatagaattcaataattaattgtatttatatcgatagaataatttatggtataaatatttaagtttaatattctcgatttttaatatatatttaagtttaatttttgacggtaataatatttaaattataattctggaattttcgtaaatacctaactagtaacttaagcatgtcaagtaaattattatgtgacaatctctaattaatctatgtcattaaattactagtactgacacttaatagtcaagtatatataaatattcttgaaatataacttaaatattattactgttaaaaattaaatttatatatttatttataactaacaaattatttatatataaatgatattaaacatgataccttttactattttttttatatataatatatattttctatatgtatataataaaatgcagaagtactcatcatgctcatgcatattatatatatagctttttggtggctcaagaaagtttgttgttggttccataaaccattgaattaattatattgtccaaagccaacttatccatatttatatatattgcaccccatgtggctatatatcctttcatatatataatattaatacttttataaatatattattagacattacccaatgagaagcatcatattattaattagtctcatgaaacatagtaattggagtagtacacatacacaataataattatttatgataataataataatttataataatcacttttgtccaaaattatattttatattctctcaattttaaaataataccattgaaaatgatggttcaaaaagcaacgttgaattccattggggttgttgaagctatttatttaccattactagggaagaaaaaggaaactaataattgatttaattaattactacatagataaaactaaaagacatgttcatttgtacgtactttgatggatttagtgggtaattaataatcatatcttcttgtattagttcctaattggagtttacataagggtaagtaaagtaaccaataactaatgttgaacactttaccaaaaaaaattatttatttattagtaaatttaaaaaaataaatactattttgaaccttgtattttataaaagttaacgattagaccatttattttattaaataacaaattagattctgtattttataaatatatagtacaaaatagtatttgaacgaattttttgttaaaataaaatttataataacctgatgtagaggtattataacaagactgattatattttctgcattttgttcatgctagaaattatctttaagttgattatattaaaaaaaaaattgtgaaaaaacttgatctcctgatactattttacaatttagaaaatataggatctaatttattctttaacaaaatgaagtatcaaatcgataacttttacaaaatataatatatacaaaataaccatgttatatcattttatttgctatatatgataaaagttgatagaataactaatttataacactataaatagtttatgatatatttttaagggttgaaaaatttaagagtacaataaccaataaactataacaccttttcttttcctcttagtaggatattagaaaattttaggagcaataaataatatatatgagattgacctagctagctatatagtactagctgagattatagagttgattaattatgtgataaaattaattataatatgccaagttttggtgtgtgccgacactttaagatcgtttgtgcttttgactaatttatagaaacttcgactacatacgtcctatataaataattaactattgtcacatcccatgctacaacttctatatataatttttattttaaacaaagaaatattagttgtacaaatatattaaggtttttgcggtacactctttttattttgagaatgaaatagtaatttcaatataattgcattcagagtataaaagggtctgagaatcaaccagagcagtgctatatttactatttagcaatgctacgaaagagaaatactgggaatgtctagctacatattgaactactaaatttattgaacgtctaataaaacgtaatttgacattttgtagaggtaaaagtaaaagtttacatagtgagctacgaatggcttgtagtgtgagtgggcgtactatcagtttcaatctctactttcttccaatgcttacacttgacccaactaagtccctcttcaatgtccatatagtttcaacaacctcagttgcatacatacctacatgatactcaacttttaagatactcagattactgaatttttttatgatttgagcaatgtaggtgagggaggggaagattctcccacttctaatggatagaattttatgttgaagtgtctgatagataaatagtgcctgaaaatatagagaagtgagaagatacatttttaagagaaaattaggaatcgtttgtctcttagaaactaaggttaaagctcacaaatcgggagtttaatttatacttaagtctttttagcggttggtacttttttataattcttcttaccatttgaatgatagaattattttagcttggaacccgttgtcctttgatcttgatattagagattgttcaagccaacatatgcattttgaggtgacgccaaagcatgtcttggcttttgaagcaactttcctttattctcataatgaattaatgaatgatagagatgttcttttgactttgttgaaggaaaaggctgctacccaacagaatttttagattattcttggtgattttaattgtgttagtctttctaatgagagaattcatggtggaaaatgtactaaaaactataaacaactgaaagatttcttggaagataagcaagatgacaagagtagggtgtatgccaaattatatcgagttttgggaaatcatgtgtggattgacaacttttcgaatgttgaagctaattttttgcctgagggagattttgatcattgccctcctactgtttacttgatccctaatttggggctaaacctttttcgttattttgatatgtggagtttgcatcctgagtcaaaagtaagaatacttgtgacagtcagtagtcccgtgatccgtaaagagaaat

SEQ ID NO: 30696 - DNA, 1261 bp, Cannabis sativa
tgtgagtagatctaagatcctggcaaaataaattccaacagtttcaagggcctaactggtccaaaaccgttagaccttgatctagaaaggtcaaggggatcaccgttcttagcatacataaatgccttgcccttgcccaagttcaagatttcagtatccaggatgtatactaggcgagaagactcattggcacacatcaaatactttgagatgcacctcgaccgagctgacagctttatcaaactagaagaagctgtcagacaagcccagataggacaagttagcaataaacattcacaaggtatcctacaaactgatgacttgccaagcgcataggcacgtactagtaactatgcccaatcctctagtttcgagaacactaagagcaagcacaataacaacaacactagaagtaacagcggcaaaaaggggaagtttaacacttctctcatgccacaaaacaagaagaacaaggaagagaagtatatatgcttcacccacctgacagagaatcttgagaccatctttatggccactcatggagcagtcccatacacaaagccccctctcatcaaaagagagttgagcaagagggacatgttgaagttttgtcagtttcacaacaactttgtccatgacacaaacgagtgtcaaaatttaagaagggagtgaactcttcataaggaagaacagtcacgaattgcgtcgttatgtgcagaatgaccagactcaggcccaagatgcctaaaacagagatataatgccaccacaagtggtgcttcacctaggggtcatcattggcggaccccatattgcaggcgagactagtaaagctaaggagtgctatgctcgaacactctgtcataagcccaaaagcaatatcatggctttagaagaaaggggctttaagcaaccaaagcttggagagcccacaatctctttcacaaaggagatgttgtccaagttagtttcccgcacaacgactccctggtcatcactgctcaaattaggaatatgactgtggcaagatgcatcgtagataatggatcctcctccaatattcttttcaaatcaacatacaaaaagatggggctccaacttactgattgaccctgcagtcaagtgatgtatgggttctttggccagggcatcccacccatggggtatatctgattacccagcactgttggagaaaatccaaccaccagaactctgatggtacagtttgttataattaacattcactctccctttaacgcca

SEQ ID NO: 30697 - DNA, 4312 bp, Cannabis sativa
  modified_base (4274)..(4279): a, c, t, g, unknown or other
tgaggtatgtgttagcaacttttgcacgcctacttctgataagctagattttaattatacttctgatatgctgcaaattttattcttccctgttcatcaggagtaaaaggaaattcaggagcaagaacattaaaagtatataacgagaagttgctcaactggatgctgagaatgaaaatcgcttcacaacagatcacgaccgagaacacataatgattcagatcaagacatgacaggttggttatttatataatggacataaatggagaactgcttgtgtatgataggtgactctgtccatagattgcttgtgtacattgggtgccttgtctatctttggatcaatatgtatctacattcttcgtatataatttcatatagatcgcaaattagctgtaaaataacatgatactgagtcctgacatgagaacttggatctctccctctctctctctttctccaggatacctctcaaatttttgggtatactctgaaacggtgacaatcaaaatcaaccaagtttgttgtgtataccctgtagccttttagcatgagaaagcatacaccaattaacaaatatttatccaacatccatccaacaatttttgctgataatctcaaaattttggtttaggacaggcctgaaagtctttgaagtcaaatatttcgatggaatttatgcttgatatgctaatccttcattgaaaacaaatatggagaaaacaagttgataccatagaattacattttgttttgagattaaactatttaattactactttttagcacaagtacaaattgtatattacttgttgaaaacaaaaaataataataaaataaagaatcttttcactgataagctattaagcttatttgaagtctcatagaagtagaaggggatcttcactgaaatagcagccattactttgtattcaagatgatctgaaattgaggcaaataaattaagaaagggctctttaatttatgaagattcaatcatatggcatccgaagttcgtataattttctttgatgcccacatacataccacaattcaaagctatattccaaattcgaaagaaagcattttatgagctacagtcggcaatcataacttcgatttttcgttatggtgactgtgtagtgtaggtgagtcctcagcctccccttaaagatccaaggacatgtatgaattttattaatgctatgtaactagggatgtatatttccactatgggatggattgtattcttaatggggtgggaattctccgtctaaatagggaacgggacggagacaagcattattttttgtcctcaaatgttaaactgtgcggggacggggattgcactccctatcttgatggggactcgtttagtatttattttatatttttaataatattttataatttgtaatttatgtttgttttatgatttttaagttgtgttttgaataataattagtttattgaataataattcatatgtaatattttaatttttatgtagtttaatattcttatatatttaaattttattataaattttatttttattatgagattctccaccttatctcgatagaaaataagctggatgtgaattaaaattcttaatgtggatgaagatgggggagtactcaccgctaatttctgccccgtgtgcatctctataacacaacaaatttctctagaatatgagacttgctatttcctcatgtacttccgctagcaattgtgtacttgtcctatgattggtacagaagaaaaatggaagaaaaaaaaatgttaagagagaaaagtagaaagaatgtaaaaatgaatgtatttggtatgagagaaaagtggatagaagagaaatatatagagaaaaaataagaatgggatcaccaaaatttatccataaaaaagtagagagaaaacgaaagacagtaaatttattaagttaccctcactaataattattaaaatttaaactatataaataaaatagtaattttctctcattatttaccaaataacataaaagaatttttttttccatattttctttccttccaaatttttctatccctctcaatttctttgcttcttaacaaacatagggttagtgattatcgaatcgtaggtgatccttacacgcataaatagcattatgcattctaaatacttatatcctaccatgtagatttatatatatatcgaaatattaattctagaaagtctaattctggctatctacatttctagggggagcggtatggtgataataaaaactacaaaagtgtgttgttttttatctaccattgagacagaattcattgcagctatagaaacttgcaaaaaaatgttatgaataaagaaatttcaacaagtgttaggaaataataacaaaagtacataatatattgcgacaaccaaattgcagttcactttagtaagaattcaagttttcgttggaggttaaatcacattgttgtacgatatcactggatacatgacaatttagagtccaagcaattacaagttgaaaagattcaacagatgacaacaattcgaatattgttgatgctgaaaaatagtcaatactagcttgctagattggggagatgaatgatgagtttaagtaaatatatagagagacacaaaatttatagtagttcactctctatgtcgcgatggtaatagagctacgtctacttataatttttatttttcacgagaattacaagacaattgactaaggacagagctcaaatttctagagagataaagtagagagagatgctttgaccttatggagactttttagaatgtgaaaaatgagctagtgaagctctccttttgtaggggaggaggtctattaaaataataataataaatatgaaaaaatcactttgggttgatcttggccattgatgatgatctaatggtaaaaattgactcttgatgaaaattatcaatttcagagcttgaatctcatccgttggatcgtttttcgggtaatttgcaaaaagatcacacttatcttgggcatgatttttggactcaaaatattaagaattgcaatatgggtgtgagacataacttgaaagagctttgaaggagctttaaaataaaagtttaatcgcgtcaatcaaatcaatattgagggagttatgactgttttattgaaggttgttcagcacccaacacccaggttgacatgagtaagtgaaaacacgtcccaaacttgtattttttgatatctaagtgatatgttgacattacttagtacatttctttgttttggtgaagttgttcaccagatatcgaagatgtcacttattggtgaaatcaggttgactcaaaactttctgatttcgccaatattccaccttgttgtaggggtgaaatatcaaagtgtgaatttgacttgtcacaagtcgtagctcttgtttactacaaaaaaatagttagatgctcaagacaaaattagattctaataggtagaacccaacgcaccaggccatacgtgcttcttgggtggcttctcggggctggttttgattcttcttaggcattcgagattgcaagcgaggtctcctaccccatgtattttatcaaaataagtaggatttccggagcaacttttgttggaacttattttaccatgttctagatttactaacatgtatgtttgattataatctataaactaatatcctaaacatgaatttcctaaaataatgaaataaacacatataaagttgcagaaaaccttacattcgtggcagcagaatattatggctctatctgttcaaatctctaatcctcgttcctttcaatcgcagagtattacaaagatctgaacctcgatctcctttagtgatggaattattcacaatcttccacactatgattgagtatcgacttgaattgtgtgggcaatgtactcttcattatagggatctcggaattatgaagaaggaagagagagaatattcaaattctaaagataagctctttttctaacaaagtagtctgatgtaggttatcaggttatgaacctatcattatctatttataggattctttctaaggttaggatttaaattatatagaattaaaaaagataaaataatggcttaaaattgaccttaagtggccggccatgtatgtggaccccacaagttttaatttttccatttgtttaataattttttcttaatggcatattttaattttaatcctagaaatgtcaaatctattttttttaataattataattaatnnnnnnataaaattaccatttaacttatttattagttag

SEQ ID NO: 30698 - DNA, 8362 bp, Cannabis sativa
ttattaactaattaattatttctttttattttctaaataattctagaactatctaattttagttcaagtgattctaaatcttctctaaaattttctaaagtgttctttatttctcttacaaatttcttagaacattttaaaacattcgttacatattttagatttgataataactcttcacattagcaaaaagagaagcataaaaccatcaataggaaatggacatattagtattacttttgctattatccgaaaacttaatttatgtacaatttgtaaatcagtcctcctagtgcagaatcaacttggcccttgtatgacccttggaaatttgaaactgctctgttatgccaagatgggccataagaagccaaacatgagtgaggagctccccacctcgcctaagttgctgagcatgttgactccacctacactggttagccgcgtacgatagtatttcgacccacaaacaactgatcagtttccagcgttcctctgtttcaagtgattccaaagtttttgcaagaatgcatgcctcaaacagcactgatttacttctgtctcctttcacttcagatggatgaacttcagtattcacctccatcaacatccgacaagcttccttgggatctttcttatgtttcctttggttgaaaaactccaaaacctctgcacacgtatcttgaaaccttatctgtccaatcccatttggcagcatgaaagggcaaacaacgacgagatacaacatgtagtcagagaacaatttactcacgtctcggtttggatcagcactggtttctcttcttggattactcgaatagtaacataggtcagttgcaatgtgccataaaagaatgctttggtcgaattctaactcaatggttgaaccaaattcatcgtataagttctctcttttgaggacatggtcacctctgctccgacataattccttgcagcccctgaaatcattattgtcaccactagatttctctttcagctgcttaaatattagttcctttaaatgcttgggcacatctgtcacgtacatgtgtatgtatttctcaagccatttatcaatgcttaagagctttgcaagaaccataagctttggtggctcacttttgagacatataccaatcaagttgtactgtctcaacttatttgaccacctatgcctggaaatgaatttgtatcgatggactgccgcaataattttcttgtgcttacttagccacagcattgtccagtctgaagtaatcattacaattactgcgtaaacctctagggttattgctccaaccaacaatatgtaagagatatttacatcagttctcgtgtatgcttctttattggtgaacttgaatgcaaaaagtactgaaattgtggaagaaaaactgatgcaacgaagaaatgcaccagtccatgagtggatcaaggctgcctttgtgtaaaaggtatcgtacatgaatcccagctccacctcaatcacttcaaaagccttatcagaagatatgtgttggaagaaggatctgcttttggtgatctcatgataactgaggataagatcagcacaaagccgtctgaaagttaagaagaaactgtgagctttgcgaaccaaatccgtgcttgaattagtacttctcctgatttcgcgatgagtaccccttgcttcgctagcttcgatgactgtcgacttaacatgaaaaccctcttcttttctcagacacagctcctccatgtatctggcataattaggaccagggtcaggttgtggaagcatggactctctgaaatgctcgttgctggctgatctcagtgcccaagtcctctctccaaatttgataataccagctacgaacattggaatcgctaagaaattcagcatattggagttccaggcccggaggaagacataaaaagctactcccacttgaacaaagagcccaagcaagtgcctgagccacaattcattgtcttccaatgcgtaagcagtgatggtgtctggtccaccaaggtggaggaggagaaatggagcccaaaatgccataattatgtagtttgggtctgtggaatcttgtcctgagcctgtgcccgagttagtagaattatcttcttggttgtttgagagtatcccaagtgaaactgtggcaactgagtccgccgataagtaggcaagccatagagccatcctgattttgttgctggtggaatgttttctccaatttccgatcaaaatgaggatgatctgtagactaaggctagttaaaaccagggcccggagctcgcatttgttccacaattctctggccttttccgggaaaaattgcattgtgttccttttcttggccaatattaaactggtgatgcctgcaaattttatgaactcaaattaagattattgaaagttggttagttcttgtattattgttattattcattatcaaatatttgaattaaaaatcaatggcagaggaaagattttataaattgacaaagtaaatcatacttctgaccaacatcagcaggaaactaggataacagtcacagcaaagctcttttaaagtctatggagaattttgtagctactgtttgtgcttaaaacaggggaaccactactaagatgataaaagtactcgttacagttctccatttaagtgattagtatagactgttttttatttatttatttatttatttattttcctcagcgaaataacagataggaaaaaccaaaagaaagaaaagaacaggtggggtcctttgaaaaagcaacataatgaaaaaaacaaacaatgaacttcatttaagttttaacacagacttctcacatgtcacttgttaagttttagattccaattcaaaatttgaatctgttttgtttcagaaatattctaatctttgttcatgattttttattttgttttagttgatgcatgggatttttaccatttaacttcggtatgattctgggatgggattagtctcttctttacctttttgttcttgatatcataggtcaagaaggtaagctaatttgaacttcatatatcacctgagttttgctatttactttgttaaaggcttacagctttcccaacctactgttacaaacaaggtgctccacttttacaattgcaactatttacatgtcaatattaataatttatgtattaacatcacttaaaaaaattgttaatttaacaggctaagacattaatcttcagcatgccaaattaatatttttttaaaaaaaaaattatgctaaatctgttatatattattggattcagttttctaattggtccagcgggaatattgtgatgcatgcatatagatcatggccgagaataactcatcatatctctctagtttggactttttgaagtcattccatccacttgtaagttgtgtttctctgattatgagctgttcaaaaaagaaaaaaagaacgaaatctgttgacttcctgtgagcgtcatgaatcagatgttgagatacatacccttttaactatgtttgagataaacccacaatgtgtacttttctccacgacaagaggaaaaaaaaacacaagaaaactttctaagctagcgtgttaaatttctaggctaactatatttgagagtcatgaatcagacgttgagatacatacccttttgctcgaataacgaccaagatcccgtgcatgaagaccttgttgaaatatctttggggatcttctttgtcttttccattggcttcatctatctaaactacaaaattgtgcagtatttagatgactacaggtggattaaaagagaatggaggttgctggatgctcttacaaaagatttccagacggctaacaaatcagtggaagaaataaagcagagagctaatcaagcgtgggagacagagctcaatctgagaggaatgactcaaacattgagtgaaatagagaagaagtggttaatgaaagaggcaaaggtgatctcagatgtgcagcgctatgttgatgattatgagaaactcataaccacaaaaggagctagaactaatttgatcaaatggtatgtttcactagtcttcaaaaagtccataccaatagttgagctagcccttggaatttatagaatcaagaaggagataacaagccagcttaagcagaagaaagaatatacaaactccattgttaaggaactagaggagtcgagaatgaaagtccgaagtttgcaagacaggcctattcaggaggcagagcagagctctgttatccgtccagtgcctctgtctcgctcggcggttgctttggtcctagaacgcctggttactgtggaatcacaatcaggcatgtttcgaggggtagaagataaagtttcttccttggtaatgcagctgcaactactgagagctttcattaaagatttacaaaagctcagatttgatagcgaacttgaaaaggcttgggtggaggaggcacaactaatcaatgctcgatcactgaacgacgtcaatacattcttgcaagatgcagcagatcagcggagatggctcgctatcgtcactgattatcgatttcttagacgcaagttggataagattattactaatgttgacaaagagatctctcatctccttgaaacaaaacaaaggtatggttttagttttatcaagagagaaagagactccttcctagatgtggtgactacgccttctgtgattcgtacccaggacaatgatctgtctgttgaattggagaatacatgtaaacaattggaagaagaagaggcaactaatgttgccattaatatgagaaaaacttgccttgagtttttgaggaaattagcttctgaagtcatgccttccatgaagacagaaaggagaattaaggaagcgtttgaacatctcaaattatgcaaagaagtgtacacgattaaggtgatgaaagaatcatgctttgcagttggtttggaagatgacatactgaaacttttgaaaatgatcagtgatactaatcaatacggctcagtcatttctattgttggtatgaaaggagttggtaagacaactatcgtcaaagaactcttaaaccataattctactatcaaaaaatttcatgctcgtcactttgtttatgttccggaagagacgagtaatgtttccctactccgcaatgtgggaaatcagatcctccatacccaaaatgaaaggagtgatgatgaatactggatcaacaagttgcaaggttacttaaatcgtgatgagaagccacacctcctagttctcgacaacttggggtccaaagaagcttgggatatactcaaacctgctgtggtctcagatggaaacgctagacctattattttgatcaccactcgtcacaaagtcgtagcttctcatgtgaattcgaatttgagcagtatccgccagcttcggctaagaaccagagaagagagctgggatttttttacacaaatagtctcgtgtccttctaatgatgaagatggtgaagatgtcaagcttgcgaaaaaggtggtgttgaaggctggaggtcttccccttgctatcttacgtcttggatatttattgtcagggaaggaagtcactaaggaggagttgtctgtggtgctgcagcgtgtaactcaaggtcagaatcaaacaccatggatggccgttaaggacaccattaaagaagacttgccatttcaaccagatcttgaaaattgtctctcctactttgaattgttcccaagggactttgaaatttcagcaaggagactagttgctttatgggtggctcgaggattgacacaaagtgataacaccagtggagtgagaactcaggaaaaagatgcctacaattatcttctggagttaattggccgtaacatcattcaaatagtcgaaaaaaagctcaatgggaaagttttgacatgccgatttcctggcattttaagagaactctggctggccagcagaacaaacaacactgcagctcactcctggtccttgtgtggaactatggagcagaaacttgcctatcgattcgatgatgaagacactggtttcagtcggagaattcatcgtcttgaccactcaaatcttttgccggaggaaagttctcctctctctattatgttctttgatacccgcgaaggagatcagcctggtttagatatacgaaactttctatgcaaagccattaaaacagggcgcttacttgacttagttgttcttgatctcgaacatgtctacaagcctcaattgcccgacatcatagcaaatctaaagaagcttacatatctaggcctaagatggactgaagtagagaagctccccaaaaccataggccaattgtcgaatctccaaactctggacctaaagcatactcaagtgcaaaagcttcctagctccatatggaaactgaagaagcttcgaaacctgcatttgaacgggagttgtcgaatcaaatacatgcctccaccaaacaatcttcataagttatctggcgtacttgtggatcatgaaggtggggcattgatggatggtcttccaaagttagttaaccttcgaaagctgcggctaacgatccaatcgacactgcaagaaggtttgtcaagacacattgaacaactgactaacttaagatctttgagtctgagatccattaatgaaagcagccaactccaggagctatacgtgccacatttgaataatcttacacatctttcaagcctaacattggcaggaaagatacgaagatcatctgtcatgtttgatctaccacgaagcctcactgaacttaccttatcaagttcggaacttgaaatagggaaccaaataatacaaatgctagggaataaccttccagaactcaaatttctctgtttgcttgccaattcttacagcgaaaaagaaatgatttgctcagtgggatttcccaagcttcttgttttgaaactttggaatcttcctaatctggaaaaactggaggtgaaggaaggagtgatgtcaagcctgagaacgtttgaaatcaggtgctgtttgcagttgacagcaactaacactgagttacccaagttagccactctctcagaattgaaactaactaacatgcctgatgaatacacagccgagttgaaaaagaagttaacgaagctaaaacgcaatctgccgattaaaatcttcacattcaaccctgatgagccaaagtgatttaattattattcacgtctttattagtgtaattaaccgatacatatatgatctaatataattgcatgtgcacggtgatttttgtttaacaacagattatgaaaaagttattaagcatgatcactttcaaccctactgtactattactaaattcactggctattcaattgaggcaatcattttctttgacatgtttctattgttttgttttatgtgacttgttattacttggttagtttatccactgcacagtatgtactgttatttttattcttgattgattgttacaatattttaattattttaagattccattaatggatttacatttactcacgatcccaaagatttgactattttatagccagctaaagtccacggactaatttatttggaagaaaaaaatagtcagtcgaccacgaaatgtagaaattaatggccatgttcaggatcctatttcttatgattattatttaaagtaaggtcctttttcttagaacgtggtataatgcatgcaatacaccgtttctacaatattacaattttatatatttgttttcactatagtgaaagttccttttaaaaaagaaaatattgcatgtaattttgttgaaagttgatcattatatatatgcgaattgttttattttattaggatagatagttaattcattgaaaattcaacgaaattttgctgattaatgccttcactagaaaagaatctttcaacgtatgatttaactgttatccttgtgaagctatgccttcattaacgtttgtctgtgcattggttttctcagcaaatttttctttgttcatcgaatgataagttgtgacaacctgacatgaatagcccatgagaagaagttaattattttaaagaggaaaaaaaacatgcatatgagttgcttatttaaaagtgccaaaccaagtctgtgccagctttaagattcgatttacaagttgagaactaaaactaattataatttacaatataatcattctcagcaaacaaaatacccaaaaaccatggtaaggaaaatgaggagaaaataaaaaaactcaaatacttatttggcgtcttggaggcagtattgaaagtacgttgcacttttatagctctgttacttttactctctaattagtacaagtggctgaagctgttact

SEQ ID NO: 30699 - DNA, 2699 bp, Cannabis sativa
ttgtattattttatatagtacaattttttttttttacttttagtcacaataaaatttttgtgattaaaagtaaaaaagttacgacgaattataaattttcattcctatgttatgactaaagagtccgtgactaactgtattaatcacaaaaattataatttgttgtgactaaatgtatttttatagtcacaatattaaactaaatcagtgacaatttgtatctaaatactaaattttaattacaatttaagtcacatttagtcacaaaaatattatattgtgacaatttgtcactaaaaataattgttttaatttaattcataatatttgcaataaaaagttgtaacaaatattaatataataatttttttcaacaatttctacattaccccgtgttaatttgcacgtgttaattgataattgtttattactttgtaaaactccaaagatggtttaaaagttatattatcaatagttttttttttcttttttagaaagctaataaataattttcaatcgtatgtttttaagcagctgggttagatggtgatgtttattttattttttaatttttttgttaagagatggtgatgtttattagatatagacagaataattatattcattcgttcatttcattcaacagaataaaaacaaaactttaatacattttctgaaattctaaactcagtatctacgtaaacaatcttccctaaaataaccgcgttaacgaaaatggcacacgtgtaaaccaatacacactacaagagagtgagtccaagaaataatatacccaaattcgggaaaaaaaattacatggtatacccactttattttatttgttttaatttttacctttattttcatatcttttaagatatacttacttttagagatgatgtgcttattatagtctttacataaatgtaaattatgtactacacttaagtaaaaggtaatgatatattaaacaattcacttataaaagtagatagattttaattaaataaaatatgaaagtatttttgattaattgataaaaaaagtattccacaaccatcaccgctcccttccccatcattgtgtgggcttaaaaaggactcttcagtgggggcccaaaatgtttaaaaggcccatggaccacgatgactctaaaaccttatgccaatcctcatccaacgcgtgtccatcttattccttatccacgtgtcagcctgtgatttgttaatttgggctctcatctcaattatatgaaataataataataataataataataatgaatccaaaaagctggcaaaaagtaaggaaatgactaagtggacgatggttttgaaccaatgaaaaggtagaacgacaacacattacactacatgagtagtgaatagtgattagatttaggaggagcgatgtaacattatttgaacatgttcttctaaagagcataaaaaatgaatatgaaaaaaaaaagccgaatgtgcttttcttaattgggaataaataataattattacactgaatgaaaataattactgctttgtctaaaaatctaaatatatactcttttccatttgtaaaataagagaacaatttttttttttgcatttggtcaaattcattttttccaaaatatctcaaaactaatgccatctagctatgacataactcttattcattgatatgtgtagccacatatttagtatatttagatattatactatatgttagtactatcttttattatcagaattttaattttattgattgcatttttagaaatttcaatttctcttaatcattgttatgttactaaaaaatttatataatgaattggaaaaaattatgcaaagtactcgtataattttttatggattaagctataacttgtgaagtttaaattaagattgaatttttctaaaggagtatcgaattaataatgcatcataaatacttttaatttttctacttcaatctttttatacaattttttttttttatagaaaatctaatattttccgaagaaatataaagaatcttacaaaaaaaatgttcatatctaactagttattattattattattattaaaatttgtagcattaataaagtggtatatattattgggattcaatttaaaatataataccaagagtagcactagttaaaaaaaaaagtagggcaactatcactatatactcttaaaattaacattttgcttacaatgaaaatgtaggtattagtcaaaagttaacactaatctatttttaattataactttgaaaatataataattttagggtaggatattttgtcataacaaacgtttatatatgggggttggatatagtcttctttttgggatcggtgttagtgcaatttgtagtatcaaatcgcccccttgtacacttggtgtaagttttaggatcatatatatattaaaatgggaacttttcaaaaaaaaaaataatattttaatatatattaattattattattattagatattttaatatatagttgatataaaatattattatggtttcctaacttttgtttgaaataatatttactaaggtccattaaatatgaaacattctaaaatggaaaaaggaaatagaaataatctataaaagtaatcacaaaagaagttaagtgaaccccctaaaaatttttcagtaaaaaaggagtttttttttttttt

SEQ ID NO: 30700 - DNA, 2020 bp, Cannabis sativa
gggaggaaccaactggaagataaataggtagaatgatccaaagggataggtgtgggaggaccggaccccatccgggaccggcctaaaaaatgactaaagtgtgaaaaataaaaactcttagcatgatcgccccatcgaaaatgggacatcctaaacctatgaagtcggtcatcaaattccaccggcctacaagtagagtaatcctgaacagaaggaacatggtgaacaatcatcggagacttaccagctccggaggtactggcatcaagagccccagtattagggatcgggaaaggaagcttggaccgggaggtcacctgctcttttccagcctcaatccaaaggaccctccctgcggcggcttgggccttgatgtaggccaattcttgttccctcctgaagaggtacttcttatatcggtcctctgcggaggcaataatgttcgcccggagcaccttctctgattcaggattgcgaatgttggggcaaagaaccttggataaattaaagtcatccaccgactggctctctgaaatcaacttggccctcctgtagtttgcagtcgtgaccaagtccccaacattcaactcatccttgtcgtatgtagagaagaccttggcgtgttgaaggaaaagttgagtgggagcgatgcgatgcatcggggggaccctgacccattcggtaagcagctccgagtgctcaatagcttggaagtcggaggagaagaaaaatcgatgatggtattccttaacatttttttggaaattaaaaggaacctgaccctcattagcaggatggggctggagtttaaaaaaaccatctttgaatttgtctctcttcttagggacagataaaagttcataaaaataaagaatttcagctgggcaggacagagcctagcctctggcaacataaaaaataaacaagcctgagagcaggggataagcttaggggataagttggcaaggcgcgaggccaacaaaaactaagaaatttatgaaatagtcctagagcggtagcattgccccggacatgcggtgcgtctgactctacactccaaaaccaccgtagttacagttgggcatctctttatctcaggaaagacggtgaaagactccagaagcagaaggcttgatcccagctactgtgacaatcttctccagttgatgggcgcaagttagagttgagtgcaactcgtctgcctcccagccggtggatcagcaagtgtacttctcctggaccacaggtcccttcatcacctcctccagggtggccatagtgttagatcctttgcctaaggatttcactccggtcgtagggacagacatgccttgagattagtaagattctgaaaaagagaaatccagcagttagcccccaaaccaaaccctaacataaaaggagggaatgggggtcccttaaccgctggaaagaggccctctccgaatgtctgttagaaatgaaaaatctagggattctccaaggcaaacatcgggtgcaaatatcccaaaggcagcgaaagcagaatagaaagaaaaagaaaaatgagagagggacataagtatgaaaatcgtgtcatgctctcaacagtacctacgcaaaaaagttgtttgcaaaataaaaaataaaggaagcagcagaacacagatgaaaagctacaccatacgacggtcatcaccaaaatcgttccatcgtagaaatcaaatacgactgaaagctctaccaaaacctctgtcctaacatgcaaatgaatggcaaaagtgaattatacccagaaaacttacatgaaggtaatggactggaagttgatgatggctgacggtagaatgtggactggcaacgacggagaaacagcaacaggaaatctatagtttctgaaattttctcaaaggagtttcttgggtcgaaatggagaaatagcgaaagtgacccaataaagaaaaaatgttggcttttatagaccagaaagggggcaaggcaactgtgatcagacaccatcgtacgtgttgggttttgtgcc

SEQ ID NO: 30701 - DNA, 2057 bp, Cannabis sativa
  modified_base (1548)..(1551): a, c, t, g, unknown or other
tagaagcttttgagcttctaaaatctttcttgagttcagtaactctcttcatacaggctgccttggattttccaggaacagcagcagcaattttctcccacctcatcgaaacctccttaggaaaagccttcaaagcattaagcaaagcaatgtcttctccactagcccaactcacaactccattttctgccattgaaccaacaccatcagatcctccttcatttgaaccaagctcaattctctgatctactgttttattcctcttcttcaagaactccgaatacgaatcagcatcgttcgatttcttctcccctaactccttggccttcttgatcacactctccaccttatgccgacccgagaaagcctcagcaatcacttcccaccgcctcggcttccccaccggattcttcaaaagctgctttttcagaacctcaatttcctcctcaacccactccttctcttctccccccaaaactacaaccccattgtcatcattcttcttgttcttccgttctctcacagacccattaagattttcaaccaccggtactgaatcaactggcacttcctcatatcgacgaactttagacctcttctgggaacccctcttcttggtatcctcatcagattgggatgactcttctgggagatcaagaaccggaccttgaccaacgctaatgtcaccgcctgtgaaggaagcaggggcgaatgggcctaaaatgaaggagaaggagagccataagaggagagatttaaagggttcggattggaggaagaagatggagaggaggaagagaaggaatgagagtgaaactgtgaggaggaggattgggttgcatagcttattggtggggtgagtttgtggatctgtggccgaaggagcaggttgtggccgtgccttaaagaggaacttgggcctggcatcctcgtccaagaactccattttcagtccaatggagatctctcagcccccgttttgttcctagattttggctttggtttgacaattggtattactcaaagttgtcttagcctagattctatagtggccaactgccaaagagaaaaggaaaggtgttattctaagccattcattcaatttaacatcattttttcacagcatatcttttctgaatcccaattaggtgaattgctgctaagcataagaaaaagaaactggagtagcaattagtaagcatctgatctaccactaccactgccagtttgaacaaattcatcctacaaatattatatgtacatgctaatacagtctgcattatgttttcatagctcattatgatacatacagaggtaacaatatttataaaagtataaaccaattacaaccatcaaattaattaatggtacactaaaacatacatattgtcaatgattcaataaactaatgggtacaatgcacccccataaaacttataagggatgcaatgatgcagtgtttccgcattcaaaataattttttagtctaatttttttatattggtgtacattataattatttaaaatattttacaaaattttaaaaannnnaaaataatttacaatataaaaaaagtgtgtaatgttaaaatttttcaattttcttacaactttacactacatcttaaatacttaaaacttcatagaaaagaattgactaaaaaatgatttccgacaccaaaacaaataaatgcatcgatgcatcgtagaattttcccaaacttattatggaattcgagcaaaatcactaattcccataaaatttcaacaagtctcatttaaatcaattgcaatacccaaatcatatttcagaaaagcacagaagatgtcaaatatcgaaacccataagaattcgaatcgaaaacatctaaatcgacaaaagacagtaaagtcagaatatttcgctacgatttgaggagaaaatgtttaatcaaagtaattaagaggaagagaaagaaaaagatagagatgaaagaaaggaacttactcagatccgaaaaggggtatggagcttcttcctcagatcagatccgaaagcatctgatgaagatgaatcc

SEQ ID NO: 30702 - DNA, 3944 bp, Cannabis sativa
aactaacttgaattacaaactatacaatgtatttataggtgtccaaagtggacaagaaactaactgtcataactgtcaagatagttatgacctaactactttaaatatgtatattagaaggacacaataaatacaacaattctccaccttaacctgtaatatacctagggaagactcctgagacttttagcccttgttgtggctcgaaacattcagaatttggagacacttagtgaacttagcagtaggcaatgattttgtaagcatatctgctgcatttttttcagtagggactttcagtagtttgatctttccacctgagattatatcttgaataaaatgcgtccttacatcaatatgctttgttctctcatagaacacttgatttctactgagatggagagcactttggctgtcacatagaacaggtatctctctttgataaatgccaagttttgctataattcctttaagcaaaagtgcttctttaacagcttctgtgcaagctatatactctgcctcagctgtagataatgtcactatagattgtagattagatttccaactgattgtgcatccattcagttgaaatacatatctagattgggatctcctagtgtcaatatcttctgcatagtaaaaatctacaaagccccttacttcttctccattacagttggcaccatagatgagccctatagttggggtaccttttagatatctcatgatcaacttcaccattgtccagtgatccttccctggctgtcccataaatcttcgtaccatactagcagagtatcaaaggtctagtttggtgcaaaccattaaatacatgatgcttcctactacactggtgtatggtatatacgttctccatgtatgtgtgatcttcatcttttgttggagcttgagatttggacaacttaaattgttgtgtataggggttgcagaatggtttgacatcttgaagaccaaatctgcttaaaatcttagaaatgtaaccactttgtgtcaccattagcctccttgctgatttgtccctagtgatttgcattcctagaatctttcttgctggcccaaggtctttcatttcgaattcttggtttagcatcttcttaactttgtttatttctccaatgctcttgcaggcaatgagcatgtcatcaacatataggagaagataaacaattccttttgtgcttttgacatatacacaactgtcataggcacttctcttaaatcccgttctcagtaaaaagtcatcaaacctcttgtaccattgcctcgggctttgttagagaccatatggggatctcttaagcaggaaaacatggtcttcctttcctttgatttcatatcttctaggctgcttcatgagaatttgttcatccaattctccatataagaaggctatttttacatccaactgttccagttcaagatcttcagttgctacaatgctcaaaagcaacttgattgaagtgtgtttcacaacaagggagaaaatttcattgtagtttattccctccctttgtgagaaacctttggcaactagtcttgccttgaaccttgctcgttcaacacctggaatccccaccttatgtttgtaaacccatttgtagcctatgactctttgtctagcaggtcttttaatcacaatccaggttttattcttgctcaaggaatccatttcctgatccatgacattatcccactctttcttatcttcagattgcaaatcttattcataagaagcaggttcttcaccttcaatgccatctatgctgagagcaaaatgcacaacatcggcatagccaaacctttcaggggggttttactgctcttctttttctgtctcttaccaattggtagtcaagagtgtcttatttctcttcattctcctttgttgcaacattcctagcttttgctgcagcatcaccattttgtgaactgatcaaatctttttacatagttttctcatcaaacaccacatctctgctaataaaatttttctgatgattgccatcttcaatgctctaaactttgtaccctttcaccccttctgggtactcaaggaagatgcgtttcctagctttgggttcaagtttaccttatttgatgtgagcatatgccaaacagccaaagatccttagttgatcataacttggagagccccctgtccagatttccagtggagttttgaactcaatgggtgataaaggacttctattgattagataacatgttgttacaatagcttctgtccaaaatttcttaggcagacctgcatatatcaacatacatctaaccctttcaaggattgttctgttcattttctcagcaagtccattttgctgagggtttctcataacagttagatgcctcataatgccattttctttgcaaaactgattgaagtgttctttgcaaaactccaatcaatgtttgtcctcaacttcttaattttcctctcagtttgagtttcaagcataacttttagttatttaaacttgttaagtgattcatatttatttctcaagataaaaagccatacatgtcttgaaaaatcatcaataaaggtcaataaataccttgctcctcctccggatatggttcttgatggcccccaaagacctgagtgaagatagtccacaatgctcctggttttatgttttccaactccaaactttgctttggtagcctttcccacaatgcattgttcacataaatctagttctttgatctgatctttgccaaatacccctttcttactcaaaactttcagaccaccatgacttatatgtccaagtggaacatgtctgacttgttttagttccagcatgtttccattatcaatttacaacttaattgttccaattccttgtatggagcaagaatgattatcacctaacttgacagtgccatcatttctggattgataacttgaaaattgactcttttcagggcaaatgtgaaaagaacatccagagtcaattatccataccttatccctgttgttcttggtgatcacaagaacacttgcactatcatcaccatctgggaccacaccagcatctccatcttccttcaagttataattcttgagaattggacaatctttcctcagatgcgatggcttgttgcagacataacaccttctcttagtctttgagtttgccttccttttgcttggactattttgtgccttgttccccttcttttggaattttcctcaaaccagtaagccatccccaaaattttcttctaaattctcaaatttcctctagatttcttttgacattaaagcagtgaccacttcttctaatgtcaaagaattgttaccatacatcatggtgtcgacaaaatgctcatactgttttgaaggcagcgaattcaaaacaatgatggtctggtcttcatcctcgatctggattcctatattctccaaatcaagaacgatcttgttgaaatcatccaaagtatcttcaacacttttccctggtaacattaaaaaagaatacaacttttgtttcaagaataaccggtttgctagagatttaacatgtagaggttttctagcttgagccagaatccaactgttattgtttccttggacacttccctgagaactcgatcacctagactaagaataatcgcattgtgtgcttttttaagaatctctgttttctccttctcagacatagttgcagggagtttagattctcctagcaaagcatcttgcagtccttgctgaactaacaaagcttgcatcttgactctccataacccaaaatcattcttgcctgtaaacttttccaggtcaaacttcgcgtttcccattagctaagaacttcttctctgagctgattcaagatcttcaagaactcccttagctttgataccacatgttggaaacatacaactccgatcatcacttaaactag

SEQ ID NO: 30703 - DNA, 4273 bp, Cannabis sativa
caaccatttaatagtaatctaatggcttaaaaaaaatgtaaccattgaaaccttttccatattatatatatattaatagaagtattaagtattgggttactacataaagacgatacttatataggaattcttttttaatgaaatttttaatatttttcttataatagtaaatattgtccatcacattgtatagttgttagttgggaaatcttcaccatttacttagtttttcaaagagaaatttgatttttcatgcatatattattctagaattaatctcttaaatttatatgtattaatattggtcaaataggttaatagttccctttttccccaaataccctccccattttcatatagttactatctctctaccttttttttccctctctttgcctcttcatcttctataaacgaaaacttaaacccccccccactaattttccatccgaagattcactcgacctaaccaccaccacgacccatgatccaaacaccactcttctccatgacaactgcgagtgacaaccaccgtaactgaatactaaagattcctttcgccacgaccatcgcaaattaaccatttttgatataagtgttatatgaaattattgttttgtaaaacagagtgtagcttttaatttgttttatgtttttgttgaatttgttaaagagtggggtttctgggtgaaaattggattatttttttttttgggttttgggttaggtccgatgggatacgatcatacgacgatataggcccgatagttcaactgtgatatatgaagtttgaggttgatgataatggcccaatataaggaggatggtagccctttcttttttttattatggaacaatacatgtctgatacgagacgataggtatgttcgatatgtatgtccgatatggcacgattggtatgtttttgttgtggacgataggggacgatgggagacgatggttggtttgatgataatatttacgttcttaattatgattttttttctttgaggccgatgggggacgatgataggtccgatgataatgtttaggctcttaattatgattttttttttcatcgaggttgatgggggacaatggtaggtccgataatatttagtttcttaattatgttttttttccttggaggctgatgggggacgatagtcagcccgatgctttgtagaatatctaacttcaagtttcttgtattttttttttttcagattacaagaccaccatgccttattattccaattttggacctctaccatcactagttcttctagcattatacataacaaatgctaaaacagttgaacctgtccacagaaaataaataaaattgtaagagaaaagtgttaaaaatatccttaaaagccacaaaatcacatcctatcggacatcacatcggacgatatcatacataatatcggaccagcacacaaccccataaaaatatcagactgtatcgggctacccatcgatccatcatcaatgtcccaaatccaaaaaaaccatcggactatatatcgggcccattgggccttcatccttgtccttagatcaaacaacccaatcgaactagcatctggcccatatcgggccctatcggactatatgataaaatccagaaactagaaaaaaatacagtatccacacgcaacaactatttcaacacataaaacagtaaaataacagcaacaacccatagatcaatcatgaaaataatgttctaacctaaatataagaaatattaacaaaaaaaaaaatacttacccatgattgttcccaaatttcttcggtggctcaacaatattttgcttaagtgttggttgaatggagtttcaaaccttgaaaaggcaaaatgtaagtaaaatgggtcattttagtgtgactttgataaataaaaaagagagaatcgggaagaggatgaagagaatgaaaagagtgaagagagatagagaggagagtataaggaggggtattatggaaaaaatgagaatgttgacatatatggccaatattaatacatataggttaaggggattaattttagggtaatatatgcataaaaaatcaaattttccttttcaaatatttgattttgcaatcagtgtgacggaatcatgaataaattaatttgaggggacgtaattatggttctttttaaataacattgtttgcaaaaaaatattatcaaaagtgttttagttggggttggaaccataatctcttcaatatacaaggacgaagcaaggattttatgataagtggggccaaaaatgatagatggtagaaattagaaaggtagaaaaacggtaaaatatattagcaatgtccaacaccattacaatatttatactattattagtataattaaggattgctttaaaaaaatgtattaaattaagtgtcacatattttaatttaataactatacattatgcaatatcctaatgtcacctcatgatgatattggacatccttaatatttaataacaatgctagaagtataaggttagcactctatataatgaattgatttttttttaattaccaattattaacatagattaaaattagtagttatcaaactaaaaattgaaaagttatttcacactatcaaaaagctcaaataacattattagttatattatcaaatatcatgtcttctataattgcacaattaaattgataatataattacttacttagtatacttgtatgcattatgcactaaaaatattttgattaacaatatagtcatacaatttttcttagttactctatttagcattgttgtcgtttaaattttaagaataaaagaaaaagaaattattttttcttctcaattactacaaaaaaaatttattccgtaaaaataaaaaaagtgtgacttattataaatcatcatttctattatcactaaaaggtctgtggctaaatatattagtcataaaaatcacaatttgttgcgactacatgtgttttcagtcacaatacttattgtgactaaaactaaataaatgacgacttgtatctaaatattatgttttagtcacaagtaattttctgttgtgactaaaaatcacatttaatcactactacaaaaatagctttttgcttcaatttttaagtgacatataaacaatttgcatcagttggtgtaaccgacgcaaaaatcataaacgcaaatacttatatattcactctcaaaacacttatatatacacaattacataaatacataaacaaacatatatatatatataagtaagaaaaaaaaaaatatatatatatatatatacttacactgtgcaaaagagagtgcaccaccaacactgagagagagagagaccctaaatgtgtagaaagagaaaatacaagtctgagaaaacacatatgttgacctcgcttttggccaacgacactgagtcttgaaagtgatttagaattaatttaattcaatgagaatatgtttaaaatatagtgtacactaagaacacaagattttatggaggttcaacactatttatttggtaatagcctattcatctttttgattatatttcacttgtgagaagagaagcaaaaacagcttgatctctttcgaaatctttttacagatatttgaacaaagtaatagctctcttgaaagtatatttttggcgccctcaataatggaatggttccattatttataggggacaattaccatggaaaatggtttcccaaaaactgtcaagctgtaaaaataggaaattaataactttcctaaactgtgatatttacatataaaaatcctctaaaatagggatttgattatataaaatggtaaacttcatttaatgaattctcttcacacgttttcctctggtccaattacgtgaagtgctgattttacatttgcctcccaagtctgtgtgagaactttctggttggtgcgtggacttgcccaacacacataataggtgaatgcggtgacacgtgttagatggataagcatggagaacaaggttgtcacttcaaatcttttgaagcatctttttaaatatttgatgcatttaatgctatgatataaattaccgtgcccttaggggcatgcgctgacgactgtacttataatgagtaatcattacaaaaaaaattagggggaaacaaaaattttatttaggtgcacaaatcactatcataccctttgaaactcttataaaaaagaaataaaaggttcatttggcatttttacataattttagccttctaactatca

SEQ ID NO: 30704 - DNA, 1595 bp, Cannabis sativa
  modified_base (1452)..(1454): a, c, t, g, unknown or other
tttacagtccttgtggagatgatatcgttacttatcattgtattacttgtttgtgactacgtgcacttgcgtatatctaattttagcacaacaaccatgaggtggaactgaggtggggtaggtggaagtccctcatttgggttagcatggtcagtgagggaagaatggtgttttcagtatcagtgagttgaacggctacagaaaaagaacgagctaagtcttccatatttggcaaaatagaatcaagcaaggaaatagtagatttttggaacgaaaacatggtatgcagaggaaacaacagatcattacttaaataggaaattcctagtacaacaattaagacaagtgtagaacaagttttcatatctcgaagtacacttgagttccaaagatagaaaaaagggcaagaattaaaaattgaatcaggcaggggattatccaaatccagcccctgactaggtaggtagacacagcaattaagactaaaaaccctaataaaatcggaaaggacagtggtgattaaaatcaaatagggttcatcatgagatttgttcagggaagagatcaaacctgtaagggatgcattaatggttcgacacgtttgcttcaatcttgtcagcaaagatgtcaattctgatcgcagctggtaggggagagacggttggatgtcaatctacattaatgttgagccaccacgacacggagaggggtggaaaaaggttttgggaaaaagaaaagaggaaaaatcatcattactattgaagttcgatgaagaagacgaagagatctgggtagagagcatgctggtttcagtggaagatactcgagggtgtggaaaggtcctcattaaacaattaatttacaatcatacaaaacctttttagttatccaaccttatgtgaagagaaatgtgaaataaatggtaaagctgggataagactaaataagaattttaattcttttgtagttgaaatgagaggacatgataagattctttttttggagaaatattgtagaaatttaattataaaagtacgacatttacggcgtgggcaaggagatacttttgcacttcaaaagtattttatgaaaatgtaaagcaaaaatcctaattgttctatgtgatggatttagatgaaaaaaagtagaaaaaataatatattttggggtgacgcaagaagtaaggatgcatatgaggagtttggtgacgcgcaatgagtttttacactacttaccttactaataaatataacatgccatttgctatatttgtagagattaatcatcatggacaatctacattattgggatgtgcgttgcaatcgaatgagaatattgaaacatttattttgttatttaaatattggcttgcatgtatgttcaatcatgctccaaatacaataatcacttatcaagatcagacaatgcataaatgtaacgccctaaataatnnngcacgctacccaaaatacttatgaaaccctaatcacctacgggtttactaattaaaatagcgcataatttaaacttttatattaaacagaatgaaaataaactcgtaatatatttaaaatttcaaaatagttgggatccca

SEQ ID NO: 30705 - DNA, 1973 bp, Cannabis sativa
catttccttttttgcttctcaatccacacgcctcctcatcaaccagccattccttatttaatattataaatctaattaaacaaaatcaatcttttttcgttttttgagagaaacaaaatcaatctaatcctatattgattcattgtattgttataataaaagcacatgacacgagtactcataattaaatcaaatcactttcctataattatacacccatatccccaatctcttcttacaacaatttaaatcactaattaaaagaacaacaaaattaaaacagaccaaaaacaatagagaaatgtcaactacactactaatgcaaaacaacatgactcataaaggggaggggttttgtgtgagtggctggtactcgaagactatcaattaaatcagaaaaattcatggtcatatccaacattgtagtcaaacaattgatcagtctcctgggaatcgttgggttgctgtaaaagcaattgggaagatggtgatagagtttcatgtagcataggcaactgcagctgatgattgacattaatggcagaagcagaagtagtagtgttaggctgctgcatatgatgaccatgagatggcatagtagtcatattgaaatgtttgtctgcacttgctccaggtgttgaagaattagtagtagtgtttggttgcatcgtataatgatgatgaggtggcataggagatatattgaagtgattgctcacagtagcagaggcagaagaattgtctctctgttgcatcgtatgattgggcataggagacatattgaaatggttgttgaaagtactagaggtagaagaattgtttggttgctgcatcatatgaggcatagtagacatattattgttgtagttggtactagcctgcataatattttgtatttcaggagagaaaagctgctgattgacattgctgagagtactatgatcagaagcattaacttgagtatgaggaggaggctgattggcatggttgacaaagctatcactggaagttaaatcttgcataagagactgtaaattgagatcttcatgattattaacagtaccatcagaactagttatttccaactgcatttgaggcatattgctcatacggttactgtcagatgttatagcctgctgcaattgaggtatatcagtacaagtactaccaattggcataccaccaacaaaaccaatttcttcatcatcatcattattattgttattgttatgcggtcgtgcttcttggttgggaaataaagaagcaaaactaggcagttgcagcaatcctcctttattcatattattaaaaggaggtggtagcaggagagagtttgctctagtaggtgtagactgaatcaatatccaatcagccagtttagtagtatcccctctcaacatctccatcgccaacttaagttgctccaaacgggacatatcatagaaagactcgataggaaactcccaccagtgacgattaatataatcttgctttagctcaaaattctgcttcctcaccacatcccactggtccgttagaaggttcaaatgctggttcataactcggatatcggcgtttcgatgagcttcgatcagctgaaatgtcccagacaaatttgcttgggcagtcatacgactgtagttttctgggttcatataccgatctataatcaaacgaacgttgggatgtccaaacgagaaaacattgtttcccggtgagaaaacaattatagccaactctacaccacaaagggtgcaaagctcactagctttcttgaaaataccataacgcctcttagagaatgtgacttgaagattgctctcgttctctatcctcctcattggcaccttctgccttcccctacaaaccctcctaattggtggaataatattgttgttgctgttgttgatgttgttaatcatctccatggttagctaaaaccagattagtataaatgataataataatgtgta

SEQ ID NO: 30706 - DNA, 3298 bp, Cannabis sativa
cgccctgtttaatatttggggacaattaataattcccatccccgcctcattcctcatttagacggagaatccttgtctcattaagggcaggtcttcgcagagctccatcctcatgagaaaaatgtacatccctactcttaaggccatgagcggcctcaatttgcattttattttatttttatataatgttttcaaaaaacaaaagattattatagtaattttactttagtatatgaatttttcatttatttttgccatatatttaaaataaatctattttaattaattgtcagttttaagctcattttcattgtgctcgactcgtctttagcgaagaactctaaaccaaaccctcaaatcctttgaatttgaactttcaactttgaatctctcgctctggttcgttgattggaggtctcaccttcatcttcatcttcattcatgtaaggattactcatttctttcttttatatgaaaaattatttgatacatttctcttttcttaatttttactgttacagttcagttcacaacccaatttgggtcgatttcagctcattatggataatcagggtatgaataaaatggctaaaaccacatcatcatcatcaatggttgaagatgatgacagaatttcgaaacttcctgatccactcatcattcacatcctatcgtctctcccaactgaacaagtggttcgaacatgcattctttcaaagcgttggaatcacatctggtattcagttcccacactctttttctccaataatattactagtattagtacccatcgtactgctaaaaatgaagttgttaggaaacagggccgagataagttttacagttgtgttgaaaaatatttggaacaccgtaagaaaggtatgaattctatcgttgattcagtcatattaactagttttacacttaaaatgaagggttactatcaaacaagtaaggctgaggttgtagataaatggttagcttttgcagttgagaataaggttaaggaaatgtatctatggatagacagagatgaagcttgtgatggtgaggatatgtatgattatgtcttctactgcttacctaaaataatagagagtgcaagatatttgactgatttggagttgagtggggttgagttggatacttctaattttgattttccatcactaaaagctttgtcattggtacatgttaggagttcatgtgctgtaaagaatggagaggcgtttaagtttttgttgggttgtccttctcttgagaaattgcggttacataaatattatttcaagcgcgtttcctcatttactgaggatgaggttcgattggaaagtttaagcctcaagttcttggaactgagagatacacgttatcgtaaattagaagttgaagccatgaatctcgaatctttggtactaattggtgttaccgagtacgaaatagatatctctgcttgcaagaaaataagaaatctctcattagatgataatggtcgtaatttcaacctatcattacatgatcttatttctagtagtcctcttcttgagaatttgactttgaatttctgctataattataataatcattttaaaatctcgggtcagaacttaaaaagtttcattttcaagaattgttgcttaaacaagaagaggatgaagagcaagattaaggttacaattgaatcaactccgaaattggaatacttttattatgaaggtcatatcgatttaaacatttcaatagagccatcgaattcgttgaatggaaaaattgtgctttttgagaaggatcatcatgtatatgagggctatgatgcagtttggtttacagatttgttaaattttcttttgaatctcaattgctcttggaatactgtaaacctacatgctaaaaatttcgaggtactcatattatgttaaattttattctattttatttgtacccttattaaaatgttgtacttgtattattaatctatttgctatctttgatgtgatgtttttatttttgcatgaagtctctcacttggccagaaaagttgaagaaggtatgtcgttctcctttgcttaaatggaagcatctcaaagttaatattgaatatggatatgccttcggtgttagtcgtaaaaaaatattagcttgaaggactttgatgtggatttcaccttctttagagacattatctattgatggaaggaagatcaagatattgtaactgctgattgttagttttagaaaatggtactgtagtcctttatgagattgtgtttgttttatttctttattatatttgattgtgaacttagtactatggttatgagggtgatactgatacatatgaagtttattaggtaattttctgaatggattcttcaagaatcaaaccccatgagaaacctatgagatggtcttggaatatttgggattttacatcatttgtagttattttattttgatgtattggtaagacatctgttgtgcttgttttcttatgttgaattatggtttgttatgtttcttgggatgttgtattgatctataaagtgatcagaaagtgttaaagctcgagtttgagtaagatcgagatagtgattccaaaactagatgcagaccaagaaatcttacctatataatgccctatgtttgtctttgattttcttactttgcttttatcttttattaaattgctctgtttcatttgagttcatatagattgtcattggtattaattaacaactgagtttttttacaatattaagtacttgaatattgtaaggaaaatgagatatttaatgaaggatgaagatcatcattagactcattgtttatttattttttaaggagttgagaactagaagatctcattgatagatggcttcattgtttattaggatacaatactcgcaacattatattataaatttctgtaaaaatgtaaaaaaaaaaaaaaaaatcaaaattccataaaaacttaaacttttagttgtttttgagtatttttgaagtaattcctattttaaatatgtctttaaatttatctaaggaattttcacacaaactacttaaatcacatttttgttacaatttacaatttatcccctacatttttatggatttttgagtcgtaacttttaagaaaacaacttgctttcatgtagcaacaacattattttgaaaacaataagaaaaagactaattaggttttttgtccctgaactttgacatgtgacaaattatgcccctgaacttttaaggtcgttaaaaatgcctcataaagtattgagattgttagatttaa

SEQ ID NO: 30707 - DNA, 1832 bp, Cannabis sativa
aacgacttcaaattcgagattatcgagttctacatggtccgggtgttcgtaatcttgatcagaatgaggcattgtcttgattgaaagaaaaaatatctaaaaattttggaaatacagaacataaaagctcaggacctatgaatcatctaaccctaaaattttagccttaagttgttaaaaaaaaccccatttaaagacaataccatacaagaaattgacaataaaaaatatatacatctggaatacaataatgaaagaacaatggtggaaaaatatacttactgggcagctggaaggaagaaaacctcaaagaattcttcattgagaatttctgatgctgagggtctggtttctagcaatgctgagattcagaagaaaaacttctagaaatttgaaggaagaatatgagagataaagagggcatgtaattttagagagaataagggttggaatttaaatttctatgaagctttgtaaaatggaaatggctaaatacaaggatgctactgaccataaatccaaataatggtaatcgttgaatcgcaatgatgactgatcgaatggatggaaacttttgaaaaaaaaagggtcaggtcaataaatgctgaaatgatatttttctcgaagtactaaactgccaaaatgaagcatgcattttcttttcaaaaggaaaataagattgtaccctctgctaattaagaagtcatttttttttaaaagtacgtacttttcaggggacaatagttatactcatattttgagcaagcaatatggtgatgacacgtagtgaaaggctggaaaataaaccagctcacgttatggagcaataaatgtgtttaaaaacttgcttggaaaaaataattggtacaaatatttgaacttattctttcaaagataaggacgagcaatggatagtaactacaattttgtgagactatggagatgaacaatcaatgaattctttaagatcttgctgcttattgacccacaaacttgtgagtatgctgaaagactaaagtaattacttacgatataatttatctcagaattatcgcattatggcagtgcctgcgtttgcttctctcaacattaccgaaggatgcgagaagtactttccatattatacttaggcgcaaaaatgtatctttaaagtaaagcattataagataatcatctatgttgcgaggagaagaagcacaatgagcacaattacttatagataaagacaagagcagttatagcggttatctatttttattccatgagatgtaaatatgaaacatggagattttccacgtttcacaagcaattacaaagataagatctcgaggaaataactgtcaacctaaaaatcttataaacatggaaaaaaacctagaaaataacggggacgatcaattgaagaaacagagagaattataaaaaaattatcttgtattctataaacattctataaaatctcatcaataagatagactcgtagagtatgaagaattaacttcgaaactacgtaaaaaacttcttgttatttacaatcatttattattaataattattattataaaatttatttattactttaagactcatttgaacaaaaatctgcgttaacaataaaattttttaaatttttttctaataaaattttatataatttttcattgaatttttgtcataatatttaaaatatattttatttttgtttgatagatatattttttatgaatatgaatttgaagaaaaaaattaaaagaactgctataattaaatatatatatattttataaaaataaaaattattaacttcgggtgaatatttttggtgcaaataa

SEQ ID NO: 30708 - DNA, 1944 bp, Cannabis sativa
ttattcatgtatatttttattcatctatacatctatttactaatttgccccttctactgtcattattttatttatttacacaatcttttctatttccccttttgtttactcatcaacagagaatactaataaaagatcaaagatctgctccaactttttgtgatttgagactggggagggatatagaatgaaaaaaaaaaaaaaaacaattttaaagtaatgtaaatatatttaatcaaatttagaaacttatataaaagttcctgattaattagtatttctaaagatgataaataccataattgcatgataaaatttgcattactttacaatgcagagtttgatttaatatattcaattagattattattatttggggtttaagttacgatattgtaccttgttcttactttttctttactttaaaggtagaataaatataataaaaggttttgtagtcatctatattactaagaaataaaataatatactttattcaaccaaaaagatcacaagagaatcaaaatcaaccattgatattatagtacttgcctaataatttatctttaatttttcattaaataattttggaaattatattctcattacactagtttctcattgagtgaaccaaaagaagaaggtggcaatgcttatccttagctttttcactttaattgtttattttaaatagtatcatatgaaaagtcttttttctttgaataatttcactcttaacaattataatgatttttgtttcaaaattgcttcaagtcacttattcattattaaaagcacacattttaatttatttgtcatcctcccattatcatagtttcaatatcaaacggctccaagcttgcatacaaagacaaaataaaataattttgaaaacatgatgataattttattaaattaaaatatttcaattatttttcctaatcatataagggtaaatactattttggaccttgtattttgcagaagttactaattggacctttttttttgttaaataacaaaatggaccctacatttttaaaaatggtaaaagtaggactctaagctcaaatttttaacaattttattttttaacataactaattttatgataatttataatacgaacagatacaaaaaaaatataactagttttgtcataaaatttctagatcagattattattaagttttattttgacaaaaaatcatttcattgtcttatttgtacaattttagaaaatacatgatctactttgtcacttaacaaaatagatggtccaattgataatttttgcaagacacaagatctaaaataatatttacctatcatataaataaaataaaatgattattgattaaaaaaaaaaatgattataattttcttgaatagtttaataaataataataaaataatatttgtaattattttatattttaattctagtttacattttaataaatgtacacataaaaagaaaaattgtgaaaagccaaaggttaatcttgaatattattgtattggtattaaatttcctaaatcattaatgtgggactgattatggcggctggcttaaagtgtccttaatagcatcgaagggtcaaagtttgcttgatgtacttttcttctctttcgattaatgaacacttgataattgatatcatcattatttattataataatttaatttaattaatataataagttaagatatatatttaggataaaatttggtgaatgtttgtggttattaatgagtagtaatagtattttataatttattaattatattttttttaaaaattattatatttaattatatgagatttaatagttaaccgtactaacaataatatacttttattagaatggtgatagctaccatttatgtcttctagcatttatcttttgtaaaccactaaggtaccttagtttgcacattaa

SEQ ID NO: 30709 - DNA, 1640 bp, Cannabis sativa
atttttgttacgagatattattatgtaatttcaaaaaagttatataatttaatttaattattatgtatatatttttaaaaaattaatatatagtaaatatattttaataatttttattaactaatttattatatttggccaatttgttaatttttttttttaaaaaaataaacatatactaatttagtttataaatttagaactattttgtacctcaaaccttcgtaataataacccttgggaaaaaaataaaattaaattaactattaatacatgaaaaattattgttattaaacaatagtagtatctaatcctactatgttttaacacctttgttaacgatttttaataataattagtaaattaagattaattagaatttttactttttaactttgatatgcacttctaaattttttaggctgttgaaattttttttataactattgaaattgttagattcaaaaattttcattcaatttcactaatagaagtttcgagggtacaaattagtgcatatcaaaattcgagagtacaatttggtacaagaataatcattatattagtaaaattgaatgaaattagacaaaaaatcttccaatccaacaattttaataattcaataaaattttaatttattacatctcaaatttagatatcataaattctaattagcttaattaatacaaaaagacaataatgtcatgtggataaatgagggaaggaagattccattgaatattataatgttttttcttgaacattaaaaaatatttattaatacataaaaattgcattgacttataagtcaactaaaataaacaaatcaaatcattaaataattttaatttcttttttttgttctaattagtctttattacctaattaaaaatatttctataaatatatatatatatatatttatatatatattctctcactcaaaccttcaaagcttgatttttccaatttggtttatcaatggcgaacacaatcgaatcctctctcctcaaactattcttcgaggccttatcttctccaaccctacaaaaaatcgcccaaatttgggatctgaaaaacgacgtcgcagagttacagaggttcttagcaacggcatctgaagaagaagaagaagactacgatttcaatggcgaattgaggttaattaaagcttacgaagccgaagacatgcttcacagtcttacgatcatcgccggaaagttaatcgacgattctggaacaaatcgacggccaataagctaaggtactaagtaactacgacaacgacgaccttgatgatcttgaaatcttgattatggagttaaatattcaattaggaatgaaaattcactcctttttttttaattattattgggggaaatttatatctcaatagagagctaattaattaagctctgttttttttttttttttttgtgttattatggattaattttgattatttatttaaattgaaaaagaaaaaaaataggaatgattattaaccatcccaaatttttcaaaaaaaaattgaatgcattaatcctcattagtattagtataccatgaaagttggagttttttatttttaattattatttgttttttatttttgataaattaatttagaaaaatgctaa

SEQ ID NO: 30710 - DNA, 1805 bp, Cannabis sativa
agatatactgatatccgtacggtaaattgttcagaatggagaaagcggaagggcctgcacatgaaagaacatttgtgtcctctgttaaaatatcaactgtagatggtgtactatttatgatgggagatggaaaatcaagagtaagagatgcagaaagttctgcagcttctttgatgatccgcgccttgcaagaatccgatatactttaatacagcccttccttcttcatcgtttccaatctccaacaactaattgggtcaaggatcaagtatgtaagtatcagggtcatttacactttttctgcttttctttcattaactaacatcatttatatacttatatattgactacttgaattcaagtggagatgctgcttaaatgttgtttgaagtgaacaaatttctatcaaaattttgagtaaagtttctttttttcgtttttttaaattctatggcagaatcgggatgttcaggctttgcttcgcgtcgcagtgaagcagataagcactgtatttatacctggaagtgaaaaaaaatcagaatttatcattgatgttgttgctgtcaacaatgttgggttcattccctgatttttaatttttgttaaaaggttttatttgtagggtgcttttaacctcaaaatgatagatgttgatgatgacatgcctgaaaatttagacaaactcaaatattgaaggtttgtcaattggcttatctccataggaattgaaccattaagattaaagttttaattgatgttaaaactgagcttatgtccctgtcggtcagattgaagttgcagagattaatttcggagattgtatcggtgacatcgttgcagacaatcccaattcaaagaaggaagctttctcttcatttgacaagagcttcatcttgtgtttgaggttatgaagatgtgatcttaaatggaaacaagagaataatgatgatggtgtttgttgtttttgtgtgagaattaaaataagttgttaatgattgaatacatgacaaaggtatataagtgcatttttttttccgataacactataaaaacatctctaactatacattttgaaatttaagaatcatttatagtttttagttttatggtggtgttgaacattttaatagcaatattctattaatataaatgatagtaagttatatcatatttattagtgtattaattatttttagtaaattttattttagatcttttactttgtattttttttaataaagctaatcaagtcataaaataatataattagtctcgtcataacattttcaactcaaatattattaaattttatttgataaacaattaattcaggtactattttaagaattttaggatcaaaaatttcttttaataaacaaaagttcataattttttgtaaaacacataaataatatttacacttaaaaaaatatatttaaagttagtgaaaagtttgctataacaacaatacaccattgcaaaaaaagaaaaaaaaaactacaatatacttgtcaattaaaaaaaaaggattaaaatttcttcaaatattaataacaaaaaatatattttcacaatatcataccaaaaaaaatcaatatatatcccaaattcaaattaaaatacattgataaaaatcctaatgccaaaataagtgaatggaatatatagaaatttgagtagtttaaaaaagacaatattctaaggttcgttagtttattattattgagtccgatctttgaatttcggttgtttttgttagacaattaaatatttaagaaggatttttttgaaagaatttctttttt

SEQ ID NO: 30711 - DNA, 2972 bp, Cannabis sativa
  modified_base (2670)..(2676): a, c, t, g, unknown or other
agcaccgattgggggtatggtcggtcctcccccggtgtgtccatggatcaatgctgataagtctccttattctatttaaaatgttaccctaggaggcttttgaattaatgattgttactttatggtggctttagtatgatcgtaactcactgttatttggtaatatgatgtcaagattagatattgttcgagatttaacccataatcacttatcggaattcaaagagcatgttcaacaaaatcttcagctgagactgtgcattctagaccaagttggccagtgagctactcgatcgatgctacaacctcttaagtccttttctcttttaactattgcttcaatggttcctaaaggggctttgtcaggctaggtggagtgatacaggatactacaggtgtggtttggttggtttgatcatatggtgtgttaggtgatttttctgttaatgtgaaaaaggtgcttgcaattagactggtgttgactcttgcgcatcaatttagattcagtatctccattattaatagtgattttactgtgactattggttggattaataaccttcactcaatttttattttttagtctattttagtagatattaattttttattagctgatgttggtggtggttattgcagtactatttcgtaatctatgaatggtgttgcccactagctttcaagctctgttcccagtataggagaatgtggatgaacaaatacttgtccacgatttttaaatttttctattacaacaaattaatcttagggaattgtatttttttattcaaaatatatatgaactatttatatagttaagtatggatcacatcactttttattgtgttattaagattaattgcataattcaataatgattctaaataataatatttggtattttaacttatattgtgtaatttaatttttttttttgccaaaattagatctcttatttcaataaatctatatagttaaaaaaaaatgagagatatgagacgatgataaggaactctaaagtctctctaattagcattatttgttctctctttaattctcacatttttttaatttataattagctttggattttttttcttaaattaagatattcgaaaataatatttttttaaaaaaaatttaactctaaaaattttggttacaatattttcctgcttttggatttttttttaaaagaaattaagatatataaaaatgatatgttttaaaaaattgataacttcaaaatctatcatcatatttttgcttttggctttgttttaggatatttaaaaaatgattgtttttttttattcaaaaaaaaaaatgattatttttttatcacttactacattctctatatatatcttaactaacattctctcttcttctctggaatattattttcttaccgacttaaatactgataagaaaattagagaattaataaatcttgatatgatttttattgatgagaaaatgattgttatttatattcgtatttttcttttactactacttttctttttatcaatttatcaattattaaatactcaattggtataatgcatgtaacaataagaaaaaaaatttgtttacaattaagtttaagaagcgaatgagtgaaggctgtttgtattgtctgcaaaccacaaatgagtacagatcccttttaaataactataaaattttatttttggttacaacttcagtggagagactagaagaaatagttaacatttcgatcaataagttttaattcataactctaatatttagaggtataagtatctaatatttgtaacactgtaatttttagttgcataagtatccaatgtttgtaaaactgtaattttataccagtttgtcagtaatgaccccattattgtcttatacatgacacaaataagtcccagaatctaattcgttaggtcgggttggcttgattttacatccaacttttcatatttttcaaaaaaaattatataaaaaattaataaagttcaaatttgatacaattttattactttgttatcatcaaataaaatacataatttaaaaatttttaaatatctgatgtgaaatgcaggttgttattagttaaattataagatgcacgagcaaggaggaggattaatagggtgttactactgggtgaaaaaaaataatttatcgtataaatatttaaatttaatttcaagttgtaaataaacatttaagtttaattttcttattggcatatttaaactaatttttctttaaaaaaaaattaacgactttgaccaatcaagaattgctacgtgacagttaggtacctaaagaagtttcataatataataagtattattatccttaaaaattaaattttagtatttatttataactaaaagttaaactataaatatatatatgatgtaaattattaagaggagtgctaattacaaccacttaataacatccacgcccaaaatcacatgccgaaatattattttcaatttttttttcatagtggtattcgttataattacagtatcatctctgtaatttttttaaaaattccaaatagtttacaataccaaaaatagagatcctgatatttcagtttaccacgcgcgttcaaaaacttaaaacgtattttcgtcactttaaactattcgaaattttttaaannnnnnnagggatgatgttgtaagcataacaaacactcccgtgaaaaaaaaaattaaaaaaagtatttcgacatatatatttttaagcgtagaaattgactaaaaggttgtaacacaaaaatgactgtaacactcctcaattattaaaaaaaaaatattgtgttagggcgaatatttcgtccaaattctctggttgtctgctttaccacgaaaatattgtatatgaagcaatatttgaggtacgggaacatcccacgtgtgggaagactttgggcaaggccttataataataaagatatttag

SEQ ID NO: 30712 - DNA, 3887 bp, Cannabis sativa
cgaattctggagcaacattattataattaatggtgttaattttttgttgtattaacttattatgttaatttttaaattctcatactaaattgtattaattattaattatatatgaggtggattttattatgactatcaatagtattagtcattagaattttatttttttggttattaatagagttattgagttcttcaagttattaaattatttgaagtagtatgtagtgtcaaggattaaatgacggcatcaactggatttgacaagataagttttctctttttatatagataaaatattgttaataatttttaatatgattattaatttgtagtaaaatatgtattataaaatttttaataatatttatttatttattatgattattattttattttttcctcactaatgtatattttgtttatttgctgttaaattttttttttcgagggagtaaattctcatgagcacaacctcctgacctccatgctaattggaccatcccctctggcctgtctagaattgttcgtcgctaagtttttgtttcttgtttagagagtgattatgaaggtgttgtgatttctttccattctttttatgagggtgtctctgcagtacgcattgtggaccattgatattgtgatttgatgatgaccggtcgtgttgattatactcatacatgctaggatttttattattttcatgcaatctatatcataaatataggggagtcttcaaaaatactttttttttatgttttatttataattttacggtataaattttatatttataaaaatacgcttgtaaagttataaaattataaaaatacattttactcagtaaaaagtaagaaaacatctaacaaaacaacgagaaatcaacatcatcacaactataaatcaacgataaataaatttataaaataacgaaaaaaaaaacaaccagaaaaataatctaataaaaaatataatgcaactataattaaactataaaaaattaaaaataaaaaagtttaatgtttttactgaagaagtatttatataaataaaaaaatttaaagagtaaaaatgaaattttttctatattaacatatttttataatgttttttgatctattatgtaaatatttctatattattaacatacaaaatcctaaaacatgtttttaactgaattaatatgagtttaatgataactctaagatttagagttattttgatatctttaagtttgaattttaaactaaataatagagtaattagtgtctatattatgtaattgtgtctttgtaataaatgaaagtgtgtgtgtgtgtgtgtgttattaaatgttaaatagacttatgttgctgtttttatatgtattaagcagaaaaaatgctgaaatgggtattgggaaatgtttgggacaagaagaaaaagagcaggaaaaggcttgttgctgattgtcattgctatagcaattatcgtgtagcaattggccagtccagtaagtgtattgtggcagaaattccagctgacattaatgaagaataaatgatgcttatgtggagaaaatgtgtacaatgactcaggcaatatgtggagaaaaaagggcaagtggacaatgacttggattttcaattagggtaaactttagtaccctaattgggaggcagccaataaaaaaagaggagatagaaaattgtggctgcactttaagaaaggaggtagtacgaatttttaagaggaagtacagaaaaaaaaaaaaaaaaaaagaaagaaagaaaggaagagagtacaaagaagagaagaagaagactaagaagaaggagaagaaggcaacctcaataaagaagatttgagctcaccaactcatttttcttgctctcctctttcattttgtatcattttctactctttgttattctctttagctccatgaacatgttatttcttggttttaagtttttagtttcagacatgaactaagatctttgagatttgggtggttatgaacccttgtatgaactagtgctatgatttgcaatgattgagtaatcctatctttgtttaattagatacgatgaaatgttgattgaatattaatttttggccagctttaacatttagcaagctagatcttaattggaaaagtgagacctagttgaacccatctaattgatgcatgattcttacctctcttttaggtattaactagtagtgaaataggcatattttgctaccttgcataactaaggatttgatgctatagtggactgtttgtgacctgatatggtgtaggaatgcattgttgaggttatgaatggtatattgcaagttttggaagcttgctggttttttttgaaatctgttagctctgccaggattgctgagtcattgctgggtcattgttgtatcaactggaacatactagtggagaaattaaccacccaattgtctattttctaaattcaaaattatcacaactttaattacttttgacttcttatttttagtttatttagctcaaaatattatttctcaactctagaattaaggttcagaatttttctcttgaattaattggttactttattttatttttacttgtaattttttttaattgcttttagatgatttgcattacttagtgtaaaagtccccgtggatacaaaccttgattacttatcattgtattacttgtttgtaattgtgtacacttgcgcaattataaatcaatataattttcacaatatttaacataaatgaaaccttacattgtatgctgtgaaaaaatatctcgttcatttagtttcatttagtttctctaacccttgtatctttttaatcatagggtattcacaagaaactgcatcaatcttctatctacacaatcatatgttatgtatgatctcactcataccacatcactgactaattaggttgatagttaaaactagtagcctttcaattttatccaaaagcccataagtagctcttgtagactcattcttttagttaatgccttctatagcttatagcttgagattttgagtttatttatctctccaagattgttttacataattcttgtaatccgaattgagtacaccaataaagcttattatttcatgttcatttttagtgttcattatttttaatgttactgtgtttaacaaagctcaacagattaagtgaatcttgatcgtcatgaacgatccaatcataaaaagttgtactagagtatgggattaactaaataaagattcaagtttgaaggttcaagaatcaccaagaagatgttggctggaaagtttgagattgagaagtttaacggagtcaatgattttttattatagataatcaagatgaaggctttagtggtacacaatgggatttcagaagccattaagtatattcgagattcttatttgcattttcagtattggacacggggactgcagatcaactttcaggacctatcagtgggaccctcatttaagacaaaatcggccaagcccatctgggtgataccttccaagaacatgttgcagttctaccttcacaaagtcttccgccttcaacaaactaagcctggaagacatgtctggcaccacgttcccagaagacccttctggtttccctttatattcatgcatataaataaggaaactctagttgccagattataatagtgcattgaatcaagattaaaggggaaacttcctataacaaatattatgcaattaatccagattaattgcccacaatcagtgtacgcgatgttgaccaagtcaatcccaattcgatttgcctagtcagcgtatcatcttctccaggggctagatttcatgagaaagcccacagatattctttactgtaaactccccagtagagggaaa

SEQ ID NO: 30713 - DNA, 3932 bp, Cannabis sativa
ctaaaatcacaaaagcaagtacagaaagagggctttagtcctcaccattcgcaattaagtcctaagaatgtactctggcataccgaatttatcacaacattacacaaagaatgaatttaagagaacaaaatttcataatgatggatcatgtggaggcaattttttcttttgtagtgcatgtgtatatatttttcacactgcctgaaaagagaagatagtctatcttccaaacaaataatgatctgaaacctgtacacttataggatccattgacagcagagccaacaatgattgggtgcatgtaatgtaaagagaagatagtctatcttatttttcattgtgtacaatacaaaaagaatacagtctatcttccaaacaatggctctgaagcttgtactctaggatccaatgacagcagagcaactagcaaatgtatttgcaaattgagaaaaatctgaattattcaagacatcgtatcaaatgtataagaaaatatatatataactaaacctattgccttcccttttttacttctctctctccctcttttttttttcttcaaaatatgccgaaactgttgtttgtcaatatttatgtcagataagcatatagaaaaatgctgactacaaaatcatgtgccttgtacccctgggggttataattgtctatcataaacagcaattatcatatgattacttattttattcacctggtatcgtcatcatcaatagcattagcatttcagcagcaagatcatctttgccaccatcaaaattgaataaccttctctctaatcaagatctagactcttcttcatgctttcataaaccatatatgtaatgcttgcagctggcacaactttgagaagattgggaaagagtcctttataaaaacctcttaaaccttcatgctgaaaagttctcctaaatacatcagacatacccttataagcatcggtagtattagcttgttgtgcttgcattctggaaaaaaaaaaaaaaaaaaaaactaattattctcaattgaattcataatgtaaacttatactggaatcaaggagcaaaacccaccaaaaggaatttatttccttaagcaaagtttcaaaaacaaataaattaatacctggttctaataacctgcaatggataaacacaagttgctccaagggcaccagatattgtcccacaaccaagttggataagaggaccaggttctgcaaaacagtagttacaataagaaattataatgcactgagcaaagatatatatatttaatgagtaaatctagaaaaaaataatggaaaagcaaatcactgtaccactgtcatgatgaagaatgtacgtctttgacatatctttcaaagtctcataggcagcaagatcaatgccagcataggggataatcccaagaagggatggtagaagacccttatagaaggccctcgatccctctttaagccagatatcttttgtaagagttcccactttaggaacctttccactttcacaagaatatgtttgtaacctcgttttcacaagatccagcgggtagatcacagtttgagccactgcacctgccataccaccagcaagaagtcttccactagtaccaatatcccccttgtcttcacccttaatatcaccaattacattcttcaacatttcataagcataaaactttatggcactctcaggtgctaccttcacaacatttatcccattacccctaaaaaaaccaaggataccaccttccttccaaatcttctttaaagctggcccaatatgggcatgtgttgtctgaacttgcaaaatcaccttcaggcgatccaatggagctgttgcagttctggaggcagctccagcaattccccctgcaataaaatatttgcttctatgaacatgcttagctatgccgtgaggaataacagcatgttccccaatgtctacaaggcataccctttcccagtgatgataaatgttttcaatagttgcttcgtgtggatagagtagaagaaaatctctccattcctcaaatgtgataattccattattatccttatcaacatgctccacaaaacgtgcaagctcctcatcatcaatttcaatcccttcaaaacagaaactgccaagacttataagatgaaaataacccaaaagtgggcaatatactaataaaattaacagcattcattgcatacagcttgatgtttggcaaaataaacatacatctagcaaacattgttgaaattctttataaactttagatgtgtagaatgccaaggaaaaatgtaaaacattagatattaatagtttgtaagagacaggcaggaatagaagaaaatactgttactcaaaactaacgcacttaatggatgatcgaaagcaatgtatgatcttactagcatcacattcacatgagaaccaatagccgatttcacacttcttagtcaaaaaaaaaaaaaaaagaaagaaagagtcataaaacctcatactgagcccactaaactaagaacataaaacttcctacatttactctatataaaacaaactctactacaattcaacaactgcatcagtgtcaagtcaaaaggtttacatttctacacactcagaaccaagcctaggcgcaaagaaaaatcaccgagttatgttagagtaattatatattatacagaatcccataaaagaagaaaaagaaacaaaagtattcctaaaacctttagtcaacaactcaacagttacatataattcttccgcaggaatcaaaagcactaaaaccagaaattgtaaccttctaggaaaataaaatagaaaacaagaagtcattgcccaccttcgttgaccaatgaaataatcctccaattctacgactacttacgacactaaaattagttcatcctccgaaatagtgatggttattatagagaaaaataaaaagttaaatacagttaaataaaagcatagggccacccaaattgtccctgtcaaaatgcgaaagaaaaatcatagtcataaataatgaaattgtcactacccaattaatcacaaactctcacaatcaaaacccagttttagaaactttataataatcaataacaaaaagggcaagcaaagcaatctcataacaacaaaaaaaggataaagaattgaaataaaaaggagttgcgtggtccaatgtaatgcgaaagtaccagccttgacaagcgcgtcccagagctcttcaggcaaaatgcagccgttgtgttcgacatcaatggcctgaaaaattcgataaagctcgagctccttggcatccatataccgacggaactcgtggtaatcgacccgtccatccctattggcatcgcagaccttcaaaagatccttggcgtacttgtactccggtggaatttggagagcggagaggccagtctcgatctgggcatagtccaaaaacccggcattagcaacgtcgaagaaattgaacaggctacgaattctgaggtccctttcttctttggcttctctcaaggctagaaggacgtgatccattgatacgggaccgggtttcttcacggggttgcagcagccctctgtggcgggcttagggcccatctgagaagaagcccaattgctcgacggccggcgcagccccgtcggaaacagttaaaagagaatcagatccaagaataagaatatcgcgggagctgggaattgagagccaatctttgtgaccccccagttagcgggagcaaaaggggttatgggtatggaggaagtgttgtgtgggtaggattgttgtgaaagtggagaagaaaggcctggaagaagagcataatctcaaccccaagaaagaagaggttggatattcgctattggcaagtgcgtgcgcccgtttgtgggattctctatatatgtatgtatgtatatatgtatttctatttgctttattat

SEQ ID NO: 30714 - DNA, 1730 bp, Cannabis sativa
aattcaatgccaaacatagtattgtattaaaattatacaatccaatccaatacaatacaacccaatacattacaatacaatacaatacgacgaaccaaacgagcccttaagctattagtctattatttatgactaacattaccatactttgcaagaaatttcattatatttatacatatatctgaaactcatccaaagaattataggtcagtgaaagggttttcctttttctaattgacatgaaatcttgtaatggggaagaaaaaattataaggtcagtgaaagggttttgcatgtcgtatgtttcttgcatcaccctttcaaaaccttgctttggatcttatatgggtttaacatcattgttggccaagaaatagaaataattgttggcaacagtttttttttttcttttttggaaattgatgacagggggtttgatttatgattttggggcttgattttaggtgtgtgattggggaagggatttccgcagtggtgcgataaggttgacgaatttggtggttttaggttttaattttttttttaacaaatcattcattttaaattaattaataggtgacaaaaattggaataatttggattgtccacgtgtctattaaactaacagaagttagtgggtaccaacagaagtttaaaagaacgaaattttgagtattaacgccgcaattttaaaaattgggcttattagcgataaaactaatataataagtatttatgtcatgaatttcccttaaaaaaattacatgatgtctagttatttaacatgctataaggctaaacaatgaattatgctggtttgaagaggtcactgcaccgattgctaatgccttcttaaaaatgttttaatgtgatttagatcacgttatcaaaaataaataaataaataaatacataatttttgaatttaaaagaataaataaagaaacctcgcttttattggaagatattattggtgggtaaactctatcatatgttcaatgggtttgaaaacttattacacattatatttatttgatgactgattcgtggtagtttattggatccttagttgaggttgttctcatcttgagattattcctggtcaagtatgcttaatttttgagttccttagtgatggattaccaaaaaaaaaggcatcttattgatgtaggtagtctcgtatctacgaagtcttaaaatcatcgcacttgaccttttccagacaatataaaattgcacatcttacccacggattatgaaactctatctgtcacattctctcaaaagaaaagcaattaagtatagaagttagcaaattgagaaaaggaatctaacaattacactaggttggacaacaataatatatggtaccaccataaggcttcatatcttataatttaggctatgtttggtaggaaggaaggaaggtatgatgggtggagggtaagagagataaagaaaatagttgctctttattgacacaaatctagccaacacttgctcgctagattggcgataaaaaatataagttaagtaataaatagagagacacaagagatttatagtagtccactccccgtatcataacggtaataaagctacgtctacttcgaatttttattactgacgagaattacaagaaattgaccaaggcaagagctctaatttctagatagatactctgaccttatggactcttttgtgaatgtgaaaaatgaactagtggagct

SEQ ID NO: 30715 - DNA, 1323 bp, Cannabis sativa
aaaaaaaaatagcatgccttttctgaaactaatattgcataatttttttaataaaaattaaaattgtattaattaagctaaattataaaactcaaatcaataaaaataaggacttcattaattaatagataaaattagactttgcagtcatagtaaaataagttcactgaaatataagaaacgggcaaattattgtgggcaattgtctacttagtttaattataggtagcaaaattataaattctggagatataaataaaaacacaaccatcaaaacaactaaagagttcgaagaataattctcaatctcccaatacgacgacaagcaattgagagaattaatcacaactctagagttgttgtccacgatgatgaacttgtatcctttgagctttgccgaatcaagaactaagcaacatgcagtcgcctcgccataaaggacatctgaatagtccaacttagtcgtggtaactcagaccacctcaccaaagtggtctctagcgaccaccccgatacacaaattttccaaatctactttaacatgcattacaatttaatttgagccaattaagaaggaaagtgccaatctttcttgtggactatagtgtccaaacgagtaaaagataaatttttaaatttacaaaagaataataaatagaataaaacaaaatttcaaattattcaagtgattattatgaacgtttacattacaaaatatataacaccttacggattagcatatgaaaaataaattatatattgaacatgtgttacgtgtataaattagagggcttttttttaaaaaaaaaaaaaaatttacactttaaaataattgtttttactttttatagaattctacatagaaatccttattacaattagtggagcaacctaaatcgtataacaactcacatagaaatcactttagaaacccaaaccgtaaatttttttaaaaaaaagtttaaaaaataatatttggataatttctctaaattataatacacatatatgtataaattaatatattttttatatatattatagtacacaaatatattgttggtagcagtcattacaatattaattatataaaaactttcgaattattgattaatttccctgcatataacactgtatttggtcaaccatgagtgcatttataaaactactgaattgatttcaaatttcagcatttataagaatttttttaaagaaaacgaaaaacatttttaaaggaaaaaacaaacagaaactctagatcatttcattttatatatctttatatattaaaagtgtctatctaacggtatttcttggtttaac

SEQ ID NO: 30716 - DNA, 1615 bp, Cannabis sativa
atacgacacaaaattaccagacttgcaggtcatgctgctataaaattgttgcacaacatgaccctacctatatttttttatgatacaacacgatactacccatatttttatggcccgatacgacacgatccgtattttaaaaaattcaaaaaatatgaaccgaactagcacgacacgcacatctttacaactatgttgcagttatgaactaagtatcttaactataacaactcatttaatgaatcaacaattttcttcatttttgacctcttacctaaataatttagctattctattgtatttgtgactgctcttagttatatatatgatcaatatcaatgtactttagcatgatcgttggagattcgagactcaatctcatacactatgggagttcaacataaacaagaacaatcctcaaagtactcaaaacaaactgcaatatgcctatgaacacacttaaagaacttagaatagaaatgaatgaacactttctttattgcttttattctgaattacaaaagtgaagatcaaaaactgattacaagtataggggtatttataattagtgaccccgagtatgttaaatgattaactctacactaactaactagattaactaacttgaaaagttagttaaaaccagttgcttaagtgtcatattacttaggcatacaattctaacaaatctctaccttaacaagtaatatgcaaagaaactaagcaactacataaaggactgaacactgcctaaacttccattacattcagtagtttcaaaaagtgacagaacttagaagtaggtagatctttagtgaggatgtcagctgcattgtcttcaatggccactttgtccagctttacttcccctccaattagtgtgtctctaataaaatacaacctcacatcaataggcttggttctctcatggaaaacttagttttttacttaagtgcaaggcactttgcctatcacaatggatagttatacatctctggtctatgccaagttccatggagatacccttaagccacatggcttctttcacagcttcagtacatgcaatgtactctgcttttgttgtaaacatgacaacaatggtttgtaagtttcatttccagcatattgagcatccacttgactgaaaaacatacctagattgagatcttctagtgtcaaggtctcctgcatagtcagaatccacaaaacctgctatgttgacagtttctgagcttaatccataaaccagtccaagctgttttatgccttgtagatatctcatgatccactttactacattacaatgttacttgccaggttgccccataaacctactcaccatacttacaccatagttgatattaggcctggtgcaaatcatgagatacatatgactccccaccatactagagaaaggcactctgtccatgtagttagctttttcatcatctgcaagggcctgtattttggacagtttgaatagtggagtgtagggacttttgatagatttttcttggttaaaactaaacctgtgaaggattttagatatgtaaccactttgagatagtttgagagttctctttgatctgtctctaatgatgtcaatacctaaaat

SEQ ID NO: 30717 - DNA, 2063 bp, Cannabis sativa
  modified_base (1431)..(1431): a, c, t, g, unknown or other
  modified_base (1598)..(1600): a, c, t, g, unknown or other
aaaatggtatttacccgaaaataaataccactttatctctaacacttattatttcctcctcgaaaattttttataccaactttgacactaagcttgccaaagtttatcatctttgctctcctaattaatcaaacaaattttgatttattttatggatctcaaccccatatttctacaataggtcaaatcaccatatcactttacaaataaaacttcttccattttatttttacatgtacacacaattttcatgaatcttttgagatttcatggtaatctctcaagagattaaaaaatgaactaaaccactttgttagtttatttttgctctttatttgcctaaaaagcaaactatcaactcttagtagattacaaggtgtgtgcaatattttcctcaagaaatagtcactaaatcatatttaaataaaacacttccttgttttattttatttccacgtattatcttttcaagataataatttattcacagtttatcattaatcttttgaaattatatgataacttctcaaaaatacaaaataaatacacacctactcaaagacaagaaatacatgaacaataatattgataaaataatattacaattcttgacaaaatatacacataaatatagaaaacaagatgaagagaagattacaaaattacaataaataaaaacacaatataaatagtagtatatatatagatgtgataacactctcaacactactagcactaagtgtaagtaggggaatcacaaacttgcacaaggtttaacacttttgctcaaaagtttatttcctcctaccacaagcacttagggaagaaagaaatggaaatatttttttaaatttattaagcttatagtttctaacaaggtgttttctttgatagaaacttacgaaaaaggtgtcttcacaagtgaaccaaacatctctatttatagtgtttaagatcacacacttcgaaattcaaactcataaccctcatagatgttatggactcaaatataactcatgcacacaccataactcttatagcattaagaatttcaattaagacgtgtaacacttttttacacatttgatattagtaataattgtggaggttacaaaatgtaagtaatttgacctcttatgttacattttatgtgaatattacttacatgtaactctcaatcacattatatatatattaatctcatattaatatataatatatcacatttaaatattttaatttatcttatattattacaaacataatataacacttgattccaacaactcttcaatatgttcgttcttatgtattttggaccttgtattttacaaaagttaccgattgaactctctgttttgttaaataacaaaataaatcttgtatttttcaaaatggtaaaaatcgaaccctgaactgattttttgtcanaataaaatttaataataattcgatttaaaagtgttatgaaaaaaattgtttacattttctgtatctgttcgtattttcaaattggttatattaaaaaaaaattgtcaaaaataaagctcaaggtcttatttgtactatttttaaaaatacagggtctattttgtcannnaacaaaacagagggtccaattggtaatttttgtaaaacacagggtctaaaatagtatttaccctaatttcttttacaaattttgaaatacatgtttttaaagagaaaattgcattgtatacccactttactttatttgttttaatttttacctttatttccatattttttaagatatacccacttttatagatgatgtgcctattataccctttacataaatctaaattatgtactacacttaagtgaaaggtaaggatatattagacaattcactcataaaagtgagtagattttagttgaataaaatatgaaggtatttttgattaattgatacaaaaaagaggtattcctcaacttatcctttttttaaagggataatttcacaaatgcacaaaaataacaaaaaaaaaaaaaacaacaaaaatacggtttcacgggattttaaacatttttacgatttt

SEQ ID NO: 30718 - DNA, 1464 bp, Cannabis sativa
gccattcattccgtgggtgtaagatcccaatggaagcttgaagcggggacgttacaatataatatcaaatttcccatcatattttaattctctttttcttttaacaatgagaattatatttcaactctcattgattaagcatcattcaaaaaaaagtgataaattgaataaaaattcaatcggttggttggcactgttgtataaataaataaaaaaaaaaaaaacatttatttgattaaagtaaaatatgcggtgagcgtggatcgaacacgcgaccttcagatcttcagtctgacgctctcccaactgagctatccccgctagttgaactcatacaactaagtattatatatatagttaaatgtttacatgatttatttttgagtttcattaattaggtaagaggtcattgattattaagtagctaacgtacctgtttgttgtactattgtgaattcgtcatctccaatttctctctctcacacacaataaaaactgccttatgtcagctttgtacatctccacccactcacttatgtttctctttctcattacacctatatagcattatatttatatgtatgtatctatatatcatttatgtatatgcatgcatgcatgagcaaaaaaatcacatggatgcctgcattaaattctcattatttgatatatgcaccaaaaaaaaaaaattaactactttattaataattttttaattacaatataaatatgattgtgacttaatttttagtcacaataaaaaattatttgtgactaaaatataacatttagacacaagttattactaatttagttttagttacaacaaatattacgattgaaaacacatttagtagcaacaatttatgattaattatttgtaactaatacttttaatctttagtcacaacataagaataatgatttgtaattggttataattattttacttttagccacaaattttgttgtaactaaaagtaagattttttgtactgatgaaaaaaaaacattatgtagaaaaacactcaattcaacaaaaaatttatatcaaacttaaaaaattaatttatttattttatttttcacacttttttttcctacattttttttcctgctaaaatttaacttccaaacatagccttaatttaatatacaaaagaacatattttattttttttaaaaaaaaaaattacatataagaacctatcattgttagtcaatagatataagttctgttattagtattgtaacgccccaatattttgccttattttacaaagtgctaattttgatacttaaaaagattcaaagctgtttgaaaatacacagtgggttttacaataaatatgcaaattagtgaatgatcattcatattaaaacaaaataagtagttgagtgaatttttcttaaaacaaaataatgatcattcatattaaaacagttagtagtcccgtgatccgt

SEQ ID NO: 30719 - DNA, 3355 bp, Cannabis sativa
  modified_base (3263)..(3265): a, c, t, g, unknown or other
cttttttttaataccttatttcaaagtttagagagtctaagtttcattacatgacttttactaaatctaagtataatacaaactagttggattagaattaattaatactagctcaagccacaaagttagggttagttgcaacccaaaatatatatatatttatatatataaataaattatatcaacatccatatgattttttttaggatacacacctaacaaaaaacctgccctcttccaaactgataaagacttccaataacaaacaataacaatggtacaataaatgtttttacatataaaaataatcatatattaattcacatgtaaattattaattaatttatatatatatatatacaaattctatatagtcacaaacaaactcaaagtacagtacaaaagtcaacaatctcaggctcttttcttgctaatcctttcactcctaaaaatattccattttgaaacatactcaacaatatgtttttatttttacaattttaatctaaatacattatattaatttcacataatttatcatgacaaatatgaaaaattcgaaaaaggttattattatcattcaactgtttatgtttgcctttttgcatatatattatccaattaaaatccaaccttcttaccttccaaaattgacatattataatttttttttgaattattatatatataaatatttattcattaatgacgcatgtttagtcctcatcctatgtcaaaattaaattcattttctagatatataatttatttatttaatttgttttattttcttaaccaagaaaattattaataattagctagacatatgcttaaaatttaaatattttataagccattaaattgaacaattttttaattagaaatttcgaaataatttttgcttaattaattagttgttagtcggtaaaattactcgataattttttaaggttacggagtaattataaaatacaatcattaatttggtttcatcatgttgttgcttatgagttttaaaatatgttttgttaagtatttttattttgaatgtgtcatttttttatgaacaaaaaaattaatgtcattctagaagaaatgctaatacatctaataatgtgtaatcttctattttatatattaattaaagaattaattagctagggctatatatagcttaattatttatatatagttttcttctaaaaaaaaataaataataaatgaacaattattatctcaccccaatttctcttttttggataaatcatataaaaaagtggctgtctttttcaggaaaatatatgatataacatttatttttatttttatttttatttttgcttttcctccataattgaagagcttttcaaaataagattgcttggttgatataaaatgcctcctattacttaacaacaaacaactcaaaaaaaagtaggcacttgtcatgatgtgattagtggctattaaattaataaatacaatttatattgagtatgaatacaaatgtagcacttttcataaataattaaaataataagtttgatttggtcaattgggtacttttaattagtctagaaagtgtaataatattaatcataattataattaattagaattgtaaattggtgtttctacttttcttcactttaatgattatgatcttatgttagatgaaaaagcagcattctatcaaaaaaaaaaaaaaaagcataataataataaaaataaaaatattatatatattaatttattttctcttttggagagagcctagctgagtattattagccataaattgcggtttcatgcaggtgggtttaatttttttttttcttcacaatttaattttaaactattgctttttcatgccctagtaataaataaataaataatataatataatttttttttgacatattttgcatattagtgagtgttgtaataggtttgttttgttgctataaattgtgccaaaattagatccatgtaatttattaattacttgatgtatatactacatataagaatcaatttatattattagtgttagaattattaggagatgtattgaaaagtttaaaattaattaaattattaattagaatattaaagctgagaatatgtttgtgtaaattgttgaaaatatttagttaggatgaatggaagattttatggaaattttgttgggaagaaagggtttaggcaaggagatctaatgtctccaccattgtttgttgttattatggagtatttgactaggcgacttaagatggagactttgaaaaaaaactttcaaataccattttatgtgcaagagtcctaattatactagtctctgttttgcagatgacttaattctcttctgtaaagatactacacgagtttccaacacctaaaaaatgtacttgaggagttcagtacgtagtgctacaagacttgttgcaaataaggccgaattccaaatatttttttggaggaattgctgaaaaattaaatattttttagaatattcaatttaaggaggggagttttactttaaagtatttgggagtttcattgagaccaactaaatggcgtatggatcagctatcatttgaaaaagtaagcttagacttctcacttgggatacaagaaatttgtcttttacagggagagtgtagttcatccattctgtatagcttggtcttaagaattattggatgaatatattcatcttacctcaaaatgttattaataaagaagttgataaattatgttgagggttcttatggggaaatagtggtaacatgagcaattgcttattgggagaaattagtttgcttaccaaaggcttatggaggattaggttttagaaatagtgttaattggaatcgtgctattcttgccaagtatgtttgggctttagtggagaagcatgacatgctttgagttaaatgggtcaactctgtatatttgaagagcatggaaaaattacaactgatgtgtagaatcaaatcaacgaaaacttaatcaataaataattagcaatgacaagattaataaatagcacaacaacaatcaaaaatagaatagggatgaatagagtatctaaactagaaaaaattaaagcaataaaatcaacatcaagatatattctagttcaagtcctatagatcgatgaaatttatggctctactccagttctggaacaccaccaaaattctctttattgattgagcaagaacaagctacattgcagtcgagatcgattctctgttggnnnctctcaaagtgtttactctcacacccaattgaatcttcttcatttacagaagattcttcatacaaatcccaaactctctctctctctctc

SEQ ID NO: 30720 - DNA, 2685 bp, Cannabis sativa
  modified_base (47)..(54): a, c, t, g, unknown or other
  modified_base (2558)..(2563): a, c, t, g, unknown or other
  modified_base (2624)..(2627): a, c, t, g, unknown or other
ttttttaaaaaaaaaaaaaaaacacttttaaaaaaaaaaaaaaaaannnnnnnnaaaaaaaaaaaaaaaactaagctcattcgcagagtacccaataaaaacccgccaaagcgaaattattatttatattattattatttttcctttattccttcaagctccttatcggcttagccagcttcaccggcggcgaagccgccgacgtcggcagaatcacagattcacgttgatatgacgtcaagttccctaatctctctaagctcaaaccgaaagccgccgccagctccggacctctcattgatcggaggatcgagctagccccgaccagaaactgaggccgattcttccgagccgaggtagtgaacccgaaaaactccatcggacctgcacgagacgcgatctgacagaacgggaagtatcttgggacccagaacacgtcgccttctttcacctccgtgttcatcgctgaggtcccgttagggtaaacgacttggatcattcctgttccttttagtacgattccgtattctgtagcttttggattcaggtgaggcgccatcatcgatccctgtcaaattcaaatttgagtttcgaattcaatttcagtttcaattttgatattattcgaattattaccgctgtgagattgacgagatagacaccgcagccggatttcctgagtggagaataggaaaactcgtcgagtgcgatgctccagccatagttgtttttgaagcctttcttgccatcgtatagattgtaagagtcaggtgattttcctttgcctttgtaatctttagttttcttatctctatttgcaaatagagaatcaagaagctttctccaagaccaagttgttttctgattttgttctcggtttatgtcttcttctaattcatcttcgtcttcttcttcttcttctccttgatgaaaccctacaattttcttaaggtgttgaagcttgtcttcttgtttcagctgaagaaatttggcccatgtttttggtgatcgagaatctggtatgtatactattggaccttcttgttgactacttaaaatctccttaagttctgcatgtgttacctgcaaaaatttacacatttatatatgtattaatatatatatatttatgtatatatagaagaaaaaacaatgtcaagtgtcaaagccatgttctttgtaatggcttttggtttggttacttacattaaatgcgttttcaagaatttctgagtcgaatcctgagagtatagatgctgggttggttcctccaccaaggaagaaagactgtaaaagagtaaaaatggtatactcaaaatggtgctaaaattaagtccatgtaaaggtagagattttgagaaaaaacccaactgaaaaaagtgaggtttaatctgtctatacatacctgaaaagttccaattctcagactctcagaggtgtcaaagctacaaatgatatgaagtctttgcccttctcctgtgttgacaagataaaatgctgagccagctgaaatcctgtacacatctccggtctttaatttcctctcagccagttgatccttgtatatgaaacctagttttacttctcctgcaagcaaacacaaattagaaaatagaaatgtgtgtgtataatgtatatatgtatatatcaatacctctgcgtataaagatggtcaattcagaatcaagatactgagggaggaaaagggtctttggctccatagtaatgaacccaattctcaatggtccttgagcaaatttactatcagagctcctcatcactctcatctcccctgcatcagttttcatcacatgctttgagtctctcaatatgaagggaagctctcctctttcatcttccctttctttttctttttctctttcctcttccttcttcctttccttctccctagtccaatcttcatcttcatcaaagcccattattcccaatactccatagctcaacacaagcatcagaaccagaagggtcaatttgattcttcccatttttgtcttgtcaatggtgtttgaggtgtgtgtttgtgtggaatcattgatgtttatgaagagaagtgatgaagacgcgtgtgtgtcatgcagagaaggaaggcttggtggcaggttttggtttagacacactttggattcagaggttggaatgtgatcgatgaatgacaagaggtatttgtgttgaatatctcttcctttcaatctaatctaataatctaaactgccataactttctacaggtggcaaggaatgaactccctctgttttcttttaatgaaaatctagattttattaaatcatagttacaagattagattgattgggtcttataaataagtaaggatgtggcttaatatttattgaagtaaaatatagagtaggacttaacataagttttctactagtaggaaagtttttttaaccattgattttaaattatgtggtcattaagatataaggtgtatattattacaataaggctgcttgtatgtaattaaaattttatacatattataataatattaaattatatatttatttttttaaaannnnnntattaataattaaaaaaaatattgatttttaatttaaattattattagagtaatttgcggnnnnaatacctaagttttatgccgagtagcagataaatacctaagtcgtatttttggcggta

SEQ ID NO: 30721 - DNA, 6500 bp, Cannabis sativa
  modified_base (5030)..(5037): a, c, t, g, unknown or other
  modified_base (5160)..(5169): a, c, t, g, unknown or other
tactaatatacttaacacagatatcttttatgtaacatttcagattaatggtattgatttttttttttttttttttgcaaagtcagattgatggtattgattaaaggcttgtttagaacatcacataaattagtgcacttcccactcaaatcacatttcagagctcacttaaactattttcttctttaggcataggttacaaatggatgactatgaagtatcatacttaatggtctaaggattagcttaaaaccattccttcacaaaaaatcttaatctcttgagatataatttgcttgaggaatgttagttatatggaattagtattctatgattactttctcttagaagaaaatagaaaacttttaacaataaattcaatcattcgtattaattggtatgtaataatgtacttttcatcaaagaaaattgaaaaagaatctagagacaatattggtatacaaggcttatttacagattattacatctagtccggggcaatttgagaccagaaggaatgacatgaatacaaacttcatttctttttatatatatatttatatattattcttccattagcaaattcaatgcagtctcaaccaaagaatgaatagttgtgctatggcggctcattccaacagtacctgagaacatattaaagctctcaagctctgcagtggtctccaagacactctccaactccttctccaaccccaaatcattgaagattcttatgtttgatgctttatttgtcatcatccaaatggccaattcaatggcaaacctccttattcttggaattttaatatggggtttttggtacttcttcagaatttgaactaaagcataagctaattcagcttcagttatcccagctctctcaaacatttgacttgattcttgtgaatccatgaatttgaaaacatgtgctgctagtccaaccattacttcctgtagtttgttctctcctgacatgattgcttgaatcacctgaaataagcaccaaaatgattagtatttacatgtcaaaattataacccaaatgatattagattgagaaaaacacttactgtaggtgctgcagcagtgatgcccttgagctgtttgaagctgttttctccactataagtgcacaagtttctcaaaattctagcagcattaactctcagcaagggaagttccaaagcttgaacaagcctatcaagtatatccaactttaacatacgataacaattgtttttgctttccaatgccaacatagctagagcttcaccagctgcagttctcacttggtcatatttctgagacagtccttctttgaagaagatattgaacaaccctttaagaactccacctgtaccgccaatcctttcggttgcatcttcttccaatgccaggctagttaagatttctatcccaagttgttgcaacattggttgtttctctccataccttagaatatctctgatgttgctgactgtgaatattacctcagaaatctctctccttagaagtttccctgtggttcctgttgtgctccccaacctcttcactacttgcaaggatcgtttcactgtcaaaatctgggatgctgcagcattgtcattcttcagcaaccactcttcagcatgtgtaaaatcaatgatcttcggtaagagacctcttgtgtttccaatcttgccacagatgtcatggtcacgagcaagctttttcaagatcagaagtcccaagtgattgaacttccaaaactcatagtttggatggtcacagatgatgtttctttctccaatctcatcagctgcaccacctgaacttcggttggtttgtagcagagatgatattgattccattgcaccgggaatcccagccactcgaagcgagttttgcttctttcctgcaagctttgacaaaacctcagcagcatattttctgctctcttcttcctgtggatcactccaattcaacatctcaactagtttttcaataactggaaagttcaatccaatcttctgcaaggtgtcatcagagaagcgtggattcagcgaaaattggcgaagaattctcgccccaatgagctgctcatcaggggaattagaagccagaagatccatggcaaaagtaaccatgtccatcttcaagccatcaaatatgcttccattaacacatctcgaataggcatcatagaagaaccttctgattgaaaccataccagaagctcctcccaattcactctctttgttcacctcatcaagcagcttgcagtaagtgaccttccattcccaataagctttctccattagaaacaacagagcttcagccaaggccaaggcatagaaaatagtaagagcagcctttctattcttcttgtcagtgtctcctttagccacatccccatagttgtgtttgatgagtttcattgctgagagaacaacacaagctgttgctgacaaaacttgaagccaataaagaagcttactgatgtgttttgtaacaaaaacccatctggcatatggcaatagaggcacctctgagcttgtccatctccgagttggttttctttggcaatcccaattctgtgcattagctacaccaccagttcctgctatatctctactgcattgcctgcttttccctgctacaaaaaagggactgaaaactgttttgatgttcccaatcaggaaactcgagctggacttcaaagcgcgaaagctgttgattccagcatcagttatggaccatgttgcctggtgttgccactcaagctcgtgactcctgctaaatattctagctccttcaatcaacaatatgattgttatgagccaaaaatcagtcttgtccaaagtaatggcaaaaccaccaagaagaacaactgttgcccagataaaaccaagtgttccaaggccagttgctgctttttcaagaacagcaagcctaagagcaaagagggtaagcttcttttctggtgctcttactgtttttgttaaggctgcagagccagaatttgcattgctactattgtcccttttctctatactattttgaggctcaaacattgttgtaactggactaatgttatcactcaacctgttgaggtctgatatctggaggtgaatgcttcttcctccaccaccctcctcagaatcccaacgattcatattttcttatgttcttttttaatggtatgttggagtttggagatagtgttagaacatttagagttatataaatgagagtttgagatatgtgggaagacaacaaaggtctgaattggtctaactactaacgtagaggaaacccaacttgggtggcacgtttcttttgcggcaattgtcttagttagggaagagtaacgtttttattgcttctatttctgtcattttttttcttcttctaaaaagtgttagttatgttgtgattttagctagtttataacttttaaagctcattaaattactcatacaaaaaggcacaatagcctacttttcattttcatttcttacctcaatttcacatttcttcactttatcttaaatcaaagggtgtactgtggaccctttctctgcctgccccagctggaatatagctttttttattcatcaaatatacttttgtattgtgactttaacattttctttcagaaaaggaaaaaggaatctcatcttctttcttgtcaattttcaagtacaagagtcctcttctttgagacattgactttcataaaccccaactgttttctataattaattaactatattcccctctttcattctttatttccttaatgagaactaactacacttgaaatatgtttcaatggtttaacataggggtttatatcattttgtgtaactatgcttttttagtatcattttggaccatccatttcaaacaataacaaatgaaaatgtcaatattgttaagaaaaaaataataataaaataaaaattagtatcttctagtattagctccaatttagtcgacaatatactcaaaaatgatctaaaattttttggtatcatatttttgttatttcaaaatggttttttgttagtaaattgtttgtggttgagagtctaaactggtattttaaaaaaagataaactttaaaatatgatatgagaaactatgttgaataataataacaagaataagaatgataccatgatgcccggaaatggtgtttttcatttcatgttttgatggattaatattacactattactatatctcatacaaaatgaagaaattactattagcttaattagtggtttggtttcataaaaaaaaatattttcttaaaacgtgtaatcttgcattttagttggatgatgcttaaaggagattggtgacaagagtgtttaattgtgttaagctaaagctttaaatgggtcccaatcccaaactcatagtagcttatcccttttaagcattgagtacacgaaagagaactatcttattatgtaaagaactcatcacaagaaggatcagggattttaggcgtccaaatcaggccgtacacgtggcagacgatgatgatcaacataatttggttgaccaaattcggcctctatagaattgctgtcgtttcattgcccttatgctcttccaatccaatatatcaaataatacaaatgtacaattaacaactttaataaagagttcgatcaataattaatggttttgttttgtgttgtataaatatgacatgttacaaccaaaatgtgacatgtcaattacatgcacttcatcatttatgttaaagaaatcaatatcttatagaaaactcttttaactgtttgccaaatataagatacaaacttttaaccttaactctcatgaaattatagtcatatatatgttaataagatttttatttaaaatctcaaaatattcttaagttcattttgacaaattataattatttttttgtagcctttgtaactaatttaggtgaagggggatttgattgattgttaaatcatattagggtaaattgtgtcataaatacttaatgtttcagattttatacnnnnnnnnacctaatgtttatttttggaggtaaaaatacctaatgttacaattctcttacatcgttactactacttctgttattatttcataaatatggacacgtggagggcccaaatgcattacatttannnnnnnnnntttaaaatttaatattcttaatatcaaaaaataattactacttatttttaaaaacaataagagagatacaatactaaattaccatatctgagtgaactagtgtagtatatggaacatgattatttaattaaagtgccaatatcatgtgaaaattcttatgagaacagatttttttttttttttttgaaacaagtagcatttagtttctgaaatgaaaaatattaagttttaaaataaaataaaaataaatataatgcatctgaaccctccatgtgtccatatttatgagttaataacgaaagtggtagtagcggtgtaagagaattgtaacatttttttttgcctccaaaaataaatattaggtatttaagtgtataaaatctgaaacattaggtatttatgccgcaatttacccaaatataaaatgtatacaattaaaagtggtttcatttttttttttttctagtgaaaagctgtaccatttaaacaagatataaatactcaaagttttaagattataaacagaataaatctaataatttttttagcggtaaatattaataaaattgtaattttttgtcaaattctatcagtccgggctccgttagtatcataaatttataatcagacttattagtttttaaatttgttgaaagaaaaaatttgagaatagttactagttactacatgtttctgtgcaaagcttaattatttataatttagaccttacatatatcttgttaagatgctaatagagtctataatgataaaattcaattatttagaatttaggctttgtatattaatgaaactagatgaaaattacaattttactagtattagtacttgtgtcgctaaaaaaaattattgtatttgtttattataaattcaaaatttaagtacttataccgtaattttttttaattattaaattattactaatatatatactaatatcatatatatttttaaaaaggtattgtatatttattataaaaaaaataggtataaaagtataatattttaaaaatattaagtattttaatcataatatactttaagataaaaacatttagtaaaaaatggcacaatgagttcttcacttatttggcaattcaattcaattactggtaagattaggggtaaaaatagagattggattgaaaagatttgtacacgaaagggaatgagtttaaatgtttgaattgtaagaatgggaatgctttaaagaatatttaactaatgtaaatttatttttactattggagtgaaaaaatatgatagaaaaatacctaataatatggcatccctcaattaaatagtaatataat

SEQ ID NO: 30722 - DNA, 1774 bp, Cannabis sativa
ttagaaggtaggccaaatagatcactctattattattttcttggtattatatataatatatataacgtaccaatggatttaatgggcgtcaaaataaagctatttttctttaggctttagttacctaatatattatctttattgcaattcaagaaatatatatatatatttatatatttatatatatacaagtgtctaacattggtgtaaggcttctaacattatattgcttttgagggctcatttgtagctggcaatggcatatcgttgaccacactattctaactcatcacctacaaaatccaaccaaaacattacaacaacaaacaatcatctataatctataaaaaaaaaaactatattttgttatgtttggaatccaagaaagtaaaaatataataaattaatatatttttttaattatcaaattcgtgtgtatgttgatagggatctctggtttagtagatgtaagacacttttgtcgttatggttatatagtattttgcaaagagaatgatggctcatggcagcatagcaataatcatattaaaaagaaaaaaaagatttcattataattaaattatttttatcatataattatatttgtgatgtatataattagtgtgaggaagtttttttttttatgacaagtggtgaattctcgttcatatatataggaagtttcttattttttttttttttttttttgtttttgagaaaatacaatgttattatataaattaagatataagtcatttacaataacaaagtaaaaagaagagggtaaatacctcaaccaagaacaggcttcattcaattctagagcataacgagccaaatattgtgcagccatgcatgttggctgcatgttgaccgatcgtttggcatgaacaatggtaactttaggaaaaaagaagataagaataaaaatatttataattaaatcatgaaaggaggatattgctcgagtaggtacattaagggcatttgtaactatatattagagcatctgtttccagttgtgaaagtgaaagttcagttgtagggcccaattaaggttgtgaaaaatagcctttgcttttatttcatttgatgccaaattacctgttgcatctctaacgatggcacccacgcctattatatttctatttttatcacaagctgcatcaacatttaacttgagcataccggcagtaggggatccacaaaacacatgattgcagtcgttgttggagagtagaagttgatcgaggattcctgacatacttacccatggatgtgcgaaaattctgcagataattagaggcaaaaggaagctaaaacaattgttggttgggcagttcctccatgtactaccttatttctttcaaaccatatagaccacgtagtgcacaaaattagttccatattagtttttgagtgggaagtcgacaggtgcactagatgatctccattttttatagtctcggcctgtttctaatcaaaagtgaatcctgtagtacaccagatagcatgggcatatttgcatccaaaccatgcccaattatctcccacgctcgtttgcagatggagcaagtggaatcagtaattactttttgctccactaaaaaaacaactacgggcaaaagattatattctattttttttatataacattatatattatagttgaaataaatatttttttccgaaattttttgaatattttatggtatctaaaataaaattcaaaataattgattatatacaagtaaaatataacaaatataaaaaa

SEQ ID NO: 30723 - DNA, 1218 bp, Cannabis sativa
agaattcataaaattaattttagactgtctgattgattgttgtatttattaataaaattttatcaaaaaaatttaaatttaaggtaccaaatatgtatgattataaatacagagttcccaacttgtatttttttttaatggaaatatggcaattttattagatagaatcatcacaatgttcatctcaactcagaaggtgagttggttacatcaaaaataaaaactgacgagtaacaagaactctgagcaaggaaatgcgcgaccttattagcggtacgtttagcaaaattcaaagagacattaggtaaatcattaagaaatttcttacaatccgaaacaataaattcgaaataagaaggaagacacacaaagctatgtattgcttgaactgcgacaagacaatccgtctcaacaatcacctaatgccaaccttgagtcttgaaccagctcaaaccttctttgataccaattatttcaacaacttcatgagagacacttccaagattaagagatgttcgggcttctataaaggcaccatcaccgtttctagctatgaaaccataaccataagaattcaaagcttgaaaaatcgctccatcaatatttatcttaatcgtattggtaactggtttagtccaacgctcatcctccatcccttgaccaacatggttaagtagaggctccattctctttcgttgagcacacaaggtaccaaatgtgtagataccctaaaattaatttataatttgtgctatttatcaaaaaaaaaattatatgtgttgactcattatttataattgtactctaatgcaccagatataaaataagtaaaaaaataaataattgttattaatagtgtgtgtaaaatttaaattaaagtaatgacaatatcaataaatcaaaattcaagcattggggagaaaaatagactagaacagtgaaattaaacaaaacaagaaaactataaaatcaacactaataattatactggtgtaagtttgatagatcgatgtgatctatggctctactcaagttctagaacaccaccgtaacttctttattgattgagtaagaacacaagtacaatacaagcaagaggtctctttgtttggtatttctcaaattgtttatctctctaacactcttactcaagaagcttcttcatctacaaaagttgcttcttaaaaaactcaatactcaatctctctctctctctct

SEQ ID NO: 30724 - DNA, 3808 bp, Cannabis sativa
atagaatagatatattttattatattggcgtcactatctccatcattttacattacagttttagtgctcaactagatttcattgaaagtgttaaggtatatcatcttataattttgaagtttgtagattcaaagttaaggtttgtataaccctataatgtgttctcaataataagtatgaaatttaagtttttcataagataattattggttctcaaggaccattctcgtaatcaagctggatttgtcacatttgaggtaaggaaattaagtagaaacttttaaattttttgtatgaaataatattcaaaaggagtaggaatgagggacttctaacctatttttatttgttcattattatgttatgttgtttgaataatggtgatacaatgaaatcacattatttaaactatggatatgtataagtagtttgaataatgatcgatacaatagatttatattatttaaactagttatgttgtttggataatggatggtacaatagattcacattatttaaacaatgatatgattatgatattttatttaaatagtgtatagtagttaggcattatttaaattattaagattgtagcttatgtgatgtgatttgatcgaaaagataatggttaaatacttgactattgggtctatatggtaaataggtcatttagtagtgggtacaattttactaaacccagccctccgccatttagtctaatagttcaggtttatttgccaaagacggactcgagcgtaattttttttttaatgtgatttagcttggaatctaagttctattagttactagtgataaaattaagcttatctatattgctatttgcctaaatatgtgcattagttgtatttatttttatttatgtgactacctgacacacatttccttactaagtttagtagctctcccttatcaaattactatgtgcagatcgaccaaggtaactaaaagtctagttggtcggtggcgagtggaactttggacgcttgtgtgtgtgaactcgctgagggccatataactacgtgcgatctaggacactctatttatttatttacgctattaaatttatgttttaattatttttatttattatttattatgtcttttggtacgaaaattggccaattgtgaatatttttcaagtattaaataaaagacgacatgataatttttcatgttaaacggttgtaaataatactagtatttttatataagtgtgggccttacagtttggtattagagccacaattatatcggtcttgaatattcccatgagttacacatatcgggtaaaaatgtttcgctcgctaccaagtaagtattatttttgtatgtttatattttatgtgcattttagtaatttgaagatttttttttttttattttcaaaatcctaaaactaataactcagcaccaacattatgagattagatcaagtagaacacattgttaggcacattaaagacttaaagagagttcccaagaccccacgcatgcgagaagaaaacaaaatctttgatgaattaacaaaatacacgacgcgatggataggataatatgctgctggaactatttattaaagtcacatgagaagtacatagccctaatgcacgcactcaaaatgccacatttctaacgtagtctaagagacaattgggaacatctaagacatgtgtgggtagatgaggccagaatatatgacctactcatgatcaacctagttgatcaatacaagactactaatatcatatatcaccgtaatggcactaaagaagaaatatatcctcgacctaataatgtcattaggtttgaattctttcaaaatttaccaaacttatcaaacctagtgtatttagaactcgactatgtagatttgactgaggatatgttagagaatgggtcagacatagaagattagaatagtcaagctgtattttattttatgtgtttatttgcttatgtaataagagattttagtatgggtccacttttgataggcgttttagtgtaacttttttagcttgttattctttggaattcaaaataaataaagaggttttattctatctagtaaagatttatataaatatatatatgttctctttacgaacgtaagttactttggtcataagaaaatttgattgaaggaaaatctttatttttttaaaagaatactagatctctagctacataatcacttgattattggaatagaaacaaaagtctattccttggataaaattggacaagctaaaagagactactattcgtcctccacacataactcagctttggattctttagggtcttctttcgggtcttcttctgggtcctcctcgaagtccatttccatttctacatttgctggaattgttgttggcatgctcttggattcagagtctgactcatcaatttccactttaaaatgataattaggtacgtcatcttctagtccatcgatacttattgctatggatgaatctaagtccccgcttttggtactggagagtaatctagctcattggagccttctagctttttctcatcctcgagttcttcatccaaaggaatctcgaatacttctattatttcctctgcttctatttaaggtgggctttttagttcaagttctagcatttctccttttacctcaaaatagtttggcttttccaactctttcaaatctcgttcatttgttatgttcacggattcagttaagtcctccttattgttgtcactttgtttaaatcgtatattcttgacgcgttcttcttccatgttgtttgttttcacaatataattattttcaaaaataaagttgtggaagttaagtgttagttcacatatgaaggctgtgtatctgattgcgtcaccaagacccaagaaacagtgccaaacgtcattgatatagtagaggagttcggggacatgtgacaatgtaacccttaacactaaaaacttttcttgtgatttgattaaggctcccctctcctctactactcttttgatttcttcattaattgtgatgacttctcgtagagctctaagtatcttatcctgttcgaggtgaatatttttgatctttagcgatagaatgcttttgatttccgtaagtactgtttcgtttgacgccttaattctaagatacatacctcttatatctgcaataatttattctttaactatttagtagaacttagcataagaagatatataaatatatataaatattaaccagatagaataaaaattctttatttatttatggattccaatggataaaaagctaaaggagttacactaaatctcctaactaaagtggagctgtactaaaactccttattacataaacaaataaaaatatgaaatcaaatgtagcttgactattctaatcttctatgtttgacccttcctctaacatattctctatcaaatctacatagtcgagttcgaaatacactaggtttgaggagattggtaactttcgaaagaatttagacctaacaatattattgggtcgatgatgtatttcttctttagtgtcattaaggtgacatatagtgttagtaatgttgtattgatgcactaggttgatcatgagtaggtcatatcttttgatcttatttacgccgacatgccctaaatgtttacaatttgctcttagattacgttggacatgtggcatattgagttcgtgcatcagggctatgtactactcatgtgacttcaataaacacttccaacagtatcttatcttatccattatctcatgtattttgttaattctatc

SEQ ID NO: 30725 - DNA, 1202 bp, Cannabis sativa
aaactctgtgaagaagggaaagactcatgaatcaaggtacactgagtatacaagtcttataggtactcaaaagccttaaaggctgttaaagatgatcaagaatggtttgcacactggaattgccagttcctaaatgcattgagtgaggtcaaagagcttgatgtccgtttcaaggactgtgtctagaatgaaggtactcctagagtgagaacctctgaaagcagtaagatacccttctgtttagttagggttccaactttggcaaacttaagttgttttaacaaaagcaaatttgacccttactttttgcgcttagatcatcatagatatactgtaaataattacatggatagagtatatgaaatcattaggagtccaaaccatttcattcaaccaacacatgaagcttgggtagacaactttagaaagatgttttacccattgttcttccaatatcaaaggctcttaggtagagaggatactgctcactttgttagagggaacccaaaatatgctaaaataatttgtttgagttttacttgtgtggtatctattttgtattggtgatactcttatgtgttctgacaagcaattgctttgtctttttggagaaaatccccgcaccctccagatgggtttgttggataacttcctcaaaattgtctctattatggctgatgaggttcgagaagtcatcgagggtggcataggaaaaatgaagacagcatagccttttgtggctagatctcaaacaccagaacctttggctaggggccaagagtctgtcttgatggttccgggtatagaggttgtagccaacccccaagtcagttttgttgagactactttggctattatacctctttggcaaaggcccatcatcttggatgatgataaagagatggaagatggtcacggtcctgccttttctaagaaaagaataggctccactaagggtggagatagcaaaaaagcgaggactgaagccaagcaaaagtttcaacaacaggctacttcgcagaagtaggtgtttgagtcttccaatcagaggggggctgatgttgttgataatgaaaagccccctaggcagagcacatgttccttaaagggggcttccaacttgcatcctctacctccgccagtgaggtttgtgttaggaattatattaccaggatctagatttactaccgagtatgtttcat

SEQ ID NO: 30726 - DNA, 1794 bp, Cannabis sativa
taatccccaatatccaaaggatatcttctttatgcattttttcctctatggactgcactatccaatcaccatttgcatcaacaagagagtccacataagtattgggaggaaccgaagctggtgctctgagaaggaatggggctcctcgaggtatccatcgatcttcatttattctcactttgcttccatcagtcactctccaccgcatccctttaacaagtaactcacagccccataaaatgcctctccacacattagaacaccaattgccgagtccagcctctatgaaattagaattcgggtagtaaagagcctttaagacttgagcaaacaaactttccggatttgtgataagtttccagtcttgttttgcaatcaaggcttgattgaagtcttcatgatccctaaatcccatacctcccgaccatttgtctttgcaaagcttctcccaatttccccaataatggatttggtgtttttctgctgttgtagaaccccaccagaaccgagcaattagagattgaatctcacttattagtccctttgaaattctaaagcagctcatcacatacaccgggatagcttggattattgatttgatcaacatctcgcgaccgacttgagaaaaaagacccatcttccaaccttggagtttttcccaaaccttgttgcgaaccaatccaaatgcttctttcttgttttgcttctttcttgtttttattctttcttgtttttaccaacaaaggcgggtaggcctaaatacttcgagtggttttccgtaaaagtaactcctaatgaagcagccaatcgttgaccatccgtacttctgatctttctaccaacacataagttggacttgttgaagttaatgcattggcctgataaagatgagtaaacccgaagcacctcctcaagggcttttccttcctccatcgaagcatccaagaagattaaacagtcatccgcaaacaacagatgggttaatcttttctctaaattgccaaagcggagaccatgaattttatttgctcggcttgcttcatttaataaacacgatagcccctccgagcaaataagaaataaaaatggcgatagaggatctccttgccttaaccctctctccggtatgatgtaccccctagcctctccatttaacaaaaccgagaaggtaactatcttaacataccccataatctttcgaatccattgctcgtcataacccaaacatttcatcattccttcaaggaagtcacattcgacccgatcgtaggcttttgatatatccagcttaagagccatcttcttcccattcccaaaccgacctttctttatacaatggaggctctcaaacccgagaatggcgttatcttgaatttgtctcccttttatgaaagcactttggtttttcgatatcaccttcttcatactcaatttcattctattagctagacatttggagatcaccttgtatataacattacataaacttaagggcctgaattctcccaccatggtaggttccttaactttgggaattagacaaagtaaagtgtcatttaagcagctgcagttcataccattatttaatacctctaagcatgttgctataacctcgtgacccacttctttccaatgattgtggtagaataaccccggtagaccatctttccctggagctttgagggggtggatttgatcaatggcttctctaacctcttccttagtgaattcctccagaagcatagagttgtcatggttggataaccagtttggaacacatctgttgagtatttc

SEQ ID NO: 30727 - DNA, 4756 bp, Cannabis sativa
tgtaagatttgacaaagggaagcaaagaagtattttctcattgaattgcagaaagggtacatacagagtatatatacaatatgacaagaggcagagttagttagaagttaactaactcacttaacagaaaaacagaaaacaactaatcttgattaacagacttaaccacttgacagctcagcaagattagtgtcattaacaggccccctcaaacttagtgtggatgagcaaaccacaccaagtttgtccctaagaacagcaaaccgagagttggagatcggtttagtaagggtatcagccaactgatgttcagcagggacatgattgacaatgatctccttgcgactaactttgtctctaacaaaatagagatctatttcgatgtgcttagtacgagcatgaaggacgggatttgcagcaagcataattgcactagcattgtcgcaccagattagaggaggagaggatataggcaaacacagttcagtaagcaatgactgaatccaactaatttctgaaacaacagcagctagacttcgaaattcagcctcagtagatgatcttgagatagtgctttgtttctttgattgccaagtgattagattgcctcctagaaagacacaatagcctgtggttgatctcctatcatccggatcagcagcccaatccgcatcacagtatgcttccaaagtaaagtgaggagatcttttgagatgtagaccatagtctaaggtgccagcaagatagcgtaggattcttttgacagcaacaagatgagattgaagaggctggtgcatgaattggcaaaccttgttgacacaaaaagcaatgtcgggtcttgtgattgtagcatattgtagggctcccacaatagatcgataaaatgaggcatcaaggactggttcactgccataatttgaaagtcttaacccactattcattggtgtactttgagtcttaactccttgtagttcagctctgcataataaatcctgaagatacttctgttgggagagtattaaaccatctgaagtgggaagaacttgaatcccaaggaagtagttgatgtggccaagatccttgagtgcaaattcagaactaagagctgatatgagggctgaaacttcactttggttgttgccagtgacaagaatatcgtccacataaacaaggacataaaggcaggattgaggggatgttttcacgaaaagtgagttgtcagttttggcaaaagagaacccaaagtgagtgagagctgaagacaacttttcaaaccaagctctaggagcttgtttgaggccataaagagccttattaagcttgcatacatgatcaggaaagttaggatcaacaaagccaggaggttgagtcatgtaaatttcttcattgagatccccattgagaaaggcattatccacatctagttgtcttattgaccaacctttggtaatagcaagagtaagaagaaccctgatggtgacaggcttggcaacaggactaaaggtctcattgaagtcaaagccagcttgttgatgaaagcctttggcaacaagacgagctttgaacttgctaatggagccatcaggattttcctttatcctgtacacccatttgcaaccaatagggatgcgattggggggtaattttacaagaatccatgtgttattcctctttaaggcagtgaattccatgtccatagcattgagccactttggatctttgagggcagatgatgtagtggttggagtgatggaagccatgagaactttaggctttcgaatgccagacttggatctggttttcatggcatgagaatttgtgctggtatgctgctgtgtttcaggaacagaggtgatactaggagcaacagaagcagcagtgtccctgaagcgttgctgtgttggctgcattgcagagtctgcaataggagatgattctgtagtgggagcaagagaagcatgggcaaatggagctgcagtatctgacctgtgagaagcagaaactaaagtaacatcattagtaacattaggtgttataaatgggatattagtgggagggccattatcagaattggatgaactactgggagaagcagtaggagcaggtatgagatcagggacagtatttggagatagatgagtagatggggaagtggggataagtgtgggaaaagcaggagtactgttgggagtatgagagatatgagatggaatattggtaacagtggaataaggaaaaatactctcatcaaataacacatctcgagagatgtagagtcttccttctttggataggcacttgtagcctttatgtgcaagactataccctataaaggtacacggctgtgacctatattgtaatttatttttgttatagggtctgagattaggaaaacaaaggcaaccaaacactttaagtgaagaatagtcaggctttatactgaacagcttttctaaaggtgaaatgaagccaagttgaggggtaggcatcctattgattagaaacacagcagacctgtaagcctcatcccaaaattttaagggtaatgaggcttgagctaacaaagttaggccactttcaacaatgtgtctgtgtttacgttcggcaatgccattttgttcatgtgtgtgaggacaagagacacgatgtaagatcccattttcagcaagataacttgtgaaagcttggtattcccctccccaatcagattgaatcatttttatttttgtgtttaactgaagttcaacctgagttttgaaactaatgaaggtggacaaggcttcatttttggttctaagtaagtaaagccaggtatgcctagtgtaagcatcaatgaagctaatgtaatatcgatacccattggatgatgtaataggggcaggcccccataagtcagaatgcaaagcttgtagaggagctgtgtaaacagtagtagataaaggaaagggaagcttatggtgctttcctaaacaacaagcagtgcatacatcagatgaatgaatattatttttatttgtattgagtttgatattacaagaagctaaagtagcttggacaatccgagaggagggatgtccaagtcttttatgccacaaagaaaaaagactattttcattgttgagagtatgattgttacagaggtgagatgaagatggatctgaagtttgtttctgatgtgatgacagaagatcaagttgagatggatcaaatttgtacagtcccttgtcaaatttcccaagcattaaaatcctctgagtatcctggtccttgacaacacagtaagagggatgaaattcaaagaaaacattgttgtcattagcgaattgggaaacacttaataagttctttgtaatctcaggaacatgaagcaaattattaagtgtaagaaattgtggttcataaggagaaaggaaagaggattgacctatgttactgatgtttagaccagctccattgcccatatgaatttgttgctcaccaaggaattctgaactggaagccaagttatttgcatttggggtgagatgattggtagccccagaatcggggtaccaatttggatcagccacagactctggggtagcaaaatatgcttgcagttcagctacattggcatttgcagaaggactttgaaatgactcaggccctgtgaagtttttgtcaaatctgtaaaagcactgttgcacagtatggccaagtttatggcacaactggcactgtggtttctgaccccaggcagtgaaggaacctctaccacgagggggaccccctctgaaattaccaaaatggcctctgctagatgggggaccacgagatgcagggtatggtgggaatccaggtggcccattccctggattaaagaagtgtccaggaccacttctttgttgattctgaccatatccaaattggctttgggagaaatgaggagattggccacgtcccatactggttttggcatgagcaagatttgcttcattcttggtaatgtcgagttctttggcagctttgtccaagaaaacttcttgtgccataagaagagcttcaatttctgcaacactataagcatcagtacgagtatttacagaagtgataaagacattataatcactagttaagccattaaaaatagcttctatatgatcctgtgcagaagtgggatggccaatagaggcaagagtatcaacaagattcttgatcttgagaagatagtcactaagagagtccttcattttcgtgtttctcagtagagttctgtactgtccaacattggccctgttgagtgcagtataatattccttgagagtgatccatatttgagctgctgtttcgcacccgaccatgcgagtaagaaccttctccgacattgaagacagcaaccaagataccagaacattgtcttgttgctcccagtcttcgaattcagggctgattttgtttgtgcggcgatcatcgtctgtgaggaactttgaaggagccagctgtggatcaagaaatcgctgaagacgacttcctttgatggcggcaaggacttgttgcttccatgggagatagtttgtctcatcgagacgaacagatagagagtgagagaaggaaattaaattcgttttaggaagagagttgttgctaagaggagtagcacctggatttggttgtgacgaagagggaggaatcaaagaacctccattgttgggagaagccatagctaagaacgaataatggctctgataccatgtaagatttgacaaagggaagcaaa

SEQ ID NO: 30728 - DNA, 2074 bp, Cannabis sativa
atttacgcgctgggaaaagtcttttttgccagagcttttcattttatgctgccaaaagttctaatactaacattgatttgccaacccccttttgccaacacagcatggataaattctattttaccaacgtaataccaacttttgccagcacaaaaatgtgctgggaaaagtgacatttcttgtagtgtgcaaaattcccccctccaaactatgtaaatcgcgcactttttttaaaaaaaaattatttatgtggctataacttacggtattgttgacttaaaactttgtcagctgactagagtctgataaataaattgatcacccagaaataataaaaaaaaaataaaaatagaaagaagatcaccagaagctatagaggttcggccccttaaatattagtaatgacctatttcccttttaattagttaatgctatgcagatcactaaggtagacaaagtaaattctactataactctcaagatgcttacagagaatcttgttcattgaagtgctctttctagaatgagagtcgagataatgattatttgtccatttccttgtgaatacgttcattatttataggaagtagggaagtatatttaaatatttgaaatgtaacagctacataaaaatctctcttttttggagcattacaatctgtttgaaactcctataattttgggctaaatagtcgaattcgcatttgtagggtgctggtagagatattcgtagagtttgctgaagaagaaatcaagacccattcaccctatctagcccttctaagatcatttaccctggccggcatgttgaaaacccggccaggttcctctaaagacttgtatttttaagaaggttacccatgatgcagtttcgcatggtatgttggtcttttctcttcgggctggtatatttgttttcaccttgatcggtatgttgaaggtccggttaggtcttcatggaaagttgagtacttcattaatatcaggcttatgtgggatctgtcaggcatgtacctgcccagatgtcccacattatgcttagtgttagctaaattaggacacgtatcagtgccacgtcaggtggcgaaaatgaggatatcaggttaattgcagtacaagcatagggacaaacgcatgtagccccgctaaaaaaattacatttaaaaaaattaaatattttccttttaattaaataattatacaacaaaataataaatgaaaaaaaatccacaaaataattatagtttttacttaaaagtaaatataaatattttttataacaattaaactctcatacaataaaatcctaggtctgtcaagtacaaagacttattatttaataacactaagctactttaaattcaatttattattagtattaaacatacaaaatagctctaaaaatgtacatacatactctcataatttatgattagactgtttttaatgtacaactaactataataccacacacactcaatactctaggcatacttggtatcattattagtttgtactttctgaaagcctagcatatatatgtcggtaatgaaactttaagtacaccttgccaatactcggatatgctaatttgatggctactgaaaaatgcatactgagcatgtacatatgtgcatctattatacttatcttaccttaattcatgttagactaattttagtttaagtttcgagtcgttttttagggtagatttcgatcttcacttttagttttaggactattttacgcttgattctcttgttttaggtccttgaatatttaaaggaagtattcacaagaatagagaacaaaagatgcaaaaaggttgagaaaaaatatcaatctcttttctggtgaagcctgtcgcgacgggcaatatccttagtggtgctggggattggcaattcttcaatcaagtgtgttggtcaacctgagtggaaacttttgctggacgattagtggtcctaagtcacaatcacaaaaatcgtgactcgctaaatcactcttaaagatttaaaatcaaaactagaagtttttctattggtaaatagcgtgaaaatactttaaatatcga

SEQ ID NO: 30729 - DNA, 2912 bp, Cannabis sativa
  modified_base (28)..(34): a, c, t, g, unknown or other
ttttgttttgttgttttacggttgtttnnnnnnnagacagtatttttgtaaaaaaatctgtgtgacaataaaattataaaattttactcaaaatcctgtatttttgtaaaaactcccattaaaaatccaaaacaaataaaaatagaaaaatatactctaacaatttttttttttcaaaaaatacacttcaaaataaaagtatatccaaatcacactaaaagaaaaacaacttttgcggcaatggcttgtcggcatatcaactattgtcggcgaccttagttagtgcgctggcaaaagtctttacaccgacaaatttatttgccagcataagtgcaacgccgacaatagaactgccggttgaggtcccagtgacgaagctttgccgacgagttaatgcgccggcaaaagaattggcgcgcatttggtgccaattcccaatttggcgccgactctttcccggcgcattaacttgccgacaatagaatttaataataaaaaaataaatacttttgccagcgagttacccgccggcaaaacatttaatattaaaaatattaaacacttttgtcggcgcacttgtactcgccgacagaagtattttttttattaaattaaatttaaaataaaaataacatcaaatatattataaaaccgaaatttatattgtaattacaaaactacattaaatgtcataaactaaatcaaagtatttttagttcctatacagtaatattatgtacactacagactaaaaaaaatacaaatcggcatcagcattgtcatcattgtcgtcattcgtcgtctcgtcatctcatcacatcaccgggatggatgggcagtctgtgaggaggacccagtagcatgaccgggaggctaaaattgtgaaatcggtggaattagaggcatctcgaacatgttaaatcctggaacgacgttggccaattggatcattttttgttagaacgtactcataatttgattctcagtgatcatcatctgttgttgccactcgttccgtgcttcttgctcttccaccattcgcttcactgccttatattcctcttgagtgacagtgggctgcccgaaggacctgccatgggagttgctctttttacccccgtcttaagtcttggcaactggcccgatcctctcaagtagcatgatcgctcacccaacacatctgtcataacatgcatatctacaggaaattgggtgggtcaacattgtactagcacgggatattagttggcactggttgagtttcacgaatctcaaccattttggcttgcaaaaaatttcatgaaactattagagttaaatagaaattcaaatataaaactaatttattaaaaatataaaattacttacatgcaattgttgtgtgtgctcattgcgacatttgttgttcttgtagtggaactttgcaaaagtatccacaacactgggaagttcccccgtctggggatcagcctatttttatacaaaattgaaaattagaaaaatattattaaaaaatttcttattaacaaaatattactttgttgaaaatatctaccccgctcacaatgtgaccaactatggtctttgatccccatccaccttgaaccttcatctgtcctcagttttttgcattttgttcagctcttgtctgtaatttaacgtacatttgttgttagcaaattgagaaaaaaaatattaagtatatagaaattaaatattaaaacttttaattaatacttgttgttttgggtctttttagtatgcgataacctctacccacacctttgatgtcactatatctggacgtgatctcctggtcgcttctttctccctgtatttttgaatattctccttccatgccttcttcgtatttttctccagtcacgtaatccttttgacattgatttggtaacataatccgtgaacataagattattagttggcaactcaaacttggtctaaaaaaatttaaattcgtatatatattgtattttttgtataatgattttgtttgatctattacaagaaaaaattagaatgttactgctattctatctcatatattctgaatgcctgtatcatcaacgtcctcaaactcaaacttattcataggaatagaattgcgaacaagaaacttgatgtaattgttaaacttgtttccatagtcatctactggggccctagtcgccatatgaaatctaaatttcaatttttgacctgcaggctgcttggccagttcttgttcaatatttttccccttatactttcccctaactctcttttttaacctccacttgaacatgcatcagccattctacaaatacaagctacgaataattaattaatcaaactattaacaaaagaggcatgtatttgatttaattaatggtgggtttaatattacaatactttaaagtctacaagtcatcataatcatcatcatcattaacgggtacattaattttattatcattatcactagtgtcttcgtcatcactataaataatgaagtcatctaaatcttcacggttaggctgctcccgacccctatacattgggtcaacatcatcacggacatattcgacatcgtccaattgtgcaagttgaatgactaaaaggattcctgaagagtttcttttttgtatagccttggtctcattatcttcctcatctgaaaaatcctagacattgcgaagggtgtaaaaattgacaagcttcgaatcaactccgttcttcagttcaagaatgtaatacattgaatttgcttgggatgcaagtatgaatggttcattttggtaccattcacgggaaacacaaacactaatgaaaataccatcactttttgtcctgttaccgtttgtgtctcaccacttgcacctaaaaataataacactataatccttcaagtaagt

SEQ ID NO: 30730 - DNA, 2348 bp, Cannabis sativa
ccactcctccgtacataatcctctgtccaacctctccatgatcctagaattactatgttcattacaccaagtcagctcatgcttagaggaactaaaatcaatgagccggcaatcatctatgacttctctaaagccatccataacccctggtaatctatctcggccaccaattttttcagaaagacttacaatttcattgaaatccccaatacataaccacggcccccaaacttccttccttaaatcacgtagtaattgccacgagaacctcctctggcttgcatcaggattaccgtaaaacccagtaaaataccacggtgagaacccagctccggccacagtagcaagaatatgcccaggtgaactagacaaaacttgcaatgtaatatcagtcctccacattagtaataaaccaccactcatccccactctatcaaccgtccacatattcccataattcaaaacactacacactcgctcagcttgatcccgagttagtttactttcagctaagaaaataatatctggaccaacatcacgcacatgggattgcaaggcacgtaatgtccaagggttcccaatcccttgaacattccaacttaaaagtttcattgtgatcggcggccttgatcatcaaggctcgccgctttcaattcaacacaagaagcaggtaaatccataggactagaaacacctacctcataatcattagcataaattccatctccctcaattggttcggttagacccgctgagaattcgaccataccctccactgtagctgctggcaattccgttatttgcatctccgaatgaacttctcccatcttagccttgcctcgtgccttatttttaatagacacacgttttctgcttcccttcctctgttgattctccccacagatcccaacaccagtccccggagcaaaactctccgccatcgcgtcagccaccaacactttcccttccacacagccctctgtttgagtaaaatcaatagtattcctcccacacttcctctttcgtccttccccttcattatcagctgctgaaatatcttcatcctgatcaatcccacggcttcgaatccccttctcttgagtcaccgtctcgttacattgtttctgtgcattattctcagagataaccttttgttgattactaggcccacaatcctttagcccaacacaattaaacccatcttgtgtaacattattattatgtgtacttttagtggactctggcccattatgcacaatgcccattccctttgcaaagtctattgtattctttgacttattcataatatcctgaccaagaagctccttcccacgactcacacctaaacccacgtcttcctgtaactgctgcctccgaagaaaccattcggacgtggaacccgcggcctgacttgcttccccctccgccatcttgctcagctcctgtcgtcgattctcctccgccattggtctgtcagcaagctcttccaaaccatcttgacgttgtcgggccaaagtttgtccatgagctacaaaacaattgggaatcggatcctcctctcttaaccatattccatatttcggaacctggccgcctgttaaattaacctccattaccatcgtcttgtcacaccctacttgatcatgtccccaatagccacacttaaagcatagaagtggtaatttttcaaatttaaactgtacccaccgtttaccaccatccaccggaatgtatcgtccaacaaaaatcgcattccggatcgggaagccaatctttacacgaacatagccattcaagaaaatctgttgaggattattccaaatgatgtcttcaacatcccccgccatactacctaatcgcttaacattattaacagtcaaagctttaagcggaaaacccctcatcttaacccagagagaaaccttatccaacctcgcatctcgccactgtccactctccgaccattcttccagaaccaacactcccccattaaacagccaaggttgcttctcaaatattcttttagcatcacttctactattaaatgatatcccaaagtagttatactcattattttcatccataatcttcactttccattcccccactgatttccacatcctagtaaaaatggttcggaacagccccaatcccatactttgtttcgaaacaattcttccaatcagtgacttctctccaaactcagtcacttgctcttcattcacctcccattcctcttcttgctccattcctaacttgtcagtcaattgcacaatttcatcaacagtactatccgccatcatcgtagccatgaacacaaatatcacacaaagatcaatcatagtata

SEQ ID NO: 30731 - DNA, 1660 bp, Cannabis sativa
ttaatgtttgttttatattgttttcgtgttattttttggaaaaccgtaaaaatgtaagaaaaaaacattcttgaacgtaaaaatgtaaatattttacaaaaaatagtgtcttatgtaattattccaacaaataaatggcaatgggccaattcatgagttccatgatagtaaatttatgaagaaaattttaaaagttgttatgctaaatatgagatttttaaatttgactaaattatatagtatgtttttttttatagtatttgatatgcaatatatatgtaaattaggttttcaaattccatatttcatatttttatttgtttaggtagttttatttgtcactagtgctagaaaagtcactagagtttgctggcggtgccgaaaaaatcatcagagtagctttcggtatcgaaaaagtcatcgaagttgttgccaatgctgaaaaattcgtcaaaattggtattattgccggaaaaattactaaaaaaatcaccaagaaactgttttcttgatgatgaaattacttttttggcgatttttccagtgacaatgtcaattcttgaaactttctgacactggcagctactccgacgacttttccagcagtgacagcaaacttccaaaaagttatcgaaatcggcatagtcgtcgaaaaaattaccaagaaactggtttcttcatggaaaaagaaactggtttcttcatgaagaaaccagtttcttggtgatttccggtgattttttcgacaataatgcctattttgacgacttttatggcatcaacaataacttcgatgactttgtcgacatcggcatctactttggcgacttttttgctactgatagcaaacttcaaaaaattcgtcagaattagcattgtccccgaaaaaattaccagaaaaattacaaataaattagtttcttcatcaagaaacctgatgaagaaaccagtttcttggtattttttcgatgataataccaattgtgataacttttttagcgccaacaacaactctggtaacttttccagcgccgacagtaactccagcgactttttcggtgccgacatcaaactccggtgcctttttcagtatcagtaacaactccggcgatcactatagtttcatttgttttattttttttttttaaaaaaaaaacatgaaagaaatttaatatcttttatggtaattcaattttatatatattaaaatttttatttcaaatacgatatttttttccattaaatttttttactatatttatttaaactagttttatttttctcatatttatagaattactcctaataaataactcggtaaaatagtttttctcattacagagagaacaagcaatattacttattataattcttcaatgtatatgtgtatcataaattaaataattagggagtgattgccccgaaaagttctatatttaaagggatgatgttgtaagtataacaaatacccttgtaaaaaaaaaaattaaaaaaaaatatcctgacatatattttcaaacataaaaattaactaagagattgtaacagtagcataatcatttatgttataattttgattttatatacttaaaaaatttaaaaattttattattaaaccaaaaacctaaaccctaaaaaaactatgacttttttttcaaaa

SEQ ID NO: 30732 - DNA, 1323 bp, Cannabis sativa
actattacactcaaaaagtttatattaaactaattatgcatgctagtagagggtaaccgtaacacatatttctttgttgctaagagaaaatgcgtgtacctgtgaaaattctgcttgttttgctgatcttggattccactatcctgatatagggtgatctcagcttattaaatttattatttcgaagttgccccatcttttgcctgtgcctgattttagattgcttagtgagagatcttcctgcaaaattacaaatgtgaatcctcttacttctttttaataatatctaaaagaagcataaaataccgtttagtcatcacgtgctgatgtatgaatccgtaaattttgctcctttaatatataaaagatgatattctcagaacagaatacattattttccaccaggtgtgaagccttttccacctatccaaggacatatgaccttattcatgcaaatggtgttttcagcttatacaagagcaagtaagtctattattctgatattttaaataatcattcatttcaagttcagctatgaaatttgaacctaaaactttttctttggataatcaacttttctgagtgctcatttaccacagatttgagattgagatagcaccatttagtggggactagctagacgatattgctttgcatctgtcattgttcgtaattgattacatttctctgtatattagatttatgtatcttgtatacgaatgtcatcagccatttgccaaaaacttcatctttttttgctgacataaaaggtgcaacaatgtaggtgtgatccgactgatatacttttagaaatggatcgaatcctgcggcctgaaggggcggtaatattccgtgaccaagaggatgttttattcaaggtgaggaaaatcgtaagaggaatgaggtggaatacgaaaatggtggatcacgaggatggtccacttgtttccgagaagatattggttgctgtgaagaagtactgggttgcaggtgaaaacaatacgacatcatcacagtgaaaaagaaaagaaaaataagatattgagttggcgtccgggctggtcagaagccaagggacgttgttttttgcagcatttttgttttttcttctgacaatttcctatgcgtctctagtaaatatagatttacttgtatcaattactcttacagcctataacactgctattaacctttaaagtcgtaaaagaagattctatttttattctttttactaactaattggttaccaatatctaaacttatattctacttatcattaaacaatttcacacgtatctattcacacgtatctatttcgaaata

SEQ ID NO: 30733 - DNA, 2945 bp, Cannabis sativa
catgcaattgagagttttctagagcttattttagagttctaggttcactaggtaacatggactctagaaggggatgtttagtggctatgtctgacttaggtttggttatacaatttagagaccgtgtacgtatggtgtgagtgcgggttggagtagtagcaactgctggtggagggatttctatgggaatatgaggttgattattttgagatgttggtgggggttgagatgacagaggatgggtaggacgtattagtggctcagggacctgtggtatgtgagtatgggagggatttgacacatgctcgggtggtatacaagtagtagtggtgggattaaggacacctaaatgcacattagttgttccagtagccatattaggagaggtagtgaattctgcagtaggcaaattagttgtagatggaggaattacctgagttgcagatgtttgtgttgcagctaggaatagttgttcatgaaatacaacatttcgtgcaatgaataatcttccctcctgattttcacacaaatagcctttgtgtgatgaggaatacccaatgaatatacactgcagtgtcttgaactccattttttacttgttatacggtctgagatgtgtgtagcaagcacacccaaacggcttgagaatattgtaatcaggtgtttggccaagcaaagcttctgtgggagagacatagtcaagaacaggggttggtagcctgttgattaggaagacagcagtgtgaaatgcatgccactagtaagaaaaatcaaggccagattgtgcaaggatggtgagtcccatttcagtgatgtgcttgtgtttacgttcagcccttccattttgctcacttgttttgggacaaggatgttgaaaggggatgccttgatcacttaggaaccgattaaagggtctgtattctcctccccaatctgcttgaactttcatgataggtaacttgaattgtatttccaccatagctttgaacttaagaaacatatcaagggcttaagatttttgagtgagaggatagatccaggtgtatcggctatagtcatcaagaaagtgaatgtaataaaagtagccatctttggatttaatgtgggaaggaccccatagatccgtgtgaataagctcaaggggttgagtggccttagaatctatgctagcgaagggttgtgtgtggcttataccaagttgacaggcatgacaaaattgcaagttatgtatggtaccagtatgaggaattgtggacagtattttctttagaacaataggggaaggatgtcccaatttttgatgccagacatttatgtcattctttgaactggtatgaaaaacaatcggtatgcattgagtcttttgaaaagattgtctttattcatatgagtagaagtacaaagattgtcatttgttacattgtgtaatggtaaatgactagtacaactcatagcaattggattgttggcagtaagcacatactgtcttgtctttttcagtgcacgtgagcactcttctagcacatataagccatctttaagtgtccccttgagtagtaccctccctgtttttttgtccttgacaaagcaacatgatttgtggaattcaagaaacacaaagttatcattagttagttgagatacattaacaaaattttttgttattacaggaacatgaagaactgaattaagcttaagattggtggaattaaatgcaggtaacgtagctaagccaatattagagattagtaatttcttaccatctccaacagcgagactttcagtgctaggatagggaatagctgattcatgactgtcaaggccattggtcacatgatttgtggcacctgtgtccacataccaaccagagtcattgccaaaatcaggaataaatgatgtggcaaaggcttgaggatcgtattcaaagtcatgttcagtgacataggcacggggagtggagttgttcgtggaagttgaaggacctgtggtgcctggtttgggtgtaacccaatttttatcaaaaaaatagtgacagaccagtgttgtgaccttacgaaggcatagctgacagaggggcctgttctgttgattctaggttcaataacctattctggcaccattcttgaatgattgtggtgctcgatagggattgtttcttgagtctgtaaaggcaacattggcttgtagcttaagcgcaagatcagtgacagaactatggtgttcgagacgattttcatgagcaagaagaagagcttgcacctcttcgaatgtaagaacatcacttcttgcagtgatcccagacactattggatcgtatgccggtcctagaccatttagaagctgtagaatgagatcttgatcaagaattggagactcaggaacagcaagagagtctgctatggcctgtatcttgtcaacataatcagaaattgattgtcctcccttatgaattgtagaaaactggttctttagttgaagcagtcgtgctttagattggctcgagaactcctgttcaagggtgcgccaaaaagcatgggaggaggagaagctgacaacagaggcaagaaccccttctgtcatcgacgatcaaagccatgacagaagtagctggtccttgcgtttccactagtgatacccagggtttggttccccagtgagaagatgttacagggagggatgccagccagtaagatctcatccaattcatgtccgatcacagtggggatcacttgagatttccaaaacaaaaatttagtgtgatctagtttaacagtcaaaacagaggttagagagtgagagaagggattccagttggattgaaactggttctacgcagctggagctagagttcttgggaccggagcaggatcggaggaagtagactccattgatgacgtttgtcgaaggcgactgataccatgtaagatctcagaatatgagatcca

SEQ ID NO: 30734 - DNA, 1787 bp, Cannabis sativa
agacattttgaagaactacaaaagaaataatatttctccaagatgtactcctaaggtggatataagtaaaacttatgatacgttgaattgggagtttttggaagcccttttgaatgctttcaaacttccagtcagatttatatcttggataatgacttgtctaagagcaacatcctactcaatattgatgaatggaagagtgcaagggagtttcaaaggcaagaaaggcttaaggcaaggtgacctcctatcccctcttttatttgtaatgattatggtatatttgactaggtggctgcagttggcagccaatcaatcgaattttaagtatcaccctttgtgtaagaatctcaagataataaatctttgttttgtggatgattagatgttgttttgtaagggaaacttaagctcagttcaggtgttgaagaatattttagatgagtttagtgcttcctcagggctagcaatcaatactagtaaatcttaactctattttggaggggtgagagaagaggaaaaataggctatgttaaaaggaacgacccttattgaaggtttgtttcctctcaaatacctgggggttcctctaagaccaacaaaatggaaagcggaagattgtggtgtgatgataaagaaaatcaaacaaagactccatagttgggcaactaaacatctttcgtttgctggtagggcccaactcattcattcagggttgctggggcttcgcaactattggatgagtatattcattttgcctcatagtatcacaagggagattgagaagctttgtagaggatttctttggggttggaatggtaatagaagtaaacttcatgtggctttgtgggaaaaagtttatcttcaaaagaattatggtggtttaggattcaaagatgtggtcaaatggaatcaagctgtccttgccaaatatatttgggccatttcatccaaaagtgacttactttgggttaaatgggtcaataatatttatctcaagaacaattccatttggacctatgttctaaaaaatgatacaagttggtattggaggaaactttttcatttgagggacaaatttactcaaaatgatatagcaagtgcaggggctgctatgggacacttcaatactaagctaacagcaaactcaatttgaaattagcgacaatgtgtggtgcagcttcaacatgttgaatcatagatttattttttggcaagcgaccaataactagttgttaaccagggacaaatttgctcagtttaaaattacccttgacaatgttcattgtccggtttgtggtgctgcagctgagacaaacaaccacttgttttttgtttgctgcctttctcagcaggttatgactcaaatctgtatgtggcttggaatgagtagatggcctactgattttcaaggatggcaaagctggctggtgcagaacaggaaggataagaagcatagaatttacacttcagttatggcaacattgattaacaatttatggagcaacaaaaataattgcatcttcagcaattactcgagtacaactttaaaaattgtataggatattaaagatatagtgttctatagattacaagtagaaaaaaagggagtctaaatactcatgagaggaaatttatagagaatatatacaataattagttggtttggccttgctgcttgttgtgtttaggtttgtaattgcttgtggttaatgaagatcattccttcttgataaaaaaaatgatattcaaatctaaatcataactccaaaaactcactaaccaac

SEQ ID NO: 30735 - DNA, 1650 bp, Cannabis sativa
ggctcaacaaaatgaagacctcatgttgccggttacaagggaagaggtgaagtgtgcggtttttcaaatgcacccggataagagtccgggtccggatggaatgacaccagccttttttcagaaaagttggtctattgttggggacgaagtggttcggatggttcagaatttcctcagttttggctctttagaggacattggtaaagggactaacatggtgcttattccaaagaaagggaacccagagaaattgacggaccttcgtcctattgcactatgtaatgtactctataaggtcatcacaaaggtaattgcaaatagactaaagcctatgttggatggtattatctcagccccgcaaagcgcttttatacctggaaggctcatctctgataatatcatggtatcttttgaagtcttacactatctcaagagaaagcgtcaagggaaggaaggctacatggcattgaagcttgatatgagcaaagcttacgaccgtatcgagtggggttttttaagagcggttcttctcaagatgggttttgccggagtatgggtggatcgggttatgctttgcgtatcttcggttcaatatacaatcatccatggtggacatgagattggaccaatttcgccaactagaggtatacgccagggagatcccttgtcaccctatttattcattctttgtgcggaggggctttcggctttaattcataaatatgagcgtaatggttggatccatggtattaaagtggctcgcggtgctccgcaaatttctcacatgttatttgcggacgatagttacttatactgtaaagcaactttgaatgaagtaggtcgcgtccaagagttgttatccaagtttgagagggcttcggggcagaaggtgaatttacaaaagtcctccatctttttcagcaccaatacaagacaagacacgaaggatatcctatgccaagccttacaagtccaagaagcggataaggatagtctttatctaggactccctagcacgttgggaaggaaaaaaaccgctgttttgggctacttgactgataaggttaaaaaaagactaatggggtgggaaggaaaattgttgtctcgagctggaaaagaggttctagtcaaaacagtagctcaatctcttccaagctacgctatgaacgtgtttctgctgccacttgagatcacaagggatattgagaagctaatgactaagttttggtggaagtcttcatcgaaacaaaataaaggaattcattggatgtcttgggatagaatgtgcaagcacaaggagctcgggggaatgggttttagaagtttgcgggattttaatcttgctatgcttggtaaacaaggttggcgtctccttcatcacccgaatactttggcgtccaaagtctttaaagcaaggtactttccacacgataactttctttcagccaagttaggaagtaatcctagctttgtttggaggagtatcttagaggctcaatccttggttcgcaatggctctagatggttagttggatcgggtgagcagattaaggttattggagatgcttggctaccagatatgactaatcctatggtcacttctagtcctctcggcctgcaagaagcaagggtgcataatctcatgatccc

SEQ ID NO: 30736 - DNA, 1897 bp, Cannabis sativa
taatttatttcaaatttgtaacctctcttatgttacaaaattatgacaacttatcatacactcacttattagtatgttacacatatttaatttatatatatatatatatattatattattcaaatagtataacaatcccccactagattaaatattttcccattagtaacaagcttgtaactttgtaacatttatttaaacaatcaaaatattatattctctcactttgattgactaaatagattagttaggtgttttgaccttatttttagtcaactatgcggagtcaataaacatctatattaatgtttgaatattaaaaataatcaagtagctataaacgacacaagatttataaaagtttggcccctgaatcagtaatgactgtaatatcccaaaaattcaatttttataattgggccatattttactaaaaatgagataatatgtgtgttatgagtttaataagtagaattatgatcttactagtcaattatgtggtaattaagaatttcaatataaataaaggaataagcgtaatttgtgaattacgaagattttgtaggtatatatgggtattgttggggattattttaccaggatctagatttactaccatgtatgttatttaacttcctaaatatgaatttctaaaataatagaatttaggctgatattatggtcagtagtactgacgtacgaacgttctaaactcagcaccgtgttggacacggtgatagggttatggttgggtgtaggggcgcctgattataattcgaattattgttatgttattatttatgcttttcttacagagtctgtcgactcacagttattgtttgcatgtgtaggtaagggcaaagctaaggttgagcagccgtgagagcgagcaaatagagattgtacatgtcgggacggttaggccaggagcgtacagtcttttggacatcagggcttatattgtatagtcgctaggcgacaaacttttgtatatgtacagtaaagcttttgtaaatacttttgtaaacaggatcccggtttaatataagtataatattttaatgattataattaattaagtaaaattttaattaatcacgatttttaataaactcgttaattagtgacgagctgcacatttaagttaaaaatcacgttaacacgcttaaactagtaggatgttacgatgcgtctttagtaaaaataaaaattaaatttgttcaaattatatatatatatttatatgtggtattgtagctagatatgctcatttggtcatttttaaagacattcaaattactggaagagcaagctttttgcaaaagaaagaaaaaagttgaagaacaagcgttcttaatctttagttaccacttaatcaagggaccctccaactaatgacccttatgattttcggggctccattagccattagctgacttgtataaatgtatatatagtttttttttagtgaaaatatataggtaaaatacgtaagccaaacaattttattcctaagttttcggatgtattattattattattattgtatgcaaatgaatctacgttttttaaaaaatatatataatggtggaccaaatgctcaaattatagctcaccctctcttgtataggacccatacgaaaatgatatacaaatgtatagcagtgattactagattgtcatgctggtagattaatcataacccttatgtgtcatgccatacaagaactacaagaacatgaaaatgcaaattaggtagattttattatcgttttttattttttaagtctacgttatagaaaaagaaaaaaaaattttaatttttgactaattagtaatttttccccctgaactttgacatgtagtaaatcgtacccctgaacttttttggtcgtta

SEQ ID NO: 30737 - DNA, 1813 bp, Cannabis sativa
agaaagtatagatctcccattcacttggatgaaacgggcgaaaaaaattcttaggtccgcaatcagtgcaacgaactaatgaagcaatagaaaagattaagtctaggatgcttgcctctcagagtaggaaaaagagttatgcagattcgaaacatagaaatgtagagttttaggtaggagatcatgtattcctacagctgtattcgatgaaggggatcaaacgtttcgggaaaagaggcaaattatgccctagatttacaggatctttcgagattctcgagaaggttggacaagtggcatattgtttagctttgcctcaagctctttcagtagttcacaatgtattccatgtttttatgccgcagaagtatatttaagaccctactcatgtactaatttatgaaaatcttaagctacaaccagatttaacatatgaagaataaccagttcagatcctagacaaaaaggataaggtccttcggaacaagacaatagctttggtcaaagtactctggagaaacagcaaggtggaggatgccacttgggagttagagtccgatatgagggctcaatatctagagttgttcaggttagatttcggggacaaaatacttttaaggggagataattgtaaagactacttggattaggatttaattatgaaacttgcatgttagttaggaattatcagtttatggagatttatttgaattcacaatgcattttatatgtcatatatggaatttcatattttttttttgcatgttttgtgcccagcaacattggaacgtggcggcatttggctattagactcacatcttagtatttttagtatagcagggcaatatatttagatattggtaatgtcaggattagtggaaattttagaagtgaccgaaatacccctaagtgtttatgaatctttatggctttagtgaggggtaaaatagtctttttgactattgaggtttttgtcgtttagtagggagttaatattaagtattaatctgattttttaatgtttattaggctgatattatagttagataaagcctttttattcatctatttcaaaaattaagaaaattcaagaaaagaaactctctctcatagttctctctctctctcttttttgaacaccatagaacccagctatggttggtgttttgctacctaattttgtggatttacagcaagttctaagtagattcaagctcaagtaagttcttagtacctctccttgtgatttcttgagttttaagttatggtttttgcatgaaattgggtttatgagttctgtagttgttgttgttgtttgatgttgtttctgaagttaaattattgttagaaatgttgtttagagctggtttggtggctgtttgtgaggtttgttcaaggtttgagcttaagagctcaaactttgctctcacatggtgttttgtgattttgtgcatgttgaggtattttgttgccttgtttatgttttttgaaatatataaatcatgtctggaagcttttgtttgatttagggttgaattgaatgagttgtgaatttttaaagctttcctgcactgaaccggtcgacccgtaggaactggaattctagttggggaatcggtctactggttggggcagtttagggaaccctagtttttctcgttgttgaaatatttagggtcttgccatgttatttatcgatagagaaacttttagcttcgagtttaagtccctggaaagtgatttagcgtgtcactcaccagttttacgaataatgtgatttaggggcatgtaatttgtcgagcagatgttccac

SEQ ID NO: 30738 - DNA, 1580 bp, Cannabis sativa
aagtacggcccatattttacgtaaccctttaacacaaaaaatgggttgggttggctggtttagtcggcccggcccgtattttgtacacccctactagaggagtcttttgagccggtgatactagatgagagatatatcataggggaatagttgggtctcccctacttctactctttcctctcagacctttagcgagattcttactagtagcttagtaggggatgttaagtgccagattcctcataggaattatcaggctctctctaggttggttggcgtggtttgagcgccatattgagcatggggcagtattaccgcttcatcgatattttatggacatcgctgcttactttgggatgtgtttgacatagcttacgctaaaaagcatcaagtatcttttgatgatattcgtcttgtacagagagttaggttggccttagcctaccccctacgagatcggtcactactttaatctgaagtctgtgctgaagcagaacaggactagctacttctatcttagtcatattggttaccaatggttgggtgacactaattgcacagccatgtcaaaggtcagtgggtacgccaattagtactttatcgcctatggcctttgcgggattaggcattacgaattttggccagtgccattctctagatgctctatccccactttgcaaataagggatagggcaaaccacatcatgtctctcttggcagagaagataaatataatccgattgaccagtgtggccaagttctaaaagtatggcttataccctcctgctcttagagttgtaggagcactggctgtagatagggcctaccttagagatgggaaagagctcttgacttggatgatgatcaggtacctttatctcgcattgcacaaactttggagagggccctctgccagtgcctagccggtgggggtctgggtggcaatgcttctctccgtatcgggaccagaggccaggcttttgagagacctacacaccccgtgcctatatctagaggaaagggtaaggtggtagtagtgtactctaatagctcctcttctgatgaagatggtatttgatagttgttaacaccatgcaattttgatatattgaaaatttatgattgttttctgactcaactactttctttttgcagatatgtcttccaagttgagaggtcttactgggggaccttcagatgagcccacgagatgagtgagggccaaggtggccaggacttcccgtggtggagatgttaccgggtcgtcactgcctcacccttctccagggactgcaccacctgagtagcctgtgatacggcctgtaggccagggtactcggaggcctaacaaaagagcgaggtcagtctctgggcagagggctattgaggtagccaataggtgcattgagagagctatatccccttcatggatgaggatttgaaggagcttggcgatagcgagccagacaagctctactctattggtcttcgatatctttctttggtaatttgtaattttagctctgttcatcttttaggcactccataggctggccggccatgaggcttgttgcatgggg

SEQ ID NO: 30739 - DNA, 1219 bp, Cannabis sativa
agatcctggtaaaataatttctaaaagaacacccactctttcgacattcctttctctctacgacagctcatgctttgcccgtcactatcaatagtcaaatgtgtacataaaatagctcattcaaattgggtctcacctacccgtcccaatagctaaagtttgaatttattagtgagctttagcacaaaaactctaattgacccagacccattcatcccactaagcatatgttcttataaatatggcacttttgcctctacgcaaagggttcgaattcttttggttcataatcaaaaaatacattataaaatccatgactaagagcttaataatagtaacttgtgtactaatgcttgttaacgtcctaaccacgtaaaaaactaatcctattttcttcttaatcttatttcttttagcctaatcattattataatcagttttcaaaaaactcgataaataagtgcagttaaatattagaccccacacaattaaatttaataattattataaaatatcattagttatttctaaaggaattctagtaccttcctttagaacatcttcaatgggagttgtctattggagtggtattgccacatatgcaatgtggtccaattttcaagattaattttatgtaaaatagtgttcaatatagataatagccacattatattttgctttttttatatatatatatattttattagaaaaagttatattttacttaaaatattattaatttaatgtgatgtaggattaaagtaagtaacatgtaaactctttaagtattttttttaagagaatgccataaattttatgtagataaaagagaaaataaaaaaaataatacagtagaacctttatctaagaatacacttgggacatctctgttaatcaaagcgcttttatcccggggagattgataactgacaacatcatggtctcatttgaaattcttcattatttgaaaaggaagcaacgaggaaaggatggattcatggcgcttaaattggacatgagcaaggcctatgatcgggttgaatggtcttatattggtgccatgttgacaaagatgggctttgatgagaaatgggttagaatgatatctagttgcttatcctcagtggagtatacagtggttagtagggggcatgagatcgggcctattgttccttctcgaggacttaggtaaggtgatcctatatcgccatatttgttc

SEQ ID NO: 30740 - DNA, 4000 bp, Cannabis sativa
  modified_base (630)..(642): a, c, t, g, unknown or other
  modified_base (1424)..(1427): a, c, t, g, unknown or other
tgtttattacatgattataggtttaatatataagttctattaaatctcgaacatgtagttactcacaattataataatgtcatcacagtagaaagttatcgtgatcgtatgcttcaaattatttagtcccacgatttatcactgcactgaatttatacttgtatgataatcaacaataaggtttacttacacttcggtgagtggaatatattttccaaggcattagcaaagtaaacaatgatcaaacatatcggctatacattagattggaccgatattgacagtgaaaaagatatcaaacttaccgttatatcttttctgggtcaatatcacttagttgatcatagatcatttgatcttaatcctaagatggttaagctctagcttaaattacacatgttctttgacttgttcgctatcaacttacttgtgggactagcctatacttacatcttgggaactcagtagtataattgagtgtgagtgttaatcataaatatgaacatctatagtttctatgtctattagaagtgaaatgatagtattcttagggcatggcttaacataataaaagatagagcgctcattttaataattatattacttttctgaaatatcatttacaagtannnnnnnnnnnnnaggataaaatacattgtaaggtagaacgataattttgtccctactcaatgtagaccgtctatagaggatcaatgataattgtaaatttaaataatagataaattcatagtgtatctatacttggtgtgtagagcattctatgtaatcaagagtgcaattctgtatcaatagtggagtcgggatgaattaataagatagagaatttacttgataaaatctagaactacattgggagcttgattacataggcctatggttcccacactagctaagatcatattgctttgtagactcaactaattggttttaattaatcaattaggattctaaataacatcatgtcttatttatgaattttattaaactagggcgaatttgagaagaaaaaagaaatatagggtttatttgttaattaagaaattttggaaagtctaattaataaataagttaaatggtaattttatatgataattagtcataattgataaattaacatttaaaaggttagaattaaaaattggtatttttgagaaaagataaatttaaacttaaaatgacattattggaacccatggcctctatatgagtttcagccgtaaggattttaataatatatttttaatacattttaattttaaatctaactcagtgacactataaatatatgattatagctctaaaccaaagagacacatattcacatattcagagatatacaattattagagagaaagtatgagagagagaaattttactctattctctctctctctctttttttnnnntttttgattcaagcgtttatatattacaatcatgttttaactggtactcgaacccaggacctccaagacgcacacacccacttatggccacttgagctagcctcaagtggttgattttactctattctctagttatacatacttatgaatatgtattcatatactatgtatgcagattagagaactatgaagattgttgttagaaaagtgagattgagagttataatccatattagtatatggaattcgttattccttagtctgctttttttttttttgtgtgcgctaagggtgttgaataattgtccactcatatcaatacaatatcaaggatagtgtggaagattgcctagtctttcacattttggaggagataccaagttcaattcttgatcatactttgtgacagattggatcaagagttagagaattgaatagaatgagacattaaatttcactgcattattgtaaggttttcttaaactctttacctatgtattttaaatattttaggaatctatgttaggttgttagattaggtttaatctaacatacttgaatagtaaataagattcaagtaaataatatttctaacagtgtaagcctcacaaattatattaaaataatattttagaacacccaaagataaattatatgttacataaattttaaattaagaatatttgaaaaaataatttcgtttttgtgttttcaaaacaatatttaatttaaataatcttattctaattaagaattttaaattatattccaaatataaagaaaatacatgtataaataggggttgatagtgacatagagagagactacaaataaaaattgtattagttttcttgctcttgttataatgtaaaagttgtcacaccaaaaagaaaaatataggttttgagagatatcaagccagaagaagaaaccataatcatgtccactattcactcgattaatacagaaatatctaagcgccatatagaagagattaggtctcaaaagttctcggttggtaaaaaagagtcaaacccattatcccaagatcttcctcatgctattacaagtttatcagttgaactttaaaccaaagatgttcactttctcatggagtttatcatgccgagcttatccaaaaagacaatcaaaggataatattcaacttttggtatattgggtttctatttttctactaaacgcttaagattttcccattaattcattccatataacgtatttttttcatcatctcatcaccataaccggggaagatgtacaacatgtggcgttatgtaattttatcggaagtcaaggatatactttttgatatgaggtatgcgttttttaacttacttttataagaattatttttttttcatatttagataactcttaaattacagtaattttagaataatattaatgtaatacatttacttaagatattataattgcgtatttatttaactatttaatttaatttttctttatggttattatatataatttatacttaatttaaatataataataaaataatatatatgaaaaagaaatagattttttttaaaaaaaattctattattacacaaaattctaaagttgaaaaagaaaaatcataggaattaagcccttatggagtcaattattatgaaataattgtaatcctatcactacggttatttcataataatcgactccatcagactcctacgaagtcggttattccatacccattttaccgtcacttggaacagcgtcgattgcaaattttactaaaattgacgccttatatctaaaaaatcgcctctaaagcctttttttttttttgtagtgtgactataaatgattgtcttattagataattatctcgatataatgtgtagtatgtattgtgtggtgtaaatacttgtttatgattgggtatgtgcataatggttatgcttatatattgatacctgtaattttagttattgcatttcttcctgagttataatgacttatagatgctttgtggtgcaagtaagtgtaacaataagttggatcagccataagttatggacttcttcaaaaaatatacatatcagcctaaccgatcaatggggccgagttgtcagaagatatattttaggtcacttttgaaaactaaaatttacattttaaatgtaacactgagtaggcaacttttgtaattttaaatagagatcctcgaagttaaagtttgtactttatggtttagtttatttatttaattaattaagttttaattaaatcatgttttattaaatattagtttattattgaaaattaatttgtaaaagtacacacttgacgtccttatgaattagggtgtattcggctaacccgattcatacacgggcgtccaataaactcgcctgttattcaaccccaatcaaaactataagtattatgtttttaattggattaaatatatgatattaaaggattatttttaaccaataaaaaataaggtaaatagcggcacaagtacccaaagttttatgtttgtaagcagcataaactcaatgtttatttttaacgacataagt

SEQ ID NO: 30741 - DNA, 3311 bp, Cannabis sativa
  modified_base (513)..(513): a, c, t, g, unknown or other
aactaaaactatatgataatttattttaagagctttgagttaaagttttgagtattttgaataaatatttaatttttaatgattataattttttttataattgtgtaaattattattttacaattatataaaaataattaaaattataaaaatctaatataattaggtagctagttgattaataaataatagaaaatagagcacaaattcaaatatttttttaaaaaaaagggctcaacaatttaaaagaaaaattaccatgacacgaaaatagcttataaaaagttggcatggcacgaagtcgcctatatttttttgaaaaattactccatatattattttttttaattttttttttaaaatttacggtttgggtttctaaagtagttgcagcgctagttgcaataggggattctatacgattttttgttgcaatttaagtcgcaatgctagttgcaataaaaatttctatgtatcattttgtaaaaatgtaaaaaaaaaaattattttaangtgtaaaaataaaaaaaaaaactcatattttttatatttttacgagcttttcaaattacgaagtctgtccataaccactaattatttataaagcatccctaatctatataacttaatctttagtttgaaagctatccccaaaatcaattgaaaaaaaaaaaaaataaccttttagcaatgaattatttatttagtggaacaccaacgcttcatccacccctgctttggggtctccactaaatatggttacagctttacttcatatctcactcatacaacaaagaaaaaaaaaattaataaacaactgccacttactcataatttatttatttaaaatgctgagtactgatttacaagactaattaaaataataatgtaacatcacacaacaccacaaccacaccttcaccttcatacactagaaaaaatttagcagaaaggaagctcctaaaaaggtacaataaaaattaaaaaaaaaaactgattagaccatttatttaattatttaaactagtatttgccagtagagcaaatatgttcatgtgacctttctgttcttctaactggaccaccaacacttcttaagcaataatcaatacttgaagggaccaatggtgcctctgatttcccatatgagtttgaacacagtgcttgttttaataatcctctgttgttgtacccaattgaagggcttagttgtatgtcaattagatcaacatctatgcatggaatttctttgctacaagcaaggtgaattggctgagctgagaatgttcctattattttatcatacttaatacctgaaattcccactgccccactttggttcttgcaatatgtgttcttgtcacaatagtattggtctatcattataggaactttcacatcactaacttggatatttgagaatgatacatttttaactgatccaattcctccctgtatagaaaccaaattacaaaacatatttttttaaaaaaaatttgttaattaatttagttaagtaaaatgagataattaattattattacctgccaagttttgattcttactcctgatagagtgtttttaagtgaaatattttcaacaactatattggaaacacaagcaactgttttgtcttttcctagacttcctatactgtacaaaaagaaaatatatgaaaaagtaagtaaaaaaaagtagagattcttgaataatttaattataaatagtttaatatttaattataaatattatagaataatttgaggtataaatagtttaattctcaattatatataaatactcaaatttaatttttgacagtaataatatataagttataattctaaaaccaaattgtatagtttaaaatataaggtcttcggaggaagatgttaataggttgtaaatgtatatttttggagtaatgaaattcaatgattgatcaaaaaaaatgttataattctgaaattactacatgagaatctttaattggtcaaaattattaaatttttatttttatttttaaaaaaattagtttaaatatactaatagaaaaataacacgtgactttatcacaaaaaaatatttatttacaattagaagttatacttaaatatttatgtttttatattatatatatataaatatgtggatgagagaagattatatattatacataccttataccatgtccagggccacaattcatatgatgaacatgaacatttgagcaaccagtttgtatggatacacagtcatctcctgtaaaaagagaaacataattagaaaatataaagttaattactatatttgtttgagttaataattatatatattcttgagagccccccactgagaaaaaaagttttttggtttggtattctattttttctttctttgtttcaaaagttagttttctgacagtttaccgttaaaaggaacttattatgttaccaactaaactataaggaatatatgtatatatttttgcttaccacactcaatatttgaatgatgaatctcaacatcttgagagttttgcaagtgaataccatctgtattggggctattttctggtgaagatattgtaatattgtcaactttgatcctcttagagctgtcaaatttaagatgacactgaggactgtttatgattttaatgtttttaactgtcacatcattgcttgaatagaatctcaaagcctgaaattgtttaacaaaaaaaaatgttataacttattttaaaaaacaaattaagttagatttgaacaaaataaaagaatcttacagtaggtttcatgtctggaatatacttggatttcttctgcaaaaaacatcaaaaaggctctgtttttagtaacaatacatatcttaattactatcctataatcacaagtgaatatattaattaattaattaaacaaacctgagtgttgtaaacttgggagagacaccaccagttagagccttgaccatcaacaacaccagtgccttgaatagtgaaattattgatccatttaaagtatatccattgaaataaattgtatttctgccaagacccaatttttggaggagccaatagagtaccatcaatctgtcaaagaattccactacatatattatacattttaatttaaagcaccaaaaaccatgtaaatatatctcatgaaaaaaaaaaaggaatatacttcttggcctgcctgtcccttttcaatatttttttttgtggggtgcccattattccatgaaattcagtgaaataaataaaaagatttaaaataatcaaataattacctgaaaaattaagtgag

SEQ ID NO: 30742 - DNA, 1840 bp, Cannabis sativa
gagcaatatataaactctctgcttgtactctgatttaatcaattcaattcattttctctattctctcaaagattgatttcgtaacatggtatcaaagcagggaaaagaagcttcccctcgatcttgatctgttgttcgtcttcttttttgtgtcttcttctccagcgaagactgttctttcatcactgatgttctgttctgaagttctgttatgaacttcttctttttcttcttttcgattagggtttctgttcttgatctttcttcgtttcatccatggaaactgataaccaagctgaaagtgaagaaactaatgataagggaggatatgctactgtcgaggaaggagtaaatcctgtggtgcagaacaatcgtacacagcagaggagtcctcttgaaggtccctcaaatccttactacctgcatcatggggacaatccaggtaacattcttgtatctcaacctctaactggacaagagaattacatgtcttggagtcgtgccatgcaattggctatgtcagtcaaaaaaaagattggactcttgcatggtacaattcctaaaccccttccctctaattctgtcatgtataatgcttggtatagaaacaataacattgttatatcttaaatttagtttctaaagatatctcttctagtcttttatatgatgaatcagcagctgccatttgggatgatctaaaggttagatttcatcagaaaaatggccctaacgtatacaacttcaggaaaaatctaatgaatcttaaacaagaaagtcagtcggtcagcatatacttttctaggcttaagactgtttggaaacaactttcaaattacagacccaattgtgtttgtaatggatgtacatgtggtggtgtcaaaaagattcaagaacactaccacatggagtacataatgtctttcctaatggggcttttggattctttctcccaagttcgaagcaacatattaatcatggatcccttgccagaaatcaacagggtttttcatcttgtcacccgagaagaaaaccagaaagggaattctaaccctactacagaaccaaattcaggaatggcctttggcttccagggagataaaggcaccaataacaaaccaaattcccagagaaataagtcacatcctcccaaaagaaatcggcctttctagactcactgtaacattctcggacacaccattgagaaatattacaaaattcacggataccccctaggatatcacaagaatgatagaggaaaagaaggatctgcctctgcaaatcaggttcaaactggcaatgacacgagcactaagcaggaaggacaagccttaccgcctcaacttacagctacacaatatcaacagctattaaatctgctggctgttctacaaaccgatatggtaaacactgaagcaggaaacggtacaggtaattcaggtattgtgctttcaagcatgtctaattttccttctattaattcttggatattggattctggtgccactaggcatatatgctatgacaaaaatctgtttcagtgtatatgtaatactcatcttaccagattattactgcctaacaatgaaagtattgttgtcaatcaaagttgtaccattgctatttctaatgagttaaatttgagtaatgtgctttatgttcccacattcagatacgatatcatttcagtaagttgtctaactaatgacaacaacctatctgttcaattttccgctaatcattttgtcatacaggaccaaaccaacaagaagaagattggcagacgtgaatccaagaatgggctatacatcttggactacaaacctcatgacaaccccat

SEQ ID NO: 30743 - DNA, 874 bp, Cannabis sativa
ttccagcaaacaaaataaactaagtatttagaaaaaaaaatagttacccttcaagaaaagcggatattacaacacatttcgaaaaatttgtaatcattaaacaaataataaagaaatataaaaaaaggaatacaaatatatatcataaatataatccaagatttttaactaaatgacatacagtatcccgtattgggcgggattaaaggatgtaaaactttaaatagagtagttgactcttctaaagtaaacctattttagcaaccatttatttgattaaaataaaaatccagcattgtcccgtattgggcgggatgcaaggttattcttatttgatgagcttctaccattgtttcatacttgtaaactcaattctaagttgtcactattggggcgagcattactatggaatatgaatctacaaaaatatttatctttagagattttacgttgttaaattgtctaatgggtgaacatctattggtgatgaatcccattaaaaacaataacaatgtaagaccaacagtggagaacaatatcttagattaaagttatttaaaataaaatgtgtattctcttataaatatttattttaatctatttattttgatatatgttatcttgatttttacccacttgatgtggcatgtctacatggacaacatcagtgccacatgggagtacatctcaccaacaaaaaggccaagacatctcctcagcacttcaaccaacgaggggtccaagtactcaagtgggacgatgaagtgacgaataaaccacctcaagggggctggccttatggccagcataggtcagcaagcttctggacatcacatggccaacgaccttgcactctgcaggtgcatggccagca

SEQ ID NO: 30744 - DNA, 1391 bp, Cannabis sativa
gacatcttagagtaggtttggaaggtggatgcatgcatcaagcgcagacttgcggaaaataatagtgtcatctagtctcaaaccgatcggctgtctgcggttaagaaagtcgagattagatagggtattgaaagcttagggtacttgacacctaaaacagacctcccagccgtgggtatgcagttaggtgtcgatgctcttgaggacattgctaccagtatgatggaactaacaaccgagaagtgggctgttggaagtagctccgaacctatgctcttggccaacacttcgaggtaataagcagctgggttatttctcatttctgctttggtttttcaatttacttaatgaaaaataccactcttttccttgacttttttcaatttgttctagatggcattctttgcggagcaaacctactaggaagtgcaaacaatggcggtccaactagacctttccctgactgcctagaaggacacaaaactccaaattgaatccatgaagaaagaggttgaatatcattgcaataaagctgactcactagctattaagaaatacatttaaaagtacaatgagtataaggcgtccttcacatcccagaccgaggaaaaataaaaggctcattttgaggagctagaggttgctaagtccacacttactaaggagcttgaggaagccttgaatgctaaaacaaacctttagaatcatgtaactgtcaataatcttgagctttagaacaggaaagattacttcaaatggctagaggccaaggtcaacatggacaaggtgttactaaagctggtagaggattcagtcatcactttgaaggttcgcattgaaaagaagataagcaaatcgaggcacagtccaaaactgtaacagggctgaaagagaccaaactcttatatcaacaaggctgagacgatgctttgaaagaaatctcctccctgtgcaaagctctggatatttagcggcaagagcactaagaagagcaagagtctcaccagcaagccctaaacattttgtgaaccaagctcacattattttatttgcccgccttgaataaagtatcccaaatgtgtaaaagcatcttggtaaggatgttgaggagctttccaaaagggtcgatgtcttcaaacatagtgtcgatgagtattttgatatctacgatagggttctgaccactatggttgatggagccgagactactgcccaagggactgagaatggaccagctagaaaagacaagacactagagattgtagacattccatcaggagaggacgactctttgcctcagaatacctccaaagtgccaccctaagatccaaattccaagtcagaacgctcctcctcactaacaaacataacttgttttcttttttaactta

SEQ ID NO: 30745 - DNA, 2891 bp, Cannabis sativa
ctaggaggaggaagagatgatccagcatcctctccaccatgagcggtttgggccaccatggccctcagatgacccaaagggttatcagaaagtaccttagcgatacctctcaacttggaagacatactgcaaaaagaaagtagcaaagtcagaaagtcagtcacaaatattcaatgcaggataagaatgtaaaagatggtgctatcaactaaccaataccatcatccttagaagaggaatcttcaaaatccttaacaactgccttgcccttacctctagatgtaggcaaggagtgagtaagtccctcaggcctgatttgaagagaagcatcactaattgagcccccacggaccaagcgttggcagagggccctttctctcctttacagattctaagctatctgagatagaggcatctcatcatccaagccagggacttatccatcactaggacaagcccctctgcagctagggctccatctacactaattaatgggccttgggctcctaaaactacagaagcaggagggtacaagctgtacttctgaaagttggtcacactggccaatttaattatgtttcttttcttcataggaagagacaagatgtggttttccatgtctcgcatctacagtgtggggatggagcgcttgaaaaatggcacaagctggaactggtagtgtccgatcttctagatgccctaaccaacgaagtagttctgggagtacacacctactttggcatgggtgtgttgttggtgtcacctaaccactgctggctaacctggctaaagtagaagtacctagtcctattctactttggagcagatttcaaatcaaaatagtatccaatctcataaggagtgggctgaggccaacctagctccttatataaaacaaacatcgccaaaggtacttgatactttttaaggtaatttgtgttagacacatctcaaaataagcagtgatgtctttgaagtaagggtggagcggcaacactgcccccactctatatgatgctccgaccatgccatcccaccaagggcaagttggtgcaccctctgatctctagtgggtatcccccaatggacacccctcactagcccactagcaagtatcctgctaaaagtattagcagagaagacagaggtgggagagacccacctaaatctgtgatttggcatccaaaatcataggctcaaaagactgaatcaagatgtgatccaagcccaaggctgattgagcctattcaaaggctccccattgtcatcataactacctcaggggcagttggagaggacaatacaagttctgtatctccttctcctgactggtgcggcctcctcaacttcagactcagtatcgagactctcagccctctagtcaaccttaggcacctctgcctgatcaaccttcggacctacatcaacatggggttgggtaacctcgtctaaaattctaactctaccccttgttgccaccctagcaacacgaggatcacatggtggtgctctacgacatgtctattatgttctagtcatgatcacacaggataaccaagggacttatgcggttatcacctccctaattcaatactcagaatcacctgcatagatgagaaaaggaaaggcgagcaacctaacaaagctacaaacacattatagtcaacaatactcaagggtaccttccaggtaaatcacaatgtacaaggtcaattatcgaccaagtatcatcttaagtacttttacttagacatatagtgaatcctatgttatgcactcgactaaaatggactcactacaaagtctcatacagagttcccaaggggaaccacacataagactgccgttgtatatgcctccaaggccgtcatgagaccctagctgaggtcaatagaggacaaaaaactagctgcctgcttggaaccttggcctttgccagccaaggttcccaagccttagaggctggccaagtcccatgacccagtctagggctggccaagaaccctatttccaggcataggccagcaagcccatggggtatacccgcttggccgaccagaccacatggtggaaacccttggctggccaagtctcaaacaagagctccttggccgaccaggttgtgtacatatttgagcatgtgttttttccagaactcaaacacgttcttcgtgttcttcgtgactcaaagagccatgactcacaatgaaggttagattcagatcttttttgtctagaaatcacacattacgtatcctaagactatcgtgcaaatcaaaataccaaaaggacaattgttgacctcgcttctagccaatgacaatgagtcaaaaataaagagattaagattattaaaagaaagcaaaaaataataaaacaaagtgaataccagattgtaaagaggttcggccccgtaaggatggtaatggcctactccccttgtattgtattgacttgagagaaaggaacaaagtgttcttcctcttgaaagctcttacaatggatctctgagtatgtttctctcttagatcactctttcttctctagaatgtatttctgcagtaattctttcgatgcctttcatagtgagattaggccactattcatagggacttaatacatgagggatggtttcccttttgcttataatgaataaaataagaaactccattaattctataattactattcaagaaataggaaacttaaaatatgttgtcgttattctccgactcaatcccatgattatagggattgtctttgcatctggacacaacgagaataatctttgaagttgccatctctcgtacttcgctaggcacaaacatgtcccaacctcgtcgaacatcttctccagaatcctgttgggataacagatgctggttattcat

SEQ ID NO: 30746 - DNA, 1812 bp, Cannabis sativa
  modified_base (997)..(997): a, c, t, g, unknown or other
ttttttttatttattctatatattttataatacatatgtatttttaattttcttaaataaaattttatctaatgtttttatttaatataaataaataaaatttaatttataattattttttccttctcatattcttaaaacttatacctaaaagtaaaatatattttaaatattaaggcaaaaaaaaaataatacaaaatttatgaaatttgattaaagaaaacaaaaaaataatataaaaaaataaaataattattgaaattaacataaaataatataaattaaaattaatttaagtttaattttattggacaacattgtcccacataaatgtaaaaatattgacttatatataaaaatatgagaccctccactcatcactaattgattttgagatgaaaactcatgattcttgacatgatattaaagtcatattcatatattcaagatttggtgataaaaaaataactaccatctttatcttgaggagatattggacaacattgccccacttagattaaatacaaaaatattgagccacatataacaatatagactacttcacttatcaccaattaatttgagatagaactccaaaatttatttaatatttgaaatgtacttaattataattttatggggctctcatttatcaattatcttttgttttataaatgataattaatacatgtacaaatcgaacataataatattttgagtctagttttatcaaactttttaactctaaacctataaaacttcatctttctaatttcaaaatgtaatcccgtctaattattgtaatataattttgggagtttttttttattatttttacacttcaaaacttttttttttttttttttgcggaattctacatagaaactcctattacaattagcgctgcaatctaaatcgcaacaaaaaatcgtataacaacccacatagaaaccactttaaaaactcaaaacataaaattgaaaaaaaaaattaaaanaaaataatatatagagtaattcccctttaatttttaatatataattttaaaaagtttaagaaaacttaaactcaaaaaaatattattcaattctacaaattatatagtctgaattattatttaataaaataaagagaataattgttaacttttgtacaacacaatccaaaatcatatatctatttacccttaaaaataattaggaaataatatgatgaacactatcagtctatcactatcttctaataagtaataggcttgcataaaaagaacccataatagaatgataaccacctcacattattataaaacgaatcttttctttctgtatggatgtgatcttaattgttattagctgtgatattgaaatttgaggagtcttattttctatcttttaaatgcaattttgtctactttggggaaattaattatggtatcaaagttatgtattgtaggtattgtggtaccaacctctaccaggtttttattattgagatgagaggctttggaattttaagtgttaataaaaagaaaacattaaaacacattcttcttttatgttcattttggcatctttttaatttcttcacttactattatatacattaattaccattaaattctctatctgtacgaactaaggaaaaaaaaacttgaacgtcattatttcagtaataaatgccagcctaattgctttacataaatgcacaacaattttttttaagaaaaaaaaaacataaaagtgaccacatcctacaattttttttgtttgaaagaaccacatcatatacatggtaagattttttttttttttt

SEQ ID NO: 30747 - DNA, 1771 bp, Cannabis sativa
aaatagatgagaaaattcaatacaaatgttccttgttgctcacaatagtagtagctaaatactgcatttcccttaataatatagcacaaaccagaaagaagatacagttcacaaaaccggacataaaatttatacattgctatggaccgaaaaagcaagcctatgatcttatatgtatccttcatttgcccaaactcaagaactgttaagtaacattttgatgaaaactacaacattaccatttaacaaccactcagacttgttactcgtatccatttttcgcataatggtaattcgctcctctttagtggagcctcgcaaggtaatttgagtataaccagattcctctccccgcttcacaaaagaaccaacatcttttgcccgcccaagcagctaaaatagagcacagatttcccatctttacaaactctataccgaaaactctcaaacaataaagttatcgggtactaacttaccttaggatcaccagcaagtccaagtgctatagcacatacaagggagctcttcccagatccatttggtccaattacaaggttcaaccgaggtccaggtttgcatgtcaaatgactaaaagtcataaaattatggagttgtatctcaataatgttccctggcatataatcatcatcccctctgaaacagagaataagagcctccattttaatagaatcaacagaatataatctcatatatgttaccatcaaaatcactctttttaaatttttagtactacaaaatgtctaccattgattatcaaaaccgtaaccataagacccaaaagtaacaaaaacaacccccgtactggatgtagctaaaggatcacaaaaaaaaaaaaaaatccctcttcgagtttcgaaagcttaaaatagcataaaaaagagtcatttgagcttgttctaaaccttataaccgctgattaaacccaattgttacgaaaacgaagataatggcgaatactgatcaataacagagaattcggacagacctgacgattttgggtcgcttagagggaggttccttcatcgccgaagactattttgcctggattacaactgtacgagcatcaagattccagcaatggtgattgattttgggagagtggagattgaagtgaaagctagggttttgaaaaaattagatcaaaagggaaagtcggagtgagacagttcccaaatcccaatggagcttgaattggcgccaaaatgagtgttgtgtcgtatgaggtaattataacctgtattgcagcacacggacactttcgcttgtaaccaaccaaaatttgccacgtggaaatataatcttcatgaagaaactgtaacataatattcgagtagaatataaactataaataataaagacaatgaaataccaataacataaaaatgaaataaatatcatccacaaaaagcttaaactctttctatcctcaatctccatatcaaaaacactttaccaagaacaattttgtgtcccacatgtcaaagtccatatcaaaatatctaaaaagctatataacaatctccaacttcattggatcaaaataaagctacaatctttaataccttaccaccttcacttaacatttttctttttgcatggccattattaacacaagtttatgttcttcaccaaaccattctccacacattccaacactctcactctccactattcaaccttccaaatttggcctcaatttggtatcaaatgaggcggtagttgtagctgctgcagctgaggcagtaaccct

SEQ ID NO: 30748 - DNA, 1294 bp, Cannabis sativa
gatgcatcaatacacctttttttttggagagtgcgtagaagcactaatttttattttattatcttaaggaataaaaaaaaaaagcaaaattgatgtggtagttttttattttaaaagtaattatgggtaattttgtctaaaatataagagatcggcctggtcaaggcccaatgttctacttgggcaaggctgtagaggataataggattgggcctgggccgagagtatgaatgggcccagattgaatgattgttgaccggttgttgtctgaaatcaatggctatgaaccgttaaatctcattttttttttaaagaaataaaaataaaaatattttctgagctctgagcagagattaattattttattttatttatccattattattattaggagaaattaaaaaaaaaaaaaaaaaaagggaaagaaagaaagaaaaaaggaaactttctggagaaaattttgattttgagggaaaatatggaagttgaaatggatacaatcgtcttcttccgctaaaaatgacgatcctaaacctatgccgaccttctcgagacgtgtatgatctttcaatggaccgctgctcaagatttctcccctgtctttccgatcccggtaagcttcgagttctctaattaatttttcattttattttctttctaaacttaagttattcttgtttggcttgtaagaaaactgaggaaaagtgtttgcttttgattttgaatttgtggtggtttttggtttcagttcgaagatctgctttgggtttaaaagtttcattggtggtgcttcatttggtatatgcttctattctttttcttattgatcgagatttcatacaaaagactaaaagtgaaccctggtatgttattgtagctcaaattcttggctttactctcaattttgtttaataaagttctaacctttagtaatggatttatagctctaacttgtaccactcttaactctttctttaattttaacttgtgaaagttaagtcattttctttaggttgcaagtaactgtgttattccactagtaattagtaattacacgtgagactaattacactctattttaaaatacattgtttgtttggatgtcacttatgaattcttatttatctaaaaatggtattattgtgtaattagagagtataactgagactcctcaattaacagtgtaattacctggttgaacaaacatgccaaacctcgaaattactttaatttacactcaattctaattacctagtgactttttaaacgcgcccttactgtttctttttcaggt

SEQ ID NO: 30749 - DNA, 3763 bp, Cannabis sativa
tttttcttcatcttctgacagattactacttccattagttaattcttgtgatatatgctttatagcttgtaatttccattggtcagcgattccgtaataaaataaaatgtgagacatgagctctgtggactgaacttcatacaatgtattgtatgaagctgatgtggattgattgcaatagcttgtgtcaattttttgtgggaataagttttctgaagctgattatatttgcacgtgcagggtgctattgatgcagccaatttagaaacacgtatcaaagtggctaacccagaagatccagaacctttaatcaatctctatgtcgaaaaccaggcagaccctacgatgcgacttgtttcagaaatgatgatactctgtggagaagctatagctacttatggttcccgcaatagcattcccttaccatacagagggcagccacaatcagatattgacatgtctgcatttgcacatcttccagaaggacctgttagaagttctgctttggttaaaataatgcgtgcagctgaaatggatttcaggaatcctatccgccatggagttttagggattcctggttatgttcagtttacatctcccattcgtagatatattgatctccttgctcattatcaggttagttccttcttatcatggcggaaagtagaaagctttttaaattgtgtaaacttcattgtcttcaattcagtttattttcttcttgagaaatgacttgcttttttctttttgccattttttgttttccccaaaaaagaactgcaagactaacgagaataaaatggtagcttttgccaccacccccatctgttgaatataatatgtgtgccttgttttgttttgagcagcaaatctgactatcacctagtactagtaagattattagttagaggagagtccagcaattataaagttgtatcatgaatttttttccttcttccagactatctaattacattacatgggaatgctgcacttgcatgacagtaaaacaatatctcttattattgttgtattagttgtaattccttgaagttgctgtatcgtgtattcattaaatttttttgtatgcttgtaacactactcctgaaaacgttggttcatggtgtgttttaaaaaaattatgtgagtttgcaggttaaggcatttcttagaggtgagactcttccttttacacccggtcagctggaaggaatggcctctatcataaacatgaatactagagtagcaagaaggctcagcaacatcagtcttcgatactggattatagaatatcttagaaggcaactgaaatcgagaaaataccatgcattggttcttaagttcattaaggatcgtaatgctgccataatgttaactgaggtaagctatattctttccataaactcttgtagaggttatgtgtggtagtataaaaaagattaaaatctcatatgtatgcatttagtaagataaatatgtgaatcgatgacgggggtaaccaaaatatagagcaatagcaatagaacaatagcaaatattgagaaaaaaaccagcaacatagatgaagaacttagggaaatttgaaaatgaaatggccaaagtaaagtagtacaagattccacaagtttcgagagtctgggtctctccttgatgctgtgtatcaattactaatctcataatacctgtaaattgtcacttactcacctatatatactaaccaattcgctcccaatcactaccctaatacaatgactcatatatcctctcctattaatcttggggtctaaattattggccgatcgaatttcaccttgtcctcaaggtgaaggataatcgcatcaatctctaaactgcctgtatagcatttctgttgtcaaacaaccattttgtggaatagcctcaattaaagggtaacaaattacaaatgaaagaaaaaggccagtaaagagcattccttggctcatcgcacaagtcgcgaaagaacgaatgcactcggagagccgatctttatcaaaaaacccattttagtgatgtcattttcttagccatctccttagaaatcttgggtctgggtcgcaaagaaactcccaaacaaatcaacgttcttcctcgattgaagacccaacactgcacaaatttcttttgtgaaattactgtattatgcttatgatacctgaatgaggaagaatgacatagagaattacgaactaatacaaatatgaagttatacactggttatgtagaattcttgattttccttcgtcaacattaccaacttcgccatccatcctgcaaaagagtcactttcaagtgctctttatcacaatgaatgtccataagctcatttgcaaaatgaacttctccaacacatggatacccctctcaaaggaaaacccagatggtagaaaacagagcacggaaaacttgggtacctctctcaaagcaaaaccccgatggtggagaaacaattgtcgttgctccctgcctattgtaccaatagtgtttgaccacccaacgcctcccggtgtgctgtccaaggatagatctggacgtcgcaagtccattgccgagcttccatggtggtcgatgatctcggaatggagaacatggccgtctgaaagcggtgaggggcctggggtgaaaattaaaacaaggctttttttatataattattttgacacaatgtcggtttatctttaatttagtcagtatttctataaaaatgttaagttcataatgtatcaccatttcttagcactagctttataaaaaataattctttaaaattgtattaaaaagtgtcaaatatatacaaatataaatattttgttctttctctaagaaaaaagtcttccaacaatagctttttgtttatatatttatacaattaatattgatacaaccagtttgatatttaattaactaagaatatttctaataaaatgttaatatattgccattttctcgcactaaagataatttcgtgaattatatgttaaaagttaaatcaaatatataatatgctcttcctaaaaaaaagaaaacattacagagatttgaaccacatatattcacaaactaaaataatttcgtaactatcgtgctaacttacagttaaaattccttacaacaaaaaaacaaaaaaacttacagttaaaattagttcctaactattattgcaaaaaaaaagtgtttctaactattgtaagtttcccagaaaaaaagacaaaaaaaagcaaatctgtcttcgcttaatgttgaactcttcagctcttcaaagcacatttggagatttaccgcttgtgctaattcaattttcatgtacttaggggattacatttttattattctattgcttctacatattatatagacgaacttttatttttagatctccaaaattgtggggcctggggcatagcgccattcgtatgttgttgaagtgcaccaagtagatgaacaaagagatttgagtgaaccttggctggtcttgctagctacgacaagaattacaccactcaacaagtcaacctcaatcaaaaaaccaattgagcaatgtcctttgacctcctggcatcaacaaaacgagttgaggctgaagaagaactttgtgatcagaagcctttggacttggtagccaatctttttcccgtttaagagtgacatcaagtagttcaccactggtataagctatattcatcataaagatacacaattcaaacctggatgccaaatcaaatagtagaggttgagtttgttgccc

SEQ ID NO: 30750 - DNA, 1807 bp, Cannabis sativa
tgtagcaaatatatattatatcaaaagactatatcaatgtattcacttgactaatttttcctcaaaaaatttggcatccaaattagtggcgctcattatatagtatttttaataacaattattcaattaaaatattaaaatattaatggaagagagaaataactatatttcggtaaaaatgaaatttcgtaactatataactaaccaaagtaatactgatcaattggtttctaatatttattttggacaataattctttaaactaataagggaaaatgggtttggtacttaaaaggtcagcaagattgagtttggaggatacatgaagaagcttattgagttgctcatcttgaagtttctcccgaacaatgtgacaatcgatctccatgtgcttcgttcgttcatgaaacatgagattgttcctgagataagaatggtgatgttgtcacagtatagagtagcaagtagccgatgataaataggaaaatccttcgatagagtaatgatccaattaataacctcacaagtagcattagccataagccgatatactgcctctatagaggaacgagatattgtaggttatttctttgatttcccaaacttgagagaatctcctagaaagatgcggtagtcattgactgatctacgagtgtctacacatgtaccccaatcaacatcagaggagactttgagaaagagagaaatgttgttatcagagaggctggaagcagcataagcattgagttgtgatggtgtgttagagtagaaaaataattcttggcctgaagtgccattaatgtattggagcaatctatgagctgcaatgaggtaaggcttttgagcgagacagtcatgaattggttaagtttgttaacaacaaaggaaagatcaggcctaatgattgtaaagtagattaattttcctattatgcttcagtaagtggtaagttaagggaaaatattacatgaatcattgttgagtttgttatttagctccattgaagaaggagtaggtttagcacccaagaagcatgtgtctattagaagctacaaggcaaaaggtcgttgagagactaaaatgccactattagactgagtaaaatttcaaggccaaaaaaataaatttagggggccaagatcatttaattggaacatagagttgaggtgccttttgaaattaattgcagctttataattgttggtggcaatgactaagtcatcaacatatattaaaacgaaaaagaatatatatattatcttggtttttgacaaacagagaatccagaatgtaaaagtgttgtgttatgcaaatcaaggcaaccccataaatacccaaaaaccatacattttccttggcccacgtatgcaaaagaaattagcttggctgaagaacttatgggctagctccaattgacaaatttgagcccattcccactttattttatgaccaaatagacgtatcagatcaagttcataagtgttctcaaccaagaaagaggaagccatgtttgaatctagtctcatttcttcctaggataagtgataatactagggagttttctcaagaacatcttgagccaattgtcttctctccaaaatctaatgtttcttctttcaatattggcttaagagcatcatcatcttcaacaaataaagagaaatgtaggagaatattgggttttgtgtcctaaataaaattaatttcaatataatgatatttactatttaataaaagatcagaaattgttttaatgttgcatggttcagatgatttattttacgattatatgtttaatgtataaatt

SEQ ID NO: 30751 - DNA, 1526 bp, Cannabis sativa
agaaaatggtactattaataaagaaattaaaatgtactaaactctctttctcaagagatttttcttttttttttttcttttcaaaattgtgtacaaataatacaatacaatagagttgtaataatgcccaaattgggacttgtgctagtttttttgaatttcttggatgaattcaataaatgaatgaatatatatgaatttgactctttcttgggttgataatataaaattaaatacattgttacaattcactaatctctcctcctcgacaacttcctacccataaatacattgttgattttttagttgatggtagaaccctacaacaatctcttcttggtgactgttacaggaaaaatattatgttaatattagcagagtatataatcatatggacaatttaggcatcaattataattttgattgggcaattaatcgaataatgtctctaccttgactataatttataacatatatatatatacacatacaaattctctcttgggacaagtgaatttcatcattatgacatattatattaactaaaatcttaattttgttcaagcaataataaatagagtaataatggaaagcaatatactttggctatgtttttatgttaaattttgttgggaaaaggtaataggcaagaaaaaaatagtgtgaaaaagaagttaaatttctaatgttttggtacatggtatggaaaaaattgattcaacaaaattttccataccaacataaaaattgatttttttttttcatcttacatttttcttactcttccaaaatataatttccaaaacgtacctagatttttttttaggaaagggcaaatttgttttccatcttttcaatagcacattacatttcattattattttgaaaaatttaaaataatttattatacgaaaatagattttaaatagtaaattgcaagagtactctaaaaaaaatgaatcacttatacaatgaccatttgaactttggttttaacactataaattatttaaaattaaattgggtaaatattattttggacatgtgttttgtaaaacttactaattggatccactattttgttaaataacaaaatagactctgtatttttcaaaattatacaaatacaatcctgaattgaattttttatcaaaataaaactgattatatttatagtatctatttgtgttaaaaattgttttaaagttagttatattaaaaaaataaaattattgaaaattgaactcagagtcttatttttattattttaaaaaatataggatctcttttatcatttaacaaaacaaagagtctaattgtaacttttgaaaaacacatgatcctatttaccctttaaaattttcaccctacaaaaagaacaaaagctatgtatgtcctatccaactaagaattttgcctatatataaatagatagagtagacaagtaagtgttttgttatcaaaagtaaaaagtagtaaagtaaattagtagtagtgtatatatattaggtaccttttgccaacgt

SEQ ID NO: 30752 - DNA, 1871 bp, Cannabis sativa
tatttgtgttaatacatgttttagattggccacgttaaacatgattcatggtcctaatataaaatctgagaagtgaatattaggaattctctaatagaacaaacataggttttgatgtgaaacgagagtattcatatagcttatgtgacccttagattatttcttaatacaaatcatatgttaatttattttagagatgcagtagataatatatgatttatgaccttaataatttgagaagagttaggattatttttacaatctatcatcacttaaagaaataaaataataaattgcattaataattgggtaactaaaataacaggattcatattcttaatctcccatccatattttttttttgaaatggtctcccatccatatttgaacaacgttaaaagctggatttagattttttttgaaaagtttaaagattttcctttcaaaaattatcttgatttaccaaatagaaatataaatctagtttagtattattcaattttaattctctgtggttcgacctcacctatgtgaatactatttgatacgtacacttgcgtagtttataattttgcgtaacacctctcttagtttggctagctcagaatcacccccaggtccacatggggctcgttaacaccaggttggccaactttatgcctggttttttcagcatatacctaggggcttctcttgttaaaagagccctgtggtactttggacaagttatctaacattgaccgaaacctgctcgatatttattgggcgtttagatcgggaccctgcagatgggtttgcccgaggtggccagacaggattgaccgggttcttaacggtggatggaactcaaaagtggggtccacaaccatcggatcttggggttcagtggactccttattagaaccatggtgattattaggtgaaaaaaggttgggatctttgtgagattttgaacctctcaatgaaagcacaaaaatattaagtgagaaatttgccacctgagtcgaagtctaaataacgccaatcaatcactaataaagagttaagaatagtaagtaaataaaaagagcaccatgagttatagaggttcaggccctttgataatagaaatgacctactcccgtttagttgtattgatattgagataatgtcatgcagatcactaaggaagacaaagtgaattctaactacagctcttaagatacttacagagaatattattcacagaagtgctcttagagtcaagataataattttaggtcccttcccttgtgaactcattaattatatataggggagattgttacaattagctccttaaaggtagcaacaaaaagcaaaaatccctatattctatggtgcagttacaatctatttgaaacttctatacttttgggctgaagagtcggaacccgtatttgcaagatactgttggagatatttgttgagtttgttgaggaagaaaatcgaaccccatttagttctgtccagcctttctgggatcctggccgatgtgttgacaacctgaccaagctctctttgagacttgtctttttgataagaggcaatcttgcaaggcatgttgatcttctttctacctagctatcatcttggtaatgtgaccagatgcttcctaaaaggtaatatacaataaaatgttgatatcaaacttttgtgggaatttctcctgcccagaagtctcacgttatgctaagtgtcagctagatgagaccacatgcaattgctacatcaagtggatacaaattgggataacatgcatgttaatgaaagatattatttcatatcggttcaaccatgtataatcgaattatacatatcacttttactatgtctatccacatatgtgatct

SEQ ID NO: 30753 - DNA, 3799 bp, Cannabis sativa
  modified_base (972)..(977): a, c, t, g, unknown or other
taatcaaatatttgttaatcattaaaacaaggagatctaaaagtttgagttaacagtacttatttccatcatttttcaacagttggcatttctcatagccaattgtttctagccgatgcttattttacctagttttgtgttgatggcatagacctcggttttaggacccaacaataaaagtttactcgactgtttaaaatgattgataaatttccttttttttttagtagtgatatgtggtacttcaagaccaaatgaaaatagcgagatttcacctaaagaatcgaatctcaaccaactccaagaattaatggaacggttgagatatcccctcattcagttcaaattcgatcgaaccctaggtcatgccacctgaagagaggtgcataaacctcttccctatataagaggtcatacctgaccttggcaggggatcaaaaactattttttgtaagtagaaactcgaccacttttactccttgcattcaagaacatttcttaattgcaactcaaatcaataaaacaccaaggggagtagactattactgacactcgttgtcatacttccttgaatattggtatctttaattaacatttattacaatttttgttttaattctcatttattataacttcgcatctgttggctaaaaaccagacattagagtataaataattcaaaaaattttgagaatttataggtgattctaattaactaaaacgtacatgagtatagaaaaaaataaactaaaaagatattctagataccgaaatagataaaagttatcaaaatacctcctcttttaggcagtgtctaataattttttcctatttatgttatttattaaagttagtaaatattttgagaaaatttagaaaaattaattaatttcacttatatatattatttttatgtattgtgtgtatatatatatccattgtgagatttgttgaagccttgttgctccttgnnnnnnttgcaaaatctttgcaagtgtctgaaccttcagtaacatttttgagtttccttttctctagacttcgatcttgattaagagtaatagtgtttattcttcaaacttactttcttaggtgatctccctctttccaaatacttttattccttcttggattccttttccaattgtaattcaaaatcctttgacttaagtgtgggaagaacatcttccaatgcaatcacatctctgccatatttgatgccagccttgacttctagatatgcgattgggagcaatctcaataaaatgatggtatgactttcttcatcaactttatgatttatattagcaaaccctacaataatctcattaaacctgtcaatattatctttaaagaaagagaataaatcattctaaaattatatagcctttctaataaattaatcttgctagtaattgatggcttcatgtagaattcttcaagcttgttctaaatccctttagccgtcctttcctgcgacaagctttctcctcacactattggagagatacatgatgatcgtgtattaagccatctcctttatttttggtttttttgaaccagtaatttctcatctccaagaactttggagactttctggtgcactaggatctctttcaaactttctctcaatagcgcaaagtcccatgttctatcgaatttctccaatttgaatctcgtcattgacaacgttaactatttcttcaagaattgtagcagaaagaatcttgattttgcattcttgatcggttaccaagctctgatttgtaaaggaattacgactaatgtgtagaatcaaattaactaaaacttaatcaacaagcagttagcaatgacaagactaacaattcacactcaatagatggagattaaagtagggaagaatagagtattaaaaaccaaaaatgataaagcgataaaacattaaaattaacaccaagatgaagatatatattggttcaagtcttatagaccaatgtgatctatggctctactccagtcctagaacaccaccaaaatcctctttattgattgaccaagaataaggtacatcaccgttaagatcgattctctattggactctctcaaagtatttatcgcttatactcttatccaaaaatatttttcatttacagaagattcttcatacaaaactcaaactcaaactcaatctgtctcttttctccgtacctctctctctacctattaatcttcctccttctccttctcaatctcaaaaactcctcttgaaactcgatctattcaccatgcttgaaatgataagtgttggtggtatatataggcgtgggatatggatcccaaggtcggtgttgcaagtgttaagttgttaagttagttacgacataaaaaacttaacaaacccttcataacagaatctccacgtcagcttaagttataatgctcctggatgaagcgaacactttcgggactaagaattgaagcacacactaaagggtcttcctagataggagaagcgacagctagagtcgactatttcggactcccttctaggaggaaacaactagccttccaaaactcctttctagagaaagacttgctttcctgaagactttttttgagtggacatagacttctgagaacgcccttctagatgccaactaactttccataactaggacaccttttggggatcttttcatttggagaaactataccactattgttttttacatcactcacttgattatttagggatccaaggagtttcgaagagttaggacttattgaggcgactctttgatggaatatacttctcctaggggtgtacgtcgatcggtttggtcgatttacgttgcattttattcagcctaacgtaaaaattgggttacaataaatctaagtgcacgcgcctaattaagaaaaataaaattttaacccgcctaatgaattggttgatttggtcgggttaacccgcctaaactgagcactaatgtttatttttttcacattcaattgttatattttagttcattgtgataatgacacaaatacataaattgaattcaaagttcaaatcaatcaccatgaaagaaatatagtagtttgaactttctatttttcataaatatgtatataaattatatataatagaaacatatatataaacctcttaatcaggttggtcgggttagttcgggttgattgggcgggttagtattattttcaatccgcccaatataaagattgggcgggttatattttcgtcgagttttttggtttgcattttctgtcgggttatctcgatttagtttggatgggttattcggatcgacgatttacaaaagtttatgtacaaccctacttctccacttttccagtgaagtcttacctttctaaccttttatggttttattttgagcataaaaggaatcagatataatgtttatgctctcaagagttgaaattcaatagataagttataattatcacatcatattaaatacgttcttagcttcattatgcttcttgtttcgataatatatttttttttctttcttttgtagatttgttggtgggacataaacacttttaaagattttttttttttttttttgatattaaagttttattgtctagctttctaggagcatctctttcttttgtaagtcacaatattaatgttgcgatccatagcttggttgccttagtagcgttttggttcggataaataaaaatataggaatagaaatgggaatgggaattggaatatgaatgaaattgaataaaatttaaaatgcataaaaaaattaataaaaaa

SEQ ID NO: 30754 - DNA, 2362 bp, Cannabis sativa
tttttttataattaatattttttgtggaatagtgaattaaatctgggtgtgggtgacgacttgacttgactagtgtgggtgtgggtgtgggtgtgggtgtgggtgagtcggtgatgacgagtccactgaagtgaatacgaataggcaggttgctgatgtttttctttgaaattgaatacaaatgggctgctgaagtgaataataaatagtattactatttacgcgtgaagaatacgaataggcaaaataggcattatagggcctattttttataatgatattaatttaataattaagtaaattattatcccgactacacgggtttttaggagatcggtttttttggcagcgggtcggggcaggtggtcgggtttttcaggtttgcgggtctaaatgtgcagccctaggtcaggagagacctaacttttccaagaatgatattggaaacctttttatttagaagaattataccacataggctgaatattctatttcttaatttaatatatcattaaaatatatttttatagtagaaagataaaaaaaaacataaaatacaattgtcaaaggaaatggattcgagaagattatggattgattaaaaaagtaaaagaaaatacaaaataaaaactccactacagctccatactctctcatagagacacgcatcttaaaagtcaacgaagacctaaccaaaatgaaggaccaggtggtcgatgaagcagcagataactgaagggacatagcaattgttctgtttgggtggtttgttggttcggttagatgactagcttgccgcttgttttggagagtgggttccacgccttatatgtccttcatagttccatgtcccaaccttaatttatttctctctctgtctctacctataaataatcaaatcttgctaccgaaagtggtatgcaccagattactcgaaactttttcaggagaaatcaaaggcaaccaattccaatttcaggcatggcttcaacttcaagcaatgtcaattctactgtaatcaccttctctctctctcactcattattctatgtgtggatatgctaaaatttgtgaaagggagtgagttctcctctaatggctgctctaactttgtgttgggtgagatatgtaattgtgttctccaaggagtttatattgttaagtaagttggtgttattatatagtatggtaatctatgagcagcaccacagggtattattttgacatgcaattattgtgtttgatgatgatataactgtactggcttgtttaaacttttttcaggatgatacaagtgctttatccataaaacctaagaatggcctttccagatcaacttcgcttctgaacattacggaaagcgcagcacagatacttattcaacagaatccagttcagggcactgatgatcacgttgaaaagctctctgaagcttctaccagtaagaatatcaatttttataatgtttaattagtttgaacttaattatgaacacatattcttgtttgcattctggtctccataaagaagaaaatgtttgttccattattctaattcttttttaaagaagataagtttctgcctatatcttatctcattgatttttctggattatgatacaggcttgtcactcccagagcagcatagcaatgataaaaagatagagagcttggcttcccaatcagctgatcaatttgaacagggcagtggaaataatggaaaattgcctgacgtggtggtcaaagataatgatacaagaaaggtgacatccttacactagtgtctcatcttgtaaaatcaattacatggaagcttatgaaaacagagttttatggcctttgtattaagtaattaacatttatgatgcagacagtagagtatcttacttactatactgctacaactttatttttggattttaatagctgaacaggctgtgagtatagaacgatagattaaaaccatagctttctgcaacaggcatcttttaaactgtcatggcgtgtggaaggtgaacagagtgaacaacacaagcatgacattgtctcttttgaaaatgggaatataacaaccacaaggggcagaagtaaccaggtatttgtcattatttgttttagaataataagaaatttttttctcttaattttggacactatctatcctatccctaaaatataatagatttgttaaaaattcttcttaaattataacatttatatattcatgcgcattctattaggttctatttttcagttaaaaattagcacttttactttttaaaatttgaccaatataaaatggatcttatattttctaaaatcgtaaaaatagaatattgagcttaatttttaacaattttatt

SEQ ID NO: 30755 - DNA, 10310 bp, Cannabis sativa
tgttattatatttttaaatatgtttatattttaaattaattattattttttattataaattttaatttaataactaaaatataaaattatttcttaaaataaaataaaataagtatagaatgaaaaaaaaaatagtataaatttaaaatttaatactattaatgataaagatattagtgcataatttagtatactattaagataaaataataccacgaatctacactaatttaataaaataatataccattatagatattcttatactaaacattttaaataatatttaatacgatgtaaacactaaaattagaaaataaataaacacaaaattgctcatgctcattaaactaaattacactccttcaacttaaattttgaatgccgccggtaaccaaaataaaaaaagagagagatgaatggatagaagaagaaaaaaaaaaatttaacaaatacataaaaataacaaaaatacggttttatggaattttaaatttttttacgattttatttacaaaaaatacgggcattttatgttgtactcatattaatttgttgttgattttttgttatctgtttgttattttttgttgttatttaaatattatttttatgtatttttttattattttcgtgttatttttatgaaaaattgtaaaaatataaaaaaaaaaaattataaaaaaaaatagtatcttatctaattatctaaaaaaaaaaaagactacagtgatgctcacacagtcaatggccgacagaactacatttgggcagctgtttcacttggtgggccctcctcctcttgtctcaatgactttgaattctgtccttttaaaataaaaattgaaaatcactgaaattaattgatcaagtccccacataatctcagttggcattgttggaagaaaggcaatgcaataattcatttggaggaattttattatcaactttctattataaacttctttgatacaatcagtgactttgagcacctcaatttataccatgtctactttcttgatccctaaagtcgtttgccttgctttggatggtgcgacgcttttggtggaaggggtctgatgattcgtatcggttcttgaccttggctaattgggagtcgatttgtgttcctaaacggtggggcgatcttaactttaagaagtttgaggaacttaactttgctcttgtgtcaaaacttggttggaacctcgccgctgagaataattccttgtggtgtcaatttttcaaggataagtatttcaggagatccaattccttttggtgcgctcctaagtccaacgcttggtcttttggtggcaaaagcattatgtccactagagagttcatctgggaagagacttgttatgtggtggggaatggtgcttcggtggatatttgccactctccgtggttgcctggttatgcttgggagagttatgtagcttccttaaatccaagagtttgtgagaaaggtgttatggttagttccttagtcactacgggaagcggagtttggaaccatgaggctctcgagaaatggtttatcccaggcattgttaaggatgtgctggctgtccctcggctttctttggaggctaatgatgagcttttttggaaatcggcatcggatggttccttttcggttaaaagggcgtatttggctcgtatacgggaccggtgtctaaatgatgagagcttgtggagtactctttggaagataagggggcatgaaaggattaagatcttcctatgccgcttgctagagatatactcccgtttgggagtaggattcaacgtattttcggtaatagttctcactgtgtgctctgtagttcaggggaggatactcctctccatcttttctttcactgtgatggtgctgtccaggttcggagatctggtccttggggtttctgttcggattccatggtgttttctgataatttggatatgatcaagtggttattgcaactatatggtacccctcttgctgagagggatattgctttgttctctatttatgcgatttctctctgttttgtgttgtggaggactagaaactctaccttccatgatggttcgtgtcccgtggtgtccaagattcagcaggagatctctgtgttggtggctcattggtctttggttgagtctcctatgttggttcggcaggtgaatatgcccaacttcgaagtggtggagttctttcgggatttaccttggagtgatgttaatgtttttgtggatgcggctatccgaggtgagtttgggatagctgctatcattctgttggatcgatcgggcgatgagattgaggctgccacagtaaagaggaaggtatcttcttcgtttgaggcacaattggcagcgattcacttggctgctgcagaattctgcaaattgcttggccgcgagtgtccatcttctcggactgccagttggcggtgaaaggtctctccactggtaagtcgatagattggagggcccgggggctgttcgatactacacttaacctcctcagtcagttgccgaggtgccagctccattggattccccggggtttgaattctggtgcgcatagcttagcagcttgggctgcctccaatagctgctataagttgttttcttcaagggaagtgacaccctttgttgccactatgaacttcggcttttaggcctgttgtttttcaataaagtttctgttagtatcaaaaaaaaaattctattataattttttacctaatttgtatgactaaaactatataccaaaatattttagtcaacattctagtgtggaaaataattttaaaactttgtaaacactcgtaataaattaaaatatcaagaactttatttttaataatacaaattattcaaaaaaatttaaaaatttacaagaatagtattctaactataataaatatcattatgaaatttttaaattaaaatatttcaacatgtaatttgaaacacaaaaattaactaaaatattataataaaaagttataattagcatttttcatcttactatatacaccagtctctatctctattatctctatgagtctctagtgttgttaatttgttataacattcattgtgagccatatatccaatgaatgactggagtggattacatttcatatgttcaattattctccacaaaaaagaagacaaattgttctgctcctcagatctcatctcttgtatatttaataatttaaccatgcatatatgtttttgatgttgacttatttcactgcttttaaacacaaatgtcttttgtttttcaattttaacataaaatattttcttctcttctctcactattatatttttgggttttcttaattctaatatttatgggcttttttatttatttaattagcgtgaatagaggttatgtacattccccatcccattccacagtggtgtcagtccaaattaatcacatttattaaactaaaaactgtcaatagcaaatacccccctgacttcgtacgatttgtacttgtgtaccattatggagggggccaattataccactgctagtgcaagtaggcacaaacataaactgaaaatattggtcaaattcaataataatctgagagacagagagagagcatttattatttagtttctatttctttccttcttacacttctgagtgttaagccaaaaaataataagaatcccactcagtagtattattcacccatcagcgtctttcatcagtatccttcatttcactctctctcgtaccaaaaaattaaaataagaaaaagccgtagattccccatttcccacgtaaaccacttaaccgtcaaaatccgccgcttcaaatctacgattttcccgagaaaataatgaaataaagaaagaaagtgaaattttacttttttttatttttttataataacaatctcagggagttccatatcttcacgcacacgataaaagcagagggattataataaatatgtgtatattataatatcgctattgtaattgtgaagtgtatagctagtgtgcagtgcagacaccttaaaagattccggcggcgggtgattttcggtcaccgtcatggattcaggcggcgcaactcaggtcaccaccgccggcggggttcagatccggcaaactagaaggttgccggattttctacagagcgtgaatctcaagtacgtgaaattagggtaccattatctaatctcgaatctgttgactctgtgtttcattcctttgatttttgtaaccctaattgaggcttcgcaaatggatctgggtgatttgcggcatctgtggcttcaccttcagtataatctggtcagcgtcattatatgctctgctttcatggtttttggtttcactgtctatattatgtctcgtcccagaccgatttatctcgttgactattcctgttatcgtgcacctgatcatctcaaggctccctataaccggttcttggaacattcacgtctcaccggagactttgacgaatcgtctcttgagtttcagcgcaagattttggagcgttcaggcctaggggaggagacttatgtccctgaagcgatgcacttcattccgccaaggccttccatggccgcagctagagaggaggccgaacaggtcatgtatggtgccttggataatctctttgccaataccaatgttaagcctaagaatattggcattcttgttgtaaactgtagcttgtttaatcccacgccttctctttccgctatgattgtgaacaagtacaagttgaggggtaatataagaagttttaaccttggaggaatgggctgtagtgctggggttatagctattgatcttgccaaggacttgttgcaggttcataggaatacttatgccgttgttgtgagtactgaaaatattactcagaactggtattttgggaacaagaaatcaatgttgatacccaattgcttgtttcgagtagggggttcagcggttttgctttctaacaagtctgtcgataggaggcgagctaagtacaggcttgttcatgttgtcaggacccatcggggtgcagacgataaggctttccgatgtgtttatcaggaacaggatgatgctgggaagaccggggtttccctgtccaaagatttgatggcaatagctggaggagctcttaagacaaacattaccactttaggccctcttgtgctccccattagtgagcagcttcttttctttgtgacccttctggttaagaagttactaaactcgagtatgaagccatacattcctgatttcaagttggcatttgaccatttctgtattcatgctggaggaagggctgtgattgatgagctagagaagaacttgcagcttttgtcaatacatgtagaggcttctaggatggctcttcaccgatttggaaacacttcatcaagctccatttggtatgagttggcctatatagaagctaagggaagaatgcgaaagggcaatcgggtgtggcagattgcatttgggagtggtttcaaatgtaatagtgcggtctgggaagcgcttcagagagtgaagccttctcgaaatggtccgtgggaagattgcattgacaagtatcctgtgaagacggagttatgattttggttaattccattcaggttaccactcgtcactactatcttttgctatgttagccctttgatgttgggtttttaatttgatactaaatgtgattcatgttttttcacccttagattctccctacgtataatatcataatacccacattatcatttcagggtgctatgatgtttagaactgttgatttcgtactgagatcatgttgcctagttgtcatttgctactttcttttcttttgtttcttcttctgtgtaatatgtcaatgataaactggtatcagaagtccttagccttctcttttgtacgactttagtattttttttacatttgatcacgcttgatatgaactcaaaactattttgttgagcttacacctgtgaattgtgatgaacttctgttagattctagggatattctttttttattacgaaaaggtagagtgaaatttctgctgtatatctgccaggaaagaaaattaactggcagtatatgcaacaaattacatatacatagtggacctcctttttctgtttctaccttcgttggctttatctgttatgacctatacaaaatgtcctcgcagaccaacttttaaaacttgtggtgagcattattatttgttttctcaaatcctttcatcacacaattattgtttttgtattgtgctgcgattcagtcttattaaaaaagttggtttggaaagttagttcccttttcatctgtttgtgtttaaaatgtcaaaaatctcccaaggaaagcaagtatttatttaccaaggcgtaatcatgaatgatgttttcactggcattagttctccctgttagtgttgtaaattcatgtgtgacgtgatagtcccccttatattttttggtatagaaaaatatgatgccaacatttaaaggataggccccctatgattcggtattttcgtgttgtacttttctatatttttttacaattattaataagctaattactaaattatatgtatttcttaaaatttcaattatttttatataattttacagaatgataaaaaaaattattagaactattaaaattttaatatttaaatattaattctcaaagttttaaaattctacaaataaaataatataagttttaattttacatttttttaataattttaattataaaattataatattcagttatattaagatttattattattttaattcatttataattgacattattattatagggctttttaatgtgttgtacatgcctttccaaacttgtcatgtcctgcctttcgagtttgtcgtgttgtatcgtgttttgaccgtgtttgtgctgatttcgtacatgtcaaaaaatctgacccgcatttagagcactactccctctgtaaaagagtatccatttgatgcctaccggtctatttttatgaagctacctaactctttcttttattatgtaattgtagtcacctaccaaactctttctttcccctcgttttactagtgttttttttatcagaattatttttggtttttgcaaccaaaaagaaaaaggaattattttggtggaactaaagaaaacacgtgtaatttgacgtgattctatctttaaagttgtgttaagcataaccgtctactgcattttaaaatagtagatcagtactatgaacatgcataccactaccctcaaaacatgcgtaccacctccagaccaaccattccaatttaagatttagctgtttgacctctgtattgtgaccgctgtttggccttttcttttgatcttatttgtgtagatgaatgaataaaaatgctttgaacaagattgaattaatggacagtatcttttttcacacattattattataaccggaacaataataaatacggaccaacccgttggtgactgaagaagacgccggtagaatgactggcttctctccaaatcaggaagagaaggaaaagggaaggaatcctcctctatctaaaggaagactgaatctcttccaaagttcttccttttgtctcagggaccaatttcgccacaaatatcacagtgaaagcactcactatcatgtaaatggtaaaggttcctgttgaagccagcaacatctttttaacgtattgaacacaaaaatgggcagatacaatgagacactataacgcggacaagaatggtgttccacgcagtagtcaaattcagatataaatatatataaataaatattcgtatagagtgacacacctccactactccagttcaggagcaaatttgcagtcatggtgaccacccaggcagtgaaccagttggcaagagttgctacacttccagctagactttttatattgactggaagaatctgtgttgcccaaaaaaatgaagcccattaatagctgcaataacttgcaagattatgttcttatagctaggaacagttgtcaaaagttttacaataacacagggagaaaaagtgaccaggaatttatacctcagacattataatccatggaattgctccaacacccaacgagaaggcaactaccattgcctgaaacacaaatgaaagtgccattgtaaagacattttgaaaagacccaaataagaaatgctccctaaattgtgataaaatatatacataccacgaccccaaccacagataggatgctcattgtgctatacaaaccagaatcgctcgatacagcatcctgtaaacagttaaatggaaaaacaaaaatttagatacacaagttaactgtccgaacaaatatttcaagaaacaattaggttacctttagatagaatgctactgctacgacaaggaggctaagtgtcattccagcagaggaaacctgtaataagaagtttaaaacttgtcatttgcacttcccaaaatagatacaaacaaatgattacattatgcagaactccaactcacaataaggagaagcctacggcctgccttgtccaccaaccatgtagtcacaagagtagccaatacctaattgtgcatacaaaatcctagttatgattgtgcaagtgcaacaattgcatggagcgaaacactcagattactctctagttttacctgaatagccccaagaccaaatgttgctgcattacctgatttcacccctgttcaaataatggtgcctataagaaccattttgaagtaaaaatctaagttcacaacaatacaagggatgcatatcccaaaatgggcatattttttcaaagtatggatgtaaggatttaagctcaccagcagcttcaaaaatggtacttgaatagaatagaacaccgttgattccactaatctgctgaagcacaagtaatccaattccaatctgagagatgcataaaagaagttaggttcaaatgaatgaacttgtatcgtatgaaaattcaggtcacaacacgagcacatagaaaaatcaatcttctggaaaagagttaaaaccgtgagaggcatatagtatcgtctttgcttgagttctgcaaaattaattgttgaccttttgcttgatgatgctacagatctctacacaaatatgaaaccaacagttgatttcaggttagatgaaatgcaagcattataatgcataatgctgagcttcctcaaggaaattgaatgtatgaaagggttgcaaccttgatgtcatttacttcagctgaaatatcagcatcaaaaccgcgaagaacttgcaaagagacctcgaaatcatctgtcttgcccatttttgcctggatttaggtccaaaagaatgcacagttaaaacaaaatcaacatatctaatcatgattgactgaaaagccataattcaatgcaacttacaagccaccgaggagattctggaataaagaacagtccaggaatcagtattatgcaaggcagtgctcctgcaaaaagagaaattgttgaacagttccctcaactttgaaaagccttttgtttgtttgtttggtttttttactaaaaggcacttattttatgacttaaaaggcttcatcaaaagttgatcactaaaatcttttcttttgattatactgaagttgattaagttgtttagattatagtgaattttagcagcgagccttccctcttaatataattttcaataaatgattgtttctttgatttaaggattacccaaaactgccagtattctccacggaacaaaaagtcccaacaaataagccagcattatgcccgcagtgacagatagctatattaagaggggaagggaagaagaacaaaaaactcagtaatgatacatcataaaactataagactaaaaaattatgaaatacacaagtaagagtaagatcattgaacctggtttactgaacccagactgcctcttaagttttgaggtgatatctcagctatatatacaggtacctgcaaaagccaaagttattgagaagatagtgttatttacaagcacaaatccaaattgccaaagacaccaacttgttgaagcaaaaacctaccacgtacgagattatccccacaccaaacccttccaacaaccttcccatgtagagaaatgaagaatcctacaaaaagcaatgaacacaaataaaaatataaacgttcctaaccacattttgcatttgtatgcagttggtgcaaaaaaaaaaaaaaaagggatagcttttcaaacccactttggcaaatgatatgtcaagccatccgattatgttag

SEQ ID NO: 30756 - DNA, 1840 bp, Cannabis sativa
ttggttggagtgatttatatggctgaataggaacttaagtatatttgaaagaaaatgtttatcaatttaatatccttggttagcaatattttttattttataattttaattaagataacataagtagaactcaatatcgctacaataggtgttagaatttggaataagatgaatgaggtccatctcaaaactaattagcaatggaaggaatgactcattcattttatacatgacaatttattttcacacattagcaatttgagattaactctaatgataggtaagtaagaaattaatataacgtagtattgcccttaaatttatgtatatatgtaatgcatcctttggtagtagggaacttttctgacttatcaatcatgaaaaattattattttgttctctattaaaactccaataataataaaagtcgtatgtcatttcatttttcattaccaaacatccaaagaaagaaaaaaatcattttagtttcttgttctcaaagccttatctgtttacaccaaacttgtttgttgatgaatgtattgggagtgagtatagagaatagagtaggcgtgcaaccaccaaagcattacaactcaaacccacgtgaatccaataactccattgtctctgacagccaaacttgagtccgactctttagcctagctaacttctaaacccaatccaatatactactaataatgccagctcaaacttcaccatattaatgccactaaagcctaaacacaaatctctctctctctctttctctccatcacataattaatatatttactctttttatatattttccttaccaatttttaattataattaattgtctacgtatgagtcgtaccatacattatttacattaaaatatatttgaatcttcacataaaagctttgtttggatgtacaagtagtatctacttcccaacaatctctgctgtttttcttcaagcttcaaacttggtcccaagaggaggagcagagccagaagaagaagaaggtcagtatagcttgaacaaaatctctgttacattacacaattctcctttttatctttcgaatatctgttactagttgaatcagttgtgtttttcacttgttttgttgtgattgtaatgagtaattatttttgtaatgttattatttactaataatatgatgggtggcagggttaagaatgggccggggagtcagtgctggtggaggacaaagctctttgggctatctatttggaagtggagagcctgctaaaaaagcccaaacctctcaaaacccaggcccagttacagtcccaaacaatgcatctcctcaaaaaactgtggttgttgcttcaaagcctaagataattgacaaggaaatcccagcaggaattcatggcaacactaccaacaattatttcagggctgatggccagaactgtggaaattttataacagtaaatttttcctctcacaatttctttgttttactttagctgataataagattgacacatatacccaacaaaaaaagaaaaaaaaaatacagtacatattcattttcagaagtttttatatattagcttggaattgattaaaggtttgggtttcaattttgtgatttcaattgtattttatggttaattatgaaaaagtgcatgatatatattagtgatataaggatttttaaatatttttacaaattataattaattattttacgaatttatattctgtaaaaacaaaccgtccataattatttttgtaaaaatatttaagaaatagcacatctgtccttgaaaaaaaatctccttactatataatgacaatatgacaacaatagtttttct

SEQ ID NO: 30757 - DNA, 1640 bp, Cannabis sativa
actaaggctatgcaaatacttttgcttcacatcaaagcctagtttatccaattttagcattctcaattctcatttttcagattttgaattaggatatgcaaaaggtgatcaatcttaaacatgtaattaatacaaatatggataaattcacaatcaagaaaagagaaatagcaattattattaaccaaaaataatatcaatcgacattcatcatctccccaaataggagtttagttcataatctccatagtcaaatccataattaaaattgaaataaaaaataacatagaaaaattaagagagaattgaaaagaactagttgaagaaatcgatccgggtcgtcacaagctagccgctcttgaagtcttctcctttgtttctagggctccccttatgaataatcatcaaaaaacatgaactcctttctaattgagccaagttttttctttaaaattcgtgaaattacaaaattacccaaaaacttgtcaggaaggcttcgtcgagacgaagcattttgcctgtcgcgatggctaaagcatcaacaaaaggagaaaactgtttaccaactcccgtctcccgtcgcaatgggcttcgacagaaaatttctttgtacattttttctcaactttttcatttcttgtcctctattcttgtgaatacttcctttaaacatttgaggacctgaaaccaaaaaatcaaacgtaaaatagcccaaaaactaaaaacaaaaatcgaaaactatccgataatacgacctaaaacttagactaaaattaacctaacaaatttgcatataaccctaacctattatatttatatctcttttttcttaatcacacacgatgctcaaacttctttctcaagcataaatgattctattttctaattttctaaccttttcttcatgcatacatgattattttattcaataattataaatatataatatatgtagattatatattttatgagaacaatttactatttgttcaaataaaaatctatcataatcataagtaatcgaacattagcaatacatgttcaaaacaatattattcttaaccacatatatacctatactcttcgaaaatatatatcttaaaaaaatatattgcaaaaaaaagtgatatgatatatattaaatatttttaatatttagttagagtttctaattctaaaagtggtattaaacacatcaaatgataattttattttttttttgtatttttgatgatgtatgattaaggaattattataatttttgttagatcttaaaaatgtgttaataaaaatatttgaacttcaagatggaatctaagattaagattgagaattaggaaggaaaatagtgacaactacaagtgagatataatgattacaataagtgagatacggtgataaaacgtgaaatacagtaataacaacgtacgagagatacaatgatgacaacaaatttgaatgaatgagatataaaaatagtgtattatgagaaagattgcttatcaattcttattatttctcaataatttatttgatatatgtaatttaaaatatgttaaacatcctctggaaagtgcggtttgtttactagttttataaatagaggccatattatgtacttgtgagagatatagttgaaa

SEQ ID NO: 30758 - DNA, 2117 bp, Cannabis sativa
tttcttttttggtgttcttcttcttccttcgtttctttgattgttcatggcgcaagaagaaaaaactcaaactcgaagcactcgagacgacaatgattcaaatcagttctctgttcttggtgagaattcgaagtcgacgaatgcgaacgatctttcaaatccttattttctgtcaaacggtgacaatcctggagctgttttagttccaaagattctcacaggaagtgagaattatagtacatggaggagatcgatgatgattgctctagttgctcgaaacaagatcaagtttgtgaatggaaaattgcctcaacctgatgaagatcaagaggagtatgatgcttggtgcagatgcaatagcacagtgatctcctggattcttcatgccatatcaagtgaaatcgcagacagcatcatgtaccatgagaatgttgctgagatttgggaagaactacatgatcgattttatgaaagaaatgccccaaggatttttgaagctaaaaagactatgcagaatttaatacaaggttccaattctgtcacaacttatttcacacgcctcaagtctctttgggatcagattagagaatatagaccacaacctgtttgtagtctctttttgattccttatttcattgctctatttgtcattatgccaaacaaagaaagctaccatttatttctaatcataacatttccaagaaatgttttgatctcatacatgttgatatttggggacctttcaatactttaaccacagaaggttataagtatttcattaccatagtagatgattgctctaggtatacttggattcacctcattaagcaaaaatctgatgctcaaattgttatcccacagttcataaaattgattcagaatcagtttaatgttaccattaaagctcttaggtctgataatgccaaagagctacaattcaatgaatttttcagtgaacttgggatcattcattatcattcttgtgtccaaaggccacaacaaaattccgttgtggaaagaaaacatcagcatttactcaatgttgctagagcccttttatttcaatcctacatacctttggtttattggtaagagtgtgttgctactgcagcatacttgattaacagaacaccaacaccaaatttaaagaacaaaacaccttttgacatccttcacaataaacctcctacatatgagcatctcaaagcattcgggtgtctagcttatgcatctacattgagtcaaaatagatcaaagttttctcctaggtcagcaccttgcatttttttgggatatcccacagggatgaaagcttacaaattgcttgatttgaacactaataaagtttttaattccagggatgtttatttttatgagcacatcttcccttttgtgcatactggcagtgtttctcctagttatgaatcttttttttttgctattcccagtaccaatactgaacccgattcatcttcctcactgaattcatctcctattcctcaaaatactaaacctgattcatctattcctcataccagaacagggagacaacttactaagccatcatatctgaatgactaccattgttatttggccactcacccttctgttttttcttcacagggttctcaagttacatctcaccctttgtctgaagttattgcttatcacaggttatcaccgagattcagagctactgtgctcactatttctagccttttttagcctgaatttttcagtcaagctcatggtatacctgaatgggacaatgccatggacaatgagattgatgctcttgaaaagaatcatacatggattgtggttactttacccgaggatcaacatgttattgggtgcaaatgggtgtataaaattaaactcaatgctgatgggagtgttgaaagatttaaggcaagacttgttgccaaaggttataatcagcaagagggggtggattatactgacacatttgcaccagtcaccaaattggttactgtcaaattagttttggctttggctgccatgaaaggatggcatttacatcaacttgatgtaaataatgcctttctacatggtgacttacatgaagaagtgtatatgtctctacctcaagggta

SEQ ID NO: 30759 - DNA, 6567 bp, Cannabis sativa
aattagatattaaacgtcattttcataatttagaaccaaattaaggtagtatatgtaaaaattctaaaattaattaataattataattaaaattattttttgaaaaaattaaatttacgtagtattttataagaaaataaaatataataaaaaataaaaagagattaattaatatcaagttataggtaatatgttaaatatttttaattagtttcttaatcaatctcagtcaatagtaatctaatagctaaaattataaccattataattagagttttgacgtaatcattaagtaattatagtttaatattcataaagcatatagatagcaattatatggtggtctcattgagtgggttaagcagttgaatttattcttaaaatcacactaaatataacatttatctaagaactaaaaccctatcataccctatcatagaatataaagtatcaaacttaaatagaatctgttctctttacttttttcttttttcggtaagaaaaatcttgttataaaattaagtttttattgtaattgttaattagcttctaaagatcaaagttactaaaagagaaatgaaaggaaaccagctatgatgtttgaaggtattagattttactattattactctgatctcctccacaaaaagcccaaagatttatacaagcctaatagaatacaatgtctttgggagtgccctgacatagctcttaaaatatcaagtacataattcatgaccaaagacagaaaacattatatgtttacgatgccgcgccgcaccttgtaacaacggttaaacctgtcacgatgacctttggtaatagtacctgaaaagtttgcaagaaatcagttttcactgaccccgtgtaagcacctaagaaagacaataaagagacatacacaaagatttttatgccgtaaatggatgcatattttcgaagaagacgttcaatggtgtaccactcagaacgatctgatccagcttggtaaccaattcgtggcatgtgtattgaagcttgtaaatggaatcagcaaacacaagtgtaagactatttccaacacaaaggagaagagtatatacaatcctataaatatatttgatattaattaaagcacgcagcaaagattaccagagttttgtgctgccgtaaaggatgcctttgataagcaacattccagatccgggatagatatcttactacgaggtacttttcgcctaggattgtaagactgtacaacggctaaacccacccatagagaagtattaccatctgtattctggcgagtattctgttcatcagaattctctggataacaacatttttttataagaaaaaggaacatgtaacggtttccaatcgttgaacctaaaacgatttacatgtcaatactctacaataaataaacagttatagaagaaaaataatattaagagggatattgcttatctttgacaaaaatatggtgaaactccactgtcaaacgtagcagagcagactgtgttaatgaccatgcgaaccatataactacatatataatggtgttggatatgtgccttaaagtgtacatctctgtgcaaatattatttataactttaatagttgtatttcatttattaaatacagtgaggactttattttaacaagattacaaacaagcatggtctgtataaatatggtgagccctttaggcttatcaatacccaccgcccaccaaaaaccttgattttgtcctcaaggtgaaattaagaaacagttcagaaatggtgtgaaagtcttcccaagtagcgtgttcatcaaatcaaatggctcacaccgcataaaaatgcggtttaaaattattcgcagtgcggttgtggtttgtatttttttctctaaaccgcacagtgcgatacggtgtgcggttttgaattctataaaagcaatttaaaccgcaccgtgctattacaaaaataactatttttttaagtataatttttaaattagtcttaatctatgtatatatatacatatgcaagatttaggtgataaagatttattaaattatttgaataaaatgatattataaataaatgttgctcaagagttatatgggagcaggttcaagtctggactgcaacactggtttcaaaaccttggctatggggatatatcatatagacatagatcttaatgtagcaggtccagtgctgaaggaacaattactgtattatcaaggtttttctccatcagcatagaaatcctcatatctacctctctagtgcaaatcaaaatttggaatgcgattggtgagaagaattgcaagcttttggtggtgctctagtcattatagttggagtgtgcatgagaaaattctattctagtcattatagttattattattattttgcacaaatttttgcttccactggactcacacaatagttgtccattatttcttaggattgatgaacaaatttgcatagcactcaataattaatgtcatgaaaaagtatggccttataaagcagtagaacgaggatgcaaaagcttaccattcactcttatgagatgaagatcaccaagatgtaggtccttaaattcagaagctcggctataagcctctggtattcttgtagacagtttagtcagtgcatcaaacattcctccacgtccccaatttccagaatcatcaacacagctatgacatcaagatatatatcacatctcttgttaaataaagtcactccatttccaataagaaattttttagagcagtcatactaacctgaatataatggcaggctcagatggacaagtatcataaggattagtacaatctccataaacaaagtgaacagagcccaattctaacatcgaatcatcatccgaagggataacagggtctttgatagacagcgagtgatagccaagggtttcccatttcaacaatttcttctcatcagcctttttctttgcagcctcaagtttagcacgtttactctcatctaaatctcttcttcttcccaaatcaatgatttggtctccacttgtttgtgatgcctccttaaatttttcaacccacaagaggtatgatgcctcatcaaaaccagaatcagaactcaaagatacagcttcttgttgttgagaagaaagacatcccttcaacatatctgtcggattaacttcaaatttcctgccatcattaccagcaacttgttcatgacgcattgcaactaccctctcaaccattgttttcaactttgagctttgtaattcctcaatattgtcattgctagtctcatcaggatcaaatatacctaacccatatatgacagaacgcaaatcacctccttcaactcctgcagattctttattttcttcgttttcaacatcatctcccacaacattatggctaagctgcaatttcctttctgctctccgcataatgacctacattaattcatgtgaaacagaaagttgtacaaatgcctttgatgatagtgattgatgtctaatttctcacctcttccacagtacgttcagtaaccagactaatagacaacacagggctcatttgaccaatacggtgagctctctgcaaagcctgcttgtcaacctgaggattccagtctagctcgtagaaaatgacctagtttatagatgcatggaaatataataagagaactttttacatttgaagtcttcacagcttactagtcgccaggagaaaaatgacccagtttctataaatgcatgaaatataataagaaaactacatttgaacctccagtttattaggtgaagtaacttttacgagtcaccaggaaaaaatgaaaataataaatgtaaaaacgcctcctctgagagctcacctttgtgactaagaaaaattcatcacaaaactataacttgatacttacagtatcagcagctacaagattcaaaccaactcccccagccctagtagaaatcagaaatacgaaagcaccattttcttcagcttgtgaactcaaactaccttcagctgattgtctactgaaacttcttatagcagcaaaccgctcctcagctcgaatcgatccatcaagacgctcataagaatatcttcgtaactccaaaaaatcctgcgttggatataaataaacatttttcacaacatattgaatgaagacttgcatcagttaatagcgtaaatgttgttatattctattgatacaaaacctgtagaatgtccagtgtatgagtcatctgagcaaaaagaagaacacgatgtcccgaatcatgtagcttgtgaagtagctggtccaaaataataagttttccactggcctggatagaaagtcagaaacaaataaagaacacaattggaaagacagttacaagagtgaaatacaacttagtcaactgtgtcttcactttagaagagatttccttccgtgaatttttattattagtagctgttagatttgaatagcacataatttctctcaaatagatcattataatttatgcaatcacataagatatagaaggtgccttacacataagatatagaaggtaccttaacaaggtgttcaccttcttcatatggttcaggttcaatgccagggaataggtacggatggctacaagtttttcgtaactgcattacctgtaatgcaagtagcagcattcactattagaagggaggtatagctcttcagaaaatcattctgcaaatggaacctgatagctgttctgaaaagcaatctgtaaatggaaacctgagctacaatgaagtaccaacatattggtgatttattgttatttgtgacacaggcaacttggaggccctcatataattaatgccaaaacttgctcaacaaaaggttacattatttctttctatgcaatataatatgtgtgtgtgtgtgaaataagttcactataaaatttattgtacgcataaagtcccagtatctgtttgctaccccctacctgggggtgggtagcaaacccccttgtacaatgactcaaaatataggcaagcacctaaaaagccaagtaaattctgtacggccgccaggagattggtaccttgacagggaatggaatccttcattcatataaatgggtccccctgtttttaagggttctgaatgcatttaacggacaaaagataatagttttcaaaatagaaatttagaagaataattttagtaaggaaaatatagatataagtgaacacaagagtagctgttaaaaatggtctttaaagggaaggacaagaatgacatacagtattctgtaaggactggtaatttgaggttccagatgaaaatgcaagaagtttagggagctctctcctcaaaattgacacgtacactttcttttgcaggctgactagcggtgccatcctaaagacaaatatcttagcattgaatcatgcaaatgctctcagaactcgagagtatatgacagtgtgaagatggattacaacttacatagttatctcagtaagtggtggtaggactaaatttccacactcaataagtcttgattttgtacgtcgaagcatgaaagttcccactatgctttttaaaatttttaactgctccttgactatagactgatcattccctgtttcaaaataataatgtgacatccatagaaataacttcccaaatccaatgcctgaacaaaatcttaagcagaaagaaaaaaaatacatctcttgcagagtttaagttatacctgagggatttgcagcttccttgaatgcaaaaaggaattggtccaacttcccaaagactgaaggcatacaaaagtgcatcaaagaccaaagttcagttagattgttttgaataggtgtgccagtcatcaatagtcgtcttggcatcagaaaacgctctttcaggacattatacaaaacctaataagatggaaacaagtcaaccaacataataattactaacagacatacaaaaggtacaaactactaaatatggaaatacaaggtcagaaaaaaccctcttaattaacgtccatgcctgttctatgaaattttgatgtgtattttcatgcaaaacaggaaataaatctaaccgtactgtatattgtatccaagatgatatgcattctacaactagtgtcacaagtcaataaattaatgcactagatgcatttatgagagtcggcagatttagggtaatgtttttctgttattatatttctaatacatagcagtgtatataacatgtaccataatcctataaagagaaacaaatcaaataataaagatacaataaatctttaaactaatttcctaaaaaaatggtacaataaaaacataattattatacacctataatgtataataataataataattaaaaaagctgattttccaacactccccttcaagctggactaaaaatgttctccataaccagcttgctagtaagaaaatcaaattgtttcttacacaatccttttgtgaaaatatctgccacctaatcttcactaaaaacataaggcatacacacttgaccgctctcaattttctccttaataaaatatttaatctacttcaacatgctttgtgcg

SEQ ID NO: 30760 - DNA, 3612 bp, Cannabis sativa
  modified_base (2823)..(2824): a, c, t, g, unknown or other
tggtaaaataattccaacagtacaccctcaggctaatggacaagttgaggcagcaaataagataatcaaaaggatcctcatgccaaagttggacaagctgaagggtagattggtagatgagcttcctaatgtgctctaggcatacaggactaggcctcgctccaccataggtgaaactcctttctacttgacatatgggtgcaaagttgtactccccattgagatgaaactcaactcattttggatgaagaatgtcaatgaagcagcaaatgagaaggtaattgtggaaagtttggatcacttggaggaaaaaatagatgtagcccaaatgaggttggcagtgtattcgccaagggcacctactataattcaagagtttgcatgcatgccttcaggaccaaagacttggtgctaaggaaggtcctctcgttcactagggacccgagggcaagaatgttgggaaccaattgggaagacccctatcagattgctaaggcaatctcgccaaaaacctacaaattagctcgcatgaatgacacggtgataccaaaggcatggaatgcaaagcacttaaagaagtactattgttgaagaggagtgcgggaagtatcctttgtttatttaagctgttaagaatcaaggaggtagcccatgaggcaaccccattagtttcatttctttctattttttctatttgaaatttcaatgtaatgtaccaataggccacccagatggccttaagtttcctctttggaatgaatgaatattgcattgagattattctatcatacctggtcacgtatttttaaagtaatatccttcttccttgtaaaaaaaagaaagtagtagaaggaaattgggagtaaaactcaaatgtatagtgccatgaatgacgctacacattagggggcaaggggggagaaagtaaaaaaaaaaacttttctcaaatagaaaaaggactagctaatcttggcagacaaaagaaatacacttctccccacaaaagttgcctagccaaaagagatcttgaaagacactcatggcattatgctagaaagagagggatgcctttcaagcataaataagcattcacaagcacacgcaatagtgaaagtaccaattaaaaggttgacacacgttcaagtaacaatatcctcccttacatctgaataaaaggataagtaaataggaagaggtcaagactgctcaaagagtcaatgctctcccaaacaaaaaacctgcttaccagagtagggaccttacaagatcacacacacaaaaaaaaaacaaagtagaggtatcagagacacgagaaataaaagataaagccttacagttatctaaaattcaaaatcataaattaaagtgaagttcgaagctcctggtgtatccgcatagaaaagaggtcactagttccactgcctgaagggttagtatcccaacgattcttgccttcacgtgatgccattccatcaccacatttagctttaaaatcctcaacaatttgaaccacaagggggcccaaaacgctgtagtcgacctcaggatttttcacccaattagcatgaagcagacactcaatcttgtcctcttcttcctccttgtgctttgatcttaagataacaaggcaatgacacatttggtcaatctagggtctaagttttttcagatgcacttgtgactttgcaaattacttctaagtttttgagtcagactttacattgtgggttgcatcccatcctcatcagcttgaaaacgatccacattcgcttagagttcatcgcgttgggtgttggactaggccaagtcatctagaggcttttgaaggtgggaaaaatccccctcacaagatgagctagagcttggagtacattgttgtagaacagaagcgtacaagacaaaaattgaagtcaataatttctcaacaaagtgttaaaatgcaatggcaatatatacaaatccatatgctacacttgagagttgcctcttagcgatcctccactgaagattgttgtagccaattcaattcacagggagtatactcctcgaggtgcctattgtacccgctggaaaattggctcattagagattgagatcaggctaacttgttaggaccaaactgtggctaaaggaaatcttcagcagagccgtacgaaatttggaaaaggtgctgagcattgaaagtctcaaaagaaatgttggaggtataacttgaaccccctaaatctatctcgtcacacgaatgacctttagggtcggcacctgaagatagagtataccgcttggggtcctgcatttcaacatcccaagctagattagtagaattgacaaattcaggctccgcaacataactttctcccttataatgagtgatagaggaagtatgttgagatctcaaagtaagttgagctggacatccccaggcaagatgtgacttccctacgcttgcacctatagttgctgaggatttggctcgaagataggattttcttgcatttggaaagcaatgatcaacccacctttaacgtcaaagaattaaaagcacgaggcctggctttctttgacttgatagggtgtcttggaccaaaaccaacaacaagaacaatccctttgtgtagaacagttgcgacttatataaaaccaggatcccattttacaaaatatttacaaaagtttcatagtgcataatacaaaagttgtcacctagcgactatacaaaataagcttagctgtcccaaagaccgtacgctccaggcataaccgccccgacatgtacaatcttcatctgctcgctctcacggctgctcaaccttagccttgccnntacctacacatgcaaacaatatatgtgagtcaacagactcagtaagaaaagaataaataatatcatagcaataacccggattatgatcaggcgcccatacatccaaccataactctaaccccgtgtccgatacggtactgagtctagaacgttcgtacgacaatactgtcgatcataatatcagtctatactcagtatgctagtcatactctagccttactgatgtgatagcatcgatcagtatctgagccaaacatgcatctatccgtatccagtataactctacgtatactgataccactatcgatgaaatctaacaagcttaataatcatgtacgctaaatatgtaaatacatatgcatatttttatactaatcttacctcgttaccgaattcaggtgtgccggccaacctgagtagaacaactgctcggcgcattacagactcctaaatcacataattcgtaaaactaataagtgacacgctaaatcacattttgggaactttaagttgaaactaaaagttttcctatcgattaatagcatggcaataaactaaatatttcaaaaatgggaaaaactagggttccctaaaataccccaaccgatagaccggttccccaacaagaattccggttacaggggttttttggggaccaaccggtcgaccagttcctataggtctgcctgaaccagaattctggtttattgcaggaaacacacaaaatctcactacaacctcaaatcgaccccaagtttcaccaaaacttccagacctgcctaatatac

SEQ ID NO: 30761 - DNA, 2252 bp, Cannabis sativa
aacataaacattaagcccacgcataacaaagaaagaggattttaatatttactaggagcatttccaatggagtgttaaaatagtagtgtaattctatattttaacaagtttaagaaaattaggtcttcaatggtgtgctaaatttttgttaaatttggcataagatattatattatgccaaatttggcacacaataaatgtaacttttataattacagttttttcattgatcattaataatttaatatacatttatgggaaattacgggaaaagtccttacaaagtttactttggtgtatataagtcatcaatctcattcatacatgaagttgtgacttgtattgtacagagaattaagatcatttagctatgaataaaacagtctagaatatattaaagttttaagaatctttaatcaatggttgctagtgcagttcactaatgtctgatattcggtgcaagtaatctcgattcggattactgatgtagcatgacatctaagtgaaggtttggtatataatagagattatatatagcaaggaccaatatgtaattaaactatctttaacaaacatgccatttactataaagacccaattaataatataataatgatcaatggtagattggcctgaatactgagtaatcatgaactcatgttcatgttattagtttctttgattcactcataaaggtttctcagaaaagataattcttacaacttctgcttcgagaatctaataatatggatagttagaaacatgatctacaattatggaatcctgattttcttaacggatcaaatattggttccctgtatgtgttaattctggaactaaaaagttgagcgtgaatttagattggatctaaattatactttcactagtgaattaacaaaactaaaggataaagaagtaattagaagagtaaaatgataatttgaccaaaactaataatgaaccaacacaatgagagctaatcactggaattgattatatcaatggacactgtaataaaactcagtaaatataattctataattactgagagttcaattccatatttatagtggagtaatcatagaattaataaatatgattatttggttgatgagattcaataaataatctagtttattggagtttaaagttataggtctgtggtcctcggatcaccaccttgaaacactatcaaagggaaggattaaaactatatatgaaagttcggaaaaatctattttgaattcttcacaatagtaattatttattttataatagataatttacttttcaaattaattaattaaataaattgggataagataaattttaggacaaaagacacatttcttctctcaatcaagacggagggaggcaccacctagattgtgtctaaacacagtgtaggcgccacctatataggtgtcctcacttgatttatttttgggttaattaattaattaacttaaaatattctctcaagtggttgaaagattccatcaatcagttatatatagaatacaaatacctataagataatttggttatattatttattcaaataacttagtatgatttaattaataattttgaataattaaataaaaaaattattgagtttatttaatatatcgtataaaaaaaattcaaatcaaaatacaaaatttaataaatgtacgtaacttttctaaaagcccaaaaaggattaactagtttacatttttctctccatcgctacaacaagattgttgttgctcatgtgttgagaatacaagaactttatatacgctattctttactagcccacactactctttgtgtgtggtgaaaaatctggaagatcaaggtatgagttttgttatcactgtttggagaatacaacatacgaaaagatttgaggatccctaataggctttgagaggtaaatattattttcatttatttacattctatttaatatatatacatatggtgatctttagcatatggtacaatgataatcagtaataattgttccactacgtagctaatttagtaccataaaaccaatagaaattggttgagccacagtttcaacaacacctccttaactgcttttgataaaaggcgaaccttccaactctaaatctgtctttgcattttgtcttttaagaaccccagaatagtacctttatatctactcattatacaaggaagacccaagtaaatgatgctttcatccgcttttgccattccaagaactccacaaattc

SEQ ID NO: 30762 - DNA, 2035 bp, Cannabis sativa
actcatactattaaaaaaatatcatctttaatatatttttgtaacttaattatcaataaataaaatataaccgcacgcgaagcgcgatttgtttcgtagttataagaatataagacatgaataaaagttactaacatctaataaatcaagtccttgtaaaagaaaaggcacaaaaaatcaaaatatggtcaacttttccatgttaactatttcccttgtgaaaccaccttacaaacgtaattatagtaaaatacaatctatcttttaccaccaagagaatctgataacaatttaattcattatagatattaaaatataaatcagtttctgtttaatattaaacataatttctattttgaaacgtattggatcgatagtgcaaacgacaccccatccactgaatagctcccctaaaaatcaatttgatgaataaatactttttttttttttttaacacagaatagataccttgaaatatatagatttactatacattattacaagaaaataaaattcttcaaaaaaaaacaaaaaaaaaagaaaagaaaataaaacacacttgacagtaaaaaaatacacaaagaaaaaaaaaaattaaatcttacatcttctaaaaaaatacaataccagcaagagattgaaatccattttcggacccaatcacccactaaaaaatcgacttttttttcttcctaaaaaagagaataaattatttttattgatatattatctttgtattgtaaaaaatgaaatcataatgaagtttctttcaagaaaaaaaaacattaaaatggaaaaagaacggagaggcgtacctgggaagctccacgatagtacctgcgcagctgaggggtttccagaatagctaaaatgaggaaggggcttggggttaaaagggcttgttttatatgaaaccggtttttagtgaaacactttaagttcattgggtttgtgcaaattacaaaggcttcaaaaacacattattctgtgactagccaaacatggcccttggtccaaacaatgataaaaggccaacaagggacatgttgggttggttaagctattgttaactaatttttttagtttgattttttttattattcagaactaaatatggaacttgttccaaaaaaactagctacatatttcatgcgacaagagtaaaagtgggataaaacacttcaatatatttttaccccactttttatcttctcaagtattaaaagttggataaaaggcctcatgttcaaatgaagaaaaagatatactcgttgcatctttatgtttttcatcaagaattagctcagttgattcctactacattaatataatgttcaactagtagtgtaggggccataacttgataatatacctcttaacctaaagatgatttcgttccatcttgttggttcaagaggtaatctattcacttgcacatggcaaagtgtatctcattatgaagcgagctattttgaagacaactgctttattggtagtattgtcgtagatgcaccccattccagtaccatggtacgagcactagattcaagttgtagtcatagcgtgctagcttgtatgtttcaaattatagtgcttcagtgatgacgtttggcccttcccaagaaagttcgagtacttctgttgctgcgtgtttcatcttcaggaatacccatcgtaacacaatgtgtccaaacttaaatttcttgtctttaaccttggagttctagtttcttgcaaccctttgttgatacacagcctttcagagctcaaacatatctcttatttctttaatcatattaagagactcgaccaacaattggtcatttgcatggttgtcatatgttagcctctgatgtgatgggagtgtgagctctacgagtatcatatcttgctatccgtaagttagagaaaaaagagtatggtcgattattgttttccctgtagtgtgggaagaacacaacacttagggtagctctttaggccaatttctttagctttctctgttgggttttgtgccctaaataaaacccattac

SEQ ID NO: 30763 - DNA, 2718 bp, Cannabis sativa
tgaaaaaaaattaagctaaaaattaactttaaatataaaaacagataaaaatatcaatatatataaatatatatattaaatttatatattaaaaagtacttttacactttaccacacaaaatagtgcatcatgattccttattgttttgacatttaaaaaaaaatagttaattttatttgtaatcgtgtatgttttagttatttaaagtattgtgtaaaatttaaaaaatttaaaataatttacaatctaaacatcaatattcaactaatttattttattcacgtataaaataaaataattatatatacaacaaactctttcaattttatttttataattaaaaaaaatgataaatattattttagattctgtgttttgcaaaaaatactaattgaatattctgttttgttaaatgctaaaatagaccttctgtattgttaaatggtaaaaataggatcctagctcaattttcaacaattttaattttaatataatcaactttaagacaatttttaacacaaacaaatacagaaaatataactaattttatcataatatctctagatcatattattattaagttttattttgatataaaatcagttcatgatactatttgtacaattttaaaaaatacaaggttcattttcgcatttagcaaaacgaaaaatttaattaataacttttgtaaaacacaaattccacaatggtattaaaaaaaaataatctagattcctaaacatataagagatgagaaatgctaaagggcaccagtgcctagcaccctcctatgtgccagtatcgctattggtccaactaagtatcggctcccatataatttaatataatagtttttagggaatatcgcaatctaatcgcaacgtgacatgtcgagaatgtgctagtcagtactaatccttatagcaaatacatccttgcaacccatttattgagagtattatgggcaagtgttgaagacactacatatataatacctacattgatacttgtagggaaatgaaatggctgaggatggcaataagacacgtttctccatatcacaacacaatctctcaatcaatgcatcttcaatctctatacctacttagtactaaatagtaaaaaaaaggcattttttattagcatacaaatacaataattttaaaaaaattacataaattagacacaaaatattatttgtattagtattaaaatttaaatgaattaaagactttccttttacaaatttaaatcattttttttttgtttgaaaggtaaatggaaataatactatattaaaagtaaaggagtaaactaatactagtgacaaatcaaacaattgctctattttgtttaaatatatataaatgcaattggttagataatgaaaaatataattttataagaatactcaatcaaacatatttaaactaaattttaattatgataatctacatttgtaagcaacattgtttattaatttattgatagtggcaacattgcttattgtttgattagattaatactttaataaacattgacttctaatattattctaattatttatttaaaaaaataataataaatttaataatctaaatttggatcaaaacgacgaagaaaaggtagtaaacgacagcatatttggaagaagaagaagatgggttccaactccggtgaagctagaagaacacgtcttcgttccgaccttcgattccaaaccagaaaatccaaatcaatttcttcaagactacgtttcccatctcacaaccaaccctctcgatctctccaaacccttatgggagcttcaccttctaaacctccctacttccgatgcagaatccgtcggaattttccgaatccaccactccgtcggcgacggagcttccctcatgtccctactcctcgcctgtacccgccaaacctccgaccctgaaaagttacccactcttccagcgccgttgaaacggtcggcggagactgaagattctgagggtcactgcggtggccggtttttgtggatcttgacggcgatttggtcggcgattaccttgatatggaacacgttggtggatataatggtgtttgtatcgacgattttgttcttgaaagataccaaaactccgattaaagggttaaaaggggttgagaagaatactaagagattcgtacatcggaccattagtcttgaccacatcaaattgatcaagaacacaaccaatacggtatgtttattacaattaatcagagaaagcttatgaagatttttgatttgatcttatatttgatttgggatatgtttggatgattttggagcagactattaatgatgttttattgggaataacacaagctggtctatcgaagtatttgaatcgcagatatggtaaatttttctgttaagaattgattcattttgttgcattgaatgcattgctactgttttttttattggtttattatggtttttttttcttgaactttcatatatatcaaattgtaccggttgaaatttcttttcgaaatattgagattgttagactttcaattttactaacagacacatttcgtacacgtcagatgcccgttagtaaacttgaatgaaagtccttgaatctaacaatctcaatagtaagaataaccaaaattcgagagaaaaaaaatcgtaattagtcctgttttttttaagctctaatctgaagttagagtcttttgtg

SEQ ID NO: 30764 - DNA, 2450 bp, Cannabis sativa
gtagaagtacaagatttcctttggtgttggtgatgttttattgtgttaagcacaaaggatgtaccacccagataggaggcgatacacttgagggatgaattggaagggcaccactccagctactgcgcagaaatgtgtaacataacaccttagcagaaggtgtgcacccatctccacgtgggcccagctctagatgccaaaccctccgtccgtgaacttgcttggcttcactccatgaatggagagcctattccaatacaatcaaggaacactctcaagccctcgtagggtcttgtacttcctaagattgccataaatcctgaatttgttgatatattggtccatttctcaaggattgtcgtcattcaacatcagtcttggagcgttctcttgctccagcagcatatcttcttctagttcaacctcttcttgttggatcttcttatacacaatttatgtaaaaagaaacaaaaccaagcagttagctatccaaactatctaatatagagagggaccgggaacgtcctcccccataaattgcttggagaggtccctaccagatttactattcagaaacaaaatcttcaagggtcatttgttctagataggaaatcgaaaacatcaagaggaaaaagaaggaaggaattgacaaagtacccagaaccagaaggattatgagcacggaaaattttttccaacattttttgcagcaaaacaaccattctttaggagttgctaaggctaaaaatcaaaagcaatacaatctatcatgcctaagactaccaacagtatcaatcggaagccaaagaaatccttatttcattcaaaggagaacatgtaaaacctatattctacagtgaattcaaaacacagttaaaaggcgatgaagtaaacaaatacatacctaataacggaatcgacaacaccaaactgatttttgctggttctggtagaggcaaacaagcacacttagcacgaagacggttggctagggccatcagtgagtcaattttagagttaaaattgatattcctcaattcactcatctggaaacaattgattgctgggtggatgatttggcaaaggatgatttcttaggcaaaaggaaattcgaagaaggtcgtcgaagggtgggttcattcaccgctaaaacttctcactgtgttttgctctcaaggaaattcaaatttaaacggttgaaaatttgaaatcaggagaaaagtgttaaatggtatctctcaagggtatttatacgcaaggtggctatccacgtgaaaaagaatgaacagtctaagaccgtatctccaaaagcacaagcacatctaatgacttggaagtctagaagccaatcatgtcaagcaattaatgcactctagaatcgaggcacaaatcaatgatgaaaatgattttcttaatttttgcaccaacaatgaacaaccattaaaataaaagctttcttggaaagtaactcttcggtaaatgtgcacttccaccaccaaatgattgccacgtttatttcccaacactgaagacagaagttcaccttccatgatcagttaacacctggaaagaaataaaaatattacttttaaacctccacacgtctacccatatggattaggaaaagctttcacaatatgcaatattctagaagcttgggggtaaatgttatctgtgtttttggcaagggacacgtggactccaggtcagcatttaaagcccatcagtggacccaaagaagataacttgggtcaagtccaagttagacaagaccttccaggaaggtatgttagcttcataatcagacaagcttttgccaaggatagcccgtatccagaagtagttccagtactgtgattctgaagggccaaacatcgtattcctggaagaccaaactggtttccctttttatccaagggcacagaataaggaattaactctcatcaaatctctgtgaaaggatcgtatcaagctaaaaagggaaattacctaaaatagagatcaagtaattaactcataattaattgcccacaattataggacacgctaatgatagcttaatcatatctaatctgcctagtcagtacatcaaacctttcataggatgggcctcacgaagacaacccaactttatgtattttcatgtaaactcctcattagatggaaaaggaaaactaagtataattcatataaacactataaatacccacaaatcctccgaattaagggttgaattctcttaaaacatttgctcaggcaaaaataaagagcttacactcattgtattcccaaaagctttctagtgaaaaatacataataatattgaatcgtagactaaaactcgttaaacccccaaccacgtaaaaactatgtgtgttgttctatttttttttctttggattatttatatcttcagttctaatctcttataattagtttttcaaaaatct

SEQ ID NO: 30765 - DNA, 2407 bp, Cannabis sativa
attgttggctttgatgtagataaattcccaagcttaaaaattacagtataaatatttaagttttttaatggaatagaaacttaagcttttaattattgtaattccattaatacttattttgaccattctttaagttgctttaaaaaatgctatgtgttgatgttaatttgcagcataaatttccaagttattgagtttaatgttgcgaatttttgagcttgagaatttatttgcatcaaactcaataatttgaggatttatgccacaaattaacatcaacatgtgacatatttgggagcaattaacgtaatggttaaataagtactaacaaaattacaaattgagagcttgagtatttatgaaatgatcggatagttaaatcacgagaattagcacataataaagagatttaattattattattattatgtgattttgagtctcttaacaaaaattatggcttattgtcagaaataagtcttaggaaaatattttctcaattacggagatatagttgaacattaggtgcattatatatgttatatgtaaattttttatgaattgtatgtcttatgtttagtaacattggaatgcgatgtttggcttatagagtcacttagaaatggtgtagtatcttaaaaatagaggggttatataattagacatttagaatgttgggattactcggggttatggtataggaccattttatccctaaattttaggttgcattatggtgaaagaagggcaagattgtcatttcatcttaagttaagtaaattgttattttaatatgaattttattaattccttagttaattaggttgaatgttatgtgaataagagaattcaaaaaaaattaattcttatcctttgatttctttagcccaaataatgaaaattaaaaaaaatgcaagttttctttccaagcagttctctctctcgacctctctagaaaaacagcagaactcaacccttttcattattgttcttgaggatttcaacatgatttgaaggatttttcttgggtgaatcaaaggtaagagccctagttcttccatgtctttattctctaggttttgagctttattctgaaatgaaactgtgattatggtattgtttaagtttaagtttcttgggattcattttctgagtagattttaaattagtaggagctgtttgtgcttgattttgttggttgtgagtgtgttgaacaaatgtttgagttgttaaactcaagcttggaccttttatggtgaaatcgaattcagggaattataactattatttttggttgaaataggttagttatgacttaattagatggtctgaaaggtttgaattaatttggggtagaattaagtggtgtgtgaagattttggcgattcctgcactgcactggtcaaccagttcagttttacactgtagaatcggtctaccggttccccgaagaaacacgcatagatttcggttttctggttgggatccggtttaccagttgtggtaattttgagcaccctatgtaacgccctaatttatagggacgccacgtgtgtgattttataaagtagtttaatactaatcgattaattaattattaaaaactgtggtaatattaaaaacttgactaacataaagcactaaaaaagacattataacggcataaaaagcgtgttccgaaaatccctgttataaaaagttttgctaaagaaatatatacgacaaccattcaaacacaaaatcaaaatacacaactaatacagctagcccaaaacaactcttggcaacttggcacgcaggccggtgaggctaatatgtaaggataaactacacctcgagtaccactgagtgttgtaccacacgcactacatcccgtactagtgttggtaacattggatcgtgcccttaaatatcatatattgtaccaatgcactcgtaccgctaccgtactagtgttgataatataagaatcacataacacaacataaaatttacatacatacacatatacatgtacatatcttatgctagtcttacctcttcttgattcaagtatgccgatcaatctaaatgcaaatatcactcgttgaacgaggccctatgtcacaatacacaaaacgaataaataacttgctaaaacctttaaggagacctaaacttaaaattaaaagttttcctatcgataaatagtatggcaatgctctaaattttgaggaaacacaaaaaaaaaatgagactttagaaaaactgtcaggaaaaatgacaggctattttttaaaagtggaacccacaacaatataaaatcatataaaattataaaatatcaagaattaatgctaattgcctttactaatccataatataacatgcaatcattacaccttgttaaaaggattttatcctcaaa

SEQ ID NO: 30766 - DNA, 4542 bp, Cannabis sativa
tttaagcttaaaagctcaatctctcagatcttcactcttaatggctgccttaagaaacttagttgccatcaactttccaccatgtgccttgtccaagttcttagacgtaggcatagtcagcttagctctaatgaactaagccacatggggatcatactcatcaagtaatcttatacttctcttcattctagccatcttaagtttaataacttaagttacttacaactcaagaaaagtcaaaattgggttgaaaaaagtcaaagtaacttgtaagaaatttttcaatgcactaggagagtgtttttgatttttggaggttttaaaagaattattttgagggtttttgagagcttaaaaatccttagagtaagaccaacaaaggaagagaaggagaaaaaataagaagaaaaaaaatcggcgtggattaaaaaaaagttttttctaccttggaatgaagaatgcttgaaggcttgatgatgatgaaatcccaaagttctctctaaggactataggtatgtgggagtgaaaagagaagtgtgaaaatttgtttgtcaactcacttatttatagttgagttcaatttcctactcctaaagttaacaagagtcttttaaatttaaagctttctaaggaagaggtaaatgataagtaaaagatataattatatctttctttttttctcatttttaagaatattttgaaattcctatacaacaaggaatatgaatacaaatttaaaaggttacaataattccaaatgctattaagattaaggaaaaattagagaattaaaggaaaaaaaaaacatgataagtaaaaagccaaaagtcttttctcttcttcctttctctctctaatttcaaatgatatctctatataggaggattccaatccaattaatcttaattccataacaaaaaataagaaaatttaaaattttccaagaaagagataaacgataagtttaaaaaaaaaaaaaaaaagataagatttttcctctttttctttgttaattaatttttgatatttccaaggactaagcaaaagtattcaaagtcctaattcaattagtaatgcttgaagaacagatacaagtacctaagaatgtcaaaattgatgcccatctagtatatttaagtgaaacaggctcagttcacgtcatcaagtcaactccacacaagtgtaaaattaacttggggggaaaatgttaacccgtaaacttttcctagtgacgtgaacatcaatgtttgacatgtgacatgaaggatgacatcacaaagttgagtggatccaagtcatatcagtgacctgagaggggaccctagccctgcgctcaggttgactttaagatctctggtatggaagttcagacttcaataacttgaatctattatgtaccatgaatacattgagcaacctaatccaagtctcgcgagctaaaattacacaaacctacaacccgaaagccaacctgggcacaaagggtttcacccgctgcccaagttgacatatcaaactagggtttcaatttttgagaccatcttactgcaaaaaggtcaaaaattgcattgggacataaactagacatacaacgaacatatgtgaggcatcagaatcagaatcaaagtaaattgatttttgagcaacgggaccctagggccccaccacccagcgactgagttgataatctgtcaatctgggtgccttccaaatatcaaattagagatccaacttttgcatattcttcatcaagaatggggaaataggttatttcagagggaaaacaacaattcttgggtacaaaaaatagggtccaacgcccaggttgatacttggggtttgccctgcgcccaggttgatattttgtcaacctgagacatttcagatggagttttacaggaattatttcgagcaacttctctattttcaaaaaatattgagattcaactatttcttgggaccaaacgaaatatgtggaggggcaaaaaggggacctagcgcccaggttgatatattgtcagcctgggctattttcgatcaagttcagcaaaaggtgttccaggtattttttccatcataaaaaataatgaaaattcaagcaaactcgggggaaaaatcacaatccaaagtccctggaaataaagcctagcgccaaggttgacctagggttgggcttagcccccaggttgacaatcaacctagcatgttgccttgaatccaaaatggtcaaaaattgggtaggagatatcatcctcaagtttagaagccttggaagtatcaaaaatgaaatcccaggaactcaggagtaagtactcatcccccaagttggcaaaaggcctagtgcactgggttctacttgttcgaatctgatgccatttcaaccgtctgtctagtttttcacaatgacaatgatctatgaagtcagcaaaataaaattcaaaactttgaatttctcatttccagctcacctagaaatgaagagtatcaagtctctcatttctgcaaaatagcaacatctccaagaaccggtaaccagcttcaccataacacacaaatagattaagtgatgtcaaaatatcccttaggcatctaaaagtacatcccttgcatgtttttacacttactcggcgtctagggtgacatcatatttcaacttgggcgctgggatgtcaacctgggcgatagttcataaactcccttcagtaaaatagccataactcactcaattttgatctgattgacacgattcaacttgtattttgaaactaattcaattatctatcaagtcatttctggcactccaaacgtagttttgaagctattgtcatcaaaatttaccctcaaaggagttacaaaaataagctccaagttacccgcaacgggactcgtcgggctccaaaaaatggccacccccaccaagagctaatttttactcttagatcatcatcaacggtaaaaaaacatcttatttgtgtttttctactattttttaggattcattcaccaataaaagagaactcccttagttcatttttcacattcagaaaactatccacaaggccagagcttctcaatctagattttctctctctagaattcagaacttttgacacttagtctattgttgtaattatcatctcatgagaaataaaaactcaaagtagacgtagctatattactatcatttagtctattgttgtaattaccatctcatgagaaataaaaactcaaagtagacgtagctatattactatcgtgatatagatagtgaactactataaatttgttgtgtctcttttatagaaaattaactacttattcattctcgccaatctagtgagtggatgtagcttagaagtctagtctagatttctaagttagcactgacgatggacgaagccagtggggggaccacgatctagtgccattttttcgttttttttttttttttgatgaactttaaactaaattacacaaagctcaaaactagagaacaacaacaaaactagtctagttggtcacaagaggggccaactcctataaaaaaaacaaaataaggataaattaaatgtaagcttagagagtataacaattgtcactagatctgagcccatgcaagaaaatttcatcaagaatattataaccctgatcacaaatttgactatcagggttataacaataaattaaattactatcaaagctaatagtataaacctaatcacaaacttgactaatgctaagaagattagcttttagtccatcaaccaacatgacatgcttaagtctaggaagcccatcaaaattaagagtccccattcctatgacttttccaacgaccattaccgaaagtaacttctccacaatgcattggtctaatgttgtcaaggtagtctttttcacctgtcatgtgtctagaacaaccactatcaaaataccacatgtgagaggcaatagatttaaaacatgaagagcctaccaagcatttatttttgacaatctatttttgtttttgagaaacatatttatttctaaaatcattagatttaaacatgttttgtatagtaacacatttaggtcgagtgtgacctttaatctcacaaaaatgacaaatatgaatgaattgtcttctattccctttatagttatcaaacttactgtgctgcttcttttctgtatcagcagtgtattttgctgcaataacataaccttgcaaggtagagacagaacctccagaaatgaaaatattagatttaacaaatttggtatttgatttggattgagtcgtaacataacttagacccgcatgactcgtttgacctgaattttgaatcttttcaaaaatattagaacccagatttagcattttgacatttcttttaagattttcaagttccttagttaaagagataattttagactcttttaaaatcaatttagattcacaatatttatttatttctttaagatctttgatattgtgacaccaatttttattaattttaaccaaggagcaattttcagtacaaatttccaaccatttac

SEQ ID NO: 30767 - DNA, 3975 bp, Cannabis sativa
  modified_base (3764)..(3767): a, c, t, g, unknown or other
  modified_base (3833)..(3837): a, c, t, g, unknown or other
atcggaaaaaacctctttaatttgaatttcgtatgaaagagcccaattaagtccaaacaaaagtgccaaagtctccgcttgtaatacaaagatacttcctgaagacataacaaaccagaaaacaccacaataaaaactatgagtagaagttaaagacaaactaccacaagagacgcaaccccaaaaacgataaaatcaacaatgttaagaaagaataaaggaaaaaactagccaaatggataaccttttggctagtaaaagaacaccataaaacataaaataaacattttccccaaaaggggcaaaacatataagtcttgatacattcaagcataatacaagtgcactccagaactagcctaccaatgtttaactaatcagtctaaaaatacctatccacattatataaattgacttttaattacgagtccaaatgctaatcatcatatagtgaccttatagtgagtgaaaaaaaagcaatggatataataacttgatccatatatatttggtacttaattttgtaaccatatatttcataaagatgaaaattaagatagtaaattattaattgtcatatatatttactgtcatgaatgcagtcatattgattgtgaaccaaaccctctttaagggcaatgttcaaagtttatgaagacatatgtcccatgaataggttaacattcattcttaacatgaacctggtcaccatagctgcgcaggttcatgaccccagttgcaaaatctttctatctttataattaatcattcatttgtgtgtctggtgattttgattattaattaaactatttatttattaagtccaattaagttaacctacatccagatatagatcatatggcaatgttgtatatatggtcaagtacgaacctatttctacacttgttatatatgtttcgggtcttttcagaaactagagagccaattaatccgagtcatatcttcctacaaaaaacaaagttaagagataaaaagaagaaacggtccaatccaaacctaatcttatttacaacaaagtaagaagaaaacgacaaaaaaacaaacggcgacgggccgctacaactcggatatactataaatgtgagaggttatacacgtgttaagcatatctctagggttttatccaacacaacaaaacctgttatagtagtgtgtgtccaaatcatcaatagaaacgttttcggttttctcctctttttttttattttttttattttgtatgatgagatgtctttccatgcggcaactcgttgtgttttgaatgtgatagctagatttaataatttatataatatattttaaaaaaatgagataatagaaccaaagtattagtttctagtagtaacgatggggccaaggataggtagggagttatttctctacaaaatgagaagatattattctcattaggtataaatttatacctttctttttgagtagtggttttttgtgtggatacataatgaatcatgcatatatcaaattatttaaaatttaaaacggtaatgatgatcagaaatgtagccacgtgtaataatgagatgctttaactatcacaacaaaactagagttttctttttctttggaaatataaactaagaaaagaaacaaaacatatattgtatttcatatatcgatcattttatataaagttttaaaaggattaggctatattatatgtagatcggtctaagggattaattgatgttatgttacatatatatatgtacacaattctttttttagtttcattaaaaatattgctactcttgagctttaaaaagaaaaagcacctaatattgtttagtaacttaatatcatatataatattaaaacatgttatttcttttagtaattagttttgaaatgaaattatatatagtacttagagtcaaagttaatctcttctttgcatttgttgcccaccagttttatgtcggccttatatttcaaaatttgtagtagatgttggttagttataattataaaattatattaatttattttaacgtttttcttatgaagttactaaaattatttgtttaatgttcttttagtctaggtattagttttttaagctaatattcttactttgttggttggtttatgggctaagatgcatgttatttcaatttcagacattaaaattttattattatctaatattttttgaagcatttttctcgtaactttgtaactttaaattgcatattttagaatagataataaagagatttcggtcctaacccaaaaaaaaaaaaaattgtagtggatgctctcttaacacagcaccaagagcgacgtggatgatgggcctgaaattgatggctttatcactttatactgtttatttgtttcctttgcaataatactacgtacctctcctaatatatttcaatataaattggtatatttcaagattgttatgaaatgtttaagtagttgcatgaaatatgattaatttcaatagtgatgaaagtataaaacatatcttgttcaagtatccttagctacaaataataataataataataataatataagatatgcaggcctgttcttttgatagtgatagtgagaaagtgtttaaggtccatgggccgaatgtccatatctattatacatttttctattttaaaaagaaaaatccatactatatatatttttttgctaatatataatatatattattgaaaatagttgttacacaaaataaaaggaaagagtttatcgaattaaaatttgggttgagtcgtaaactaggtcgctttctttaagacgtttgcggcactacttagaactgtgcaagtagactatcaatctcgtcgtccccaagataaaatagcacagtggaacacactatcggaactctattgcacgatagagaaccgtcgaaatactaaaccgaaaaatcgtactagtactgctcagaatatatatgtaatataatcgtatatatgtatatatcgtatatgtttttcagtgagaaaaaaagaaatgtgtttctcccgttgattttgatgtattatataagcaatacacagaaggtagtaatgagaagaaagacgttattgaagggaacgttagaatataagattgtgagaacgatgctaaaaatcagttaccacttaattaaactcattttagaaaaaactgttttaattaataataattcaataaataaattttttctaaaaagtaaagtgacaccacacccgcttgccagctcaactcggcacggtcggtcgggtggacgaagacaacacgtgtgtgtggtgatacgatgtgtgagtcatcacccatgtgcacaaaattaagtattcccaacctaagtaccaaatttgtacattatatacacttttaataaagtgtttctatcccatgtggaactccattcacacacacttcactttatcaaatttcacaatgttacaacatatattagttatattcatatgtgactttggcacgtacccgttacaatattgaaaaaaaaaaacatgaactaattttattagaaattaaataattagaattcaatttttatataaaaaaaatttaaatatataataataaaaattgtaaataatatagtttgagagttattgtataaggtaaatactattttggaccctgtgttttacaaaagttattaattagactctctattttgttaaatgataaaatagatcctatatatttcaaaattgtacaaataacaccctgaactgattttttgtcannnnaaaacttaataataatctaatttagaaatattatgacaaaactggttacattttctgtatctattnnnnntagaaattgtcttaaagttgattatattaaaaaataaaattattaaaaattatgcttagagtgctatttttactattttagaaaatataaggtctattttgtcatttaacaaaacagaaggtccaattagtaattttt

SEQ ID NO: 30768 - DNA, 1327 bp, Cannabis sativa
aaagtttgtgtggatgatgaccttttgtttgattggagtgtggatcttttttgaagcggttctcttcggccaatatttgtaccactcgtcttggtaaatctagggttggggcagtgtttcgtggtgatacttgtctcgtccaagcttctagtacttggacttggaatggttgtttctctcctaatattgatgaggttttgggtatcttcgttggggacttacttgcttgtcacttattgaatgggtggtattgggtctgattgtcttgctgtaattaatgtcattcattactgtaaggttgattagtcctattttggttgtattattagagatattattgcttattgtaaaagttttagtgatatttcttttatgtattgtcctaggagtgctaatagggtggctcatactttaacaaagttagcattcgtttatgtttagtgtcctagtcaccctgattgtattgatgttgttttgtagacacttttaagattaatgatattattttgcactctttttcctcttgaggtttatcttactcggtttacttttaaacttttaatgaagttgttatttttcaaaaaaaaaaaaaaagaaaagaaaatccaaaaatatttataatttaaaatctcaatatgaaaaaacaaaatatttttcacgtctttttaaaattaatcttttcgaattaatttggtagtcttctaattaaaatgtctaattattcaattttatttttcttctcaaaaaataaataaataatttgtgtcgaagattgagatttattgtatttctaattctaatcactctacaattttgtccaatactgttatactcattttttgaagtaataattgaaacgagtcaatttatgtaacatgcgtcataaataaaatatttaaaaataaatatacataaacatgtcaagaagtttaggacacaacttgaagtgtaatctcatctaacaacaattgtaatatttatgaattgatgtactttaacattgttgaattaagatacttcaatattgttaagatattcttaaagaaaatatataacaactcgaagatactcaacattgtgacaactagagatatgccttaacaagtacttttattgtgattagattaatattttccactaatatgaaattgaagggttcaatcgaagggaatgagacgaaagttttattattatattaaaatattaattcaagatatttattattaaaagtctcattattaatttactagatttttattcagaaaagtgtatgaaatcaaaattaatatataagagcattctcaatcaaaacttttactatatatat

SEQ ID NO: 30769 - DNA, 1090 bp, Cannabis sativa
catgaaacttgactaagaggttgtaacagaaagttaacagtagcgctcctcttattagtaatagataatatttcatcaagtatgggagataatgctttctttaattcctatattggaattgcttcccctataattaaaaagaaaatatatatttaatttgtgtaaaaattattaataaatcaacctagataataattgagttctttaaatctcatttagtatcatttcaaaaaaataaaatatctaaggctttctaatgtcatcgctcatgagataacagtctggtctatgaaaactaactttcgttgttttatttagtattggggagatagtataacttgttgttaccgctttctttttgtttgtcaaaaagaaattctcattttattttatattttcaaagtttttattaaaaataatttagtttatttttaaggataaaattaatatcattttctttttatttttttctgtaagcaatgaccaaaatcattaaaaattaaataatgtcgaacaggctaaaggactatacatgtaaaaaaaaatagataatctttagccaaacaagttatttatccatccgaagagcatgcacaactaatccatatgcagccacaatgaccgaccgatgaatacggatcagtgacactctaaaaatctggataacatacttgctacatcctctaacaatgatcctagatcactgaaaaaagaatatctcctagcaaaagcaaacacaattgttaaggggtcagaatcaacaagttcaaagaactttgaaggaaaaactatccaacgtgacttatattgccagacaatatccttgtattactggaaatctccatcttccactcttaagttaaaactacttgttctacttcctccaaatgtaccaaaccgcataaaaaaacaaagaaaattagcaactaataacatcattgttttttttagtcgataaaaccattgttagatagcacttgtaaacgataaagaacaagactgctagacttgtattttggcaaaagagcccctcttttgggggataaattgagaaatacatttttttttatccattaatcaaaaatacttt

SEQ ID NO: 30770 - DNA, 2940 bp, Cannabis sativa
ttggccataactctttcaatattacttagaattgaacgattcaatatgttttgaaaagataaaagagatatctagaacttttattcacaatacttttcctagaaatgaacgaattatagtaataatgggcttaaagcttcagacttgatttccaatcacaaataaagcatgttgagcatccaaaacttagaatcttacacaccatcgtatcttagaactccaaattccataatgaattcaaaaaattcatctcatttaacatttttcttctcattttcaatttatattatgaattttaccatttaaactttaaacaagtagaaaacaagcgtaattttgcactaaaataaatataatcaattgaaacacacctctaaaacactttataaaatgcatccaagctacccaataaaactccccctaacttaacctttactcattcttgagtaaagatcgacactaaaatgaaaataaatgaacaaagataaataaattaggccttaacttttaatcacaccacactaccatcacttgcaagactcaattgttgcaaaaccagattttcaatctaattactccaacaacaaactttagcactcaaaatagaagaaaatatataactcataaatgccaaataaaaataggaaatcactatacatgctcaactcaatccaaacaatttcaccaacaaattatcaataagcttgcatcatttaaccttctctactaatgtcaacaacaaatgctttgaaatcaaaaagactttaacatgttttaatgtttaggattgggtaaaggtagatggaaaatatcatttaggcttacctatatcataagcctaaatgagataacctttcttgataaccttgcaacaacccttttttttggtaaaactaaattgcaaaatgtatatgtatctatatatatattttcgattagtttcaagtaattttatttcatgaaagtctctcataaatatcttttattcctcacatatcctaccccaagttttctaaattacaatcattctccaagcttgtgctaagcttatggcatagatagggacaagaaaagataataatgaagtcatttttagctcataatatgtctcgaaaaaagaataacaacccaaggcacaacaatgtaaactagggaaaatcatgtaagggtaagtttgaaaggtaaaaatgttccaaaaattgcctaaatcatctttcacaacatatatcattaaggattttgcctcaaagggcaaacaatgcaagttctatccaatttaactcaacaaacctccaaccctagtcaagcatcaaattataattatcaacatttacaaatcataatcaatttcccatcaagcattaaaattaagaaaaagaacaattagaccaagcacatggttattaacaagtttcatcaaatgaataacaacagatagtatttttcaatcactaaggcttaccaagacactaacccaaaacttaaagaaacacaattaaatcacaacctaaaaaaaatttaaagtccacccctcaaacgtgattgttgcgttggtccctaatgtgacaccaaagattacaaaagagaacttacctagggtgcctctcaagagtgctgtcgttaacatcatatagccagacgctaattttctttagaaaacttcaactaggatcaagtccacctattgcatccgatatggccctcctgccaaatgaataaaatttccctccaatgttcctaatgtcaaagctatccacaagactagcttcaccttcataatttcaacacattagacttttcatacgaccctgaacaatttaaaatcgttctttgagcttccctttcttcttcttaacaatcctttaccatatccactcaataataggtagggatttcagttgcgacaaagacattaaaagtcatttccttatttttaactcgcaagtttaactttctcttttgtacatcaattagagctcttcccgttgctaagaatggtcttcccgaaattgtgggaatgttttcatcttcctccatgtcatgaattaagaaatcaacgaggagaatgaatttaccaaccttcaccaagacatctttaattatacttcgagggtgagcaattgagcagtctgccatttttaaagacattcttgtagggcgagcttctcccagttttagccttcataaaatagatagaggcattagattgatgcttgccccaatgtcacatagggtttttgtctcaagtgaacccctatcaatcaaggaacatcgaaactacctgaatccttaagcttgggcggtaagttcttctgtaagattgtattgcagtccttagtaagagccactatctcatattcctccaacttcctcttattggccaaaatatccttgatgaacttaaagtaagttgacattttcttaagtgccactacaaagggaatgtcaatgtgcaatttcttaaatatttcaaggaatttttaaaactacttgtcaaggttgttcttgcggagcctttgaagatacaagattttgatgtggtggtctatgctcactagtggtgccttgtattcctctgacagatcatcagcaaactacttacctctagccttcttcttgtgtgtctatacctattgatcctgatcctctttaactacttgctactcttctcgtgggccctcatatttcttcccactcctcaaggaaattgcttgacattgctcttttgggtttaccttcgtagtgctagaataattacctttggtgcagttggccatttgagcagccaatttccccatttgactctccaaggatatgataaaagccttagttccatccattaattttagagggagatcaaactgaacattggaactctcaccaaacatttgttgttgttgagtgggctgttaagtttgggggggggggttgttgtcactg

SEQ ID NO: 30771 - DNA, 2764 bp, Cannabis sativa
aaacttataccaacattaatcaggattccattcttgaacatcagagaacaccttctcgtccatgactcccaaatcaagaacaccagtagcccctactgcagcagcccacttcgctgagttgtgagccaagaagttgtaggtcctgtcaattttactgatcttgaaatcatcaagtagcctgaccgtgtttttgaaccggtttattgcaccaacaatgtcaataaattggttcgtgttgcaagtgatcgagcaattggcaaccacaacttcattgtcacattggaaagccactttccccttcaaatgttcccttgcgaactcggctgcatttgtcaagatggtcgcttctgctaacagagggttcgtagcagaaagtctctccgcgaagattgccacaactctgtcctgctcatctctgaaaacagccgctccaaaagattggttatgctgaattgatacatcagtgcagcaattccaccatcctgcttcggacgtgcgcagatgacctctcttctcattcttcggtttccatctggataagtgatcattgtatgaccggtgcactgagttgacgatctccgttatagggcggagtctcgtaccatgaattaatccatttcgggcatcccagattgctttaaaaatacagagtgcacctgtcatgaattcatcgaaagacaaaagacttggtctatgcttattatcctggaaccaagtcatccattctgtccaggagctataacttaacgaattagttctcattccccacatacttccaaaccatattgcctttgcaaagtagcaatcccaaaacaaatgtaatgttgattcctctccttcctcacaaatgggacattcctttgattggagagataaagctattccaatcttttctctagtagggaaagcatctctcattatttgccaccacaacaacttcaacctcccatggataggcgaattccataaaattctccaatcccaagaggtatatcgctgagttgtggaattcgttaccagcttaaaagctgatttgaccgagaagcagccacggggatcacctatccacctccaggagtctggtttggattgatggggaagcccgatattaaggttgtttcttgcatcgctctcgctaaaccacttccttaccctttcttcattccaagtcatattctcgtttatgaaataattgaccaaatttgcaccttgagtagcatccaacaggggctgaggcatgtgatcaccattgggcacccaagcatcaaaccagattgaagtggccctgccatctccaatttctcgacacataccttctttcagtaaggttcttgaccttagaattgctttccatagggtcgactcttcctttcatctcaacatcaaagagattagacccttttatatacttctcagtcacgatagaactccaaagattttggggttcctttacgagtttccagccccacttcagaaggagggcctgattgatatctttgattcttcggatgccaaggccacccttgtattttgatttgcaaattgtattttgatttgcaaattgaactcctttcattatcaccccaacaaaattttcttagactttgctccattttattagctataccacaagggatcacctccgatgccgccacataaataggaattgaagtccctaccgattggattagacatgtacgcccagctttcgaaagcagacgagccttccacccgtctattcttgtgaggactctttgcactagatattgcatgtctttagaccgattcttggaactgaacagtggtattccgagataagtggcatcattctgcatctttctcattcccaggagggtagtgatatcactaattcgattttttgggaccccctttgagaagaaaactgttgatttttgcaggttaatcgcttgtcctgaccaagcgcagtacttttgaagacactccagaaaggcctgggcttctttaatcgtggcttgaccgaataggactacatcatctgcaaacataagatgagtaatcgcaggggctgagcgagtaactttgatccccttaatccttccttcagatgtgtaatcctgcaggagccgagataacatatctgctgctaggataaaaagagtgggggatagtggatccccttgcctgagcccactcgtggggtggatagtgccttgtttaaccccattgatcatcaaattcattttcttgatttgtatacaactcttgatccaacccagcaaaggattcttgaagccgtggaagttgaggacctccattataaaatcccagtccatcttgtcgtaagccttctccatatcgagctttatcatcataaaaccctttgagccttttttccgagccattgagtgaataatctctttggctattgctgtattctcagtgatacatctccctttgatgaaagctgtttgcgtcggggagatgatacaaggaagaatatctcgcagacgggtggttatgactttagaaatgcatttgtatatcacattacacaaggctatgggccgaaaatcaccgacctttgaagggccctccttttttggcaccaacacaatgttagtatcgttgatgtagtgaggtagttcagcggtgttgaagaagtgtttaatgaaattgaggaagtcctctttgatcgtgtcccagtgggatcggaagaaaatcactgggaatccatcaggtcccggggccttgtccactcccatggaagctaaggcattcagaa

SEQ ID NO: 30772 - DNA, 1893 bp, Cannabis sativa
ccgatctaatgatttactttcatgtaatatgaattaaaacgatgttttatagttttttgtgttgatttggatggtttcatgttggtttaaaacgagtaagccatagatgatgcatcccctgcaattggacctttagttctttaagttctgttggagtcattctatagtatgctttggaaactagttatgctcctagagctacatcaataacaaaatttatctcccactgtggtggtaaaccaagcaattcttcggtaaatacatttaagaatattttttaccactcgaatatccttaggtccaactgtaccgagtttgctagtatctatcactactgctaggaatcatatgcattcaccttgtagtaggtctcgatccttgaaaactgatatgattgggatatgagaaccctaaactagttccacaaacacaaatggttcctcaccctcaaactgaaaggtcaccatatttctcttacaatcaatagtggccgcatatttagacataaaatccatccctaaaatgatgtcaaaatcttctatggttcgctcaactaaatcaaaactcaattctctaccatccactataactggcataaccttaatccacttttttaagatgactaattctccattaggtagtagggttccaaattttaatccataaatatcataggaactatctaatttacaattcactttactagaaacatatgagtgtgtagctctcgaatcaaataatactgactaagtaataagagttactgattagcatcagcctgagtaatagcaaaaactcgagttggagcaggttttgcttcttttttgggttcctctttcctcaactgaggacaatctctcttaaagcaccttataacactgcactaaaatcatgccttgcctttaaactcaccaagatggtattttttgcaaattaagcattctggataagtaaagaggccttcagggccacctcaacaacctcctcaattcagtttccctctgaacctcttatttttgcttgagccaatagatgttgctaaactctttttttttattgtggaaagaatcaccaccacccctaccaaaattagaagtatggggagaagcaaccccactgccaccctgagtcacctcggactcctgaacaatctccgcagcatccttagccctgacagtcttttccaccatctaagcataggtggtatcattatcgactatgatcattttaatcatgcataatcttggcgatgagtctcgccaagtaatttttgttattactgaaatcttttagcacaattctcgaggccaacttggcaagtttatcaaacttagtcgtatactctatcactgatattgacttttcttgagttacctgggtaaattcctttctattggtactacaaactgcctcattataatacttgacattaaataaatcttagaactcatcccaagacatagttttcaaacattgtgactcatagataccatctctcaccatatcaagtcatcttcctaaaatggaaaggtggtacaagttacttgatcattacccggtaacttccagaaatttcaaaattcttttaatggtagtcaaccattactcgactttcatcacatctcgacctcttagaaaaactatgggcccttaattctggaacctttcatacagagattccatcctgtttctagtggtgggtggcctaactagaatcactggaatgggaatcggtagcacctggtgaggtggttcaataggaggagcttgatgaaactcatctttctgtctttgaagcctagcttgcatttatgcaaacctctgttcccaatctagagaagcctatggagaattggcattgctgccgccacgacccgaccacgaccccgactt

SEQ ID NO: 30773 - DNA, 1498 bp, Cannabis sativa
tgtgagtacaataaagtcatttgtaatatggtgtttgattggattggcctcaataataagaagctggatttggaagcttgtttgaattggattaagaggtgtagacactctaaatgttgagccaaaacacttcaatcacacccagcaagaaccaccttgtttcacacataagaccaaatcaaagaaatcttagaagctttatttactttagtgtctatttcaagatgaataattcgacagtttacaagtgagcctatgatctatttatacacttaggcaattaggagtaaaactaactaacataactgtcaactaaaaacagttaagacagttattgtctcgagtacatgtggacaggtattagttggcagtaaatgttgtagtatagtgtatatgggaagcaaaggatattgctctttggcatagaaaaatgtatgttgtacatgttattgtaaatagaattaagaaataaattatatgtatatataatatatattatatgtatatatataatataaatatacacctcaattgattaaaaacaacatgaaatatataattaagcttatgtacgtactcccatataatataagctatataacttttctcaatatatatatatatatatataattaagctttggaaagtttttgttgttttgatgaaagttctaaataaaatacatgcattttatataattaatattctagtctattaattaattactatcttcaactatttttcatttgatcaaaatctaattaagtatagatagtttaatataataatgtttaaaaaatattactaactaatcataaaatgacacgttaatattggccagtatatgttaagtaaagctagtcacatatatattcaactatatcattttcacacagaagaaaatcaataacactatacatttatagagttaagtaatatgaacataaagatatgaaataacgtactcacagttgaagtttacacagaaatggtaaaaaggttttactcagctcaaatggaggctgaggcaacatattcaatatatactctgttcaaggaatacaaacacaaatgaaaggatgacaagtggccctaatgttggtaaaagagagaccaactcataacagaaaagggtacacacggaaaacacaataacaaactctgattgcagaattacaacattaatcaactaatgcataattaacagagactaattaatctattttcttaacactcacatgttacaaaagttatatatatactattaacaagatcataaatttttatcgagggataatacaggagtcttgttacttatattattcttgtgcctgtgttactatttttaatgggtattaatattattgaaaatttaactttttatgcttagtttttttatttaattaaaaaaaaaaaacttttatttttacattatattattagttggggttattctatcgactggaaatttaaaaaaaaaaaaaagatttttcatttt

SEQ ID NO: 30774 - DNA, 2320 bp, Cannabis sativa
gggcataaaacccaacaacataaacatataaaaattgattccatatattgtcaacctaacatagaaaatattaacataacataatgtattgttccaaattttttttttttttaaaaaaacactaaacaaaactacaaacattgtatctgtccagaaaacaatacaaatatttaacaagaatcaaacttcttcttcttggacttctttcccttcggcctatcttcagtcgaatatccttcgttaatctttttctgggcacagatatacacagtcacagcgaggtcatcccgatagtgcgtaatcatctcatccatattaggaggaatctcattaatcttgccccggatgaatagatcagcatacttaatcacaaatacaccacaatcactgaaaaacaaaacaaaaataaataacaatacataaccaattatttaagcagaaaaaataaacaaataaagaatcacagaagtcataggactaaaaataaccagttatttacctgttgctttgagtggggagcttgtccacaaactcatatgcaataggagtatccttcggcacagcataagggcctgactccaaactaatgtcgttcctaccatcataaaaatttaagaaattaaggaagtatggtagtaactcacagtacgcaaggagatcaggcaagatcttcttttgattcgtctttgtattcttcatggaattgaatacgaagatcttcctctttaaaatgctgaagtgaagaaatatccaatgtcgttgaacaccgacatgacacggaccgacaacatcgtcaacaccgatacaaggctggaagcaaaagttatattgccccagaatgtaatcggtgaccatgttgtcatacctgatgacactcggatcacgttttgcctttataaattcagcatacactcccttaatagttgcatcaaaatacgagcatgtcgtcaccactctcttattaacactagcatcgtataagatgctcttaagataatagagtaccacattcagatgctgcacacaataaataaaaaataataaccagttaaaaattgaaaaaaagcaaagaaattaagaaaaataaaacagactgaagaaaaaataaccagttaaatactagatcagtcaattcttcaccacgagtctgtaaaatcacaaaccaagacttgtcatcaatctgagctatgctaaaatcgaagggaggatcaatgtcgccagctattttttcattgttcctgaaatcacaaagaaaaaaatccaaaatgaaaaaataaaaccagttaaaaaataaaactcagcaactattaaaaacaaaaataacaacataacaataaaaaacatacttcttcttcaatagcctagcacctttgatccacttaacgtatccctcgcaatcttcggtgccagtgttcatcccaatctctttaacaaaaggaaacaacaccttagggtcaaaagctaattcactagatgactccttatccttcttattctgaatttttggttcagaagaaccaaactcattgacaaaaggagatctacaatgcaatctaggttttgcttgtctcttgacagcaacactagattgcaaaggcattacatatagaacctcaacctcatcttccacagtaggggatgcagactcaggaattgacaccaaatcccattgctcattctttgcactaagtggggaagaatatgcccgagtgagtctatcaaccaaatccaaaatggattggtcgactgtaatcgtttcatacgaaaacacaccgccgtcatccctcccctcacctaatccagagtgaacttggaataaaaacacgaatcaattaaacttacaatctaaaaaaaaccagttggtaatcaacacatccattataacaaagaaacaaacatacaaccttatcttcccgaacgagtgacaattgcagctcacctatatcatcatcatattcagaaagattggattttgaaacaacctacaaagatagatcaaaaaacatagtcataaccggtttctaaacaggaaaagaataaaataaacagaaattgcaaaaaaaataaccagttataaaacacaaaaaaacaggaaacataaaagaccatagaaaataaaaaataattggttataaaaacagaaaaactacaaactaaaagaaaaaatacctcgggtgacggcggatcggaaaactcattatcattcccaccaacatcaagattcctagagcaagaatcttcaaccttctcctcacaatctttgggcacagatgaccatttcttgctcttcaataattcaatgacttcatcaaatttaata

SEQ ID NO: 30775 - DNA, 1296 bp, Cannabis sativa
  modified_base (1006)..(1009): a, c, t, g, unknown or other
gtatgttgggtttaagttgggaaacttttagtcttgcgttccagttaggtgtaactaggacatgatgaggtatctaccatatgtaggtgggtctatattatgtatgagagcataagttttcagggaacttattagtgttgccaatggggcagtttgatatgattcttgtaatggattagttgtttaataaacaaggtattgtagattattcacacaaaagagtgactctattgacccctagtgttgatttcattatttatcgagccaacatgagtagtgaggcaaagtcttaattttagggcatccaataaggtggaaagagaaacttagagtgctatagctaggaatttgtcttcaatcaaggatacatctaggaatctagaccatttcccttgaatatcattggttagtggttttctagaggatttaccaggactaccacctgatagggagatcgagttttgtattgatttgattcctaaagctcaaccagtttctattgcgtcttatcgcatgacacttgaagagtttgctgaattgagaaagcaactaggggagttatagtggataagggttacattacacatagtacttctccatgaggaactccagtcttatttgctaagaaagctgatggaactttacgaatttatgtcaattatagaaagttgaattagatgacaattaaaaataagtattctttcccgaggattgatatattatttgataaacttggtggttcaaagttctttttaaagattgactgcagctcaggctatcatcaattgcggattagggaagaagatatccctaagacttctttcaggacacattatggatactttgagtttttggtgatgccgtttggactaataaatgtaccaactgcatttatggatcttatgaatagagtttgtagaccttacttggacaagtttatggtggtattcattgatgatatcttagtgtattataagacacatgaggatcatgctgaacacttgannnnagtattacagacgttgagagatcatcaattacatgctaagaaagagaagtattacttctagatgaatgaggtcaaattcttagggcgtgtaatttctcaagatggtatcgatgtggatccttcaaagatagactctatcatacagtgggaaagaccaaagaatgtgttagtgaagttcaaagtttcctcttgggttagtaggctactatcgtcgatttgtggagaacttctctcatattgctatgcctttgataaagttaatgaaaaagaagtaaagtttgtgtggg

SEQ ID NO: 30776 - DNA, 3984 bp, Cannabis sativa
  modified_base (31)..(41): a, c, t, g, unknown or other
  modified_base (1029)..(1029): a, c, t, g, unknown or other
cagcgtcggtagcgaatttcgcgaaaaccgnnnnnnnnnnngcttaaaaaccgcctctaaagggagtttttgtagtagtggcactcggaatatctctctgattggagaaacgacaaggataagaattaaaaaaatgtgaaataatcagctgcttaatttttaaattatttgaccaaaaaaaactaattaaaataaaatgagatgaaatagattgcaccatcatatttaaccttaaaaatacttttagtttcatatattgctcagaagacacaatagtagaaactattgtaacatgttcaatcaacctcgtaactttagcacttaactattgtgcaaggtacgtaactgcactactaacaacccttttagtcccagagaacttgttattcccaatcactaacaacaatttgataacgagtcatcgaagaataaagaacaaccaacaacaaaacaaaacaaaacaaaacaaaatcatgtcacataattaagactaaaatactcaaaactgtcacagagacaaaactaaaatattgaaaactatgtcacagagacaatactaattacaataataaaaattaaattgtaatattaaaacacaatcccaactaagccgtatacttatgctaggaaaagctggcgggcctggccgaaaaaaaaaaagataacttcctgtatttataaatttaagaacaagaaacactaattttttttaattttgttaatattaaatagtgtttatactgtcatatgcacattgttattttaagtacgtagattaatcatagtttttattaatttatttttttatttttatgatggtgtattatttatttggggaattacctcatttactattttttttactttttcttttcaaatttacggtttgggtttctaaagtagttgcagagctagttgcaataggggtttctatacaattttttgttgtaatttaggttgcagcggtagttgcaatagaaatttctatatagaattctgtataaatgtaaaaaaaattattttgaagtntaaaaataaaaaaaatccctatttattttggcactagttatataacaaatataaaagttaaaatgaaaatgcttattataattattatacaatacgcgtgattaatcacttatttgtattttttttttccaaattttatatttttagaatttttttcttcaaaagtttaggtatttttaagtcacctaaaatatttgtgtatatttaatgagtaaaaatgttgtctaagttataataaataataaatatgtagtttttttttaataaaataaaattttaacatttagtatctatttaagttttagtgtagctcattatcttttttttaagttcgttttgaaagttatagctcattttctttgggttcactattacaaaataaactttttgcgttggtcaacacgttaatcaatgtcaaaaactgatagaaaaacatcacataaaattttacactagttcagaattgacactactttgtgtcgattcaaaactgacatttagacgtaacagaagattccttgtccttggaaatatattgtcgtacccagacgtgtgcatgcattatccttttgactccttgtctaatggtttctttcttatcacttaggaaaatttcagtaaatattggtcgtattgttggagactctgagaatcttgtcgaggtattctcttagaagaatccattcaagacaagatcttgctgagatgctcattaccatgagcatgaggtgctgagatgcatgcttgagcatgcgtgctgagaggctattgtgcatgcatgtcgagaggcagttgagcatgtgtatcaagatgcacttgagcatgcgtgccaagaggcactagtgcattcgtggcaagatgctattgtgcatacgtgtggagaggcactagtgcattccgagaggcacttttgcatgtgtgccgagagacactcatgtgtaccgagaggcactcgtgcatgcatgtcgagaggcactcgtgcatgcatgctaagaagctctcatgcatgcatgtcgagatggagacgcatgcgtgccggggtgatgcatgccgagatggtggtgtcaggaaggtcaccaacaccatctcttgaggcttggtgcttcatggttgagtctcaggactttgaggcttgaagctttaaaccttgtatcttgatgttcggggtcaaaccaccttcactttctcgaaggaattttgttaaccgcacgtttacttggctaatcttgaaagttagctttgctaatttttggggttaacaaagtagaatggaatattttagaaatcatgatgtttacatttcaggtttcctaatagttttgttaacttaattatgaaatgtcattcatctgtttctattagttttagcattaatggacaagtgattggtcatgtgcaagcttctaggggaataagataagagaatctgttgtctccttacatttttgctctactgtaaaggtcatgttgcagcttcaaaactagaggaagggttgtttatgggaattaaaagctctaggaatagccctactatagtatctcattttctttttgttaatgatagtatcttattttctatggtagataagatttcttgtgtagccattattaagcatgctttgcttgtttataataaagctttaggtcgattagtgaacttagctaaatcttttttattttattttccatgcaagataattcgtgcgatctaacttgaaagtgagagatgaattgagggaatttttaaatggattccataattaaggctgcggggcaagggccggagtaggggtggcagtcaaagcattagtgggatgatcaagaacactgggatccattatagacgaagatgccaaaggctatgtaataccataatagagcttatcaatacagaacttaagagagcaatgaacgagaaaatagagcatcaaagtcttgcaaaagctacagagctttgagctgaaggccattatttatagtctcaaaaatacaggaaaggagttgttacaacaaacctgtaactaactcaacaaccaaaaaggacagaaaaacagaaataacagaaaagatattattctgtatcaattctctcctaatacttctaaccaatctttttcaatcttttttaaatcttttaggtttagataataaactttttttttgtgtgaatatatagggttgccacaatgttttagtaggtctaaaaatttgtcttttgatttcatgattgataaggttagttcttttcttaatagttcgaagcataagtgtttttcaagggcaagtaaagaagtcattttaaagagagtagttcaagctatttcttcctatgctatgtcttgttttaggttatctggggccacctgtctaagaatcgagccccttatcacaagattctagcggggttcacttggaaatggatttaaaattcactagaaatgtaaggatgctttatgtaaatctaaattttttaggggtctggggtttcagtccttagtgcatttctatcaagctatgttagctaaacaagcttgaagagtacttaagaatcctaattccttattggccaaagtcttacaatagttcaatcatacttttcatgcatgctagaaaagttcatagcgcaccgtttacttggcagagtactcattgggggtagagatttgcataacaggagtcttgtttggaagatttgtaatgaaatttctatcagcactcttaatgatcgttggattcctcatcttaggttgatttattacaaatcacaagaaaggccttcttctaattttgtctcattcttcatccatccctcagattcctcgaacttacataagatagatacctattttgaggggatgttgttaaatctatcattgtgatctctaactaggcctaaataatcttgatgttcaaatttagagtcttacaagttctagtcagtttactataaaatct

SEQ ID NO: 30777 - DNA, 2606 bp, Cannabis sativa
tattcgtccttttatttctgcagcaactagtttctaacatgttgattaactcccatcaccctataaatattaacccttcattaccattggggatttgatcatttttgtaagcagaaattctcaaaaacaaatatattaaaaaatatttactatatatactagatgaatcatgtctatatatatatataaatatattgaattaattggttgggattgagattttacaaatcaatttacccatgcttgttggtcttgatataactctctccctctatctctcactttctctctctatatatatactatagtattctatttttaattctatgactcaatcgacaaaggttaatgttgcccattaattttcactcatcaccttccatccatatatgaagttggtcctggttggtcccatgcaatgcatatatctttatatattaattatccttcttattttcttggttcatcactaatatatgttttatataatatacataattctcttattatataataaaaaagtaaaaagtaattttaatagactacatataattaatcacaactagacatggtaagaagatctatttagttagatcgggtcgaagttccgatctgacagatcattttttattcgaaacattcaaatgcttattgaatttcggatcagatctacttcgccccgcttaattttttttttgaatgagatctgtgatctgatctggtttcaatatattaaaaaaacttaattaaagacctgaactcaggatccaagacccgagacttggactcgcactcgcacccgcacttgggacccggcactagaattggacttagacacaaacatacctaagacccaagacccgagacccgggccccggactcgggactcaggacccagacccaggacctaggactggacccaggtcgagacttaggaccagacccggaccgggacccgagaccgagattcgggacctaaattagatttggaaaataaaataaaataatactaatacaaaattaaaataaatataaaattataagttttaataaaaaaaaatatatataaatcgagttgaaacagatccgatctgaataagttaggttgcatttgatccaatccgaatatttgatctagcggggcgaggcgagacgaatcattagatgatttgaattaagatcaaattcgaccaaatttatttacactcctaatcacaagtccaagacagatagttcaatgtaaaaaatgtatgtaatgtatgttaacattttgtataactaaagaatatctgatactgtacaataaaataaacatcactttctactctttttcattcaacacaacctattattatttatgattacgatttcaattttgatcacttcatgagcaaaatggttctacaatatagccactattatatgaatattggaaatgcttactacatatttaaaggtaaaagaagggaaaaaaggagagggaaagaaactaatgactcctataaactatggtaattaagtcctaagattaattaagttttaagtattaccaaaatattgaaccattttaaaagaaaatgtgtacgtgttattttcaaaaattactaaaaaaatatatatgtatttttgaaataataatttttgtttttaagcccttaagttgggtgggcgctaagctcgcgcctaacccgttttagcacagagccggcctaatgataatatagacaagacttaaaataattaaataattaaactcttacaaaagacaaccttttataaaacgaatacagaatagcaccaccatccccatatatgtcattactcttaatattggtatgtaaaccatactttacaacttctcttgaatttgaacgaccaattctctagtagatgttattactaacacaatagaatcttcattgttgtgagcatataattaataaagatcactgatataaggtgtcaattatcagtggtgggaactgggaacatctctaatggagacaatatttatagttatcaaaagtacacatattatcataaaatattattttttttattttttctctcatttacataaatttaataatttttcatacaaaaatcactttaataatcgacaactctaaaaattatctaccataatcttacataccatttaaatgattgaattttattaaatactataaaataatatcatgaagtaatttttttggcaaagaaaaaaaataaagtaatgtcacgtgttgtcaaatgtaaataatggtaataaaattatattaaaaataatgaccacattatatatgtgacaaaaataattttatgagcaatttctattagaaatactctaagtgatacattataaataattaatagtattctataataattattacattaaattacatctgtctcgatatataattattttaataaaaatataatatgataagtcatgcttggcacgcactaatctctataataaattaaagaaataatactaaggaaatagctcttccaatactcaaacacatcatgagctcctccatcaccataagcacatggtcttcaacaatttcttcttgacaatctctctctctctctct

SEQ ID NO: 30778 - DNA, 3815 bp, Cannabis sativa
  modified_base (1405)..(1405): a, c, t, g, unknown or other
  modified_base (1438)..(1438): a, c, t, g, unknown or other
  modified_base (1471)..(1471): a, c, t, g, unknown or other
atttatataagcatattttaggttgtatcaattagtctatgatgtcaagaattatgcattagattgtattactctctagttcgttttctttggacttttatgaattgtagtatttcctttttattataatatgtgtgtaagagtctttatgtgttatgtatcttgactcttcttatcttcagggaagtaaaattaaaataataatttcattaatgtttaggagaacaagttataaatagtacactatatattatattgtatgattgaagacaatagaaattttgtcgatgagcttatgatactagttattaaatttcatattttggaactaattttttatcataattatcaagttgatatgtagggaatatagaaccttaaaatgtaatttatatgataatttatttatattgtaatgctaatgacttgtgatgtgatgtgaattgtgtctgaccctatttaagtaatttggtaccttggcatactatgacctttggagatgtaggttgcatgatgctatgttagaggcacaactatttctcaagtgttcataataacatgagaaattgttgtgttattttggtccatctagcatgataagttatatagcaatagtaatttagttgtattaatattataatctccaatctcttttatattaattagtatcgcgtgtattgatattatagtctccaatactttttgtataataaacacatttttagtagaaaatatataagtatcaccagtaagaaggatgagaattgattattacactgttaacttagaatatgacattttttatgtatcttaatttgaacaaaaagctatgttaatttctcatgtagatagtctgataaaaactctctgaaatctagaatgttatttgtcaagggtgggaactataccattaaagagatcatttgtataatgtagttgagggagggcgttggtctggttgatgtttagcaggttttgtgtaaactttgatggtttttattaatgatatccttttcttgataaaaaaaaagtgagggagaattctatttgcaccctaaaaaattataaatacacacttattagaaaaaatacaaatttaaatagtttttataaattactcttaatgtttttttttaaatacaagttaccttattgtgatcaagtcctccaattgaagcttgcctcgatttggaaatttcccttcaaaaatggcctcacacctattataaaaaaatttatgttataaacaaatatggatcagttatacttatacatacaattactatatctaatctaaacatataagtatacattatacctttttgtcttttagtccttgctcttcaaagctcttcaaatcaaagattggttccaaaggtagatacttcaattttataaaataatngatacttcaattttataaaataatattatatanaattttataaaataatattatatatatatatanatatatatatatatatgtagatatgtagatatttaggtttcaccgaaggatgagtaatattttttagtttttttgcaggaatagatcgacagattaagaaacagattaaggaatgatagttatatatatgtgtagatatttcagttttgtttagggttttattatttttaatttaaatataaacatcttaaataatttaatgatatataatcatttttttattcttattttttattttactttttcatctgacttttttattgttattcaaaatttaaattgtcgctcacttttttctatttctattatttttatgattattttatttatgcatgctaatatatagctgtaaaatagtttaagtagttagaaaataatgttgagtttgtttaagtattagaataatttattgtcattaaaatttaaaaatgacgttgaagttacatttttcagatttgtataacacctcaacctaatctaaacgttttatcacttacgacttggacggaagacaaatccaagtcactcctgccgaagctaagcctagtcgttcattttaaaatttgaatcttatatcctggataaagaagaaagactagggtatgtattagtcttgtcccttttcaaaattgtatgtgttgtttatttatgtgaacatgcatgcaattgaattcaacttgtgcacgttttgtcattttttttttggttggaaagaagttgtatttgtgtgcctagagtgtgttaaactctcagttaagcaactgattttgtagtagacctttattaagtttgcaatagattcagtgaaaaagtagaaaagggttagttacatttttttttaatccaatttggttgtaattccgttcctgaccaagcagtggttttgtctagttgaggaatgaaaatatcaaaatacctggctatgcattttttttatcaaaaatattttctattattggatcaatgatttgtcaaatgtatgtattgtacgcgtagatgaaagatgttggaagcagaacttgctcataatgccaaagccttctttccccagccacaaaatcaattaccctaaattcaaaaggtaatgtaagtttttattttatcttttacctttgagccatgtactgctttgtttttgaacaattttagtatcagctacaactcagtacttgcaaataggatgaaagaaactaaaatgttggccttaatttttgtcgaatgtgtgcatattaaacagactttgtcctttgtcttcatgactgactttatatttaggatccatttggttattattctctgtgtttagaacaaatttacttatcgggaacctctcttttgttaaatgagaatgtattttttttttaaaagggtacaaaataattaataattgagtttaattttcattatttttaattataattaacctgagtttcgtttttattttttcttgttatttggggaaattaatgttgattgaattaactagttgctatatgccaatgtattgcagtttaaatgaatactgttgttctttgtatactttgttatatagtgattattttctctctaattgtttaagctatattgcagtctgttgtttgtattcaatataagcacaccatcgacactagctaaccagagtagaattctttgtagttttggaaaatatggatcttggccaggtgtttgtccacgcattatcatacattttgggacactttctacttccaccacaaaaataatcaaactcattctcaaacctttattttttttttcaggattaatccatttcacagcgtaatgtgaaaattactgatggtccatactccactattttcacctggaactctgtagtttcattaagtgtaggaccagaagatacaattccaaaacaagaagccaacttctagatctgctcatgtgtacacttaaagatgtgactcaatatttatgaattgatgctgtgtacaaatttaataattttaaccatttttgttgttttttttagaaaataatttgttgtagtacttaaagattgtactatatataatatatatttcattatataaagaaaaaaaaattattttactatttattgtcaatatattattattatagaactattttatataattttactaccaaaaattggtagtagatagttttattggacattataatttattagttttgcaattattttttggtagcaaaataattttattggatattaaaagcttataattttgctactacaataaagatgatttactaccaaaaaattagtagctaaaaatatagcatcaactaccaaatatttggtagcaaaaaactttcagcgacc

SEQ ID NO: 30779 - DNA, 2162 bp, Cannabis sativa
  modified_base (27)..(70): a, c, t, g, unknown or other
  modified_base (1883)..(1886): a, c, t, g, unknown or other
ttatcgatttagaaagttcatatttannnnnnnnnnnnnnnnnnnnnnnnnnnnnnnnnnnnnnnnnnnnaaaataatttccaacagaaatatcttatcgcttgaggatagcagcaataaatggatggaaatgtgtcgataccccacctcgaagaatgggtatagaaacaaccacatcctctgtggggataattgcaggattggtgaaggggaggtgcagcctttgggtagagcgaggacacatggttgcgagtcgcagcaaattcaacctcgtaaacgtattgaggtcggatttggtaacccacgagacctagtcctcgcatgagaagggtacgtttagctgggtattgtccactgaatctgtctcgctctcctcaacatcttcctctcctcctgactcgcggtcaggaacctcccaatcttctcccatttcctcgacttagatgtcagggacatgcctggagtgaatgaggtgttcctgggcggacaccgtagattccctatcgcaaatctcgattgtccctggttcagcgagctcctgaaccattctttctttgtcttcgaaagacaacagacataaagtcgcagtgttggcgataggggtttcttcttcagaaagcgaagctggtataaagatatcttctttatcttgctcatcagtaaaagcaccccctctagagtctagcatctggctatctgacaggtcgctcatctgaaagatagaagatcttttcagtgtgtgaaagtgtggaaacaaagtaaagtgacctcacccacataaaaaaacactactcaaagaataaaggactgacctaacatctaaacaaatggctgggggtatcccagtatcctaatgatcatgtcgttacatgaaaattaaggtactggggcacacccaccatttcgagaacttaggcaattgtcccagagtacaagtcgcatatgtgcaaccaatagaatgcctcaaaaaaatccatgggcacgcctacacaaaatccgaagagtttcgtgacgtagcaccctaaataggagcaaatgtaataattacagccgtcattttttgaaaccctcgacgggacaaccaaaggtcaccaccttgtgacatctcttcacctgtctctcgattatagtttccctcatgaccttatctgtcagtcgcgaaactaggggcatgtgttatagtgagatttttttcacctagaaacttgagaccggactcttattgaaaagacacgtgtattcactttcctcgaggagagctaagatgtcgatgagagaccccacgagtacgaacctcgcctaaacagattcagcgagatgatgtgaatatgaccaagtctaaccgcattcgtaacattgcttccaagttgaatgctagcgagaaaggagtgtgtcccgttgctgttttctcagtagttctgtgagcccaaagtacttgaggtagctcgtcgacccatctgcccttggcagcatctaacttcttcttgattgtatccttcaaggttttattaatagtttccacttgtccattcgcctgaggcctgaatactgatgagaagctcttaattattttgttcctctcgtagaactcaatgaacaagtcaccatcgaactaagttccgttatcagatactatcttcatgggaattccaaaccagcagacaatgtttttgacaacaaaatcaacggctaccacatcgtacttggctccccctcgccctgtgggaagtgccccaattaaatcaatcccccatatcgcaaatgggtaaggccaggtcatcatccttagttccgttggtgctacgcaaggtatatgggaaaatctctaacagttatcacattttttgaaaaactcgtgagtgtccttattgatcgttggccannnntatccttgtctaatgatctttttaaatagactctgccaacttgcatgatccctgcaaaagccctcatgtatttctttgatgatctcatttgcttctgtaggaagaacacaccgaagtagaggcatggaataacctcttctgtatagtttgccttcgactattgtgcagtgaggtactgtacataggagtttttgtgtcttgttcttgttagttggaagttttctatcgagtacatagtgttggaaatttattttaccagggtcttagatctactca

SEQ ID NO: 30780 - DNA, 1302 bp, Cannabis sativa
atgaatgattctttgattcgacctttcacaagtgatgaaatttacagtgctttgaagacaataaatcctgataagagcccaggtagtgatggcatgtcagctatgttttatcacaagtattggtctattgtaggagatgtggtcacaaaagtttttttgggtgtattgaatgaaggtcatagtatggatattattaatcattcactcattacgcttataccaaaaacaaaaactcctactggtatgtctgacttccgaccaatcagcctttgcaatgttatctataaaatcatctccaagactcttgctatcaggtttaaaaatgtccttccagcaatgatttcagaaacacaaagtgcttttctttctaatcggcttatcactgataatattctggtggcatttgaattaattcatcatttgaaacataagacaagggggggtagaagcttctcagcacttaaattggatatgagcaaagcttttgacagagttgagtggttctatatccaagaggttatgcttaaaatgggatttcatcacaaatgggtggctttgattatgagttgtcttagttctactagattctcatttatgctgaatggtgaagaagtggggcatgttcaaccaactagaggccttcgtcaaggtgatcctttatcaccttacttatttttgatttgttctgaaggcctatcaagactattgcaaaatgaagagcttaaccagaacctcaaaggtctacgattaacacgtcattcaccatcaatttcacacctcctatttgcggatgacagtcttctcttttgtgaggctacacatagttcagcaagggctattaagaatgttcttgatacttatcaccaagcttctggtcaactcctgaatacatccaaatctgttatgtccttttcgcctaataccactcaagaagctcaagattacttccataacactttaggcatgcctattagtgaatgtcatgaacgatatttgggtcttccagccttctcggaacgtgataaaaaggagatgtttagtgatgttaaagaacgcatatggcaaaagcttcatgcatggaatgagaagctcttctctgttgggggaaaagaggtacttttgaaagctgttgtacaatcaattccaacatatgcaatgagttgtttccgtttgccttcgactttctgtaaccaattagaatctatgatggccaatttttggtggggttctaacaaagatggttctaagatacattggagaagttgaaaattgttgtgtaagtcgaaatttgaaggtggcatg

SEQ ID NO: 30781 - DNA, 1008 bp, Cannabis sativa
tatggtcttaaacaggcttcgagacaatggtatgctaaaataagcactaccttaatctctaatggttttgctcaatcccaatctgatcattccttgttcattaaatccactcccaaactcttcatggctgttctcatctatgtagatgacattgtcattgctagtagcaatgcctcagcaacaattgagttcaaaaaatttctgaatgctaaatacaaattaaaagaccttggccaacttagattttttcttggcatagaggtgagtcgatcacctactggaatttacatctctcaaaggccttttactctccaattattgaatgaaaccggttatcttggttccaaacccgtttctaccccaatggagcctaatctcaaattgagctccactgatggacagcctttatccaatcctactacttatcgtagtctcataggcaagcttttatatcttaccatcacgcgacctgatctctcatacacagttaataggctaagtcaatacttggcatctccacgaaaacctcacttgcttgctgctcaacgaattctgcaatatcttaaaaccacccctggtcagggattatttttttccaacaaatctgagtctcatgtctctgcttacgcagaaacaagtctcaatatcaaagtcttctctgatgcagattggggcagctacattgacactaggaggtcaatttctggctattgcgtgttcattggcaactcattagtatcctggaaatccaagaaacaggccactgtttctcgatcttcagctgaagctgaatatcgagcaatggctcatgctacttgtgaaataacttggatacttgctatcttaaaagactttcacattgcccacaacacacttgccaccctctattgtgataatgatgctgcaatacacatatcagaaaatccagtcttccatgagcgcaccaagcatgtagatatcgattgccatatcgtaagggaaaaggttcaacaagggacaatcaaaatg

SEQ ID NO: 30782 - DNA, 2407 bp, Cannabis sativa
  modified_base (1316)..(1321): a, c, t, g, unknown or other
atattgaaattagttttatttagggcataaacccaacactttcaagatttagattcaagctttcaagaactagactcaacctccaagaatcgagtctccaatagctacaaccatatttgagttggataaattcaatggctcgaatgattttagcttgtggagattaagatgaaattttttctggttcatccaaggatctcattagatgttgaagctatgattctcatgcaggacaagaagaagaaaactgagattgaggcaaaggcacacagtgccattcttctaagccttggtgatgaagtgttgggagaagtatctaatgaggaaaattcacttgatctctagaataagttgtcatctatctacatgaagaagtctttagcaaataaattgtacctcaagaaaaggcactacacacttcgggtggatgaatccagggaactcgaaaaatatcttaatgattttaacagaatcattcttgatctcaacaatcttggtgtcaagattgaggatgaagaccaagcaatcacattgctcagctctctgccaaagatgtttgagcatttagtggacacaattctgtatggtaaggatactcttaccatgaagaccaagcaatcacattgctcagctctctgccaaaggttgctctcaagaaaggagagatgacagaggtgagagcaatggagaaggattattaattgtgaaggaaaagtaccccaagaagtgttggtatttatagtccatatcagagttagaaaagcagaagtggatttgataaatctagactaatgaaaagaaggcaatacctcttgtagtctatcatggaatttttgctatcttttagtataattatgatcatccaatcgaagaactaatgttaaagaattcacattataatctttcaagctaacctcaacacttagaaataaagtgggctattatattctatagaatgaataaatttatgtattacagtgtattctcaactcatgagacattgtaattgagatagagtttatcataatttcacaccaccttgatggtgttgggcatgtgagagagagagagagaggcgtgtaatgaccgcatttcataatatggactagaaaaggcaattagcactaattattggtatttttataattattagtggatttaattatttgtgagtcccattgttagaaatgggcattagagttataatttctcgattccggggattttattaaactctaggagtactatttgaattatatgtgaattatgcaatttttgtaattttttctcaacaacaacggaaaatgcgatggatnnnnnntttgatcacatgggtaagtctagagccttatttcttagtggaatgtatattggtggaaattgagtattggggttgagcggggttatggattttgaccattctaccccctatctttgaaaaatgccctaaagttataagttaaggggcattttagtaaatttccacatgggtgatttggtggctgcattaggttttgacacctagctagttacacttcagccaaagattaacttagttaaccttttacattttggaaaaaattaaagaaaaataagaaaaagattgaaattgaagaaacctctttctttcccttctctctcttcgaactagccaaaaacaaggggtcttgctgctgctctttggtgttttcagcaaggaattcaagagggattcaagctaaggtaacccttgaatccatagatttgagtttttgaagcttttacttcggttgattttgtgattttgagttttaggggctgttagggtttgaattgtgtttggttcgaattctaagtttaatttaagttggaaatagcttattgttgcttgttttgttgtgttgggatagaattgagcaagtttgagctttcaaatccaaacttaggtctttaatggcatattttaattcagtgtgtttttctgagttttattggttggattatgttttgtatgccctgtttaggtactttgaaggtttggtagcatttggttgagtattgaaaaagttttgggttttttgggggaaactggtacaaattggttaaccagtttgccaatacctgtaaaaccagttaatcagttttggcaggttccctgaataacctgttttctcaattcttgcccatttcagtgccttagttgagtgtttccttgtttcctaggttgatgtaatccctagtgaatataacagagccttgagttgtagatttgggtttcccgaattagggttttggacatgtgatttacccagttttaatatgtgattagggcatccatcctgcacgagactttccatccaggtcggccaactcacttgaatctggaaagaaggtaagaactgtgtataatgtgtaatatggatatgcg

SEQ ID NO: 30783 - DNA, 6088 bp, Cannabis sativa
acaaggaaatcactcgttcgtgcccagcactgaattttgcgtttgcgcgatggttttccgtacatatttacgtgtttataaataatgaaggctccggcttcactggtccataactgaggaaatagaaaattagaaaacgagtgttgaagcagagttcagagagagagagagagagagattgggtaatggctgccatggatatatggatgtcggagaaaaagtcaaacttagaaggacacagagagtaaaatgcgggtaagaagctgagttcgccattcatttatttaaaaaatttgttttgttgaataaataaagaaaactcatggagacgtgcgaggctccttcaaattcgctactactcataaattattctccaaaagctaactcttttctctttctctctctctctcttctcttctctgtgctgtaacagaacaagaaagaaagaaagaaagaaagaaaggagacgaagctcattgctaaacgtaattatgcatttcgaaaagcttgatgattctcctatgttccgccaacaggttacattcgattcatttttcatcagcatttatgttcaatttgcatgcgtttcatcaattcatagccccattttctttcttttggcttgagaagaaatatgacccatttgtgaattgtgattttggcatgtattggtttgttatagaatatagatcagtggtattggtttcttgatgaataagtttgtgtctttagtgtaatatgtatcagaaacttgggaatgaaacgtagatggatgtttctcttttctttattgttaattcttgtgttttggtaggcaatttgtttagcatacaatcaagcttactaaacaatgtaagattaagatatattgtattgtgtggttcttgaaacagatacagtgcttggaagaaagttcagagtcactaaggggaagatgtcacaagttttacaaaggatgtcgaaagtatacgtacgtatgttttaactgtgtaatttctttcaaattcattatttacaaaatcaatgattctctgtgcttagtttctcttttgtaattttattctcagagaaggccttgaagacggttatgatggcgacattgcttttgcaagtgcgcttgaaacttttggaggagagactagtgaccctgattttatggctttaggaggtaactgttccatatctagtttgctgtatcaatatgtatttcatcttctttagaagaaaatttaatcatagtttgtactttgtggtgataattttatattcttgttacatttataatgataattaaccttacatggcctcttcacagacaatgtcaaagttgtctgtttgtaatggttttaccaacatcatataaatctcttgtttctttccccaatagtatagcttgtgaaattctttacttttaaaattcactgtaacaagccccaggaaaaagggcatcaacttaacttcatataggtgtatgttcacatgatttacatatactaatcgaatccatgctactctcaggcccagttttgagcagattcgcaagtgctttgagagaaactgcagtttataaggaagttcttcaatcccaggtaaattatcatatttcaatattttcttcaacttgaccgtcctatatcattcccaggtgatccaatagcaatcatcaacagtctaacttgtggaaaagagacagttctgattgacttcgctgtttgccaaaaaaaaaatcttttttaactgacttttctcaggtagagcatgtgctaaatgacaggctcctacagttcgtgaatgtttaccttcatgatgtaaaggtatagtgtttaaaatacatactttgattgcacatagtaggaacaccaaggacgtaaaatcaaaactgcagaaatattctttctaatataattccatacaaatcccaagtggacgtggactaaaactttgtggacttttcaatatcaaatttactgcataagaaaggagaatttaattcatagaaaccttatgaatactccacatgaactgctgggaataagtatccatgactgccaggtccttatatttacacaatgtgcgctcaatctcacagcagtagtggcatgttcaacttaacctacattttattggtaacaatagcataccaaaaaaatgatctacaatggtacatccagttcttcagttcatacacacgtgataggaaacatttactactttgtattttattcaatatatgatgttgtgtaactatcattcttcatgatcccctactgtccaattagaaaaattcatgttctcactaaagtaagtatcattgttgcaggaagcccgaaagcgctttgagaaggcttcattcacacatgatcaggtaggtttccatcctcaatatctcagtagacatttcgtgggactttacctttttaccatgcttcataatccacatgcatatatatttttttcagtgataattttattatatatttttatacaattaatatctgtccatgctagatggccccatgaacaagactattttgaatgatcacattcacaggaacattattttatattgtaccgataatttttttcttttttgcttaccgtaatgtaacatgataattaaagctgcattttaacttagtaagagcagtctattccaatgaaacatcaaagatgagcctttagtattattttttttgaccatgtgagcggatgttagacttatagtggttctttagtgagatatatttctgtataatacagatttttcgcttctggtttgtatgaccaacatgtgatctctttggttatcaacttagtaagagcagtagaaactagaaagatgtgttttaaaactaaagcctcccaaattgtggtcccttgaggaatagaactgaaataggggggaaagtgtttcaaaatttctgactgagtcaacttgatttccacttttcttgctgagttttagtatccaatactatgtggagtactattgaagccaagttgtatgaaaattgtctttgagttttccagcttaatgctgttaaaagatatgtcctgtttatgtgttctgtattgcctattgtttgacacaggcccgcgagaagtttctctcagtgaagaagagcaccaagactgatgttgctgctgttattgagcaggtatacctaatagtagactagtaggctatctccaaactgacatgctactgaatgtttctacatacatttacttcggatacttttacatttatctatttatatctaatttgatagagaggcattccaggaactcaataatgcaaggtcttcatttgatgaagctcgctttaatctggtaaactaagttttacaattatatgttatttgattagaaaattcatcgtggaaacacttatgcctctaatagattaactccacatacaggtcggtgctctctctgacattgaggcaaagaagagattcgaatttttggaggctgtcagcggaatgatggatgctcatcttcgttacttcaaacaggtatacaatgcaatcaaaatgatgcttatcccaatgttgtatcacagatgtatgctgcctcttatttggtctcaccatcttttattttagggatatgagctgttacatgaaatggagccttacattaatcaggtgtgtagcttgctctattttacagtattatatttttatttcttgacttgctgtatagatttgattgctccggggtaggacaaatagatctctgtgaagtaaaactttttctccaagataatgggagggatgaagtaggtagaacagaaccaccactccctccccctcctaactcagaataatgccttccagattacttgtacatctaattctatttaaaattagaaaacttgtagattctttcatctatgagtagaagtagagtacgttcatgatcattcccatagcagcatgcactggcatgtggcaatagaaccattctcattagaactgcaaaacacaactttacaataccacattgggtaattctatccttgtttcatgtaagcagatatagctttgtacttctcaatcgtcttttctttttgactgccttgtttttttattttaatttcatttgatatatggtccacgttaaagtctgcaacccataagattgtgttagggaggtgaatgcatgacatgcaattttcaatacagttgctctacactggagagaacatatatcggtaaaaaaaaattgtcatttcagaacagcatatatgatagtaagaatagaaaattcattaatttacacagtaagcataaagggacatcaattacaaagtaactgattctccagaatttttctctttattcttctgaatctgaactcagagaacatattttagaacagattttgcaaagaaatggaacttatttccgttgtcagaatccagatactatccctttctgactcccatcattgatgttaagttttagactatatatggagctagcttatcagaaatgtattagtccctaagtaatctacccaacatctcatcaagtgtaataagcatctgattttcttcttgagcaattattttatatgacaaactcaaatgccattcaacaactagttagcagaactaatgttttcttagtttacagtttattcgtgtcaaacttttttatttcatggaaaaaaatttaacttcaattcttccgttacagattttgacttatgctcaacagtctagagaaatttccaaccatgagcaggtatctctcattgaaaggatgctagagaacaaaaagcagtttgatcttgaaactaaagaatcattaaatggctctcataattctacaaatggagacagtatgcagccttttgcttggcgatcccacaaagagatagaggccgtgatgcaatctgctgcaaagggaaaggtgtttattgctctcattttacttcagatcagttataattcataatagttattctgataattatctctattcaaggtacaaacgattcgacaaggttatctttcaaaacggtcctccaatttgaggggtgattggaaaagaagattttttgttcttgatagcagagggatgttgttctactatcgaaaacaatggggctggccagtgagttactaactaaaagaaggtactttcaaatgattatgccttttcttttctgcttatgtagatgttgactataaatttcagtctggaagccagtctgcaccacagaaaaagggctccttcgaaaatggtcatgggcttttgagtaggttgctttcatctcaccatcacggtggtgcaaatgatgaaagatctgcccatcacacagtaaacctcctgacatcaacaataaagattgatgcagatcaaacagatttaaggttctgcttcaggattatttcaccttccaaaacctacacgctgcaggtatagcatgagaatttggaatgttgaccctcctcatgtcactgttacttttgtttatcttagatcttatatgtctgttttgttttatgatgcaggcagaaaatgccattgaccgaatggattgggtggaaaaaataactggagtaattgcttcattgttgagtttccaaggaggacctgagagggtacatacaaagaatttttcttttattgtgaagcttctatgggagtttctatgtgtggtaatgataaaatccaattattgtgtcagaatctctctgaaagccccacaggaagcgatgaattttactctgctagtgatagtagttcattcagaagttctcctgacgttgatcacaaagctgttgaagatcatttttcaaagatgtatcacacaaacaatccctcaggtgtctctagaagtttcaaatcacataaggatggttggaaaaatgagaagccacttgacatactaaaaagagtccgtgggaatgaaatctgtgctgattgtggtgcacctgaaccagattgggcatccttaaacctcggaattcttatttgcattgaatgctccggtgtccatcgtaaccttggtgttcatatatcaaaagtaagcaatcctaatttgcattcatgttgcctagttcccatatgtg

SEQ ID NO: 30784 - DNA, 1848 bp, Cannabis sativa
ttgagtaactctaaaagtgtatagtgacaattcaacgcgcgtcactaatgaggctgactggaaaagtagtttttagtgacactccacacgtgtcactgatcccttttacattcactttttgcacgtcactataggcgtatagagtcaatttttttcagactaaaaaggtaacagctacacacataaaatgtcactatatccctttttttctttttttattattttttattaatatttttggaactatagtgacacacaaaaaaagtcactatatttatttatttatttattttaataatttttttaatataggattttatttttttatttatttatttattgggaaaattaatatacttatatatcagattttttttttattttaattttcatagaaaaaatttaaaaagtgtatatatacatttacatttaataaccaaaatttaatttacagaaagaaaaaataaaaaaaaaataaagtatattgaacaaaaaatattcctttgaatcaatataacataagtattgttcaataaaaatttttttactgaaatatttataaaacaataagagtgggtattaccacttagatgaaaataaaacccaaaatttggcatgaacacatttgtataaaaaaaaattagaaacctaaaaaaaactatcaagatcacgattatagtagtccaccgtagacaatataaccccgacctccatcaaccagaaactcaaagccgctgttggaggagagggattcgaagggtctcgaactctagtgaagtaaaacggatgactttacaaacccccaagcaccggtcattcccctgtaaagaaatagatgaagaagagaagttcaagactttagatctaccgttaaaaatgaaaggaactaaaacaaaaacataggatgacacatgggcctaaactgggcaagcaggcaggcagaacgcaaatatcctaaaatttgacatgaatcaaacaaatgtccttatttcaaaaaatttaacaaaaggaacaaattaaaataaccttacctttaaccccgtacaccctcacgtttttcactttgtttcagccctcactctcacagtacaactctcttcactgttaccggctaccgtcattgccgatctctgacatgccgacgggtgttgcgcctattggcggtgcccatttgggcgttaggacatcggagaagctttgcccaggctggcgatctcatgatcgcagagagaatagacagagaagaagggaaaggcgctggtgactggtgtcgtgcgtttgggctgtaagacgctgccaacgagagagaagaaagagagaggtgagaggcgtgtaattagggttttcacttaagaatgatatatatatatatatcactttaaataaaaaaaaaaagaaagagagaggtgagaggcgtataatttggattttttgagatatatatatcactttaaataaaaataaaaaaataaaaaaagatctgatttgatttgatttgaaagagagagacgatgatgggtcatttattatttatttttttaaaaaaaataaattaaaagaagagcattataataatagtttttttttttttttataagagactatatagtgacacacattgtgtgtgagaaaatgtgtataccaacacgctatgcgcgtcactaaagccacgtgtacatggttttagtgacgtgcatagcgtgttggtatacacatttacatacacgcgtagcacgtctctataagttatggttttttttttttttataaaattataaattttgggttttagtatttagtgacactctatatttttagtgacctacatttcgggtgataaataccgaa

SEQ ID NO: 30785 - DNA, 1528 bp, Cannabis sativa
gagaactcgcgctacgcacgtgaggcatgttttaatttttctttaaaaaaattattttgaaatgagacatattataataattaaataaatattttttaaaaaataattatacatatttatagttagctatatacacattttaatatagaagagattatattatctttatataggtttaattgtgaaggtaatgagttaacgaattattaagtgaaaaaagattaaatatactaccatataaatttgattatgggttgaatgttttgctcttaagttatatatctatatatttatatataaataaaaaaaatgagttatctcgatgcttgatcataaaatagctttgatgataatgtacttgctgataaaacaatataaacttttatatggtcaaagaaaattaaaaattgtacacttaacatttgttaaaataataaaactaaacaaatatacttaaataaaactaagaatatcaaattaggcaaaatactctaaattatacataaaatttaaaagaatcttcataaaaaagaattaagattaagataaaaaatataaaatttttatatgttaaaatttaaattatatctataaataaaaatgcataaatatttcatctaatttattaattaaaaaaataaaaattacaaaacattaatttaaaaatatcactacattcatcacttataaatggattttttaaaaaagaagaagaagaaaaaaaacacatataattaatgaactttgaatatacattgaactctaccattatttaaaaaaaaaaagataataatttatgttatagtgagattttctcacttagaaactcgaggccggactcctattaaaaacgacacgcgtattcattctccttgaggaaagctgagacgtcgatgagagacccctcgaatatgaacctcacctgaaccatattcagtgagatgatgcgaacatgaccgggtctaatcacatttgtatagctcgcactatgtaggaccaaggaacagttttaagctcgcatgtaccaggctatatttgagtatccccctgatcctcctgcaaaaacatagagatcgattctctattctgcgagctggtcccgttgacccaatagctttgataaaccgatacagactcacatgtcttggttctatcaacttgttatatgatgtccatataagcaatcttaaaaggacgcagacatcctagactcgattagtctcgaatgcatattaaagcctgctagcttatgcagaaatatgaacagccaactcgcactatagaagtcgcataccttcctgtatttactgaattaagctagaaactattcttcatttattgtgtttacgttttttagtttaattattgtaattcaatgtatgaacggattgataataaatttaatccatgtgtaaattataggacacttgctttgtatataaaggagtgatctatcgcgaaatggaacaagaaaagaaatccttgcaacagtggactaagcaaactgtgatctgactgaaccactata

SEQ ID NO: 30786 - DNA, 1039 bp, Cannabis sativa
aaaaaaaaagtcactattaatataaatgaaaaaaactattaaaaatgttttataattattttttgtgtgaatggtagatgtaattataaaaccaatatattattcctatgatcacttgttagattgtatttgaatgctactgttcattttcaataactgattatgatttcattcccttaagaaaaaatcaaaaaataaaattataattaataatgacaatttataacttttatattttgaaacaaacctatataaatgtatagaaaactctcattattattaccatcactttcatattactatcaaaccctacctaacaatgcatggttgacatgtgagataagagcccaccttacttgtgtagtgatgatcctcatgaataccctttcttcccttatatatatatatatgaatatatattattattagtgcaaatttaatattaagttttaaatattttactttaaataaaaattataaaaatacactaactaattataaaatgttatttcatagtgatgtttggccgtttaataccgcatagcaatactcatattattttgtagagaccatacatttcatttcaaatgaagacacgtgttagtttcctatatgaagccacataagcttaaattaggagtgtaaatagatcgggtcggatctgatccgactatgatctgacctattgatatcatgtaaggatctgccccgcttcgcctcgctagatcagatcagatccaacctgtcttatttgaatcgaatctgatctgatccgacccaatcttttttaatatctaagcttataattttatatctattttaattttgtattaatattatttaatacaatattatatttggtattgactcgtattaatagattgtataaagttataatatattttcaataaactcgacccaacaccaactacgggttaggtccgggtccgagttcgtgttcatgtcctaggtctcaagtctcgggttcgggtctcgggatgggtcccaggtctggtccaaagtctcgatctcgggtccg

SEQ ID NO: 30787 - DNA, 2770 bp, Cannabis sativa
aaaggcccattgggccagaatcagctacagctacacctatacacatacacctacaccatcttgtttcctccttctctacccgaaacgaagaagaaccaagttcttcaggagccgatcatgattagcgttctagctcaggtaatccatgcaactttcattcaacatctcatgtcatccatcggatttcgtttagtttcgctttttctcaatttgatttgattcgtttgtttgtgttttttgcaggagcggttgctgggggccgcactcggaagcatattcactggaatggtagtattcgagcagcgaagaagcatttataagtccatttcagatactcagcctcaattaaactcccaatttcaggtaatttcttctctttctctttttatttattcgtattgtgtcgtagtttaggtttatgaaaccctaggactcgattgtattaagttacttacttgttttgtttcatgtaattttataaatttcatttaaagatgatttgttctgatttggtaaaagaatgtcttgaactttgtcacgaattgatagaactcgtgagttttcgtttatcaacgaaagaccaaatgctttattattaacacatttaagttagtttgagtgttctgagtgtcaaatgttcaaattatcttgtcaaaaaaaaaaaaaaaaatttgtttgaattgaaagatagagttcattaggttggcgaaggcatcactaaaaattcagtgttcttcatgggcatgaaaggtcgtttttaggtgtcttatgtttgcaaacgaattcggtgattgaccggtagtaggtcccaacttgctcaaattagttgtgcattgtgtagttcatcaaggagcacttctaacaccatacaccttacctcatcctactttccaaactacacattctaacattgaggttgttacataattgaatgatgccatgagttagcatttaagatacaaaggacattgttatggttgaatggatattggtgcaacactatcatgaagggccatggtgtgctccttgtttccttttggtgaaaggcctgtagacctaggtaccttgtaggtcagcaataaaagtaggattttcaccaaattcatgtgtacgtgtgttgtgtttgtactcctacatatggcttgatgttggttgttcatggtgttgaagttatgttgagagtggctaggttcatggtgttgaaatgcttcctcaatattgaaagtggaagagaaatgagcaccttcagtattatcctcgtcatcacctagtacttggtcatcatcaccttcttcctccattgcttgatcatcatcttcaagaggaaatattgatctttacttcatatccacacccattttcaaaggagaaacccatgtgggttaataataggaggttgtaggtgtcactaagctttggtctattccaccccaaaattcaaccccaaaggaaccccaagtttttgaatctttactccctcccaaagggttgatatttatagactaataagttcagctggataaaattaaaaggctaagcaataagattctgaaaaacacatgaacttaaagactctcatttctcttaggataaataagaagttgttgggggcctattactgctgcagtaaagttttgatatttttattaaatttaattgttattgactatttctgatttcagtacttgcctcaaagtacagaagtcttaaacttgaaatagaagaattagttaatcgactgatattgtagaatcagtgatattatatttctttaaaggtagtgatgctttaagccctccctgtgatgacttttgctgtattcatcaacgagagaaatcaaacctttttgctaggcatgtgattaaaaatgacatttttttgtccatacttatgctgtggtattgattataaaagtgtgttaatttagagttgtttggacctttgaatttgaatggcctcaatgttttcctatgctattttattatgtactctctattaggatcttctgtatgaaaaattccatgcaccggaaatgatcaactttccagtttttgaatattaagcaatgcacagaaccaaacaattgtgctaccctatcacacattgtagattctgctttgtataggctaactcaacagttacaatctggtacttgtagcaggtgagagagcccatatttggaaaggaagctcgctcagagcttgcacgaatgtggaacaaaggtgtagaccaggcgtttggacctgcaatccagtatcttagctcccacggatggtagattttgtgcaataccattcccaatcatatacaatgtatgtatggaccctcctcattcatacaatgttacaacattcctaactttgaatcattttcatcttgagacaatgaccttgattttccaagtcttactatactaataataataatatggccttctgttcccttgtttgttcttcttgcaggatttgaatacctaaattagttactaataatgagggtcccccatggtgagatatgaccgtttaacttcctttgggggtagtagccattacttcggggtgacatccccgagacttgctatgaagggggcgatagtcgccatctggggatggtactcccaagatcccttctacttgatcttcgctatttttcttttcaaatatcacataattataaaaaataataactcatacatttttttttaattttttcctttttaaaacccaattatcacataatttagaaaatatctctaaaattactttttttt

SEQ ID NO: 30788 - DNA, 1543 bp, Cannabis sativa
atttctttttattaaaaaaagtatatgtcatgtctatttgatttttattagatgtaaagtagtgtattatatgatccgataaaattattctaggtttctatttttgaataactagagtttgttagagtacgctcaataatttctctactctatcttttaaaatatattactaaaatttattttttttattttacagttcacttttacatcatacatacatcaacttctttaaaatacatcaccatacctcagtatattatatatatatatatatacatcttataattagagtttgttagagcactctcaatattatatattttcactaattttaataaataatttagataataaatctataaataaatttttcattatttcttttaaaatatttttaaatataaaagatatacaaaataaatgatataaaaagtaattgtgccagtaggaattatttatctcacataaataatctcacacacatatataggattaactagattagttattcggtctttaacatggccaataacattagactagtaaaattatataattcactgtaatcgaattctacgtgtcaaacaagccgttgaagaattatcttaagccatgtgacttatgatcttgctggttaatttagttcaaaatatatatacatatatatgcatccactaaatgtttgaaacatatatatgtcatcgttataatattgactcgattaataaagtactaaggttagctaattagatgcatatttctatgtatctgatctcctttttgttggttcaagtggtacgtggaagtctttatttcgaattgatcttcttcaatttgtgtgttttttaatatatacgattcaatggattaggattgttatactgtaaagcttgattaaagtgtacaacaacggtgcatcctcatcattaattattctttctttactagctagcttatatattaagatcttcaaatgcacatgcacatcctttagtgatatatggctagcattcttatttgattgatcaaataaaaataaaaacaagtatataactaatattgtaaaacaacatttaattatatatctgaattcctaataattcaataaatgtataagacaatttgcctaagaatttaaagagagattattgtccatcgtgattatgcacatatacatatatattatatatatatatacatataaatcatgtgtgtatggtacatatcaaataagagttaatttaaacatataaaatgtcggtaatataagaactatctagtaattagaagtatggtgatttcatgaattatattatagatctaagaaagttaatgatgaaatacaatttttatattgtgtggtacagtattatttacacctctcattataggtattatataacatatactaaatgcacttgttctaattactaactaagagtgtacataaattgatccaattcaatgagaaccgaccgatccaattacaatcgaccgccaaacattggatatccaattatgatcggatcggattggatgttat

SEQ ID NO: 30789 - DNA, 1498 bp, Cannabis sativa
aatagcaccaatgtcgtccccgtttgcaaagttaacatatacccaagttcttccaggtcttggaaggatccatttgttgaaatcctcatagattttcttcttcatctcttcaaatctccagtgaccactattatgaaagttagaattcttgaaaaagccaaagatcatgttaaagcacagcagcaaaggttacaatttcagctttgtcaagcagagaaatatttccaagaaaaatcgaaggaaacatccacttaaccacctttgcacctgaatgcagaaggaaattgtcaatttgaataccccatttgctggagaaccaaaggccaatagtgatagggaattgacagcaacagtatcactgtcagaattgccacaaagaaaatagtgtccaaccttattcccaaaaattcttcccaacctcgagccaaacgggaggcaatcttttattaatttccacaggaaaagcttcattctttcatgaatacccgacctccacaaagaggaacaaatctcatccattttaaaagtcctcttatacaagtcaaagtagccagccttgagagagaaacaaccatcagaacttgacatccacacagcgagtcaccactttgaacatcaacaagattacaagacataatattcttagcagtctctggacaaaaggatctcgcaatcagagcctcatcccaagaaaccccttcatcaaccaagagtttccccactttcaaatcagtggtgatgccatggttcaaatccttaggccccaaaagaatcccatcagaacacgaccaattacaataccagacctccaccttcgaatgccttctaaccagccaagcactattgtccataatgaattcacgagtttcctagatccttctagcaataggagaggcatgacgagggagagcacatctccaaaagctagaatcatgacaatatttatccaggggaagttggactcaaagagaattgtgtcttttatccatgagccatccaagttttgtcatcaagcagaaattaatgtcacgaaaactgcggatgccaaggcctccacaacctttaggcttgcagatagactcccaattcaacaaagaaagaaaccttccaccctccgtacttcctatctaccaaaaacgtctaaccagggcatccagaacattggtaatctttacaggtaaaaaaaaaaattaacatggtgtaaatcacaatagaagagatggcattcttaataagaatagttctagttgcctgagaaagaagcttagccctccaacccttcattttacttctgaccttatcaatgatgaaattaaagtcactacatctgctgcctttgataaaaagaggatttccaagaaagaactcttcaccattcataatatcaaaccccaaccgatctgagatagctaagcccagatttaagttgtagtttttttagaggagaaccttggacttgctaacattaactcgctgtcctgaccataagcaatatttt

SEQ ID NO: 30790 - DNA, 1613 bp, Cannabis sativa
tttatgggcatggaccctacttttggtctaaagaatgggacagagacgagaatcatattatgttttaatcgggactcgtttaatatattaattatttatattttataatatttatttgtactttttaatatattagtgttatttttataattttttaagctgtattttttaataatacataatgtataatattttaatttttaagtaattaatattattatatatttaaaattttaaaataaattttatttttatattagagaattacttgctgcgagcccgttttattaggagatttccctttttatccacgatagaaaataagtggggatgagactaggaacatgaggagcactctctgcaaatctcttgccttcgtgtacatctctacttagtgcttttgtaaagtaaaatattattattgataaaaattagtataaaaaattattatactttcataaaaattatagaaaagtgtaaatcattaatactttgttggtataaaattcaaatgaaacaaaaatgtcaatactggtttgccactccactccaaatttttaattattattaattaatataaattgcatatatcattttcaaaatatggtctctttccacaagaatttctagctatctttcattttcattaattatttgacttctctctctttgtcttggtccaaatgtatttaattccccatatttttcacttttttaataatttgaacaattttttttgttaaatataaatacaataaacgataaaaatatatatgaaaagaatttacaaattgaaaattttgaatgtataattttctttatttaaccaaaatatatatatatatatatcatgatttttaagaatacacgtgtttttttatttaaaaattaaagatatataatagggatgtgtatttttttcatggggaattaattctacgttcatataggaaaatatatatgtatataattttaggaatatatacagtaaaaactgttgatattatttaattttaaatataattataccatccgaagcttataaaattgatacaataataacaaagaagcattatgtatagtattcaataatattctcaaagtgaaaacaattattataaaatctaatataaataatggtcatttaaatatatgaaaatattacaataatactaaaaaagtattatagttggaaaaatatattataggaaaagtcatgccctatgatcacacaacttttcttaatagttcaaaaaagtattatggtaagattaagatttttatataatacctttttttggtattatagaaactagaaagttttatttgttgtatgcatgttatagcttatcatacttaaaatttaatttatagatataatatatatatataacaccaatttattctgataaatattgattaactatcttaatttgactcaacttataactatatatacatgtcataatcttcatttaagttcttattagattagtcaaataatacaattaatcaattaaaaatttgtacgaaataaagaggccgttaatcaataactaattagacaagtaattagccaatttgagcactaaattatacattgtcattatttt

SEQ ID NO: 30791 - DNA, 2944 bp, Cannabis sativa
aaaaattgatgattttttatttaaacttgaatggacggtctggatctgaattaactttgtactggttaagaatgaggaatgatggatgttagattttattttggcatttaataacttatttaatctacatatttggtgactacatgcatagttgtggagatattattattttcttttacttgagtggtcctcattttagttactaatattttctgtataattataggagtcattctattaattttaaatatgtattttgtaatataaattaaagggttacttgttagcattatttttctacaaaggtgaaagtgtaacttttaatttcaattatatattacatatttgtcggaacgagacatgaacatgtttcaatctccaaatgtttttattaaattttaatagtacgatctatatcttgcgtttatatccaaataatgaaatataaaatatataggtggcctttggtaaatttttttaatccattttctattttaaaattgaaaaagtgaaaatattctttaaaaatatgttctattaagctgattttacttttcaattttttaattgagaatcaaaattttaaaaacgaaaaaaaagccacttttaatattttttttaaactgttttctttttcttaattaatattttggacttcaatcagaccccgacccatatccccccacggcctggcgttgaactcgacctctaacctgaacccgaattcgaccccggacctagacctcacgtaaataaaatcaaaaaatgaaaatgaaaacgaactttacagaatacacttttgttttctgtttttaaagttgaaaaacaaaagtagttacagaatgcattttttttaaaaaacaaaaattttacttttatttagtgattaaaaaattagaaaacaaaattgttaccaaacggcacgatagttaattatattattaattcccattaattaaaggacttaattaatacttatagggtctgtattacaacgtgtttaattagctatgttcttcggatgattttgaggcgtgcaaacctatatatgtagaggttaatcgatgtacatataagaggtattattaattagtattatacatattcgtataataatcaaacacttgaaaaatgaattatttatacagctaagagtgattcagatgaaatctcatttctaagatgatctagtcctaatccaatattattatattatgcaaatcagccaaaaaaaatgttgtcttgtaatgttaatgataccaataacaaaagcaaaattccaaattagcaaatacacttagatatttcctataaagaaaaactagccaattttgtcatgtcatgttaatgaaaaatataaataatatagaaattaaaatacttgaatgtttcccgaattatttttttaattaaaaatttcgatcgtccgtacatatcgatttcatattgttttgtgtatattagtataaaaactatactttgtgacttttaggcgttgcattgtaacaaaaccacaacaatattgaaaataatatctcattatcagtggttttttgttttattttgaaaaaatatttattaaaatggaaaagttaaaattcgatcgatccaccctaatatatagttcttcttatgagataaaataatgctttgacaacaaatacacaacactacccaaaagaaatagtagtttacttagttgactattttgaagttggtttctttcatctgataattatatattatacaatatatataaatataaacataaaatatcgattattgtgtttatgtatttggtgtgggcggccaaacatgcctcatgcactgacctcaaaggagagacatgcatgtattacaacccatactgctctgcctcacaacaccaacaccatatgataactgataagtgtatatatatatggcatatacatatattaacatatatataatgatttattttttattttttccatttaaaatgacattagttattatatatataatctgctttataatattataaaataatttacaaatgggtgccaggaaaaataatacgaatgaagcatgacatatggcctatatggctatacattactgattaaaataacaagaagaaaaagaaatcaaaagaagcaagctaaaatgtttaacttattgaagacatgatcgatggactatgatgtgtaacctactatctctcattattatatattatacaataatttgagagtattatttgttatgcaatataataaacatattggtggcattaatattattatcacaatgagccaagtcacatatacatatatatatatatatatgtatatatagtatctaagaaagtagccttaattattaagcatgagtattgttgtgcatgcatatatagactaaccctagctagcctacacaatggacaacgtttttggcacctgcctttctgcatgcatggatatgtgtgatgaagattaattaataggcaattgataatagcattgctgttaggtaccagtgctgcctagcatctttttacatgtcatgttgtgattggctagcgataccttctaaaaattattatattaaattatatagaactcgatacatagttggaccaataacgatattaacacataggagggtgctagacaccactagtaccctttagcatttctgaattgataatatacctaatcaataaatatgtgtatatatctacatacattattcattaataaaacaaaagttaatagtgtgtacgtacacatatatgtaattatattatcattcatcaaatccatcaaattctatggggtgactgactgaaattaaggagaaagataaaccaaattctttatttgtttaatttgtataataaattaattcaaaactttcgtaaaagtttacgtattatgaaacattaactgaaattatctgt

SEQ ID NO: 30792 - DNA, 1241 bp, Cannabis sativa
tttttgctggataactagggatttgtttgaacaacccaaactggctacttgctagggatttggtcctaattaatgaacccaattatctggccacatgaccatagagtctaatgtacgaaatttgacccttaaaaattgtattagctttgattatttcagttcatatttagaacaattttaaaattgtattagctttgttattagacacagtgatatttagcacttctagacatgtcgtcttggctagcgatattttttaaaaattattatattaattataagagacctgatacttgattagactaataacaatattaacatgtagaaaaatactaagcatcatttgtatctttcagcatttatcatataataaatatagttttttgaaataatataaattgattaaatgaatgtagttgaatttgtatctgttttttttcaacctcgaaatttgcatcaattttaatcctagtagagaaaaaaaaatgggatttgatcaaataaatcatgctgcctatatagtttattgattattcaataaaatgggatttgatcaaataaatcatgctgctctatatagttctttttgtcaaataaatcacactgccctcagagtctcttaaatattttgaagactcagttctaatttaaaaaattagacccttaacaaaaaaaaaatacaatttattaataatttttatatattatcatacaagttgtatatcttgtacaaaacactaaaaaattcgaactattttattaatattattattgattctaatacaacttaaaaaaaatagtacctcaacctagaaaatatatataaatatatatcaaatattttttaatgggtattagccattgattgttactaaataattttaactataaatattaattttaaacatattaaatcagcagattttgatttgatgggaaataataaaaaaaaaatcagattttttatgcttaatttagttacttatttaaaaatatatcaaaaagtatttttttcacactatattaaaattatgtttatataaaaattattttaaggaacaaccccacaaccctagcatatttaatgtaaaaatgagatatttttttaaatcaaataaaaaaattaagtataaaaaattcaaaatttcctaatattacctactcataggtaatacccattaaaagtatatatatattaatatttttatagggattatttcacaaaaacataaaaacaacaa

SEQ ID NO: 30793 - DNA, 1918 bp, Cannabis sativa
cataggctaataggcctaaaatcctaaatagaatgagcatgttctttcttagggataagagtaatcaaagtctgattaatgtaagaaaagtctcgatcattattaagacagtcaagcacagctttaacaagatcttagccaatagttgaccaatttttttgataaaataaagcattaagaccatctaaaccatgagctttgtccccagaaaggtggaaaacaactttcttcacttcttcagcccgaaaaggttcccctaaatagtcaatctcaaaattattcagagggggatctaaagcagaaagaatttgctcaacagaggctgaatcgcaaccttgagaatgaaaaagattggcaaagtaagaagagacaatattactaatgccctccaaactgtttacaatctccccatcctcagtattaagaaaatgaatagtgttagccttttttcgtttagatgcaaagcggtgaaaaaacttagtgtttttatcaccagcattacgccaactaacacgagcatgctgtctccaatacacttcctctttatacaagaaaggattcgattgagattgtaaagccttaatctcagccacattactttcttctaaagggaggttattttgaagatcagcaatacttttattaagagcaacaattttattcttaaacaaactacgagcagagacattccaagacttaagagaagatatacaagactcctgtttggccataaaactagaaaaatcagaatcagtaagagttgaaggactcatccaagaacgctgaacaatttgaaaaaactcctcattttctaacctaatattctgaaattgaaacctcttcctagaaagaacaagaacagaatcattatccagcctaatatcaacttttagactctatgatcggatccaaaaaaaagctaaatgattcagagtagcattaggaaacagatcaacccaagaatcagaacaaacagcccaatctaatcgctcataagtggatccatgtttccaagtatatttattgccaataaaagacataggagaaagtttaaatttatccaaaaaaaaagagaaaactcttccatatcagcaacattatgataattactaccaattttatcactatatagaaaataagaattaaagtccccaattacaaaccaaggaagattaggggcattataaaacactttatgcaaaaggttccaagtaaaagaacgttggctagaaacaggtgaaccattaaaaccagtaaagtgaaacattatattatcattaaaagagagatgatagtcaatatgattacaagaataagttaaaatatttacaaaaacatcagctttccataaaagcataagtccccctacaaaatgtttcctaaggacttcaaaacccgaatcaaaccccaaagaaagcttgactctatccacagctccagaagcaagcttggtttccatcaaaaaaagaacagaaggcctatgttccttcaccaacagggagagtcttcggaacgcacgagtactccccaatcctcacgcattccaactgataatagtcatttttttgggcgtgtgtgcccagcatcacccgcctgttccaaagataaagcagcaagagtggtagcatcatcattatcatttgccctagctctcttaagggtttccctaagagagccaccaaccataagctgatgtgattgaaaggaagcccgcttcactccaaaaacataagcaaggcctttccctcgcacagaagcatcaagttggccagcaggatgatcaccatgaccagcaagagcattcagatcaccagagacagccttaaaggctgaaacagaagcacttcccacaaaagtctgaacagattggatgcccccaaagggatcacaagaagccctatcagcaacaaggatagag

SEQ ID NO: 30794 - DNA, 1803 bp, Cannabis sativa
caacctaaattgcaacaaaaatcgtatagaaacccctattgcaactagtgctgcaactactttagaaacccaaatcataaatttaaaaaaaaagttaagaaaacggagtaattcttttttttttcttgtaacatcccaacttctttgccaaaactaaaactccaaaaagaagctatattttattattttaaacaggtagaaaatccggcaattctaacttcaccttccaggggccatggtttcagattaagaaggaccccattgaccagccatggtcgtttttccataataaactgacagtcttcctctgtagcaaagaagaatcccatcactccttcaccacattttttcattctccatgagccaatattacgccatatccccatgagtatctttttcaccactgaagcaggcatatctttgtttcccataaccttgccgacgcatgctttgttaatcaccacatcctcaagggtaatatcttcaaacagttcaagcatttccatttccatgttgctgtctctttccagtagcttattactgttttcatcaatgctgtcaacagccacttccttctcacgtatttcacccattgagagagaaaaacaaacactcaaaaaaagcaatgccaaagaaagatgatcttctggtaaaatgagctaatgtagtaaataactagaagtcatatagactagactcgacctggagccattttctttataagtactgggtccagtttcacgggctcccaacccgttgcctttcggatgacaacacccccatcattgcaaagaaaacaggggcattcatcaaaacggatggaaaaccaaagtttgaacttgttcgtcgtggatttctcaggtgctgggtggacatatggattacacatcctttcactgctggtttcttcctcaaagctgctgggaaggaagaagcttggatccaattcaaatatgagaaactcccttacatgtgttttaactgtggtcgactggcacaccttgataaaatatgttatgtccctaaagcaatggtgattccgaaggctgggaaagcagttcaaatgtatggaccatggataaaaagcgatacagggaggaataattgcttcactatggaaggaaagggtattactcagtggcagattgaggataatggaagagcatggggaaaagaaacctcggagaagaaaggcacctggaaacggcggaaccctactcatgatcggaaaaaagaagggcttctgatgggagacaaaacaccggtatcgggtacagacagtagcagcaatgcaggaatgtccaacgttgatatggcaggtacgtcctctgtgcgtgttgcttctcagagtacgaatgcagacttggtttctttggacagagtggcgggagtatattcaaacaatcaaaaccctattcctattgggcccaactatttggatctccctcggcccgactttgctcaggagactgaagacagaatcccagatattgggcctactatttctcaggcccttgaaattccccactcatggatctgtatgtctcaaactccacataattacccagatgataacccaatcatgtggcccacggacaaccttgaattacaagagatgtttttaaatctctataaaccagatgttattgataagtttagggcccaacaaggtttaatttcaaaccccccagatttatcagagttgattattcatctcttgggcactcgaaaaagaaaggcccatacatggtatagcccaaccccttctccctcaaaatgctccattactgaaattggagatat

SEQ ID NO: 30795 - DNA, 1514 bp, Cannabis sativa
tacaaatactccttatcaaacttcacctggttttcatctccaaaaacatgatatcccttgcattacctctatgagagctttgagtagtcgctatgaagttagtgctggtaaattttagacctttttcgtaaatattattttggactcaaaagttaccgattagaaactttgttttgttaaatgataaattacagtgtgtttgtcaaaatattacaaaataatacccgaactcaatttttgtcaattactttcttaatcattctattcataatattattaatttattatgttctattttgaaaagaaaaaaaattgagctaagggtattattttattttgtctgaattgtcatttaacaagtataggatttgatcggtaccttttacagaacacagaatctaaaataatatctattcttttttgtctttttgagttgtcaaatggaaaaaattcttatttgcattctctattataggaaggaatgagtatcttatgacaatcaaagatctgggaactaagatgttctttgatctagtatgtcaggtgagcatctaaagtctaacattgttaccataataaatgattgtttgatgaaattgtcttccccttcttctttttttgcccaaaaaaggttttgtatgttcaaaaattggaagttggatgcatcctttttgtgtgggatggaaatgatgcacctccattaaaggttcaaacaatgtaagacatgttagttatgaacttcatggcttttcaaatctatttctgttgtctttgcaaacctttacacgaattcggtttgttcatcaggcatgaagatgaagaactaagccccctaccactagaaattgaagcgaaaacgctcaacatgttaatccttagtaaatttccttgtgttggaactgtgttgagagtgaaggctcctgttgatatgagtgcctactttcaagaagaaatggggcaatgggtgaagattcggaacatgaaatgtgaagaaacaaaatctggtttatggcttggtactttgcttcccaccactaaggttaggctccttcctaacagtgatccaattgtcatggaatgtaaaaggtaatacttttcaacttaaaatctctctaaacttgttgcttgttagtagtacacactattatttgaatttgatttcttcagagcaatggatgagcgcggagttggcagacaaggtcgatcgcctttaggaagtaatcctctctctggtttaacaggtacttaacagaaactatatcacattcatattcatatgaacatcagcctgctaattatgcttatgcctttgttttgttattgattatattcagtggtagatcccaaagaatttccatatgcaacattgatggatctcatcactcacacagaggttttgtaactaatatttgtgttttagtttcaatcatttggctggtataaatgtattaagtcttattatttttgttaaaattagacctcactgtaacctttattattacagttttacagat

SEQ ID NO: 30796 - DNA, 2810 bp, Cannabis sativa
  modified_base (2159)..(2159): a, c, t, g, unknown or other
gaaatccctatggaattagttatttcataataaccgatgccattgggtacactttagtgttggttatgtttgaccttataactttacctagatcagtgccggtagcaaattttgccaaaatcaacgctgaaaggccttaaaaactacctctaaagtccagatttgtagtagtgttcagacgagatagagatagagaaagagagaagggtcattgttgtcgcggtcaagggtgagagagtgagtcgtcgagggaaagagagaatgagccatcgagggagagagagaaaatgaagccttcatcgtcatcgtcatcttgttgtaaaattgcaacatcaacgttgatcttgaatcaactaccaacgggcttagaccataactcagccccatcacctctaatacgaggtcctataagaaatcaacaaagtaacatcgtgagctttcttccaatggaaaagacaaacacacgataaaacaacaacatcacaaacaatacaagacttttaattccaaactaggtcatttctagccgacccaatttcctagtacaaacttaacaccaactcctccctatccccacacaacttaaccataaaattcgttagccaatgtccaaaaacatgcacatccaaactatcaaaagagaaactaccatactctcaacattgttttgcaaaagagaatgatacaaggtaatgagtcaccatttcactaaaagcctcacacatcagacaattcttttccacatttacatgcttagaatgaagatgaatacgagtaagaaggcatctcgagacaactctctataaaatattttttatttttggagagatcttagccaaccataacatttctaataacttatatcgaccccagcattccaactaccatttagctcttaaagctttcgatatgcacttttaacagaataaataatatttctctccaaagtccaaaaccaataatcatcatccccaaaataaaatgaaaaaaaaaaaagaatttctaaaactttcccaacatcttccaaagaaaaaatatcataaataagatcaacatcccattctttcactccaactttaaataaagaacttaccaaaatttgatccaattcttgtatcaatgaaggcagtcgaggaatccccaaattactaagctaaggatcatggaatactctagtcggatccccagatcccacacccctaaataactcagagacaccctcttagtctcccaaaggatccttcatataaaacatgcattagaactaagctcaaccccccgaaactcagaggaagaaaaatatctagctttataaactctaccaatcaatgagcccagatttttaataaatctccaccattgctttcccaacatcactaaattaaaatcgcacaacctcctaaaaaatataccacccgtatttttatgaactgccatgcgctcccaacacatccacaaaatcctgttactctgagatgaagaagaccataaaaacttcgccattaacctttgaatctcctaattaaaaagtcccaagaggtaaaagaaacacacacgtatcaaataaataagaagagattgaacaacattcttaagcaaatcttctttctcgacacgagaaagaagcttctcgtcccaactattaatgcacttcttcattttatccttcaaaaaactcaggatgacattcttattacgacccataacattaggaagacccaaatgctaactattatcattagctttagccaccccaacaagctacaaatcaaagcctacatattaccatcagtatttgagctgaaaaagacagagaatttatcaaaattcaccttttgccccaaaagcatgctcaaaatttgaaggtaataatcatctcaacaaaaatttgggtgcatcttgaataaaacccctttagcctcctctacaattttatttttttttatttatttaacaaaattattgttctcaaattgaataaagaataataaaataaattaatgatctaattaaataaagtagaaaaaatataaataaagagagaatttaaagtaagaagtaaaacattagaaaaatgagaaaattaaggagagatagatagatgtatttaaagtaattttagactatcatattcttatatcttagttttatatatatanatatatatatatatatggtaatacatgtataaatattgtatttactcaaaaataattttattatgatattgaattaaacattgtttattgttattattattgttttttttactaactagaaaggggatcacgtggtgtaaatcccttttccaccctttcagtcatttagatataatctcggggactacgtgtcagttatatgggtcttatacctcagcttgtcttaattgggtcattggttcccatcacacaaatgacaccacctacaacgcaaactaaccttcagaagggtcaaacctttaatacctttcgagaggggttgtcgtgggtttcgaacttttgacccaaataatgaagaattgtgactacgttgtttattgttatttttgttacatttaatactttttggtattttaatttttttagtgtatctctatttaattataacctcttagttagtattcttagatagaggttgtattgtagtattgggcacaatggtgtcacttaatttaatccaatttcatcttctatttaaatattttaaaggcatttatgactttttgtccttaataatgataataataataaaaagaaaattttatttatacctcaaaaacttttcaaacaccacattttaataatttttat

SEQ ID NO: 30797 - DNA, 1546 bp, Cannabis sativa
  modified_base (1498)..(1517): a, c, t, g, unknown or other
caaaacacattgaaaaccacaatttcttatacaaaaatccctgaacacacattttttttttgtttacacaaataataggcaaccacaaaatacaacataaaacattgaaagaccgaaaccctccaggttgcactaccgcaatatgtacaatcactgccgagctccagctcagtgttcctccagcttagctttttcctttacctacacaaggtagcaaactgatgagtcaacagactaaataagatatgcaatacatatatataggcaatgctagaccggctttatgcttaagtcgccctgagctcaacaaccgagctcaccaaatggtgaagaacgttcttaagggaagtacgaccactgtatcaaatgcactaaagtaccaaatctgtactcgtgttggtagagccattattgtaaccccaaaagttactaagtgttgtaccacaggcatgacgtaccctctggtactcgtgctggtaacgctgtaatcatccggatgtcctacactgtactaacacccttaaaatcatataaccgttagtgttagtagtgtaaacatttaactcatgcatacattcacatatatattattatgctatcttacctcgttccgtgctcaagtgtgtcggtcagcctgagtggaaacgcagcttgacgttttacagggccttaaacaataacgttcaaaactcaatgagagacacgctaaaatacttaacgggaatttaaaattaaaactaaggataaccctatcgataaaaaggatactaacaccttaaacaacacaaaatagggaaaattagggtctaggaaaatgacccaattgacagactggttcccaaccgaaagtccggttcctgggtaccaatcggtaccggtcgaccggttctaatggtcccccaaaaccggtcgaccggttctgtgctgggaacccaaaaatcgaccccatgacctcaaaaccaagccaaactttgcaaaactctccagtatacctgcaaacactcaaatagacccaaacaaaccaaagcaattatctcaaaatccaaagacaccattagaggtcaaggtttgagtttgccaaaacttcactatagaccacaaagacaacctaaataaaccctaaacaaccatagataagttccaaaatctaattcaaagaccaattgttaccataacatcaaaattcctacaatcatgagtcaaaacccctctttactaacaaaaaatatgtaaagaaagagactagggttccataccttgaaataacacaccaattcttactaatacccactggtttgagctgaggaaattccagcttggtgctggttcttgccaattcgagagaaagagggagagagaagtaattttctaggtttttccttaaaaacacaaaccctattatttctattaatattaacataatttacagcaactaatatccccacataatgacaaaattccccaaggtaaaagactaatattgttgggttttatgccnnnnnnnnnnnnnnnnnnnntataatcaaatttacttattaatatagat

SEQ ID NO: 30798 - DNA, 1935 bp, Cannabis sativa
taagatcctggtaaaataaattcccaacaaattatacgttatgtactcattacaggcaaagtaaccgttagcacgggtagatatataaccgtgattcgaggcaagactgtcaattatcattaaatgagctgaaatttaaaagacccctatttagggtcatatcggttcatcattcgacgcctaggacacgcgtcacccatctagacaagactctacgatgagtgaagtccacgtgcaaccaggaaggtccaacatagacttaggggcaaatgttatccagttttttgcaccttgacatggcaataggatcaaatgacacgtgtcccatatttctaatacctagacggaggaaaatatccctagtagcttgcacatgactagttacatatataatagttagatatccgactacgtagaagaatgtttgtcctgagcgacttacaagagatagcgacttcagagaataatcttgttgtgtctacacgtgaagacaatccctaggattgactaagaggaaaatggcaacctattctagtttcctatttctcacattgtaattattaaattattgtatttccttttttattcattgtaaggaaaagggaaaccatctctcatgcattaagtccctataaatagtgacctagcctcactatgaaagggatggatgccctaatcacataacataactgggtaaatcacacatcaaaaaccctaatataggaaacccaattctacaacttaaggttctgttattactactaggaactacaatatcctagcaaatagggaaacacccaactaaggcactaaaatgggcaagaattgagaaaacaagttgttcagggaatctgccaaaattggttaactggttttgcaagacctggtaaaccggttaaccagtttgcaccaggtttcccaaacaactccaaacttgttcaaaacttatccaaatgccatcaaacgttccatagtacctaacagagcatacacaacacattccaaccaataaaactcaaaaaacacccaaaatcaaaatgtgccattgatgaaccaagcttgagttttcaaactcaagcttgtgcacccataacccaaaacaaccaaaccagctgcaagaagctatttccaactgaaattaaacttaaaatttgaaccacacataatccaaaccctaacagcccctataactgaaaattgaacattcaagcaaaaacaaaacttcattaacacaaatctatgagttccagggttaccttagcttcaaatttatttgaatgcttggctaaaatcccaaaaaaagatgaaaagatgttggttccttctggttttgtggtggtcgaacaaggagagagagagagagagagagagagagagagaaaggatgagtttcctaatttttaacttttctttctatttttcctaaatgaataaggattacccaaattaatccttgctgaaaatagaagctaggtgtcaacatccaaggctaccacacaattctcacttgccaaattaccaaaatgcgcttttagcctaaacttaggctagcttattgcttacgagtaaaatggtcaaaaaccataacccctcataaactcggtattatattttctccaatatacatcccactaagaaataaggttctagacctacccatgtgattaaactagccatccattgcatcttccgttatcaccgagcaaaaattgtaataatggcataatttaaatataatacaaataatacacctagagtttaataaaatctccataactgagaaattataactctaatgtctatttctaacaatgggacccatgaatgatttaaatccacaaatactataaatatatcaataattagcgctaattgcctttactaatccatattatgaaatgcggtcattacaattatccccccgttaaaagaatt

SEQ ID NO: 30799 - DNA, 1476 bp, Cannabis sativa
aaagggtaactgtattgtattctggaaatagaaatataaaacactcgactctatacacccattattagtcatgacttatgataactctattagaaattctcaacaccttacatagttctttacaaacaattagagaaagaaagtcttacaaagtgacatgaaaaaataaaaataataataatagaagatgttataaagtaatatagaataaaactaaaaaaaataggaaaaaaaaaaagacaaaaagaacaaaagaatgagaatttctatatttcaataagacaataaaataagatttaaagaatcaagtaattaagactatagaattaagtattatcgatgattttcatttttgaatagttaattatagtcatgtatatatattataatattttacaatacaagaaccattttagtaattttgtttattatatggtagaacgtcccaaaatgataaggtatcataactcaataccatatataagaataagacattcttaattggcttcgagatgttacttcttatatcatgtcatatacttattctactttttaaatcacaattctccctctacgattagtgaaaacttaataccatttataagaagaagaatttggctttccaagtcaaggtcggggttcgaaactcccgaaagcttatttgtatgaatatttatgtgtatatatagtatgtataggtggtgcagttctgttgagactcatgttcttatatatggctcaattctctaccatttattccatgtgggacaatattcacaataaccgtatcagagtggacatggtcactatctgtttaggtgcggatcggatagaattgcccgcaagggattatggctctgataccatgttgagaatcatggggttccatcttaaaaacaattggctatgagtcatgttcttatatatactacatttattccatgtggaacaatgtccacaataagttcaagcttccattttccttaagttactttcgatttttcttaagttactttcggatcatgcaagtcagaggtccaataatagtaccttgtgcttaatgtgatgtaatatgagtttagattgttcagtgtatactttgcagcattatgagtgtaatttgtgttttgtgaactacgtacaaccattaaaaaaaaattatttctatggtttaagtgaaatggtaggagggtagttgagaaaggaattataatttattaagccaagtgtacataatatgaaaatacacgttatatgtgtaggtaggtagcccccaccttatctaaaaacaagagtgaaaaaaaaccacaaaagaaaaagaggaaagagaggctctaattctgttgtatgagtagccaccaatgcttgtccccagcagtatggggagagatgagtgcctctgtttcgtcctctgctctagctgccatcacggccaaagctggtgctgctgctgcagccgctgcttccaccaccacc

SEQ ID NO: 30800 - DNA, 3766 bp, Cannabis sativa
tgaaaaaaattaatataaaatttatttacatatgtagaaaaatatcaatatctaaaagtaagaacttaatattgctaataaaataaaaattttggattaatttaccaaaaattaaaatataaaaataaacttgacaaaacatctatagtttaaggaccatctaaccaaaaactacataacaaccatgaaatactaaatcctagtgttaatctttgtagtagtgaacaacctcattaaccatacatggcggcacaggtggaacaaccttcaaagctgagaaattctgaaacaatatttcaacatctttcaaataaatagacacagaaatgtgtagatattgaagttgagtgcagttgttgagtattttgagtacatcttcatttttaataaagaacatatatagatgatattttaagatgctttaggtttgacataataaaggctatagctaaagccacttcaaaatgaacaactttaactgtaattataactaataccgtttgatatttaatctttcaagattcttgcagtaatgaccaatagcccaaatggcttcaactccaattgaagagcaattacttatgttcttttttttttttttttgaaatcacaattacttatgttcaagtaagttaagttggtcagtttcttagctatactttcaaatattgttggattattgaataaatcataatatggcatcttcagtgtccgaagggatttaccagtattatacataacataatatttatgattattcgataacattgtttcacatgagttaaaacgattactaatataactaaaaaaagaaaataaaaaacaggggaagattagagtttcacttacacttaaccctacaatctcaaattttagtggtaaaattttttaaactactgatccgattaattgccaccatggtatacaggacatgtggtacgcggcgattagtttttaaataataatattagatatattgctatcaatcaggtgatgaggcaataactttgtaccatggcttgcaaaccattggaatgtaatagacacaagtttgtcatgtaatggtaactttataaaatttagtacaagtatatctgctatcaaattcccccaattattatccattattattcctcatcatcatcacaataaaattgttagtaagaaaaaaaaaatatgtataaaattacttataatcaacaatataaatatgtgtatatatagaaacaacattattgtttctctgtcaaagttaatatatatttatagtgttacgataaactatgctataatcaaattaaacatataaaattaacattaatcccaccaaaattctcttctacatgtcaataataaatgaaaaaagcttatattcaagataaaaggaaaatagaaaagcttttacagtataaatacatttttattttttttttctaataaagttaaatataaatgaccattcaatttacaaagacataaacatgttcgttaatatttttttctaattaatatcaaaaacaccaatgtatatcatataaacatgaagttagagacgatattcataagatctatctagtattatctatagaatattgatctagattaataattagaagatgagaaaaagaaagtaatacctcaggcctttttggtttgagtttactgaaagaagagaaagttacaaaaatgagtaatgtgagggctaagaaattgtgatatgaataattattattttatatttaatgctggtaattttttgtttttttttagttttacagtctttagtaattaattcattcaaataattaccttaccgaaaaaaaaatatatatatatggaaattggaaagtatgatttttttttttaagaacaatgccttggaggtctaaaaatatatatactcattgtaaaataattaatgtgtattaatatgattttcaaagaactctttttaagaaatgaggaatactttctctctgtgatgattttgatttaacgtcttggtttttcaaaattctggatgtagaagtttagccataggagttgcttgttttttcatcatggatcgtaatgaatgggcagctttgaacaattcgttttgactacgataatagtgatgaggatattattgagggtgatcttgaggaggcttttgtggatgtcagcaaagatagtgttgagagaactctagtggggaaattgatttcctccaaggtagttttcggggaacatatgacacaagtattgatttttttggaagattaatggtaccgtgactgtcaagacagtgagtaacaatacgtttttatttcggtttttgaatcttaaagataaacataaagtctttggtggtggtccatggcttttagaatattaattggcactcaaagttcctacgagtgttggtgattacaatttgttgacgtttaatagagtgaaattttgggttcaaattcatcttgttctgatctcgtgcatgactgctgataatgggcagagaacttggtggccttcttgggccggtgaccgaagttgagaattcttctaagaattgcctcaaaaagtttttgcgggttcatgttggcatcgatatttccaagcctcttcctaaactcatgaaggttagcttgattaaaggagaggagaaatctaaatttcctctcaaatatgacatcgacctcattgcaatatgtaaatttttcataaattaacctaaataaattataaaatatataaaaaaatatacaatttttatgatcatgtaagagagataaaaatataagagtgcttcaaaatctttgtaggagagagaataaaaaaatatgagaaaaaatgtgtaagtaaattttattttaataaaagttaaaagaaattaattaattttttttttataaaatgtgattaattaaaaaaataatataaaatattttttttaaacaataatataaagtaatttgggtatgaatagtaagagaatgttaaagagaacaaaaaaaaaaatataataaatgcttatattttatttaaaaaaaaaaatctcttaccacaatataaatgtaaaattttaaaaaaagtacagcatttttgtgtaaaaactcctattttaaaataaaaggaaaaaaacaagtattcctccctagtttcctgtaagaaacaaaagaacaatatcaaagtttgaaatcattggtcccccatcaatgagtagcgtttttaacttaaaatccatctattattacatcatagaatacacaattcagctatccaatttcgtttcttataattattacaccaactcctattgtacgtacagcaaacagtgcattacaacacgagccaatatttcaggcaactatttcaaccttttaaaacaaagaaactaatagtttcatatgtaattacaactttacaaataatagcctcattgttcgagtaatcagccaggtacaaaataatccatcttgtccacgggaagattcaaaaccgaagtctccacctacaccatgcgcagcaaagcaaacaccaaaatattttcaaactagctcattcttggggctaaaaactaatgagggagggacaagcttacctcttcgaaaggaacaaaaacaaaaggtgtgagacccctctggtgtgatacagcaggcacatctgggttgtgtgtttcatcatccaaccaactttcaactactccaagaatatcctcaccagggccattgacctcatcaatgttcacaccacttgtaacaagtgagagtaaattcatccgatt

SEQ ID NO: 30801 - DNA, 4405 bp, Cannabis sativa
aagacaaaaaaaatacctacagttagaaccagcatccaactaatatttatataagaattgctaaaaggtaccactagtgtttagcatccttatcggtttcatatcgctattggtgtagttaaatatctggtccaatataacttaaaacaataactttcacagaatatcactaactaatcgtaaaacgtcactttaccactggtacctgatagaaatactctatttatatgtatggacattgttttttaatttgtggagtccaatgctttcattggagttgccctaagcaatttatatatgtgtccaacaagtaaaagtaaaagtgtgcacccccaaaccaatttatatatgtgtccaacaagcaccaaataagattgcctccattagagttgccctaagaaaaagatcacaaaccaaaaatctattggaaaagtatacaagataaacagtcatttttgtcatttggaaagccaaaaagggaaatgaactaccagaaatagaaaaggaaaataactcgtaaaatatgctcaaggagtttagattaaaaacatagtaattccttcctatcccattgactgcacacaaaaagatgcacagaaacaatatcctgaagccttagggggaaaaccatcaactgccctattatgttgaaccttaaaaaaatcagaatgagtggcattcattatacaccaggcactaaagttagcccaaagactctacaatatgacttacagtaggcataatctactaaatcaaatttatattacagttcatcatcaccaacttccactttcacagaacagagaaacaaatcttcatcatctttctttgcaaagttaccattgtttggttgagcagtacgttcccctccgctgaattctaatttcgctcgagcaatctcactaagatctggaagtatcattcaaaaattagtcaaaagatagtatctcaaatgtctaaagatgtacattaaagagagaatgagatacctagatcagctgagataagggattccccttggtaatttggtcctgccaaaatggttcctgatggagaaactataagacttcccccggaacagacaacagtatctaaagatgcatcgccatttgagtcgccagatgtgtattcttctggaggcattggatagtctttccttaagcaaaactgatttgcagataaaacaaagcaaccaccttccaaggcaatatgtgtcattgatgctctccatacatctcttgcttctgctgttggtgcacaatatatttcgatacctataatgatacttacacaggttacatgctagtcatgtatatttgtaaccattattttgatcgaaagcggattgtgattgtaaaagagtttacctttgccatacaattcagttcttaaatgtggcattctgttgtcccaacatataagtccaccgatttttccaatcgtagtttcatatacgggcagtgaagatttctctccaccacaccatacagcagaatcagacgacaatggcagtaacttgcgatatttgccaagaaattggcccatggcatcaaaaaacagaactgtgctaaagagaaccaattcaactctctccactactcctattactagatgaacccgatatttctcagcaatgcttgcaagctgatcaacttcaggacctgtatccaacatcaaagttgcataaggtgaataaagcaattgtcacattcaatagaaaaaacttaaattgttataggataaagacaattcaccaggcacactaatagctgaggcataatacttttgatactcattgttatcctctaaatggctttctttcatagcattaaacatcacactatgtggataacctccaacaaaggcttcaggaaatacaactaattgtgatccgtatgcagcagaactagcaacaagtctttctgctttatctgccaacaacaacaagtcagtaaatagaaacgaagataaactagaccaagtggtaattttactactcttgcattgaacatcatcatgtacatactaaatttcagagatgtgaataaaagaccagaaagatgacaaaagcaaaatcctatactcaaaacctgttcatgtttacatgtatattaagtacaaaatagtactaaaaacaaataacaaacttgcaatgaagggtacaatgaaaatggtgggacatcaaagaactggaatttatatgtatgcgccattaagtgggagggacccaattttgaatgaaagaaatatttgtttggcttctaagaaaatctggtcccacaaaaaagaaaatgtacaaaaaggaaggaaattgacaaaaaatcaccaaatcccacaaacaatctgcgtttaacccgtgaaaaattcccatttgggtagttgaaatggtgaagtgaacagtatacctagcgtagctggggtgtcgtagaacacagtggaagcctgaacgacggtaaccctcaccaccggcctcgggacgaccacgtcgttaagcccatttacggaattaacggaatgattcgatttcggtgttcgagtcttagaggaaggtttcagaggaagaacaaggtctggtcggacctgggtgaggagccactgaatggtctccccatcagaacgatgacccagttctcgggtcagtcgaaagataccagggcaacacgtggctggtattctgacccgcctgtgacgaccgtcgactttggaatgcctgtcgaccccctttacacgacgccgttgcagcggtcctggctgttgtatctggacttgaatcggcaaataagggtgcacctctccctcgttatttataggaggagccgtggctgtggtggttacgggttgattagtgtccattgtagtgtcaagaaaggaaagaaagagtgagagaggtactacaaggagaagaagaagaagaagaagaagaagaaaggtgattatttgcaatctgttggataaattgtgggggttgcttttaagcctaaggctgacacaacaatatacagtcagtaacaacagttgcagaaatgttgcagattgactaaagaaatttcagagtcgaagtccaatggtgttattagtattccatggaattaggtgtcgtttattgatgaagttacacgacatggcgctctacctaacaattagttgcccttgtttcttatattattgttataggaaaatgaggcacattccatttttagtactttgacatctccaatgtttaaaaattttattttatttatcttttacattattctttgttatgtgaaaagacttgacatccatttgagtgacacgcgagaaacatttcatgatctgaacgggtaatatgctccataatgtacagtttaaagtgatttatcatttgtaaataactgattagaagagtaagatggaatattcgaacatgataaatggcaccgtccgacctgcgtcgatcttgcaacaagctcacatgcaccgaccaaggtaaatgcatgtggaatttcttcagatatactttcctctttaatttatcaattaaatccctattttaatgggatttcttcatgcaaatgatgtgatttagtgaaatatatatgttgacctcgattttagccaacttatagtgtagtcgtatttatgatcagtatcaccacgtgtacacaataagaataagtaaataaagagacaatatttttacaaaggttcgactcccttagctagagagtaatgacctactccctttttagttgtattgataccaaagataatattactcagatcacaagtgttgtggattctaaaatggctctcttaagattacaatagtgagaattagtaggcaagtaagagagatgagagaaacttagtctctactataatgcttgaggcgtgtagaagagagagaaagagctaagatttatgacttagagcttttgagtttaggggaactaggtttaattttgtgctctttatataggagagcttacaagagatgataggttcatatctccttaaaataaggagatatcacctatttgttacattataaaataataaacaaataatgcattaattagtccccaagaataggtaaattatgaaatttatctcctatttttatgggtttattgaagctcaattcgtagcttgaagttccatctaggatggatgttgcagaggcacaacaagtgcctgccaggggagaagctggtcggtccttcccttgctggaggctggttggcttgtgctggctatagggttggccagacgggttcggccagaccctttaaggtggccaatttgttgtctctttgtcccgcttaagtatttggactccccgtcaattaatatgttatgtgcgatgacttgatcttcttgttgacaagttgaactccacgtggcattaatcttgcccacgtgg

SEQ ID NO: 30802 - DNA, 923 bp, Cannabis sativa
ggttggtcctccaagacccttctatggtctccttcacactagaatatggcaagaaataatctagagtggtattcagagatggtgatgggaaaacgaagagtccaagcttcagtcatatctttctcgatccaagctggcttaggtgatttggtggtgaggattttattgataaggtagtgggaatctgtggcagctccagaattgagggaaacatggtcgaaatcatgtatgaaattttcttcttctgtgagagagagagagtggtgggagggttttgacgaagaggacgccatagaaagagatggaagactagaatagctaaagactggatatggtgtacatgtaagaatgtcaaaaccaatccttaaatagcaaaaaaagagagtgaagatgtaatacttggagaagaaagggcgtgttggaatatgggaagacgcggcctccgtatgcttagatccccctgaggtagagtagccatcatttgagtagcaatgattactctcagtggcctcaaataactcaaaatgacggtaggatgatcggagaagagagggtcgaagggtttagagccataaatttcctaattccagattaaatgtgaaataacgtgcgtgtaaatgtaagataacaagtgcaattaatgcaagaaagatttggattttgagtatcaggggtgtaatcatcaccgtagaagagtggaagtcgcggctaaatgcattaaatgcaaagaacaaatagtgaaggtaggaacccaaatatttcagaacaggcctggtggaaacttcatgaagaagattttttcgttgtaaatgaacttgttcattgatataatagcttttctctaaaaaaaaaaggataaaataatagaagaacaaaaaattaaaaatattaaaagtgttataaatattaataattatgtggat

SEQ ID NO: 30803 - DNA, 3002 bp, Cannabis sativa
cccccccccccccaaaatctttcctaagaatctcaaaggcatgatcaaaaaacaacttagttctcagcctttcacaactaccagacttaagttttgattccataacaaacaaaaataaaggcttatttttatttacaataagggagaggcttcagaatgctcggggattccccaatccacgagcattctagcttaagagactcatttttttaggcggggttgctcaactacacccgcctgttcactagaagtagtaacatcagaagagctcacaacaacaacagaattagcacaagctctttttagcattttcctcacaaaatcacccaccaacatagaatgagaggtaaacgcaaacctcttttcccctaggatagcctttcctttagcattcaaggaaaaggtcgtggactgaaccctagcatgaggaacaaacatgttcatagcttgactagaatcgacaacatccaaggaaagaacaagaggaagtgaggagactgcattcactgacagattggaagagaaaccataaccaacctccataagagataaggtaacatcctctctcaaactattagacatattgagcttagaggtttcatatctcacgctattagttccttgcatagtgttaacagtgttaggaatgaattctccagcatcagaagcaatcaaaatgggggtaactgagtgaccagcatccgtgtccttagtggtaaggaattgactaaccgcttcaaccaaagatagatcacgattagtttaagtggaaggaatctcctcaaggggcaccgagtttgttaagtcaaatgggttgcgtttaaacaaagacttggcaagagctttcaaaagtatattgtagggaagatgaggtgggtaagcatggtcatcacacttcttcaagtaatagacacacttagcgatagtgtgatcaaataaaccacagtgatagcaaatatttggaagattttcatacttgaaattgagccatttctcacgggaaatgctcttaaaatccacagtgatacccctcctaatgggcttggagatatctattagcactctgactcgaaggaaaaggttagaaacattaagaatagttttcgggtcaacctcaaggaaatttccaacctcatcaccaataagcttatcaagcttgtaagatttttccgaaaaggaatagagtgggcttggatccaaaaaggggagtaccgaagttggtcagggaaaagggcatcaaggccctcaagattagcacatgttataagacagtgatcaaaatgccatggttaaccctcaagaacacgtttcatatctccctcacaaccaaactaaaccataaacattcctgagccataattcaagaaagtaagaggagctctaacaatctaagcattcctcatagcatccttaaaccattccagtttgataactctaggagtgaacacacaaaagataagacaaaattttttattgctatggttaacaacaaggttgtcttctataaactcatgggtggtcgactcacactcagtaaggttgaggttttgagagaaggattgagtaatggaatccataagacagagagaacttaaaaccacacaaaacaacagttcagaggaagaaacaagataaaaggaagtaaacagaagtaatgatatgtacaacacccaacactttaaatagattaaaggaagaacatacctcttatgaagagcctttgtgggaaagctaatagggttacaatccatccatctcttcacaccattaatgaaatctctgtagcttgtaggcataatcatcaccttcacccagaaatgagccggcaacaccattaggaaagtccagtactaggctcccaaatatgtaatcatggatggaaagctataccggagagagttatcgattccatatcttaggtgcatagccggaaccgagataagtgttgtcatgcacgaaattcacgaaagattttgtagagatcacacatccagacccaatctttccaagaagatcatttgttaaggctatttttggcctaccatgaagaatgattgctttgagtacgtctacaaatgtgagaaatggcaacgctattcaaaagtttaaagggctctaccaatagagataaccctcatgaactgtccttggccctttgcagtatggggaataaacctagtgggatcacttacaatcggcaaaggaggagtcaaatttgtcaaatttctcctcgagggtctttcttggaaaattggctcgggcccctcagtacatatcactgattcttggttgccaggatataccaacttcaaaccactccatgtcaacaatgttgatcataatttgcgtgtttttgatcttatttcatcagaccgcacctggaacattacatcccttaaacgacacttcctcaacattgacattgaccgtattttgcagctacctttatgctaatatccacctaaagacaagcttatttggcatcacacttcgtcaggtatatatacggttaagagtgggtatcacttagccacttcactcagggaaactagatcaccttcacactcccagttgccaaccacttggtggaattgtttttggaagcttaagttgcctcgcaaagtcaaaattttcccttggcgtgtaatccataatgctctacttcttgctgccaatctccatcacagacacatcattgaagacccttcctgctctcgatgtactcaccacaccgaaaccttcaaccacacattctttctatgcagagcagtgaagaacatctagtaccagcttccctttcatatggattttacagtattaccacaatcaagcaacagtgatttcctccatcttattttctctcgccttgacgatgatcaacttgagactgtacttaatctcatgtggtttgttaattccatttttggcatatttatttgacaaaaatattttattattctttgtatatttcggctggcatttattgatatggtttccatatt

SEQ ID NO: 30804 - DNA, 1236 bp, Cannabis sativa
aaattttttgattttctaagcatagaaaatcaaatttcccatataaaatcccacttattttactttaataagagaaatactaaaacgctataatagtgcatatcatcctcttacgtgtcaatattgctattggttcaaataaatataaaaatattactagttaagtacaagacgacacgtctaaaaagtattagatacgattagtacttaatagcaatgctcttttaataaatattataaaaaatcactaactaattataaaattacacttcaccttagtcttcaatgttaaagtatttatttagaaccgagaattgaacttatcaatttatgctacaaattactcttataataatgaaaggcttgttttgtttcaatattgaaattcaattaagataacagaaatatgcaatgcagagcatagtaaactcagagtaaacaaaaatcacaatgtgatgagcaaaaatcattaaatatgtatatgttaaaaacagaacacaaggccccccttgaaattgcatgataaaaaccatttcaagggttaaaacaaaccaacactcgctaaagagtaaaaattaaatgttaccattcaagtaaaacaccactcaaaaagttctaataaatttttttcctagaaaccgtcagggaggaaaatattccatccgggaatcggccgctccctagaatgcttcatcatcaaccaccaacaagggatttcgtcccctctggttttttatcgagaacctcgagattggaaaccattgcctctcggtctgttgtagtcactgtcctggtttccacccctaccgaaatttctaccaccaaaacgccctctagtggactctggttggtaaccacctctgcctcttccccgtcctggtcaaccaatgaaaaaagcaaaattaataccgaaaaccatgcaagatgatacggaaacatcttagatatgataccaacaaaagagtagtttgaagggtttaatttgtttatagtgaaaactaataatcggctcttttacacaagttactacatgttatcgggatcttagagtggcgccaattacagaacatgaagcgaataaaggatttttgccatacaaaatcaaatgataataaaatgatgaggaaaagagtatagccacatacttcctccaatagctccacctcgggaaataccagcgccgtagctgttaggtctacgctcctcgatataaacttgccttccagttaattgaat

SEQ ID NO: 30805 - DNA, 1485 bp, Cannabis sativa
  modified_base (1409)..(1432): a, c, t, g, unknown or other
aattttactccaaatataataatacagaagaaaaacgactataaaaagtgacccaaaacgtaggctaaaaatagcctaacactgttcttccataataattttatcagtgtaattatcttatttctcaggactttctctctcctgtctagtatttgcactggtttctcctcgtatgagaggtctggttgaagttccaatgcttcataactgagaacatgagattagtctgatacatatttttgaagcatcgaaacatgaaacacatcatgtacaattgtcaggctgggggtatagccaacctgtatgctacttgtcatatcctttccagggtttttaaaagtccaatgaacatggggctaagttttcccctcttaacaaagcgtttaatacccttcataggagatattcaaagaaataccatatctctgacttgaaaatcaacatctggtcgctttggatcggcatagcttttctgtctactttgagcagcgaacatatgcactctaatattgtcaattgcctcatttgttctctgaacaactttgggacccaaaaactttcttttgcctacttcatcccagtgaataggtgatctgcacttccttccatagagcagttcataaggagccatcccgattgttgcttgatagttattgttctatgagaactcgatcaggggaaggtacttcacccatgatccttcaaagtctaatacacatgctcgtagcatgtcttctaaaatctaaatggtcctttcaaattgtccatctgtctaaggatggaatgatgtattgaacttcaattgggtacccatagctcgatgtaggctctcccagaatctcgatgtgaacttcgaatccctatcagacacaatggactttgggacaccatggagacaaactatttctataacatatagttctgcatactagtcaatggagaagttcgtccgaacaggtaaaaagtacattgattttgtaaacctgtcaactatgacccacacagagttatactgcctcgtagtcctaggtaatccaattacaaagtccatggcaatgtcttcccatttccattctggaagattcaatggctgcagcaaacctacaggtctttggtgttcagctttcacttgttgacatgtaaaacactttgcaacatattctgctatatcattcttcatttgaggccaccagtacatagacttgaggtcttgatacattttagttgttcccggatgaacggagtaagaagtcgtatgagactcattcagaatttccttcttaatatcattatctataggaacacaaacacagttcataaaccgtaacataccattactatcccctgtaaaatcattagtctcccaactgaaatcttatctcaagactattgggttttgtgccctaaannnnnnnnnnnnnnnnnnnnnnnnatttactaattaatataagatcaaaaattgcttctatgttgcatagtttacat

SEQ ID NO: 30806 - DNA, 3244 bp, Cannabis sativa
  modified_base (28)..(28): a, c, t, g, unknown or other
  modified_base (59)..(59): a, c, t, g, unknown or other
  modified_base (89)..(89): a, c, t, g, unknown or other
gttatccatgaatttttcataaacgcantctcataaacgcaagaattcagttatatagnaaacgcaagaattcagttatataggcacantttatatagaatagatatatattcgtaatcgtatatatattgtttaaaaatgataatggatttcaattagattgtacactataacccatttaggcaacaattcgatgattatctacctaagtagtgactccccggcctctatataatataggcaataaaataaattatatgaatccaaatccaatgcgatgaatggtgttgttgattatatatatcaccagctaaaaattggaatcaaattagtgtacgtaatttatataaggctatttattaacgtaagaatttcatgtacgtgctagcttatagtaaaatatcaaatttgatcccttgctctactacactactactatatatacaataataataattaactcgtaattgtacattaattagtatatatataggtgaaaacatactgattacgtatcaaagtattataaattgaaagattattattacttaaagtaataattaatacaaactttaattttgtaatagttctaattctattctctcccaccgtcctcatataagtcaaaaagaatataataaaacatctctataaataaagggctttaagcttttattcatgataaataaatatatatatattattttttttagcattgttataagacatcagtggggtgtttagcaccttctcgacatgtcgcattgcgatttgctagcgatacttcctaaaagctattatactaaattatataagacccgatacttaattaaactaatagcaatattgacacataagaagatactaggcactaccggtacccattaccatttctctatttttttttatttcttccttaaaaccaataaatggaatatttattatatgggccatcatcacacttcatgctgatatcatgcagttgctgtaatccacgtggcaaacacaaatgtgggttcggtcgtggaccaaattgaaactctctctctctctctcatggggttctggccctacccctcttttggagtgtgcctatgtaccaataatgatttaccataattataattcttcttggcttttaaaatcgaaaatgacttcttcgactctccttatatatctacctttctcttcttaatttattatatacctaattaattaattttatttaagttaattaaaatttttaacttttaaattttaacatgtatcaaattatattttgaatttttttggccattaaaaattctcattgaactattaagttgttaaatttaaagacttttgtctgatttcatttaattttactaatgcttcccaaatctatcaaatcatgcccctcaaattttgacaattactaaatcatatctcttgaacctttatccatgttagattttaaatactaaaattgaacaaaagtccttaaattcaacaatctcaatagttcataaagtatttttaacgactttaaaagttcaaaagcatgatttagtacacgttcaaatttggggacaaaaatcttatttaatcttatatttatatttatttttcactttttctcctttaattaattaattggtttatggtgagacaaacaattaagatcagattttgtacattatataaaaaatgaattaattaactgatcatcgcatgaaacaacaacaataatgatcaatactattcttataggatttgcttgggacaactactcaaaaatgtgttatgaaatcgatgtgttacgtgtataccccacaatatatatcatataattaataatattattatattatataataacatattatgtatcttagagaagaaaacaagaatggaaggagaataaataaataaatacgttagaggaaaggagtccattgcttacggcttctccaactctttcttttaaaataaaacaatcattttggtgcagccaatatgacctccaatatgtgcatcaaactagtgtatataggaggctatataggagatgtgtcttaaaattaaaaaaaaaataaataaataaaaatcaaaaaacaaatggtttggatttggtagaaccaactaattaatggcacgtttacatatcaatggactatttattattatgtatgtcttgttatatataaatgcatacttattatatgaggataaaaaaaatgagataggacctacttacataaaaatcccacttaaaaatttaatgagactagtgagaagttatttatgataattttgaagagaatattatgattcggacaataggaaggagtccgaatgatcttgtcctcaatatgataatttttgatcgatcacttggataattatgattcattacatatatctctctccacaattagtgcaaattcactttttaatttctagcctcatattcatctaaaattagctaattacaagaaactattcgagatttttattagttgggtttgcaaattttgtttattttatccatgaataaaatttattaggataaaatttcaagcactctctccttgatctcatgtggtgttaaatgagtcactctatttacagcatatataattcattatgaataattgaacgtattcggagctcaaatatatgtggtgggtgcttacatatgtatgtatatttatatatttatgaaatcaaataaaccattcatgacagtgtattaatatatatatatatatatatttagaagtaaagattgcattaattataaaaagatcatctgttataggaaaactttaaatttgcagacaagtatttgttcaaaaataatctcttaattaataaagactcgtaatagaaaccaaacgtacatgcgaaacagcataagaatatattacaaccatcaactgcatgcatctagtaaaatataaaataccattttaaataacatagatatactagaaggatttaattacatagtccttaacttaatatgggtatttcaaatttgcacactaatgaatattgcgttcttatcttaaattatatatgatatcattttgagaataaaccaaacaaattaataaaatggtatattattctctatcttcattgaaaataattctagtacctctctcttattcaaactatcatatttctaccacttgataacattatatatatttaaaatttacacatgcttgcgttgccattaatgcgtttgagattgtaa

SEQ ID NO: 30807 - DNA, 1338 bp, Cannabis sativa
aactaagtctctttttaagaatgccttgattgagtcacaccttcctgtagctctaacacccctaaaataatggccacgtaggaatgtattagctcacatttttctagtcaaaaattgtgcttcacaccacatattccctttcaactcatatttctcaatcatattatcccaatattcgtgctactgtttgtccgtgtaatacctatttgaaaatggaaaaatatcatatatactacatcaattgcagtgaataataataattcaatagcccatgttcaaattcttaattgttagttaattacttgaatatcaacttcttcaaatcttcaatgaaccctcgtttatgtatgtgatgcattccattttttaaaatatgccatgagcatatacgatgtacaacactcggcatgacgtcttcaagagctttctccattgacttacaaccatctgtgaatactgtacaaggaaacttaccatccatacaacttagaagagtgctcaaaacccaattatatgtttcagcactctcatcaactagtaatccaaaaccaaaaacacaagtcttgtcgtgattattagaacctagtagtatcaccaaaggtttcgaatacctgattcaccacaaaaagagaaatctctaaaattgataacaatttcaaaaataaaagccaaaacaaatttttaagaggaaataataccgattagtcttgtaggttgagtcgaatgccaaacaatcaccgaataattggtaatccactttgcaacttgagtccgcccaaaagagattggtcaatcttccttccatgtcagcttcatatttgtaccaaaaccctgggtgtggtccttcttttgcttttaaatatttcataaccgtcttagtatcacaatcatcccatgtggagtattttttccgaagaccatggtaaagatcgtctttaataaaaccaatattatgccacccaccatggacctccaccatatactgccaaatatgtgttgttttcatccccgctctcttcattgtgagtgtttgctcaatagccgaatctgtacattttatgttcgatctaaggaaaggttttgtaaagtttaccgcaaacatataattatgatgggtgttgaacaattttgtctaccaacgaccagtagttgcatttctacaaatcttaaatgaagcttggcaaccagttcttgttaaataacgtgggtcacgtttcctattctccaaaagaaaccattttgggtctctaaaaccttcattagaacacaaccaacttctaatgtaaacatcaccttccgtgttgggcctttttattttttttcctaacactaaatcca

SEQ ID NO: 30808 - DNA, 3807 bp, Cannabis sativa
  modified_base (2821)..(2821): a, c, t, g, unknown or other
gaggctacaaagatatattgtgatagcaaatcagctatagcaatggcaaaaaatcttgtatttcacagtataactaagcatataagcatcaagtactatttcatcagggaagcagaagcaaacaaagaaatcaagctcaagcactccaagactgaagagcaggtagcagacatatttacaaatgcactaccaagaggcaagttcgagctactacaaaacatgatcggagttaccgaaatgtgtaccaaagaggagtactagaattttctacacaatttagtctaaaactttctatacacttgcagaaaaattatctaagagcttaagagatttctagattagattaagtctagaatatactagttatgttaaactctagaaacatttagatttgtttggatataattccctctagtaaaagaaggatctagaggaaataattctaaccataaagtgtaaggggtaaggaactataaataccccttcaagggttccaaactatcaataaagcttactaccttctcatacaaccctctcttctaagcccaaaccattctcatatactaaatcaataactactcatcaatatcactacttcaattaccataacaaccattaaacacttattcctcatatccacctattcaaatttaaaccaatacaaatttattctaaaaccatcattaggaactgtgaaaaatattttaaataaaagatatattttcaagggtacgtttgggatgataagttagtgaaaaatataaaaaatgagcttataaaattaaaagataaatagaatattaagtaagcacggtgtacatgtctattaattgttatttataattgtacattaatattttgagtatatttattttactcagacttggttagaaagcttttaccaaaagtagaacatctgatcaaccaaggcgatgaggaggaatgtactcctctgcaccatgcggcaattagggataatgaaattgcacagatgttggttgaaaaagatgaaagtagtgcctacatcaaaaataaacatggtatgacacctctccacattgcaactgccgatggcaattgtagagtaatgagagaaattatgcagagatgtccagatagctgccatgttgttgataacaagggcagaaatgctctacattatgctgtcacaactccagatgttggtacagtaaaactaatcttggaacattcttcacttgttggcattgaccactgttttttgaatggaaaagatattgagggagatactcccttgcttcatatgggtgctacttcatcatggcatgtcgaaattttagatgctttgttgtctaatcccagagtggataagatggcatccaacaaacaaaacatcaatattgtagatatggtgaatggcctggataaaaaagaagataagaaggtacgtaatatatatcaatttttggattcgtttagtacgtcgtattaagctgtattgtattatactgaattgtatttcatacaatatttttatgtaaaactatatatatacggtattgacttgtatgggtacataaatatataatattttagtataaattaaaatttaacatagttatatatgaaaatatgatatataatccaatttaatactatacaatacgacctaatacaccgtaccaaacaagtcctttgtgtttttcctttcttgctatctaattaattaataatatttctgtggaatgttttttttctttcttatatgatagatccaacgtaaattgcttgaagtcctccttaaacacaaagtatttgacaaaacactgggtccaacctttgaatatcggtataatatattatattagaattattatattatttaattgatttttatacaaagtcaatatttagattaattcacaaaaatattttaattaataaattctcgcttatataatgtcccaaactcactcctcaattatatttatttatattttaggctaattaggatttttactccttgaacattgacatgtttcaaatcatgtcctttgaacttttttcccgttaaaaattccccatgaactattaagattattagatttaagaacatgccaatttcattcaattttacctattctgtgattttccatgtactaaatcatgttttttagactttgatatgtaccaaatcatgctctttaaactttgatgtgtaccaaatcaagtcctctgaactttcatctatgttagactttttttaactaaaattagaaaaaaaaaaaaaaaagtctttgaattcaacaatcttaatagttcagagagaatttttaacgggaaaaaaagtttaagaaacataatttattacatattaaaatttaggggacatgattagtttgaaaggtctatactactaactttattttattattttatttttccagaaatgcagatttcaatgcaggtacacaatttcattcctgtttaattatatataactatctattttatttggcatgcatatatgattattacgtctttggcgtttggttggaagaaatagaaatataggaatgagaatgagaatggaaatggaaataagaataggaatggaatagaacaaaatttgcagtgcatacaaaaattgataaaaaaattattaatttttttctcatcatgtattggaatggtctttctttccatttcaaaatgcaattgtcattccaccaaaatggtggaaaggccatgccattggaatgacattccaacattttaatatgcaaccaaacaaaagaatataatacagattgtttcctttcctttccattccatttcattncctccaaccaaacgccaccttaagttcttttcatctaacatatgtactaaaaatcagtgccagtaaatcctcatgactatgaacaaatattaatggaccgcgaaaaaataaaggaagtggagagaaatgagtggaatgaaaaaaaaaaaaagttcttcactacaaaatacaaagagtcagctctagttgcggctacattgattgcaacagtaacatttacagctggtttcactttgcccggtggttattttagtaatgaggttggaaatcaacaacaacaacaagttattggcactgctgttctaaggaataacaaagcctttcaagctttcatgataacagacacaatagccatggtgctctctactacctctgtctttatgaacctctttctcactataatttcttctaacgaatatagtaaacgcttagcgtcgtactatattgtgtctatggttttagcaatggtagctatgggattaatggtggtagcatttgttacgggtacgtacgcagtattgtcaccttcccttggccttgctatcgccacctgtgttattggattgtctttcttcggtcttatagtctacacactaacttggagcaaaagggcagtacatattttgaaacatctggcgctagtttttcttgtgccaataccattttccattctagtctgcggatacatactctatctttttttcagttatacatatgggatattaagatcgactataagaaagtgcatatgaaatgacatttgaggattactaaagagactctctattttaatctcttttgcactctctctttggtgtaatgacaaatgttaaattttgagttagatttgtttttgcttaatatttatttattatgatattctaatgttattatagttattgttagataaattaatataaaccccaagatcaatttgtatataacatagaacacaataataagatataataattaggtatgtgtac

SEQ ID NO: 30809 - DNA, 2578 bp, Cannabis sativa
  modified_base (189)..(194): a, c, t, g, unknown or other
tttttacatattttatttgtctactaattatttaacaatagtaaaaaaataacatggaaaataaataatgtagttcaatttaaaaatgactaattagaattttcgctattgaactttgacatgtatcaaatcatgcctcctgaacttttaaggttgttgaaaataccccttaaattattgagattgttnnnnnnaaagacttttgtctaatttcatttaattttactatttcagtgattgtttatatactaaatcatgcttcctagactttaatatctaacaaatcatgccccttgaattttgacatgtactaaatcatgacccttagattttcatccacgttagattttttttactaaaagtaaaaaaaaatccttaaatccaacaatcttaatagttcagggggcatttttaacgaccttaaaagtttaaaaaatatgatttagtacatgtaaaagttcaggagcaaaaatcctaattttataacagttaaaatttattatacagtacattgatatgtgaaatgaaaaagtaattaaagaaaaaggtagacatttgtttgtccataataaagtaagaaaatatccacatcggtcctaccttaaccaaattgtttctttacactttggtcctatattataacatatttacatgtgtgtcatttaacacaaaataagagcacttatatatagttgtgaataagtccgtgctggttcggtccgacccatattttaaaaagctcacaataatataaattgtgttgtaccgacctataaaaggatatggatcatatcgtgttaatattataaaaataagcccgatatggctcgtaagcccatattttttgcatcatgctcaaattcgtgccttgttttatttgagctgacccgtttttcataaaatgttagctcgttttttatgcaggctcgaattcgagcttctctctttcactttttttttttttttacaattaatgagttaattactaaattatatgtattttttaaagtttcagttatttttttatataacttttcaataatagaatgattagaatttgaatatttattagttaatacatgtgtattattattatattaatttctaatgtgttgtacttttgaattagtttattcgtgccttcagatttgtcatgtcgtgtcgtgcttaacccaaattttttcgtgtcgtgccattttgcagcatcatgtcgtgtcgtgtccaaactcatattttttcgtgtgagttgtgcttgtacctcccgagcttgagttggtttcgtattgtgtaaaaagttggacccgtatttacaatacttataataatatattttaatataaattaacaaattaacaaataataagcaagtcaaagatcaatacagcaagtaggagtggcaaaaattttcttgacatgacccacaaacatgaacacgacacaaattttacgggttagggtcgagaaaattagacacaagccgaaaagggatcgacacaacttgacaataaataaaaacagatcaaatataacacgacctgcttaacatgaatttaacataattttttaaatgaaataaaataaaaaaattattattaatataatatgattatatgactatgtaaaaatatatatttagtgatgtaatgttgagttaaaaattataaaattaattttctttaaaaattttaaaatttttcactcttattatatataaaaactatatataaatgtacatgaattttaaatttattattttcactacaactccaactttagtaataacaaaacgaatcaaaatgaatcaatataaatacaataccattttttatgagtcatattaaagttgaaaaattagatatgggtcgaaaatatatcgacacacctaatacaaaatatggaagcaaattaaatagaatatggcactaggtgccgtttgattggaatgaataaaaatatagaaatggtaatgaaaattagaatagaaataagaatggaatgaaataaaatttaaaatacataaaaaacattgataaaaaaatcattaaattttttctcttgttacattggaatgatctttctttcttttttaaaatataatagtcattcttccaaaatggtggaaagagcattccattagaatgtcattccaatactttaaaatacaactaaacaaagaaatagaataaaaattatttcatttccattccattctattttattacttccaactaaacgccacctaatataatacaataatacgttttaccaccactagcaacaagtggtagattccaaagaatatcactttaagcataggcgagaaaaaaaaaaaaaaagacaaagaaaaaaactcagaatcaaaaggaaaacgaagtcattcttattaatttaatttggagaagaaattaagaaatcatagtctttttttctttttttcttccctcataaatttttggggagagctgtctaaaatctagtctattgtttggagtttaaaaattcaataataataaataagagaataatttaattttaaagaatattcttaaattataaaattgggttaatttcacaaatg

SEQ ID NO: 30810 - DNA, 2107 bp, Cannabis sativa
tgccacttcattttcagtctttggcatctaagcaacacttaatttgaagtgttgtgccaagggtgtaatcacaaccttggaatcagtcgttccaaaagtttgaagtaccttctggaagtaccttttctgatgtaagtgcaacaacactttctttctatctcttctaatatccatgccaaggattgtactagcaggacctaagtctttaatgtcaagtttccttcagtttcaacttgagtttgtctatttcttgcatgcttctactagccaaaaaaatgtcctccacatagagtaagaagtacatgatttcttcattttgtttcttgaaaaatgaacacaaggattgaactttctccttttaaacctaagtttagtaacactcatcaaatctcctattccattatcttggagattgctttagaccatacaatgattttcttagcaagcatacctcatcttcccttctaggttccaagaagccttctggttgcttcattaaaattctttcttctaaaattccatacagaaatgcattcttgacttctagttgcttaagttccagattatactgatcaactaataaaaaaattaccatgatagaactgtgcttgataacaggtgaaaaaagttcattgtaatcaacaccttcaatttgagaaaatcccttagccactgaccttttgtaccttggtggttcaactcctagtataccctccttgtacctgtatacccatctacaacctattaaccttggcaccttttggtttcttgattactattaaggtattgctcttgtgcaatgacttcatttcatcagacattgcaccattccattgcttacattccttgttttttcattactttagcatagcttataggctcatgccacataattttactagcaatgttaaaagcataagaaattaaagcatcatgaccatacctatctggtggtttaatatctcttctagacctatcccttccaagccagtaactccctaggtctagttgtgcaacctcatcctcaaagccactacttttaggatcacttggtgttgtttcccatttttggtgtctaactctacctcaagctcaatttcttatgcttttgttatctcttgatcaaaattttctctagctttagaagacttctcaatgaatcccatgcttgctttattgaatgtcaaatctatgcttattatgcattttttcattcctagttataggcaccatagtctataacctttgactccttccagataccttgagaaaattcatttttgggctctaggctcaagcttgtcctacccctcatgtgcaaagaaaacacatccaaacaccttgagatattcatagccagatggctttccaaaccatacatcatctggtgttttaaaatctaatgatgttgagagacatttgttgatgacatatgttgttgtgttaacaacttttgcccaaaataccataagaaaaccagcactcaatagcatgcacgtaaccccctccaatatagtcttgttgaacctctctacaagttcgtttggtgagttttcctcactattttgtgcatggctataccacattctttataaaacatgtcaaaatcatttgagtaatattttgggccattatcagtcctatgtcttttgattttattagtggtttggtttctatcattattttctaatttttgaatttttctaacacttcagttttattttttaaaataatagcccatagttttctagaaaaaccatcaataatggatagaaaatatcttccttttgagtgagatgtagttctcgagggcctccgcagatcactgtgaatgtagtcaagtgttttcttggttctcttctttccagttccaaatttgaccctacaagatttaccaaacacacaatattcatagaaatcttatttttcaagatttacctttccaagaagaccttgtttgctcaatttaattagcccccttctactcacatggccaagcctcttgtgccataattatatttttgcatccaactacttgcttgacacacatgctttggtgtttgttacagtaacatcttcaatatgatagattccattttattttctt

SEQ ID NO: 30811 - DNA, 4836 bp, Cannabis sativa
ttgagatatagcagcaggtagaacttttttaaaccggttcccaatggccttagagacaattttgtagagaactgagcataaacttattagacgataatcacctatctggcggggttgatccacttttggaatgagagtgattagagcagagtttatatctttcatatccgcaccttcatttaaaaactgaagcacacaagtcgaaactagggaaccaacaacatcccagtgtcgctgaaaaaacatcgcagacataccgtcgatgaccggagatttgtcaggagccatcgagaaaagagcatcatcaacttcgaattgagtgaaattctgggttagaaacaaattcatttcatctgtaatggtagaagaaatagcagataacataatgccaagagcttcttgatcaacccctgctgttgtgaacagattagagaaataggaagcagcttcagtggcaaattcagcttccaaatgaagaacactaccatctctagaaagaagtgatttgatcttgttgctgttgtttctagcctttgctctggaatggaaaaatttagtgtttgaatcaccacttttcaaccaatccactctagctctttgttgccaatacaattcttctttttccaataaatcatctaaaatcttttcagcatcaataacttgggccgtatgagcaggggagttagtcatactgttatgcaaagagacagctttagcttgggcattattaatatcctttttcatttgaccatatttgccttgatgccagttttgaagggcatatgcacatgatgaaatattctgcaacaaattgtctaatgcaccagtggacagagattgagaccaatttttcaagataacatcacgacattcagggtcctttaaccaaaactgctcaaaacgaaatctgtggtgagatattgtagccgaccgaacctgatttagaggagaaaccatgaattcaatcgctctatgatcagaactgaaataatcaaggtgttgaatatgattctcactaaaaaaactccttccatttagcattaataaaacctctgtcaagcctttctttaacaagaactccttaaaaattcctattagtccaagtgaacttatcaccagaaaaagccaagggaaccagattacaaacatcaacagtttgcctaaagtcatccattaaagcctctcttcgcaaaggacccccttccttatcatcattagataaaagttcattaaaatctcccattagtaaccaaggatctgaagtggaagtgggagcaaagccttttaaaaggttccaagtgtgagttctttgatgagtttcgggagagccataaaaagcagtaaaatgaaaccggggaccacgatcatacgaaacaaaaacatcaaaataattcattgaaaaagaattcagtgttacatcaatgtcatccttccataacaacaataaacccccttcaaaccatgcctagggacttctaaaccattgctaaacttaagagaggaacgaacccacttgatagaattacaagcaagttttaattccataataaaaagtaagtgagggcgctgcttattaacaagcagtttgagatgtctgaatgccgaaggattgcccaatcccctcgcatttcaactaataatcttcatggcgccatgcggggctgctgtcccgcaacctctgctgaaaaaactgaattctcctcatcagaatccgactgtgattcagaaacttgcagattgttgaactcagataaacctttactgttaccagtattattgcgacaccttttcaacacacttcgaaaatttccaggatcaacctgcattttgaaggtcttgctggatgtatttccatgttgagcaacttcctcaatcaaaatagctttgcctttgtcctttacagaggtagttgtggcatcacagaaaataggattgaaccctttactaggaggagggattggtatatttggtggaggataggtggcaaggatattggtcgtaacagagggattggataggctagatagtgaagttgaatatgcattaatacaatcagtggtaaaggtgagcatagttgaagaaagactttggaaaaaagtgggaaaaggtgagggaagttcagggattgcctctgtttggtgaagggagtgattgctagattcagcatctgtgagaggcgaagggtgtggtggtaaattgatcatacgagtttgataatggttagtgattaggatagctgaggcaattgattttcaggcaagcctagtaataaaaggatacacattagccttggaaaaataacttcgataacggtcataaccggatcaatcccagaatccacaagctccatgaaaaaatgacacttctcaaaagggtggccgattcttccacaatgaaaacaaattatgggaaggttctcatgccgaaattccaactaatgctcatcccgaacttttggaagagtgacaagcttgcccctcataagagggtgagaaatatcaatcaaaacccgaattctgatgaaagacccccatccttcatgcatagaatcctcgtagacatcaacatagtcaccaatccattccccaaccttcatggccaaagctcttgacttactaagaaaagggagacggtgaacctggacccagaactgagctttcgagaaatcatccttagagacattgtgtaactgttttggggagtgtagtaatataagctgattgaaataatgccaaggttccccattcaaaatcctaattttgtcacctgcacaaccaattgttagtaagaataaatcggaatgcatttcagatacctcaactgggaagcgacacttgttgctccagaaatcacccattttcttgatgaaagttttagggtttagagcatttgacagacaacgagcaacaaggaagtgtttaggggtatgtttccaggggaaaggtcagtatcagtgaaggaatggactgctcgttccttttcagacaacaccatacgagaatccatatcttgaagaatgaatccataaaagaaaaagaagaagagtaatcgaataaaaaccgaaggtacagagcaaagatgctatacagagattcatatatagcattagaaacctaggcaaactggttgaggggagtgccatcatggggcacaatgccatggaaggcgggttgaggggatgaactcagagccatgactgggagccgccggagaagactggaaaaaactgctaaaaaagtggtaaccgcaccggagcaaaaacagagaaaaactaaaccccactcgggcactttttttatttaaaatttatttaatttttttaacccaagacaagaattgaagtttagagaattctaccaaaaaaaattattagtaggaattgatcgtgataaattcaaaaatttagaaaatttagccgcaatttatttttattttttaagaaaaaaataaattttataatttgaaaacttgtacttaagtataaaattaaacagtatttatatgggaattttttaaaaaaaaaaaaaaaaaaaacaaaagggaacttaccattcactcaccgaagtcggcaagaaaaataacaaaataaaataaatgcctatattttggccacggttctcttctcattcaatatcaatacattgattattattccctctcctatgctgctgtgcttcactgcatcttccttcttctctccaaattttagtgttttcttctccccaaaactgtgtccttttttgattctctcacaaacttagccatcttccttaaagctttcttcttctctaacacagttcgattcaacaatttttcttttaagttctcgtcacctccgccgctgccgccctttaatggaacgtttgacctttaataatgatgggtttcagaatggagttcatcgcccttcattgtcgtattcttcttctcagagagacgttagctacaggtccaatctctctttcggcccctgatttttatttatttttttatcatctgggtctagtttattttcaatctaacttttattgattgacaaactgttgattcaagggatttttagtttcttttagtataaattcattgtttattctttccttggtgtgagtgatgtttttttacttgttcacccatatatgttttatgttaataataataataataataaatactcgtagattattggtttaatttataaatataatgagactaagtaataccagtttcaccaaaaaaaaaaaatgaaaaaaggcaatcatataatagaagcaacaaaacatggcttttaatatatgaatcatttaaggaattgcatatggaacccgaatcactgagcaattctgtagagaacaaacctttatatatctttaattcttctaatttcatatgaaatcgatcctcttttagttgctttagcatcaattaaatactcttttgtatataaatactgatatgtttatagcattcatcaaccgtcatggtttctgaaagcttcaaaacttggtaattccgtagcttatcataacttaactctcactgcggttgaacactgaaaattttaaaaataaaataaaaattattttcactttgtaagtaccacttgctgagactaaatggagttcagatatgaaacataaaactgttgattcaaacatgttctgacatctgctgtgcctttagttatcaaacaggggttgccaatccatttgttatctttgatcctattaaaaaagaaactatattatgtttctgatagaataaaagaaattattggattttctggacatgtatttgtttgccttggaaattaaagttggctttgtattatcaaatact

SEQ ID NO: 30812 - DNA, 1724 bp, Cannabis sativa
tcttcttctcgccaactcccattgcatttagaagacttggtcgaagtgaagcaaagaccaagagagcctctccgagcctacataagaagattcatgataaaggctacgaaagtagcacggttaactgaaggggggaggctggccgcaatactaggggcatcaaagtgctcagagaattatggaaagatatcaagaaaagtggccctgtagactccatggcagattttcttaactaagcagacagtttcatcaaacttgaagaggccattcaacgggtaaatgtcgagcatagaccgggccaaccataggctcgctcagcaggagcgttcgctcaaaacccccaataccctagtaattcaaatccaggcggcaaaaaatctaacaacaacggcaagcaaggaaattgaaaaaaggaaagttcgcaggtaaagtcgatctaacaacaacggcaggcaaggcaattgaaaaaaggaaagtttgtaggtaaagccaaacagacccctagagaaaatccttccaatttcactgctttctctgtcttgagtgacaacctagagacaatctacatggcgactcaatcagtagtcccgtacaaaaaacctgctcccatgaaaaaggacataagcaagcgggacatgtccaaattttgtcgttttcatggagattatggccatgacactaatgagtgcaacaacgtgaagcgggaaattgaagtcctcataaggaaaaataacccgcacgtgcaaaagtatgtcaaggccgaccaaaatcaatggaccgcccaagcagataacaacaaagacctgttactgcctccaccagtgaacagacatttacaagttatcatcggaggcctacatattgctggagattcgggaaaagcttgggagaggtatgcccgaactttattacaaaaaccaaaggaagtggttctggtcgtagaagaaaggaacccaaaaattccacgggtaggggaactcgctataactttcactgaagaagacgttgtcaatgttcgcttcccgcacaatgatccattagttgtggaggtatagatagcaaataaaatagtggctcagactatgatagataatggagcctcaacaaatattctattcaaaacaccgtatgagaagatgggactccaactcaaagatctgatcccctgtacccaaccagtatacggtttctctgaccagagtgttgcaccttcagggcaaattcgtctacccctcactgttggacaagcttcgaggagcataactgtgatggtacaattcttgataattgatgttccatcaacctttaacgtaatgttaggccaacaagccttatatgacttaaaagctgttacatcaattttccattcgtgcatcaagtttccaacaaaaaatggggtaggggcctaagaggaaaccaacaagttgcacaggaatgttacaaccttgccctggccaaggccaaaaaggaagaatcctccaaccagagttcggacaaggggaaaagcattgccaaatagggaaccgcccaaggtggggacgaagatgtggatccccgatttggggaaccaaatacaaatgttgggctagtggaagaattggaagatatagaaatcgacccaaatgtctcgaccaggaaactcaaaattggaaaaggtttgctgcttgaagtaaaatcatctttgataaaatttctaaaaacaaacctagacattttttcctggt

SEQ ID NO: 30813 - DNA, 2227 bp, Cannabis sativa
  modified_base (40)..(40): a, c, t, g, unknown or other
ataagtaaatctgattataatgaaatgagttttatttagngcataaaacccaacacataaatgggtaaatgatgtgccaaaatcctaattcaggaaacccaaacctttaacttagggttctgccattaataactaataccccaatacccaaagtatcaaggaaataaccaactatggcactggaaataacacaaattgacaacacaaaaaatttgggaaacctaaccctgatccagttaactagttttacagggcctgtaaaaccggttaaccggtttgcaccaagtaacccaaaaaattcaaaatcatgcccaaatcttgtccaaaccaatccaaaccttccagaacacttgaaccaaccccaaacaatatattccaagcaataacagcaagatacaacccatgaatctaatttcaccattaatgagccaagtatgagctcgcaagctcaaactttctcaaaccacaaacaaacgaacaacaaattatcaattcaaacataaaacaacctctggaaataccctagagtaaaacctaaactaaacagccaccacatcataaaatcacaagctaaaaaccaactaaaaaacttaaatagcacaaaggtaatgttctagggtttgccttggcttgaacaacctccaatcttgttgaaaccttgctgaaattcaaagaaattaagagttggctgggttgctttctggttgtgtgggagccgaaccaagagagaaagaaagagaggttgaattcctaaattcctttgattttctctattttttctaagtagataaacattagttttaatttatcatatggtgaaataaaattggctaggtgtcaagccctaaaacagtgacctaatcctcccccttaccaaatgaccaaaatgcccttggtgcttaaacctaagctaattcaagcctaggggtaaaatggtcaaaaaccataaccccactcaaattcggtattctatttatctttaatattaatcccactaagaaaaggttctagtcgtacccacgtgactcaaatggccatccatcgcaattttcgtcatcgccgagcaaaaattataaaaataacataattcatatataacataaataatacccctagagtttaataaaatcttcagaattgagaaattataactctaatacccattttaataatgggaaccaaatcataataaaatcatgcattactataaaaatgtcaataattaatgttaattgcctttgcttatccatattctaaaatgcggtcattacaattatgcccccgttaaaaggattttgtccccaaaatctaatctgaatagctctagatattcagtcctcattccagattcaaattctcaggtggcttcatccaccttactgttcttctagagcaccctgaccaaggttatggtcttgttccgaaaaactttttctttcctatcgaggacctgaactggttatttctcgtaagacaagtctgactgtagttcaagggtatcatagctcaagttatgagtcgggtccacatcatatttcctcaacatcaaaatataaaatacattatgaacagtcgataacgctggtggtaatgctagccaaaatgctacctgcccgactttcttgagtatctgaaatgacccaatgaacctagggcttaacttgtccctctttcaaaagcgcttaatacccttctctggagaaactcacaggaaaatatgttctcctgcctgcaatgtaatgtctctgcgcttcagatcagcataacctttttgcctattttgtgaaataaacatctgagccttgatcttatctatagccttattggtcctttgaaataattccggacctaagtacttcttttctccaattcgtcccagagaattagggagcgacatttcctaccatacatgtaacgccctaacaattaggcatgtcacaaccactaattatgaaaccctaatcccctaaactgggattactaggaagaaaagcgcgggaaatttaaactttaaactaaaacagaatgaaaataaaacttgtaatagcattaaactttagaatcaaaagtgacaagttttgggatcccaaaaatcttttacaaaatattacaagtcttttcactacctggcctaagcggcaaaaacagagttacaaaagtacatcactggtagaccccaacccacttggtctagtgtggcccgaacatgtacatacatcgcctagct

SEQ ID NO: 30814 - DNA, 2183 bp, Cannabis sativa
caaactattcatcaacaaggatgggattacaaatggtaaataaaagccactaaaagtacaatcagcctcataaagagaaaatcgtaccaaaacatgcacaaccttataagcatatcgtttaacaaaattaaaagatatattattaatatcaataaacaaagtcttacagtcagctaaaatatggccataaggtgaagccatatatttaaagcattataaatctcttatgactctaaggcaatccgactccacaacaacatgactccacccattagtcttgatctaacttaatgcttttttgattctaattgcttcaacaacatgaggttgtaaaaccccaactttattcattgtcttaacttggagaaccaaactagctgttgttcgagctactaatctaactccaaaacgacgctcatttgcaaaaagtactcctcaacattaactttgattgtaggaaatccgggaggagggggtccaatgctccaaagctatcacatttgagacaccattcttaacagcagccgaaaattgtttttgagcattataccaatcaacaaaatttagtttagctaacgaaatcacttccaacattgcaggttgtttggagttccaaaccaggtcattcctcattttttatattgcccaacatatcatagatacttcaatgacagtagctttgctccaacactttcattccttctttgaatcagcctggaaaaaacattgcactagcaacaaccgaggtcacaccagcagcaatccagcagctttgagcagaaacacacctaaccaacaccaacacgtgcaagattgtctcaggtgcaacacaacaaaaaggacatgttgtaataatgggcacatgctttgttaaaagcttaaatcttgttaggagacaattcgtggaggctctccaaagaaaattttttactttgggaggaatattaagctgccataaactcctccaaaatttaatatcgtcaaggttaaaattactatctttaaagagttgcaactaattgtaggcacttttaatagagaataaatcagagctctcataaagtcaaaaccaagcatctcttccaaggcttctagtaataggaattttccacactagctccgatttttattatccaacacatcagtgataatctcagcatcccactctaaaatatcagtctttattaatttttcatctacttataaaagaaaaaaattaattttactattaaaatattattataaaatttgagttaaatatagcattttagtgtctttttggaatatcgtattattatgtagtattatattaaattgtattttatgtaatatttttatgtaatactatatgtggtattaatttttataaatacttaaatatataatattttaatataaattaaattttaatatagtattatataaaaatatgatatataattcaatataatagaatatcgacggtctaaattagccctcaaatttaactcaaaatttacagtatggataggtgcttaattaccaatgaacaattgccacgtactcagtgtgcatcgatgattgttgagcccaaatgcacccaatctccactgtcaaggttttgaagcttatctttctgggtttcgttcaaattgaaggaagagtagaagatttctcgaatctcgaatcgaaggaagaggggaaattgaagaagatttttctgggcatcttgcaaaaaagaagaagtcaaagggccatctgcctcttcaggttcattggagtgatcatctaagggttcgtatatcattgtgaatcacacttaataatccaagtgagtgaccccctcttatattttggctgttgttgtaatcttctacatttattcaatttagctgtaattttattcatatgggtttctgtatatataattatcattttcatacgctgtgttgtttagctcatgttagcacctgaggattacaaaacagttttggtatgttgaaatagtgtattgtattcattcaaaatataaattttcaacatttttatttatgtaaagattttgtgttctccttcctacaatgggaatattggagttctgattgttttgtaaaaatttatgaaaatctttagcaaaacaatttaacaaaattttttattagtaaactagtctttggtcgcaaaaacaatcatgaattgcactg

SEQ ID NO: 30815 - DNA, 1798 bp, Cannabis sativa
tatttgattcttgtttcagttagtttattgttaggtagttttgtctataaaaggttctaactcttctctacaaacacacaattatttttacaaagaatcacatacaaagatattttctcaattactttcttctctcttttctctttgttcaccattgtgaagtttctttattccatcttaaataaagatgattagttgtaattatttcctgcatatatatgtgtcatgtttgtgtgtaaattatgtgtgcacatatcattattttttaaatattagatatagaatattgttgtgagggattaagatagcgccttataaatggttaacaattttctataagtacttttattaaaataaataaataagattcgatattaaattacaacaatagtaatattatactttataaagatgttaattaccatgctcattagcatttctggtacatattaaatagaaaattgctaaaaaatattattggtggctaacactttctttggtgtcatactgctattggtgtaattaaacatcgaatctcatataattttaaaaaataatttttaaaaaatatcactaatcaatccagtggcagacccaggatttaaagtgagagaagcgtaatttttttttttttttgtaagacaggcaaaagtaaacttaaaaaagaaaaaaacaatgctctttatgggaattaaattattgacctctactctatatgtaatctagcttaaccattacactagagctaatattatgtctataaatattactttttattataaatatatatcgtaactaactaaattacatatacattttctctcgatttttttttcagggggcgagactttcccgacatcacttataaaagtattgaacactactggtacccaataacaatgttcaattaaatattagttttattttatcttattaattcatcactttattttcccttattttgtccttctcttacaaaaatagaggcaccatcaatgctcgatcgtatcctacaaaaagagaaacatatccaaaataaaacttaaatggatattaattttagagattcacaatattccccccttttttttgtaacctactaataatgcaacatcatttcatagataggtgtcaccaaaaactttaagctaaattgtgtagaggatagggcctacctagaaagggggccacacctatatgaaatggagtagtgtatatatgccggcggatcactatataatatagtagtacaatacaagatatatacaaatagatagatatagattagattcatgtgccatgcaaagtcaataaagattataaataagttaggtatggtggccacattatatatctaacacacaattcatttcacttttacccttattttaatgtgcccatttcttttctcacttatctctatttaataatttcaaactattaaatactataataatcgagttggcttatcatcacttgttatcacgagaatgaaaatacataagggtggtcttgcttcgggtgtagaatgagagatgctcaaaatagaagtgaaattaggtcggtttttactaattttataaccgactaaataaataccctaaccatcgttgagaaattataaccatttgaaatcgaccgtacagtttttaccggtttttttatttttgacaatttttgtggttttatggtttaaccaattttttttttaaaatcgaaaccgaccgttatgtcaaacaaactatagtcgaaatcgaccatcaaattcggtaatgatgtagaatcaaaaatttaatta

SEQ ID NO: 30816 - DNA, 2503 bp, Cannabis sativa
  modified_base (1470)..(1478): a, c, t, g, unknown or other
tagttttcaattatattaaggccacaaaaacataaattaaaattattatagagtcatcccattccaaaaaaaaaatatagtgaataaaactttaaacaaaactaaaatgatagaatccaccgaataaacatctcttgagttctcctttgttgttgccttagcttctttgttaggttaactatctacaattaaaaaacgaatatattgtcatgaataacatagtaattaaattataaaataattccaaatagtgaattaaacaaattaataattgcatatctttcattttcaattattaaactttgaaaccaaaactgttaaatgtatgatttcccaaaaaaaaaatataataacaattaaacatttttatttcaatgagatataacataatatgtatttttaacattccttttttacaatccaaatttttaaaatacccagattaaaaaaaaaagtaagcttggagagttatatgattttatgatatatattttgcataacacattaatatatttacaagatatatttaacaatgaaaaataaaacaaaaaattgttgcaaattcaaaagaccaaactcaagcaaacaaaataacacggataatacacttatatatgaaatcatcaaaaagtaaaataaataaaacaatactatcataacgatacaatcagatttaaatctaaaaccatagaaaattaaaataaaataatatagaacatgactaaaaagagaaaataaatataaagtaacaaaactatgaactagaaaaatcaaatcaaagaaataaaatacctttcttatcgtgcgtgagcatgttggtggcttgtattgccctaggtggtgcggcaaacaaaggagttcgtggagagagggaactccggtgtggcaacgtaacttagaattttccaacaacaaaaaaaaaaaaaaacagaaaagaaataagtgagattgagattgagaatgagtctctttccaagaaaagaatccaaaaaaataagtacagatgaggaaagatgagttacctttttcacgcccttgtgtgaattttcccgaccaagaggcggtgacctagtttgttgtagtgtatgtcagtcgagtcaagaatgagagaaagaaaggtgggcagagactaggaaaagggaggcggtatcgtgttagggttagggttagggatagggcaactattagagagcgactgtcattctcatttgtatgtttgtctactgcattgtgttagggggtaagttaaaaaatactacttttattaatcaattaatcaaattgacctctaattttatatttaattgaaacatacctctttttatatgtattgtacctaaaatactctgacataagagagtcacacggagagtattttgaagtgacaggggcaaaattggtacaatgtttaaaaaaagagataaaaacgatagactttaaaaaagagagtaaaaataaaagaggacaatnnnnnnnnngtatagagtgtaatttcctcttgtgttagatgtatatgtttgctagggttagggtaaaggtaagagtgaaagtagcagccccatatttatagcccatactcattattttttttttatgttacagggtcggcccgggttaggttgggtttatattttggggttgtaatttgcccaggccgtttctgactcataactcacgagttgtaattttttcaaaccaaataaacttcaacccataattatatgggctgatcaacccatttttgctttgggttggccgagttagtcggcccagcgggttaaatgatcaaccctatccaagatcgggcttgtgctaaggctgattaggcctgcgcctaaggcccttccagcccaggggcctaaaaaaaaatttttcctcttaaaaatatacatatttttttagtaattttcaaaaatactacataatttttaaataaagtgtctaataatttttatttttctaaggcccacccaatctcagggctgaccttacttgtatcccacacgccacttcctctcactaagaaaattggtgtgagtctctcatattagtttacaatgtctcatgagttaagtacacacgtgatagaaagttcatcatctaattaatcctataaaactactcttattctgagtgttgaagctgatctgaaagaccctggtctgaagtctttattgtgttcatattttgcttttttggattggatgatcaataatatatacgaaaagaatcgaggatactctgatagaggtaaaattctcttttactcgtagtttatatttaattaatgtaatcatgttgagatcttgaggattatggttcatattagattcatctaaaatattttttataaaatctcgcttccgctttctactctcataaggactataaaaactaacaatcatatgttatgttgcaattagttaagtattcctagttggcacttaatgagcttaggtggcatttaactgccaaaaaaacatcgttgcaataaaattgtaac

SEQ ID NO: 30817 - DNA, 2090 bp, Cannabis sativa
tttaattgtacattaattttatttagtcctcttattttatttggccccaccctcctattttacactattcacatgcatgtcaaaagccaaaaagctcacaactaatttaaatgagacccatcatgtgagttgtaaaacttgttgtgatgttgttgatttaatttaaacaatgttagccaaacacatgtggtgtttgtgtttgtttggttcaacacatttaataaataatttagtatttttattagtaaattgggatcccttatagtaaaattatatataaatttaattaataagtgtatcttcattaattagagtaaattattcaagacaataaatcagaaaatacacaattaatataaaacatacaatcaataagataacgagaattttgtgcaaaataacacgtagttcgattatctagctgatgaaaaataattaacacaaattaaagtatgtttattttgaaagagaaaaatagtagtgattctttttacaacaagttgcttactaatcataattctttatttattttaaagtaacaaaattcatttttaaacaacttaatttggctgtgtttggggaaggtgtctccttcctaatccttaaagtttaagacttggttttattttattttattttattttaaaaaatctttcaactttgaagtgacaccataataaaaggaagggcatgcactactgaactggttcacaaaatgtgtaccttttgcattcttgttaatatggtaacataattgaaaatttgagtttgaagggggtgcaaaagttgaattttgatttgttatgtaattagctttgttagagtctatcaaaattattcaaaaaatcagtttatctcacgaaacaattacgtattactttttcaaataatggtcttcatatatttagagatgatagttttgctttggtaattcacaatttcaagtctcaatatctatttgttacctattaacacaacttcaatcatctcatgaccctccatgtcatacaagcattgaattatttggcttgataataaatgaataataataaacaacaatatctctaaattattaaagcatttgtattaaaagtacacaaaccaaaacgacattggttacttcattaatatttagtattaaattataagaaaaatattaaaaaagtgttattggtgcaatttaatattaagttttacacattttaatttaataagttataagaaatcgttaactaatcagaactatcacattagtaaagtgttgaacttcataatagcaatgttctaaaaaaaattatagcagaattgatgttttttcagaaattatattgcagaaatagtttttcttttaaaaaaaaatctaactcctaatatctttttttccgctaagaatctactaatacataatttggggaatttagtcggtaattattcggtgaaggtgggaaaaggtcaacgtcagagccgccaccaattatttggaccttctaattgggtctcaatacccatctagggaaggcagcccacggaggttgactttgggcccaattatactggttcagcccaatagaatcatcttcttcttcttgaacatcaacaactgatgtaagttcagttcagcacagtcaaacaacgctaactccgattcgcaactcggtggtgaaacggaatatggaatcggagattccggtgccaaccgtgacggagcgcgaacagtggatggtggagaacagtgtctttcagatctatgaccacttcgttaattcttctcgcaacgttaaaacccaattgtagatccctaattatgaactttaattgtcatgattattattttatttggggatttccttcaatattaataataatttatttatttcatttttttttttgtttaaaggctgaagcttcgtcgggataagcatttggagtatctttttggaggtctgagacatctcggtccctctttctgcgttttggatgccaagtaactcactttctctcttttattgttagttgtatgtaatggatatgttaaagttcaaatttttacgtaattgagcgaccagtgtttcagtttagagcttttaatg

SEQ ID NO: 30818 - DNA, 2312 bp, Cannabis sativa
tgattcagtttgctaataaaattcagtttgctaataaaatattaccattttatttaaaaaaaaaaaaaaaaaaactatttgaacaatcttttaagaatttataaataattttaaataaatgcaacttatactaaaaaataaattaaattaaatctaaatacccaaatagaaaagaatgtatgataagagctttatcgacttccactacaaattattaatgtggaactcaatattaattaactcaattttgataaaatatattatcatgtcatcatatggtcgtcactcgtgacatagtgatgagtcccagaagatgacgttgttcttatccttaacatgcttttagtaatcaatattttagagtatctctagtgtaaaattggaggatgttaggtgagttgaatatattatgtagcagtatgttattttagaaatttgtatggatattatgttgtagtattaatgttatttattattttttaataaaaaattaaagttaaaaaattattataggtaaaaattaagatatatattaaataataatatgtgagatcataattatatatttttttaaatagtgttatatattagagtatttttaaaagtaagagtgtcaaaaataatgttgaaaaaaaaataaaataaaatagacaaatactaaaaggcactagtggtgccaagcacctttttacgtgtcaatattgctattagtctaattaagtatctagtcccatataatttaatataatagcttttaggaagtatcgctagtcaatcgtacgacgatacgtcttaagggtgctaagcacacgagaacccaataacaatactcaataaaatattatatttttagataatctttaaacttttaatattcttatctgttaagaaagctactggtgcttttataacattcatttctttccctttccgactctctcactctcactctctctctctctctcggatctttcctctttcaattcaagaagagaaaaaagaaagaaaggaagaaagaaagaagggaaatggaaaagaggattagtgagaaagggcagagcagcggccacatgatgatgacatcttcttctttaggccaaccaaagggaaatgggaaaccagcgaagtctacttctactacttctttcgctgccctgccacagccaaggggtcccgccaagaataagctcttgttgagtaatatcttaaacctccgttgatatatatccagatcttaatctagtactactccaccctccaactgatccatattatttattaatcttatagatctgggttctgctgttcttgttcttttatcttgtactaattatgtaaccagttattgtaaacctctattatctatccattattctcttgtcttgtaggtagtactaattatgtattgttggttggatcagtagatctggaattaatactaatgtttttcttagttggattggtgtacttgtgtagtatttgcttttccgaacataattattagtatctcgttttatttaccaaatatcacccagctagagctagtgagatcacttaatgagtttttatgtgtcaaatgtgaaaattgcaagaaatagcagatcaaaactgtccattcattgttcataaaactactataagaatcttaatgattatataattgaacacacatactgcatccaatagaaatagatgatggagaaatatggtacgagaatttagcccaaagatatacaacaagcttatattttttagcccaccaaaactcaaggggttggtccaatcgtttgaatgggatcaacactttctttttgtccactgatttaattacttccacctcaacaactcatttatttccttaaaataaaaaaatttcatgccaatagatttatatattagaataaaatatagattaattaaacttcttatgttctacaagtttactgcatttgtaattgagtgacaaattattccttgttgtacaatgtcttctttaattgataagcctgccaactgaaatgataaagtctctcgaatcttatgcgtttcttctataatttttttaccaaaaatgtttattattgataaaaaaaaagtcagtaaagaatttatttttttagaacccctttccctttgttcattcttgatcaattctgtaccttcttaagccccaaaagacccccattctagtacactacctctatttatataattcttttacccttaggattcgtttggaacgtcgtattaagtcgtattgtattatattgaattggattatgtatcatatttttatataatactatgttaaa

SEQ ID NO: 30819 - DNA, 1956 bp, Cannabis sativa
  modified_base (1928)..(1929): a, c, t, g, unknown or other
gcttcattggggcttgggttgattaacctggaccaactttagggatgtcataatgttcactcatgttagcaagatactgattgaaatcctgaatcctatcacggtgagacttgttagcagtcttcgccaatctctggttatcgattctctctctttgttctatgtatcttttctcagcagctgtcatattctgatcataagaactgccattctttccttcttcacttgatttgttgtcgttgttgcggccatcgctatcattgatttcatcctcctcaagaatgccacttccaccacctacataattcataatatgataaatatccaaatagttatgaaaatttatagcaagaaaaaaggtgtttttacagattcaacaagttatagggcatagcataggtcgattaaacaatttttaattcatgtaaaacgatttctgccatcaatttcaagtgttgaacatagaaaaatagggaaataacagccttgaacaacaacaacttcaaaaagaaagaaaagtaaagacaaggtaccataccagcagttgaaagatcatcttgtttgattacagagttttgatcttgaagaagcttcttatgtttcttctttttcttcatatcgccagccttaacatccagagcctttcccttaagcttcagcttcccaccaaccacgttatcatatgctgacatgttcactgccaggtgatacaaacaaaacaaacaagaaaaaaattgttaccaccaaataaagaactaagaaaatcagttcatttcaatgttattttacattatcacaacatttatattagagtgtagagtgtggtctaacaaaatcagttccataacataacacacagcaaaatcacccacaaaccaccatcaaattttgcatactattaaaactaaacacccaattcgagaactcctattataaaacaaaaatgcaaataaagttaaatatgacaaaataagaaaacgtaacacactgatagcctatggattacctttttggatgcggtacaatatcagaagttacaatttttgcctacacccatataatctatagtaagaaacataatcaataagattatgaaacttagttcgatgatttataaaaagaaaatttgtcacacaagtcaaatttgtcaaactaacaatgtgaaaaactaaaatttacaaaaaacttcacttaatttactctatacttaatttactctatgcgaccatgatgcttcctaaggataagagagagccaaaaaaaaaatctttcgtgtataatcaatcctgcataatctcgaatgttatcagttcgagtacgtagaccaaataatacaatgcataagtggggaagtaaaattaagccttgttcatacataggcttctgagcctcttttctccggcacatgatacaattaatacataagctccgcacaagaggccaatgcactaatactatgcctctctcaattatttatgcataaaccaaatatccaccaaatcccaaacaacttcaaaacaattccagtgaaacaaagtacgcaaatttcattttcgttgattagaaaacaagcttaaaaactgcatatatcaagggtttgacatccatgaaacgatgtacgaaaaccctttcctcaaaaaaaaaaaagaaaagaaaagaagcataaatagggattcaaagcttgagattttctcgtatgtatatgtatatgtatatgtatattatctatatacaattacagtagaagagattttagattgaaattcaaaagtgattctattcatacctgccttcagtagagacgagagtttatttttttgacagaaaaaacttttaacacagataaataaatataaaaggggagttctatttacaccccacaaaatgataagtacaccccatttttattttatgttaatttcaatacnnattttgattttattttcataattattt

SEQ ID NO: 30820 - DNA, 3201 bp, Cannabis sativa
  modified_base (3153)..(3161): a, c, t, g, unknown or other
acagagaagctgtgcaaagtgttggcgtcaagaaatggaagttggcaatgggtgaagagatgaagtctctacaccaaaattagacatgggtgttggttcgaacttctaaaaaaaagaaggttattggctgcaaataggtctgtgccaagaaagaaggtgttcctgaaaatgacaacatccgatacaaagccagactggtagcaaaagattatgcccagaaagaaggaatagattacaatgagatgttttcacctgtcttcaagcattcatctattcaaattttgttgactttggtagcacaatttgatctaaagttagttcagcttgatgtcaaaaaacttttctccatggtacgttagatggagatatttacatgtctcaactagatggttacaaagttccacgacgtgagaattgggtttgcgaatagagtaagtctctttatggtttgaagtagtcaccgagatagtggtacacgcgttttgacagcttcatcaaggagcagaagtacaccctcagccaatacgaccactgtgtatacttttgaaaacttcaaggtggtactttaatttatttcctcttatatattgatgatattaattgcatctaagagcaaggtggagattgttaggctaaaaactcagttaagttttgaatttaaaatgaaagatcttagagaaactaagaaaattcttgggatggagatcacaagaaatagagttgcaaccagtttgtctaacataggctcagtatctgaagaaagcattacgaatgtttgacatggacgagaagactaaccttgtcagtacacctcttgcacctcattttatgttatgtgaaaagatttcacctagcaccaccgatgagaagaagtaaatggagcatattccatatgcaaatgttgttggtgacctgatgtatgcaatggtatgtaccaaacctgatattttacatgttgttagtatggcgagtcgctacatgtacaatctcggtaaaggtcactagcaagtagtaaagtagattttacggtatatctacggtactgtagatatttatttgaagtttgagagagacaagactgatggtaaacatcttgtcggatatgttgattctaactacactagagatctaaataagcgtcgatcaactactggttatgtcttcacaataggaggaggaccagtttgctggagatcaactttgcagtcaactgtagctttgtcaactacaaaggcagaatatatggctataacataagcattcaaagaagctatatggcttctcgggttgagcaacgatattggtattgttcagaaaaacgtggaggttttctgcgacagtcagagtgccttttgtttggcaaagaaccaagttcaccatggtcacactaagcatgatgttcaatttcattttattcgtgaaatcattgatgaagggaatgtttttcttcagaaatttgggactgcaaataaccctacagatatgtttacaaaagtggttacaaggatcaagtttcaacactgcttgaacttgattaacatctctcagatttagagcgcccagggcgcatgtggaggcaacgtttttagttttggtttttttgccaaggtggagattgttggatttggctcaaaagtcaatttattttgaagttgtaaatgtatggttcaactttcaaaagatttaggtcttcctatttgccacatttattttttaatatcttttgtcttatgctctctcattgattacatatggttgtgagttgaggtttcccctctataaatatagagctcttagaagagcattgccaattgagtgtagtaattcaactcatagcaattcggtgtgtacgaattctgggtgaataattcgagtacaactttatacaatcaaggtattttagaaatttgagagagagaatctgtatagctaaacttcgagaaacactttgggaaatacttgaatgatattattagtagtaaatttgtacctctattctgtatattttttacttagattaataatattagttgctttgtgtggagtaggtgcacctaattttgtgagttctattatttactgatttgatatatatatatttatcactaattttactatttattacttccacgcacaataaacagaattgtgaagaggtcttttgtaaattagtagaaggtgggcaaataattggttccattttgtactaatttaacttacgaaaattatcaaattatttgaatctcgaagtatgtattaaaaatttagagaaatgtgatgtcgtccacaaattattaatttaactattaaattgttgactgtgctacgacactatgattttaagatgataaagacttagagattctaccatggcggcacacccgttgacataaatatacaccacatttttaaattgaatgcgcatatagtcacaccattaatcttattaatttttcaattaacaaatttaataatgtcgactaacataaacaacttaaataaatgcttaacacctatgtttggtaggaaagatagatagaaagctaaaagcataaataaataaataaatatataacttatattcttataaatatagaaaacgaattagggaatagaaattcaattttaaccaaccaggttattatagtgaaaaaaccaaatcaatagacagacaaaatagtattgaatagtaccgttttctttttcttcaaattttttggatgaataatgtaatttcacaactttgtagctcattcagattttacttcttagctagaaaacaccataacataacaatataataaatagtaatgctatatagaaatgggttatgggtgaaaaagataacttaaagaagaagagaaatattcaaatcacatgcatgcaaaaaaaaaaggaagataatccgtttctttctagcaagtagcttctttttttttgttggccatttttctctgtataaaacagatggacccaaagatttttacagaaagccattcttaaaaaacaaaaactctaaaaaagaaagacttaaaattaaccaagctaccttctctcttcttcttcttcttcttctattatggatttccttactatatccaccagtaacaacaaaccaacccataaaagtttcttcttttttttttttttgannnnnnnnnaaaaaaaaaaaaaaacaaccccaaatttagatctgaagtt

SEQ ID NO: 30821 - DNA, 1276 bp, Cannabis sativa
attattaattcaaataaaaaactaaaatattaaataaaactaacactacgtgacttggcacgtaacaatcacctagtatatatatatgtgtgttatattagtagttattaacataatttgtgtaagaaaaatgaggtaaaatatgttgacactaggtagctttgtggtacgtacttttaacaattggatctcaccaaacaaaatcaactaaaggttaacttttattaagttttggtctacttttgctgctatataatataccttttgagtttgagatttatcaacttttttctttttttcctttacaaaaatagggattttttgaattaaataataaatcaattcatgaacgtaataatcactctcacatcgatatgttttaagttttcttttgcttaattattaattctatatataatatataaaattcacagacgtaattgagttttaccaaattgaaaacgtttttatatagctagtgaatgatcgaggcattttttttcatagggaaaaaaaatgtttttatttatttattcatgtaaatatatatttccattgggatggagtgtattagaattgtaagaaatatagagttaatgtgataaaaaaaaaaaaattatgatgagaggattcatttaaccaaaaaaatataaattataaacaaaaaataagggataatttaaaaaaaaaaaaaaaacgaaaacaacaaaaaaaattacaaaaatgtggtttatacagaattttaacatttttacggtttttttagattttatttacataaactctcacaactatctttcagttttcacttatatttaactctctaaactcaaattttaaaagtaaaaccgtccaaactactaaattattagtgaattttaataataatattattactattataaacatgtttttggcacctatttttatactaataatattaggtgtatcaatatatatgtatcatacatgtacaagagtgtatacataattaatttaaatttcaattaataactataaaaaatagatgacaccttaaattgctaacagttttgtaattgtagtttggagagttttaactttgagggttaagtacaagtaaaataatagtagagggtttagccgtaaaaaactaaaaaaaaaataataagaaacaataaaaactaggggtgtttatccaatcaaattcgtattattttgctcatagtgcatctgatccgcactaagtgtgaatttcatattttggatccaattcaatccgcacaatagctcaaat

SEQ ID NO: 30822 - DNA, 1308 bp, Cannabis sativa
ataatgagtaattgaaatgtttatcttttgaatagtaattgtaagtaattgaaatgtttatcttggaatagtaaatgtcccaattaattttcaaataatgcactttttaatccacattatatttcttcatttttagtgttttattagacaaaaatatatagaagccatttgcacaagatccacttaagttgccttgttaatgtagatatgaaaagagttatatttgttaaatctcaagcttaattaacacacaaattgaatactattaattgcattttgaccctcttaaattaatcaaagctttttcattaattaaccaccaaaaataacattatatataaagttggtcttcttgttttgtaactaattttgtctcccatcttcaataaaagtaaaattatataaaaatattatactttttcccacatatatttttattcaaattattaaaaaggaaaagggattttacaatcactttcactagaaaaaccaattctttgagccatattccataatatgtgtgtacatttatatacactatccctttcatgaaacagtctctcttttcaataatgacaattttttttcactttaattttctgtggaaattactttaatttttagtgctaaaattaatcaagtaaactaaaaagtttcctactagtacttactactacatatggaattagtcaagttggtattttcttctttgcaaaaattacattatttacataagtttcatttaattttaactacaatatattccaaggatttattaattaaaaaaatctactataaccatatagtactaataatcataatttatttgttgaaaatgatacaaaatttgacaaagtacaattccgtacattttcatatatatatatatctatatttataagatatgattgcatatactattcttctactaatatataattaataatttaatcaattaattaattaaagatgatgaaagaaaatgatgaaggtaattatttaacattccatagatttttcttcttttcttttatttatttttctaaaggcaaataaaaaaagttaaaccaggtcaaataataaaagataacataattattataaaacatgtctattattaattcctatcatgatgatgtgggttatgaatagtaatgaaggacaagaatatgaactttgaaacatctttatacagaaacctatatcaaagaaaagattaaccttttcttttttttttttttatcgaaataagcggattacatgttattatttttttttttttttggattaagttttacactgtatact

SEQ ID NO: 30823 - DNA, 2943 bp, Cannabis sativa
agtatacacctacatcataataactacaacatctaaaatcaatggtaaaaaaaaaattccctaccagtagagaacttttactaagtcctaccataatcttaccctatatatataaaattgtgcccaacataatgaaaataaactaataggaatggcaaactaataaagttgtgctgaacatatactttcatttatatattattcacctattaaaattaatttatttacataagattcgtgaaactaaagaatattgtaattttatattattatcaattttgaatgtttttttaagataaatatttaagtaatcttataaagaacttttggtatgcagtaagtgaattattaaaaaaattatggagaacaaaaaattacatgttcagaactcaatttttttaaaaaattattgagatttctgattctgatcttatgattttagtagtgaaatttttgtcacatatgactgtaaaattagaaatgttattgaaaattattaaaaatatactttgtgacaataaatcaatcaggttacatttatgtaacaatatatgctctaggtcaaagacatattgactttgaactaattattaaaataaagtttacattaataaggtgtctatagaacatataaggacaaactctatatttttgaattcggatcattaaggatatactacttaagacttttcggtttagtgggagtttgtatttggaatgctctatcaaactgacacatatttatagtttaattttgcagataaagtatggacttaagtttaaagtactctgaatgttttctttctatattgatgtttaagcataaggttagaaatgattaataaatgattgatcttaaggaggaccaattggagataggcacgctcagatcacatttgcatgtaattttcatgctacacatccatgactgctctatgtcttttactatattgatatacgtgaccatttatgggtttaaccacgttaaatgtggtaaaaatcgctttgatcctgtggtagtataatcaattaatggatgagattgttttgaaatacctataattatgatagcaaaatttaagcgcttataaagttacaaactataagaaaacatatgtagctcaagtgggagatttttggattaaaatctctaatgtaagctcatatgtatttgtgtgtattgctatataaaaattgacccaaataaaatgaccattttagtaattgtgggtcattgagtattaaattataatgagctaaatgtgtgaatactttaagcgatatttctaatctaatttattgagggactaaattagaaatactaaaattaataacctattaagttatataatggtagtggtccctaaaaaacaagaataattttattttcatcttcctcatcaagagagaaaattaaaaaactctaaatcttgtagaagattattaactaaaatcaccacatagatcatttctataagatctataaattaagatacacttccgttttaagtttttctctttgaatcaacaaagatattctttatatttatgtctatacacttataataatatataatatatttatttataaaatttaattttgttacaacatataaacaatctcattacaactataaataaaacattaaataactaaaaaatagttattaaagatgtagtttgataaataaataatttcaaagagtaaaaataaatcttgttccatatccatatatattttttaattttaaaattttttcatccattatataaaattttctaatattaaaccactaaagtaaatatttcataatatatatggtaaggaaaataataaagtggataagaaagaagagaagaggtattggctataaaataataaacataatattggaatgataaaacttggtgtgttctcaaacaaaagcgcccatagatgatgatgttttattttttcccaatcctaggagagtacttcaatcacattattacattacaatacaaaaactcattaattaattaaaatgaaaccgggacacatggtggcgccacgtgtcaaccgaaaaagactgatgaatacgtaacaatcattcgtagatttatagacacgtcagcttcttcgtactacaaattgtaggctgtgggtcccatcccccttagttgatgatggaagggctgaagagagaagagaaggtagagatttggagagattacatgctgcacgttaagaattattccaattggatattcgaatatccatttctaacatatcccaaatttcaaaacatttacatatataatactttctttttagcttattaaaacgcacgcactgaatctcaaagctcaaccaacagaacacaacgacaatcctgccacagattatttataggtacgtttatttctttctttttctttttctctttgtctatctgtaattatcatattgattagcaaacgtctaatttcttgtttttggtttggttagcggataattattttctaagcaagaatatttgagttctggtgtaattttgactttttttatggatgactctgtttaaattttttgatgagatatttatatggacaattatggattttgtatttgtactttctataaatattgatcgagtcgtgccgttcagtattatggtggaaaatttctcgtttccttgacttcgtataccatgtaaatctttattattattattattattgttaaatgtttgtatatttatatgcctgaccggttcggttgcttttcgagttgggttttgtcaaaatttcctttttctggtcgttagggatgtgctgataacttatctatcttcctggtgtttggtacaaatttaataaaattatttcatggtcttataactaatataatttctgttcatgacttttatttatttttgggaaataatccttttaagacgattt

SEQ ID NO: 30824 - DNA, 1442 bp, Cannabis sativa
  modified_base (1163)..(1164): a, c, t, g, unknown or other
ttttaccttaagaactaggtgagagattgggcaaggtatattgatagatctaccatcacttatgtttatgcgagaaaggttaagggtgagaagagtgtcagttcaacaacaaatgaggtcataatagatagttgagctgacactcagtaatgtaataattaatctaagcagtagtttagttgagtcaagtgtggagaatttgttggttgtaaactgctggagagaattcaaactctcaaattcctgaaaaacatcaatacaatatccatttatccatgtatctattacttgcagctcatccctaacaaattcctttcatatacaatgttcactattctacttcctcaatccatttgcgagcagttggattggattcccttcttagacggattcactagataagggatgcttcaaaaactaaatttttaacacttgaagccagaccactttgatagctcaaacttactaagggattggataatttttgccgatatgaatttggcatttgtcatgaagttagactagaactttgtctgaggaaaataagtctatgttacaaaatgctctaataaaagtcttgtcgaaatataaatttttggtaatttggtgtcaggagcaatgcttctgtagtggccaaggagatctggtctactagaggtttgatgaatttggtagtttgtcaacaacacttaattatctgatgtccttcttctcacttgagattcttgtggatcctagaagtcacaaatgaggatgttgatagtgttaaagtggagtaatgtatttcttgctaaagaaggcttctttggaaagttaatttttgttgagaatggttaaagtccaggtgatgattgaaggtttgagttgtagggcactcttcatgagagagaaatatatatatatatatatatatatactagaaaaaaattacttgctaggcacgcatgtttagttttatatgaagtgctatataatttaattataaacaatataaaaaataattatatataatttaacttattattatggtctaatagaattttctcaataaaaagtgattaagacaataaaaagtaatataattattttgtgaacttatttttatgtatatttaatacatgtaaataattaattcttggatgaagaatattctatcattcttnntaaaaatgtatcttctaatgcatataatatttagtttgccaagtagtaaaatgtttactttagtgcagtgatgtctttaatgttctgtctaaaaagaaacacacagtatttcataatttgtgcatatacatataaaattaacatttatagttaaatttatttagtaaccattcatgggtaatacccattaagaagtgttccatttatatatatgtagggtatggaacacttcttaatgagtattacccatgaatggttactaaacaaatttaactata

SEQ ID NO: 30825 - DNA, 2935 bp, Cannabis sativa
agagagagagagagagatagctttaaatgagaaaaaaatagggaaaaaaataaagaaagaacaaatttagaattaaaaataaccaaaaaaataatctcagaacaattataaaataactataaaaaatcagtttattatttctactcaagatgtatttttgtaaataaaaaaaatttaaagcataaaaattaaaaaaaatctgtatatatatatttttaaaatgtttgatctatcatgtaaatttttttaaaaaaatgtgttggaacaatttttttaatatatataacatcatatatttatcttttttttttagttatttagaatcacttataaattttttaatagtttatacatcgaaaataaagtttaaattgttgcatacataataattgtttaaattttattttcataaatataaattattagaaattttataaaaatttacaaataattttaaataactataatttataccatcatactaaaatatcctacgagagtatactataaatttataatatttactccctttttatactactactttttacgatggtgtaatcatattttatagcaaaatctaaaataataataataataataataataaaagtaatagtttgccaaaattcacttaacatatcccatttctaataaaagttaattttgtccacaacttaatttgcatatatatagtgggtgaggtgcaccacaatatggttgatcgttaaaaaaagcagaatcttattaaggatgtgatgtcataatcttttcttgtgtaaaaagtaagtattacattattaaaaacaattgccataattcactaaatatatattcattctaatgaaagttagctttctttttcggccattatagtgggtgaaatgcacactaattcacatcacttttgttttccttctttaaaagttctcaaaaagaaatctataccaaaagatcattttggtacatttttttactatatatttccgtataaaggagagagttttaatcttatttatattttttattttcataattgtgtttgtaaattatttgtattttttttataaatttttaaataatttacagtgttaaaaaataagaatcaaataattactaacaaatatatagaaaaataatcgtggaataaaattttttaatcttatttttgacaccataaattattcaaatttttttaaaaatttacaagtggtcctaaataactacaagatacgaccattaaaaaattaaattaaaaaattctcctaaatactgaaacatataagaagtacaccaaaactgtccttttaagggtgtactataaaattagccaaaacttttttaaatttacaaaatctattaatacaagtcaatagcaaatatagtattgtattaagtaatactaatacaaaattaaaatagatataaaattataagtttatatataaaattaaattcttttttttaaaaaaaaaaagccaagtcagattagatccgatctgaataagtcgggtcggatctgatccaattcgagtatctaatctagtgggacgagacaaggcggatccttatatgatctagatcaggtcggatcatagtcgaatcagattcgactcgatccatttacactcctagagtttagttcccatatcttgaaaatcatgatttaatcttgtattaacattaagcgatttgttatggttaactcagagttttgttagcattaatgaggctttggtaatcaatgcttgaaattaattatataataaattatatatatttggctgtaaataataatgaagaaaacaataatttttacataattttgtagttaaaatatgcatgttccacaattctatattattttttagtatctttgggttgagattacaatatgacaaagtttttctaagccagaaattgtgtcatgtctttacaatattttcactactatttataggattgaaatagcaattacctttgatcgtatttacataactatttatgaaacatggacattctttacatttcatttaattaaatagcggagaaataacatataaccactttcattcaaaataaaataattgttatgtttgacttgatctttgtgttttgtggcatgttatcactcagacgcttgattattgaagggcagtcctcagggaattcactgatgcccgaatgtatgtttcttgtgtgacatactcctcaaagaacatcttgacttcatttatacatttatctatatataatataaatattgctcccactgaccttctggtatacaattaattccataatgctcttttcaaacctaaaggaaaagatatgataaaaatacaatttttgatatgtttattttaatgtgtaggtagacttcttaatcttgtatattttaactaatattagagggaaattcttatagttgtatgtataacttatcctctagttcactatttggaattgattaataaattaaaatgagcaacaaatattaaggttactaaaatagaatcttttataaagacaaacgagaatgtaaatctcctttgtaaatgatttttagttcaaaataaacttcttagcaatgaatcttgatttatatccttatatttcaccatgttgcctaatgagtatttatttgtaaaaaaaactataattaatattcttcaacctattaggcaactttactaaagatggactatacattgttctttagaatatttatttcttcattcatggcatattgtaccacaattttaattctgtgcattccactgtttaatttgtgtctcaaattaatattgtagttaaaattttagtgtacataatgtaatcactagaaaatattgatcttattgttctaataagtcatcttaaggatggaccaacaaactcttaaaagagcaaatggttcaatatgcatgttatt

SEQ ID NO: 30826 - DNA, 1390 bp, Cannabis sativa
agagagagagagagagaaataattatggagaaatagagagtcagaacttaaaatgggaagggggacaaattgagtgtgatgacatcatcaagttagtatttttgtaaatataaaacttttgaaagtttaaaaaggtaaaaaatattttgtaataatgtttaaaaatacaattgggattaaaaatgtaaaaaaaaaagctaaatatgacacatagtgtaaaaatctctatataaattatttcataaatactcgacatttataaaaatgtttacaaaattacgggtctaccgtattctttaactttgttaagattcaattttctttttcataatatatagaaggttgttctatgaaaaaatattgtttttgtgttgctactacaaaaatagcttttatgaatttttttattaacaaaattaccttataaaaaaatttattagcaaaataattttatatggtcgcaaaaacgatcatgaattacactatgcgactataaacgactataaatttataatgtgcaaccatcatggtcgcataaagtaaattaagtgaagttattttgtaaattattttagtatttcatattatttgtttgataaattttatgcattatattatttttctccaatgtgaaatagtaagaaaagaaattaaaaaaaaaaaaaccataaaagatagatatttttttttttaaaaaaaaatgcaattttaggtgcattgcttaaatttttcaaaaaaaaaacaaagaatttgaaaaataattatcagcgtatattaattgatccttaacctaattagttggaactcataggtgatctaggaaatctgtgtacccgaagcgaaagaaaaaaaaaatatatttaaaagagcaaaatattttaatatataaatctgtcccaaattatgcatttaagatataaatacttaattcaaaaaaaaaaagcaaaatgtaaaaataattttaggcttgctggagtgagtactgagataatagaaacccctacggtattcttcctcgctggaacagccttaatcgagtaaaaatactcgatttccacaggtgtagggcacttccacttcagaattttatacaagaccttcaaatcggcaaggattctgtaggagatgggatttagttggaatggggtaagcttgatgtggtttatgtaatccttgaagtagtcacggaggggaattatggcccctgcactgatgtgttcaagactccaggcacctatgccagtggagtcgctggtactggtctcactactggctccctcgggggtctcacttgtaaggcgcgcagggggggtaacaactaaactcaccagctcgcactgacctaacttggcatacttgcccaagttcgattccacaggtcctcagtata

SEQ ID NO: 30827 - DNA, 1738 bp, Cannabis sativa
ggaaaatagttcggaggggagctggaaaacaacatttactttacaagaagaacaataagaggaaattaagactctccaaaatggtaggattccttaaatttccatctctctctatatatatgtatttatataatgtatgtatatgttctgtgacatggtgatagatatagatagtgttaccataatgatggggtttcaaaaagacatatcctttttcattgatttgctactgataagaaagccttaatggctctggttttgaattgttatgctaattagaactgaaagaaaataacttaatacttatgtgtttcttgaagctatggaagaggactaatattatggcctcttcttagagaaggattatataatatatgggtcttcttctcaatagctgcacattaaaactaagattcattactcaacgtgtaaagtgtttcaactcaatcaagggttttcattaaaatacaccgaatcctatcagaacactctcctcgagagtagtatgaagatgggtgacctcttggaaagtcctcttgtcgcgcccctaaaacttttccataacaggattttggtaatcggataggataagagcttctttgagggagcagggtcatccaccaagtaattggaggaaaaagatcttcctttcattttttttttaagtttcattattatggtcatctaccatatctatgaatgaggtttattggtactgtcttcagcaaattatgatatcttattcagctggactctcattatgctattgagtgaaatgaacctgcatgtttacataaacaactatatgtatatatgtatatacatttgatcttttctactttcttgtttacttatctcattcattgttttggttcttgtctttaacagcatccagtctgcaaaagtgactatgacaatgtgattaaagccttgccatatctgaaagtaaacagaaatgccaagtagaggttttgcttaagatggaaagcagaagcttattagatttgtaaacttgccatttttttttccccttttttgaaatgccatgacaagtagaggtttttgtagatactttcttgattgtttcattttcccaatcaatgatactttgatttcaccccacatgggatttccttttaatccatcttgctttcattcttctgttatttttctactaaaatttctccctcttaaattaagggggtttaatgtaaatcattttactatattttatttaaaacttaattattttaacatataattagttaaaaaaatgaaaagggacatggctataagctctaattgccttttagaataaaaagcctaaacgcattcaatttcaagcaactcttaaaatgtctttggaaaacacaaccaaccaatgctaaatatcttatctattcattactagaaggatgatttttcataaaagatatgggtggatttaaaattatcaattgatctaacaaatactcaaaatcagcacaattaacacaaacaaataagtgaaaaagaaatcattcttaaaaagaaggataggttcatagcatcaagaaggataagattcaaaataacaaccaatgtttcaaagtttaggcataaaatagtaatgaggcttcttgacattttttggattgagagcttgctcatagtccctcgcagtatacacatatacttagaacctactttcctcagcatttgtgccaagtttgtgcctctaaatattattacctaaagg

SEQ ID NO: 30828 - DNA, 2309 bp, Cannabis sativa
tcattatttcatccaaatctatttagtaatttttgaataacaaattcataaaatataaaaaataaaaatagaaaacacattacatacttattattttaaaaaattgtgatacgttcatcattacattacttgttacttgaattattaagtgtcccgttagtttaaatcgctgttaattcttaatcgttttcattcttctctgtggagttggttctttattttctgtgttaaagtgtttgtaaactctgttctcttgtacaagattccttactaagctttgtaaaattttaataatcacttttgaattttcattcatcgtgtaacaagacttcctgaaaaggcaaacttgtttgctgttgctgatcatcccatctttcctccatacaaattctttttaaaaataaatacttataatataggacaaacgattactgactgaaaagtagtttgatcaatgtaaaggaatccgttcacatgtaaattggattatactgctttttatgaatatggaggaatgctttgttcattcctaaagaaattagttggatcaaccatgttctttacacgaagcaacctatcgaagttatttttgaaatacttgaaaccccaaatgcttgcttgtgcataacatgtagtgccattgttattgtttctccctaaatcaaggtccctataattgagataagcttctcttggattcttggacacataaggagtcatgtatttataaatccttctaatccaatttacatgaatcgattccgtaacattattaatcccttcaccttcatcagtaacagctacaacatataaaatcttgtatatgtttccagctctgtgagggaatggtgtttcccattcatgaatctctttcattctaccaccataaggagtcatttgaatgaaagccattcctacctcttcttcaaacaacctttcccatattccttccaacccatcaacaggtattggcactttgacatagtcagattttccttttataggcactttaaatggagttgttctatcaagcaaaacttccttagaagatccacttgggaatcccgcgaaatagacgacagattcaatccaactcatttccttgcaatcttctcttacaatacctaattcagggaagccctttttcaaaattggaatgagtcgatcaactccaccaaggaacaaagatataaatgaagcttgaatagttttattgggactattcacagcttgtaatctcacaataataaataaatcattgtctaatctatctgccacaaattgccatctatgaacaagatttgtagctttttgttccaaattcctattgactgtgaacacagttacagtttgtgggacagaaacaagcctaattttccacgaaataatgactccaaagctagcgccgccgcctcctcggatggcccaaaagagatcttctcccatggatattctatcaagaattctcccttcatggttgaccaattgggcatcgatgatatgatcaacagagagaccatgttttctaagcatggcgccatagccaccaccgctaaaaagtcctccaacacctacactgttggcagtagcagaaggaaatcctagacattgactgttctcagcgattgtgtaataaacttcaccaatagatgctccggcttcaaccaatgcagttttttcatctaagtcaacgctgaccgatctaaggtttgtgagatcgagcacaacaaatgggacatcagagacgtaggaaagtccctcgtaatcatggccaccgctccgtactctgatctgcaaactagacttttttgtgcagtatatggtggtctggacatgagaggcattcaatggagttatgataacaaagggtttgggtgtggatggagaagagaaccttggattttgtatggataaatttaggactgaaagatacgatgtatgattttgtgtgaaaataattgaattcgaatttggagattgttgagaaaagcattgaagaaagtcattatgagtatcgaccaaagataacgaaaaaaggaagagaatgaaaagaaaaatacaagagtcaactgaagggtggcattcggacttcattttgctagtaaatggcgataatttttatgccttaaatcaacatccaattcattatttatactactaattatagcgcctatctaaatggacctttttattagttgatcactttcaaccttatgtacaaatacaatggtatatcaagtgaacagcgtttggagtatgactatctataagatttagaataattaatattatttttgcatcttcaaatt

SEQ ID NO: 30829 - DNA, 1476 bp, Cannabis sativa
taaaataattaagaaagttactaaatagaatttgaatttcaacttataagtaaccataatatttattttgaattcaaaaccgaatttaaaaaataaatatccaaaacaatattaaattattttcattaaaataataatatgataatttatactatatatacaatgtatatacgctatgtatactatatacaatatataatataatatatatacatatttatacccaaaagtacaaacatatgtatttattttattggagttgggtttttggggttaaaggtgaactgaccactatggtccaccatggttggcagctgcggagagccaccatggctacgatggccatggctaggcaccaagtttatcgcatgaacaagtcaaaaggacccaaactaggtccatatatatgttcgcacaaacatggaggcgaagcaaggggaggaccggaccttctagtccgtggctcacggtggcaacaagaggagcctgaagaaaccagaatctagtcaggttccttctccgagcacgaacaccaccagtctcacgggtccaacacaaccagtctcactagtccaaatggacccgcctggttctccttgcgtctcaagggactcatgtcctgcttgtatgcattgcatgcatgaacttttttcatgtgggcacgttttggtgcccactatagaagaacgaaaggtacccgaagctactcgggtggctgtgcatggtcaaggtccttgaggataaatcctgagctcgcatgcatatgattttggcgtgcatgcctggatttcaagattagaaactgagctcacatgctatgaatattacattataaaatttttacataaaaataatttcataaaataaaattacataaaaaatcctatgccctagtattggcttacattattttttaagaaaaaataatataacgaagcatacacgaaatttttccacataattaatgattcatatcacttctcatacatccacaataatattaccatttattcacatacatatcacacacatatatatatatatatataaatgcataaaactcacacaatttttaatgtatatacattcatggaactactcttgataccaattgttaattttatagtactaaatcaggtacccggcaaaatttttttatatttgattatcattataccatagtcccaaagatctccagatgtataaacattaaatcaaaatataaattacatgaaagatatatatacctctaaaagtctatcatggtatctttaattcttttcgtaatttgtatcctttcaggttgattagaaactcacactgtagtattctaaattgtttcactacacacaaagaatagtgtcggctaatagtatagagtgtataatttgttcttgttgaattctcaatacatgagcaagaatagtttgagagggatttctcatgttgattttgaattctatagtgtagaagcat

SEQ ID NO: 30830 - DNA, 2166 bp, Cannabis sativa
  modified_base (2105)..(2107): a, c, t, g, unknown or other
atacacaccatcttagagaattatttgtgaagcacacttttagtggaaactttagaaagttaattgagaacccaaaattagaaaggattggaagagaaattgccaagaaatgctaaagttgtaggaggcctgctgagatcgatgttggatgttgagagatggcaacacattgcaaataataatatttgggagcttagcacatctctggtttgttcaatgtatgatgatataattctggggactatatgcattattggctcgagcttccgctttcgattaatgctgctgaaacggaagctctctggtttggttcctgccttgctaagcgcacctgaagttagacaaattgacattggaatttgactgccttcaggtgatttcagtggcattttcctcattatttcgattgataatatacatatatcagaacatgggaacaaagcttctgtaattatgtaccatatggatttttgagtggattatatccaaagctttttagtataaatataaattatggttatgaaaaatatgtgtgtagaagcttagcaagctaacagtaatggtaaaaaaccagaaaacaagtaaagactttagagagaaaactaacaaaactgaattacaacagattttattggttaataatgtgaatttgaaactaacacatcttctgctcaagttaaaaaataggcttattatggttatacaagaaatgctttaagtctactccctaaatttttccgaatgcatgtgtgtttcatcatcatgcagttccgattaatgtaattttggtgttgatcaccattactgcataattgagacttaaatctcgaattgtatagtactgattttatgctgactcaaatcaataaagttaattctcattatttagttagtgtgatcttgattctcatcattctcatttcaatgaacagtgaaagaccactaaccaaacgatgaaacaaaacttcaaacacatacatacataagtaacccttggatcaaaaagtaatatttatcctaattaatcaaaaaagaaatcaaccaaatttccataaacaaataacaactcaacaagtatgctttggaactgccatgagttgcaagcattgtcagaagagtttgcaattagtatgtatttgaacttagtgttcttcgaatattattttacaattcggttcattttgctatatatgctcattgaatttctaagtgaagtatttgaatttgtgttagattgtaatttaacttagtagtgttactcattttgattattactaagaaatgtttggtttttttaagcagccggccaattattacacacatacaatgacataaacagcattatattatataatcatagcatagattatatacaattgaagttgtaatatagatactaactaatatcatatcaattttggaatttgagtcatccaatgtttcaaatttgtaagtttgcttccgtcttctgctctttacattttctgaatctttggctgtgcaactgagcttgctactgatggctcttgaaattgtgattggtgcttttctctctgcttctttcgactttttgcttgagaagatagcttctccttatgttgagaagttcctcttcaagggagaaaatcaaagttctgttagagagaggcttttcaagttgaagtcaaccttcaatactcttgctgctgttcggtttgaagtggagaacaagagaatcgaaaaccctgctgtggagaagtggctggatgatcttctcgatgctgtcgatgatgctgaggacttctttggcgatattgaatacaatgctatgaaacccaacaattctgatgagtcaaggaaagctagaggaaaggcaagtaagttattctgttgtttctctaatccttcaaatttaactgatcgtgtaaggaatgccaatatggaagatattcttatgaggttggagtacttagccaatcaaattggaaatttaaattttgaaaagaatgttgttaaggtcaaaccatcaagattatcatgttttaagacttctctgccagatgaacctgaaatttacggtagagacactgacaaggatgccttaatgaagttgttgatgtcggatnnngatagtagtgagaagatatgtgtcattcccatagtgggaatgggtgggattgggaaaac

SEQ ID NO: 30831 - DNA, 1772 bp, Cannabis sativa
gaggcttaacaaacatatattcaaattctcaatcataatcgagactataacaacacaattgttaatcacttaaccctaagtgatacataacacttttcttacctctgtccagaaatcaagtgtgcgggcccacctgagcagaaacaaagatgggcaatcctggttctatgtctcgataaccaaaactccataaatgccttaaaccaaaactccggaaaaaaactctaaattcgaaaccagacataacctaacttccaacaatcccaaagtaggctacacaacacctaaataacctaaaacaggtactaggtaccaccccgagccaaaacagaatttgaagaaaaccctaaaaaatttcccctacatggcaaccggtcgacaggttctggtgcactagaaaactttgggttttcttccccaaactcgaaccaaaaccattccatacctgtccaaatattcctaaacaatataataccacaaattcaactcatcccaagcatcatttaatcacaatttaatcattactcaaaattacatactcaagtgaaaatcaaacttcatccaattcaaatcaatctaaatagcccctatttctaatcaattcaaactcaaacaagcataaaaataatcctagaaacttaccctaaccttaattaacttcacaaccccccacaaacctaaaaccctaaccaaaacctagtctaaatctttttttttttttaaaaaaacaagaacaacatggtaagaagcttacatcaagagttggaaaccactagaattggttttctagctagaatgggtgttgaactatgatagacaatcgaatcccctttggtttccttctaggccgaaaaagaggagagagagagagcttagagattttcttcttaatttcttctttttacttaatcctttgcaatataaatcatctcttctttctttctttttttttaaaaaaataatttaaatagtaatcaacccaaaactcaaataaaacaaatcacctacccatgcaaaatggctaatatacctttttcccgaaaactaaactaaacataccctaggtgtaatttggtaatcttagctaatcccgtcaaatcaacgacctaacactctaaactagttcggtataattatcattccgatcatattattatcgtgacatatctgaccactctgccgagttctcacggttgctgggcccgaaaacattttattcttaaaatggcatccacgatatccacatattctaataaaatcttcgtaactaataaattacactttatttaatcatttactaaattctcactaattaacctaagtaagatcataatcttacttcattaccagaataattacatatttaataaaatatgtctaattaaataccataatattttccggaatattacatatgcccttcaaattttgacatgtacaaattcatgtctctttaactttcatccacgttaaattttccttactaaaattacacaaaagtccttcaatataacaaactcaaatgtttaagggagatttttaatggttttaaaagttcaaagagtatgatttggtacatatgaaagtttggaagagcaaaaatcttaattagcctaaaaataatatgaaaacaataaaaaaaccatataaaaataacaaacaaataaaaaaaaacaagaaaaaaaaaaacaaaattacaacacaaaaataacataaaaaattgttcgtattttttagaaataactaggtgattgttacgtgccaagccacgt

SEQ ID NO: 30832 - DNA, 2239 bp, Cannabis sativa
gcaatgcaacactcttccaacacattattattgtcgttttccagtaacgacattaatgctgaggaggtggaggaggacacgtggtgcaccaggagttcccagtagaggacgtagtgtccagggacgcgtgacgtgtcagcgtagctggtgtactcgaccagaagggtgttgtgaggttctagaagcttcttggccacagagatgctcttgtgcaaatcctcttcgttggttttgtcgttgtcgatgctgaggaggacgttccttctgcatatgaattggaattgtggagttttgttgtggaaccccgtcactagtagcacatcgcctattcgataccgatttagtcctgtatatacgtattttatacatcattacaaaaatttctatgaaccccaaatagttaaacaagaacagagttaaaaacaaatattggtataataagcacatacatacttacgactgatctacctaagccattagaacatggttttcttaccaactcttagctttcacaaaattaacaattatggaaaatattagacgaaaaaacttaaagtaatgtgtatacattagtgtagagttctttaaaataaaccaaaaaaaaaaactttaatgtttatgtatgtatacattttgtaaaaaacatcaaaattctattatggcccctattcatttaagattgttttaaagtaaaaaataattggtaaaatggctttctttttagttaatttctcctttttgatctagtattgataaattttttacaaactaatctgagtctaaaaatatttcattttcatgatgatattcataattatagaaagaattggtattattaatataattaccagcaaaagtggtgacgaccaattcataataagatccacgtgtgacgtggaccaaatcaacaagcctgtcaacagggacctcatcctcctcagccacgtccaacacgagtgtaccattatctcccaacggtataaactcaaagtaacacatattgggcataagtgtgaacgccacgtcagatgggtcactaagaggtttcaagttgaccccaaagtaacactcagaagaagcatacatggtacaaaccaaaggcaacttcccaccactgtagtactccaaagccggaatatactgagccatggacccagttataactgcctcaatgtacttggccttaggccaaagtttacacaacacacccttccacgaaccacctgattgttctccacatatctcctctatctcctcagcaagacccgggttcggggacgaaacgacactagacatggccaaacgacactcggggtctgtgatacaagggtctaggcggcctagccggatgtcgttgcagaaactgccccagttccgctcgagaaatgaaatggcgcggaggagagcggaggcgaagacagcgccgaggcgaagaacttggtggcggttgactaggccggagaggagctggcagtacatgctttggttgctgtcgttgcagagaatcacttggtctgggctagtgtagttgctaaaggcatcgtaagctcggcacttgaaatgcttactcttgtagtagctagtcaaaaccgcacgtgccggaagcccacacggtgtggacatttcagccttgacgaagtacaggaacatggcttttccttcgtccaaaccaggaacataccttaaataaaatggtcccgtatttaattgagtagtcaatttattttgtaacaagagaaaaagtgagttaagtgctataccttttataaatattaattaaacaacttgagggacatgcaacaaaaagcatatatacgtgaacagcaaattagtcgattatatgtacaaatagtaattgggtttatatcgtggtttccacgtcaaaatgcactgtgttagtgtgtgttatgccttatgccatgatgaagaggatgtcatccctaaagtattgatgaaatgtttagactaggcttgactggtatatggtgtcccatccatggagcactgtttaaacaaaaggggatagataagaacacacaatatataaatggctggtggataagattttcctagctagaatttggaatcagaatcactagggaaaaataaaaaataaagatgttcttattgcgtaacaagatttgaaagaaagccttttctttcggctacggataataatgatcacttatttgaaagtatatagggattaagtactgtacatattttgaacacttattat

SEQ ID NO: 30833 - DNA, 2227 bp, Cannabis sativa
ttagggcataaaatcccaacatgtactttatcatcatccaagtcagggccttgcccatctccagggtaggcctcttctttagttggcactcttgttgctctggagcagggggatataagccatactttcggaaattgtcaatactggtttgccaaataatatttctctgcttagccaataaagacaggatatgattttccctattacttatttgtaatgtggggatggaacacttgaagaatgatattctttgaaagcgtcgatggcgaacctctttaacatcccaagaaatgaagtacttgttagcatgctcgtcaaccttaggcagggatgagttgttaaaatcatctagccactggtggccaacttggctaaaatagaagtatccagactgatgttgctacaaaatagactccaagtcgaagtagtatccgatcccataaggagtgggtgaggccagcctagctccttgtacagaacaaatattgctgaaaggtgggatgatttttgttggacacatcctgaaataagcggcaatatcagaaaagtacaaatgaagaggtagtgcggctccttgatcaatgtggtactctgaccacgccattcagttaagagccaatctatgcgctagttggtccaaaggaggtatcttacgatggataccgcccactagcccattagcccgtattctctcaaaactgtcctttgagagagaccaaataagggaaatccatctgtctccttgtgaacttgcatcgagaatctcaggctcaggggattgatccgagacatgatccaagccaattgccgaaggctcaccaagcctgtttagtggattaccatcgtcgtcataacgacctaaaggacaattggacagggtgacacaaggcctgtgtctcttccttctaaccggtacaactttctcatgaccgaactcaacctcgggactctcatcctcatggtcattttcaaagctaacattggcatgaggcagggtaaccccttctacaacattgatgtgaccccgtatagccaatctagctgtatgagggtcgcacggggtcactctgccattactctatttcataccagccataactacaaggtaagaaagagacctacatggctatcacctcccctattcaacgcctagcactacctgcatggaagaaataagaggaggtgagcaacctgacaaagctacaaacatattcaagtcaacggtacccaagggtaccttccaggtaaaacaaagtgtacaaggtcgatcaacgaccaaaaaccgtcttaagcacacttactaagacatacagtaagtcctaagttatccaattgactataatggactcattacctagccttatacaatgtttccaagaaagaccaagcataaggctacatttgtatatgcctccaaggctgtcacgagaccctaaccgaggtcaaaagagggagaaaaattgcttgcccacttggagccttggccttggccggccagggtcccaagtcctagtggccgggcagaccccaagacccagtctagtggctggccaagaaccctagttccaggcataggccggctagcctaaggacacagtctccatggccggctagaccccatgaaggccacctatggccgaccagcatttacatgaattagaacacatgattttacaagaactcaaacatgttcttcgttactcaaagagccaagaatcacaacaaaggtcaaactcagttcttttttgtctagaaatcacacattatctatcctaaggctatcgtgcaaataaaaataccgaagggactatattctaatgtaagaatcaaagcatgttaaaaacaagaaataatgttcatgcattcatggcaaaatcaatcaaaccaagggaaatagcgagaatagaaagcttacccactacaagatttcaatggagaaaaaggtgggaagcttggatcgttgaaatagcgcaataatcccaagaagaatggtgcttgtgggttcggccatctggagagaaggaggagctttttctagaacaaatttctagtgagaaaaataaaaatcagaagtgaaaaaagggtttcccccaaaagtcacttatgtagtacatgtgggccccttttcctcacttacctcacctacacatcataaaggaaactaaagcagttatttctctactgcaatgagatcagacagtggagataaagttttttaaaagcgcat

SEQ ID NO: 30834 - DNA, 1116 bp, Cannabis sativa
tgatgtttggggtccttctcctaccttgtctaaacctaattttcgttattttgttacttttgtggatggttattctcgtgtcacttcgttgtttttgatgaagaaccgttctgaattgctctctattttttgtgccttttgtgctgaaattcaaaatcaatttaatgtgttttttcgtacattgagaagtgataatgccaaagagtacaatcgagtttatttcaatcttatatggttcaaaatggcatagtactccatctgaaaatggtgtagcagaacggaaaaatagacatctccttgaaacaactagagctctcttatttgaaatgcttgttcctagaccgttttggctcgatgctgttttcgttgcatatcttttaaataaccgcatgtgatctgttgttttcaaggtgggatcccttacaaaattctttttcccaataagctcttaatcttcctattgagccaagaatttttggcagcacttgctttgtcgtgatgttcgtccacatgtaaccaaattagatccaaagttattgaagtgtgtattcctttgttattcttgtcttcataaatgatataggtgttattgccccgatcttaacaaatatcttgtttttatcgatgttacttttgtgtaaaatacaatttattttttgtccacctaaatttactcatcaaggggagaatgatgatttgttggtatattttatcacatcttctacacttgacatatgttttgacgagtcccttattcctccatctgtcttggtcacagctcttgacatgcctacacctcctccacctttttcgcctcctattaaagtgtatttcaggtgtccaccccctctgtctcctctacaacttgtttcatgtcttgcactagcttcttcgtcatcacatccggaccccagggatgatcttcccattgcattacataaaggcaaacgcaaatgtacctatcttatttcttcttttgtttcttataatctattgtcctcatcttcttgctccttcattaattctcttgattctatttcgatacctaaaactattcgtgaagctctatctcatcctagttggcttgctgccatgatagaagagatgaatgtttta

SEQ ID NO: 30835 - DNA, 8127 bp, Cannabis sativa
aattattggctttcattgtactagttctaagaagaaagatagatatgctataaatgttgtaaatagctggtagtcttttttgtgtgttggttggctgctgccgccttcttgtttttgtatttagttggttcttttgaataaaattctccttttgttcaaaaaaaaaaaaagttcaaaggacaaaatttctaattagcggatcattttctttgtcaattgttcaggtcttcaaactttctatctcaacgtttaaagtcaacaactgaggcctttttgggtgtgtataaatgagccatagtatcatatttagattatacattttttaaggaaatgtatagattaatatacatgaaaaaaaaaatataatatttatatatgcatagcacgtacgtttaaattaatattaatttcataaacaatatttgtcaatgcatgtttggctatcccggcaaagacgagagagtatgttgtataaacatataatatatatatatatataacaaaaagctattgattcgagacaactaaagagtgggagacaaaactgtcccctttgtattggaatatgaatacaaagtagatagtaataataaagttttttttagaaaaaaaaataaataaataacaaatacaaattagttaattaattacaaattctccatttcgtgtaaaaattcttggtctcctttatgtctccttaacagtatcatacatgcattaattactataattttataaaatttaactctgccacaattgactatatattctgttgagatatatataaggattagggtgatcagttcttgggattatttaaagcaaagaaccacaatttatgtaaatgtaataaatacatatatttcttaatgtccaagcctctaattcataattacttccattaattaattgattatacaaaaaataagggccagagggcttaatgatataaggcacataacatggataattgtttcgtatattattatatatacatatatagtaataacgttatcaatatatatgtatacgtatcactatactatattatatatatgcatattttgtagggtacatggttgctttcaagatagagactttccatagtgtagcgtataactcttgcacagcaaaaagataaaagcattgctaatatgtagaattcagtaacaagtttcatatgttacgtacataatttaaaattagtatgaataaaaatatagggacacgattttgtcccgtgatgtactttcacggaatgtattctgtagtacattagatgggtctcagagtacattaaatgagtgtcacggtacagtacgtttctactttttaactctaattacccttagatcaatctcaaccgtcaaatcaaataactcccttatctgacggctgctgtacattacagattacaatccgtgaaagtacaataacaggacaaaatcatatccctaaaaatatatacactctagattttttgcacccaatattagtacaatttaataatagatcaaatattacatatttaaatttaaaaatatgatatttatttttacaattaacaatcacgtatatataggtatatatataatgagagagagagagagtagtgtgtggagcaaagaggagtagtgaatttatggtagggtcttgggtctcatccccaacaaaggggtggaatattgattgtcaataaatgtggctttatagttctatatagctctgctacttcactatttattttgatacatatacactatacacatgagtagggttaggcttgtattgtatttcacaacagtataaacaaaaggaatttctattaaacaaccccacatgtatatatatatgtatttaatgttaaaagtgttcattatatacatgataattgtactaataatcaagtagtacataaatacgtatatatataatgtgtgttattaccaatgagatgtaatatacatgcaagtagcagaaaagagcagaaagaaaagagatattgtatagagaaagaattattaattaattggtcaaagagtttttattgaatggtcgtttcagtgtacagtagttaaatatgtatatatatatatctgtatatatatatgcactgttagatatgtctctcactctctctctcagtaatatgttgtaatttacccctaccaatacaactcccctgcttcccttattttcactgttaaattccagtttttatttccatacctgacaacatggaaaaaccctcctctctctctcttttggctatatatacatacaatacatataatatatatatatgtactatagctatatgtatagtgtagtgctataggccatctgataatttttatatactatatgtatgtatatgtaattgtattattaatgttaattaacaatgtacatagctagagaggtatatatatatatatcctatatgtttaattaatgtaaaaacatgttttgtttctctttttgtatatacgtatagtttagtagtactactatatttgtatatataaataaaaatttactagctaattatatctaaaagttaataatcatttgatgctttgaaatttcttaaaatgaaaaaaaaataaaataaaattatatatagatatgtatagtgaatctaaaatggtatatgttccatccatcaataaacactgttacttctctctctccactaccaaaaacaaaaaaaaaaaaaaaaggaaaagcatcatatgcacacataataaaactattttttctttttctttttatttttattttgaattaattaaaaagaaaaaaagctacacattaaaaagctgatcaaacatataatgtgtttgacagaagatgatatatccatcaaaaaagcttatctctatatatccttagttttttgcctttatatgtacaaatctgtcatcactacccattttgtgacattttatgaggatcaataataataataataataataataataataatatagtgagcatatataaatatatatatatatacgtacaactggttgagagagaggatcttataaaaaggaactacatgatgaattattattattaaagccaaaaagcctggaaaatctaactctccttcactgatatagatagatagatagatagatatagatttatccgtgagtatattatcatatgcagcccttattaaaaaggttgaaaactaaatctggtctttgctctttcttattttttcaaagattcttatgatcattattattatatatttcttctcaatcaaattcaaatatttcagtctttgtatatatgctatactattattattattattattattatatctttcattctcctttataattaatttatattttatatgatcatggtgggtcgaatgagtcaatatccaatatatttttacgcgcccacaaaagattgtgttatgcagaagaatatatacatatatatatatatatatgttatgagatttttgatgaacttgatcaatatatatagagattgaggttgaaaatcactcttggggaaaatttgtctttatgtatagtactagctaccactttatatccccttatttcttgaaagtaatcattttctttaataattggtatactgttatgtaatgaaacttttacaatatgatattcaactattttcaaataaaagggaaaatgttttctataggtgtatggaaaaaaagctgcaaaattatgcatgaaattaggaaaacatgtttatgtttagctaacataataaatattaatatattttcttaatattaatatttatttaaagtataatatataggtttgtttcataacttaattaagcatctattgtagttaatcatcaaataaaggacattaaaaaaaacataaaaaaaagaagaagagagaaatcatattatatatatatatagaacatataatatctaatgatcacataattgatcttaaagaaaatgataatatacaagaaatgtagctaattaattatcttcaccatcatcatcacaattgatattcttaattaaatattgatgatgatttttctacacctcgatgatcaaaaggggaaaattaaagaactaataaaaagcaatacaaaaagtagaaaaagagaaatctatatagctaagagatggaaaaaaggtgactgatctttaagtaaaatgataagatatttcttatatatatatgtatagctctcattacttaaagaaatatataatccacaaaattaaagatcagaatattttaactagtaataagtaataataatcttaaaatctatcaagatcagtactactactactactattactactactactaatactactacgtaccccaattatataaaatatatatatatatgcatgtgagaggatatatatatatatatataactagtgcatggatgaatcattgtcttgttctacttcagaagcaggttcatcttcctcttgatcaaatccatcaataccataagcagcatggccattaccaaaggccttgatgtgatccttaagagatctcttgtgtgtgcttaaaatcagagccacccacaaatgcaataccaaagcttcccacaattcttctcatgtgttctccaatcacctctaacagcaaatgccttaccacattttctacacatgaaaggcttgatcccatgttttctcttgtagtgagtttgaagggttctgaagtccttcaatggcttcgctctcgggtggtcgatattgtttcgacaacccggtgagcaacagtagcatggcagccttaacatccctgttggttgtgtccctcttagtgattctggcccttttctgtattgagatccatgcccccacatatgcatctacacaaacattataatcatcacacgaaaagatctgatattgaattacaccaataacaatacatataacctttcagtaaagaaagtaaggactataatgatcaatacatagaattaatggacctacttatatatactagtgtcttccttttcttattacaaagaagcatttttacttttttataatgattcttcaaagcttttttgtccattttatcattagggtaaattaacatcttttcttgttattattcattaaattgtctagtagttattgggtatacctagctttactatttttgacatttgagattttcttatactcatcacttaagataaaaaggttaattaataacatatatcatgagcttgatatgatgatgatgatgtaccatgtaaggtgtcatcaatttcatcatcatcatcatcatatatagacatgtctaaacaccccccaacggcaacaacagtttgagatcaacaagtaaagatcatgagatcacctgtagcaacaataataataatttctttttttaaaaaaaaaaaacccaaaaaaaattagttattatatagctttactattttttccttttgttttgtttggttcatcctagttctataaatatacaaaccctgccaaatctgtgtaaaagcacagacttcaaagtactaaaaggcataagaaacattattattggctctctagtgttgttcaatcactacttacatatatatataaaaaggggaatagagagaagatcagtactatacatatacatatacatacatatatatatatacacacactcaatcctaattcccataaaacccatgcacccaaaagaaaaaagaaagaaaaaaacaagtatgggagaaaaaataaagataaaaaaaaaaccccaattaataaagattgaaatctaaattgaaatctaagaagaaaaaaaaaattaattaaataaataaataaatacctgcatgttgttgtatctattgaaggtcttgtaacaaactgggcaagaaaactgagtaggaccaatgagaatctgagaaggagttgggatccagtactgacccttgtagagtgtattagtagtagaagttgaataatcatgattatgattatgattgtgattaagattgttgttattattgttggttattagttgagatgaagatgagggtgcagaacctgagagaagagcttccatttcagcggcgctagggttaggtaaccctatatgaagtgcaacagtaactgtagaattattagaagtagaagtagtattactagtcttgatcatcatatgatccatatcatgatcattttcatcatcttcttcatcaatattattatcatcttgatcaataatgatattattattatcatcatctacaacgacgtcgttttgataatcttcgtagtttgttggggttaaacttaggagtggaagagcttctcttatgggtggagaagatggggcacttgtactacttgtagatactgtttggcttcctagaaaatagaaattctgagtttcttgttgatggtaattgtgattgtgaaaagggtaatgataatttggtggaatattgttgtggtgtgtgagaaaagggtttaatttgtagagattattattgttgttgttgttgttgtttttgaagaaatttgagtaagggtagtcagccatggttaaaaggctaagaaagctttattaatcaagctatatcttctgggttttttttttcttttttagagagagaaaaaaaaaggtagaagaggagagagagaaagtgagtacaagatgactgaagagagtgagtactgaacggtggatatagaggagaggttaaagtgagtagtggtggtgtgtagtagttttataagtactgtatatgtgattaatgtagagagagaaaaaggttaaaagaaaaatggaaaattggaattgttatttgtacctagtgactagtgaagaagtaaatcaattaattgatgagcattgctacaagccaaaattatagtgatgtggcatgttatgtgtggttagtgattagttagagtatttttaataatagtattctttaaagataattaaaaattagagatgttctcgactcgggtactatggtttttgattattttttcaaactaactcgcacatgtaatttttttaatttttcaaattgcacctatactgcaaaattaaaaaactgcaaaaccgcactgcaaaaaatggtgtagtgcgggcagtttttacagtatctgcgatttttgcggtttggactatcaacaaataattaaactatcacaaatataacacagcttgagcaacacttgtcaaaataaccataaggcttgacaataaatatgaaaaaaaaaaaaattaagtttcaacaatacaataaataattggctttgagttgaacattcacttattggacctaaataaatataaaaatttgtattttcataatgtggtgtgcagtttaggaaaaatttaaatcgcgaccacactgcaaagaattcaaactgtatttttttttgcagtgcgagcagtttgatgaacactcatattaaaaatttccacatcattcaaaaatataatattttattttatctcttttttccattatttttaatactcttacttctaaaaatactgctataatttttatctcacacattatattttaatatattatttattttaattatataaatattatcacattatttatttatctttatttttttaataaagagataacatcaatactatatagtggcagcaccaatttatctctaatggtataatatttttgtgttttgctaataagcgttctacataagtaatcatcctctaaaatttaaccacgacatatgctctaagcgatattgaatcaattcgatatttaattttaccaataacgatatgacacacatgaaggtactagacactacccataccttttagctttttttaaaaaaattaaaatatatagaatataatattaataaattacactaataataatattatgtgactttttgtatacttatgcttagaatcttaagatgtccatacatttctataatatttaattggaaataatatataggtaataaaaaaataataggaaaactgatataatatttaattattagaataggggaatctgatctctctcatttattcaatttttttttttttttttgtaaggactctttttttttttttttttt

SEQ ID NO: 30836 - DNA, 1942 bp, Cannabis sativa
tcagatcccacgatttaagggataatgactgtaattacattttggtcagccttgtaattaactactactatgcaattataaatagtggcaaacaatctccattggacacactgtttgtaacaaccaacacatcaccagattcatatccatttgacactaaaccagcttctctaacatcaaattttccttttttatttgttttattcttgagcagataatactctgatttattatgcccttcctttttacagtaattttagaattttcctagtttgaacttggattttcctttgtgatgattgttgttcttgtggccatgagagttcttgaaattcttggaatcttttatgtcaaatcttcctcgagccaagagtccttctccattggttttcccttttcttttgatttcttttgaatttccttggagttgagagtagctttgacttctgccatggttagagtatccttcccatacaatatagtatcaataaaatgttcataggatttagggagagaactgagaggaataatacctttatctttctcatcaatcttcacactaatattggacattttaaggatgattttgttgaactcatccaggtgctttctaagctcctttgtctcttccattctaagggtgtatagctttttcttgagttacaatttgtttgccaaagatttcttgaggtagatcgaggcaagtttgtcccaaagtgcagctgcagtctcctaatgtgagacttctctcaaaacttcatctccaaggctcaagatgattgcattgtgtgctttgctctttgtgtctttcttggttttctcatctttgatgtttgttcaagtcatctgcattcaaagcttcagagatcccttgatgaacaagaagtgctttcatccacaaaccaaaatcatttgcaccattgaacttgtccacctcgaatcttgtagatgacatggttgcaattcttaatcttcaaaactaggttcttgatgtctttgatctctctcggctctgataccactggtagtgaattaatcactctcaacaacccaatcaagaacacaatgcaacaatcaaaatgaaacaaaaataaccaacccaacaacctaaagaacatatcaaagagaaaaattaacaccaatagttgaaaaacatagacctttattgatgttgaaaccagtacaagagtgtgttgaatacaatgaagaaaggatgagaaaaaattacaatgaacctcacaaatgggaaccaagatcagctacacttgattcccttatacatccttccttttcactctctttattcctaaaatctgaatttacaacttaactaaaatgtgtgttacaaggtttatttatagtatttaaagttggttgtttgttgagataacgaatttgggcaccaactgtcaaaacagttggtaacacatcagcaaaagataaaacataaaatggttgaactaaacaccacaaacaataatttattttcttttgttgttgttatttttcaaaagtgtttatttgttgttagttatgtgaacacaaatattttttaataattaataaattattaaatatgaaaaagtaatcattctaaaataatcggttcaatttgtacttttgcggattagattgaattggattagatttaagtactatgtggattgaattgaattaaaaatataaaatttgcactaagtgtagattgaatgtatgataagcaaaataatacagattagatcaaatgaatacccctaatttcaataattgtttgtaaaactagaagttatattttcgaccattgaaggcacattgactgaggtactatatgggtagctcaaagtagagttatatataattatgaaagggataattatataaggcaccattttatgtaaaaaaatattacactttttacgtttaaagaatttttttttacatt

SEQ ID NO: 30837 - DNA, 2352 bp, Cannabis sativa
atttttatcccctaaactttaacatgtaccaaattatgttcctcaatttttcaggtcattaaaaatttctcttaaattattaaaatatttggatttaaacacttttgtctaatttcattaaattttactaatgtgataattgtcattgtccatatccatatacccatatactaaattgtgaaattgtgcccctgtgccccaaactttgatatctactaaatcatgtctcgtgaactttaacatatactaaattgtgcatttgtgctcctaaaattttcatgaacgtcagactttctttggtaaaattaaacaaaagtctttaattctgacattctcaatagttcaacagttttaacgacctattcagaggacataatttgatatatgtttcaaagtccagaggacaaaattttagaatttcaaaacacgggtgggtttggggtttcacctgagtttagggtgtcacaatttcagaatttgaacctggtccagtgggtaatcgagtgtaacttgaacacaccctataatttttttaacttgttttttatttcaggtttttcgggtttcatatcagacgaatttcctgagtaggtatagtttttgggtacgaatgtgacgcaagagtatatattgtatactcaattaatacacattaatttttctactttttttttttttaatttgatgaatcaagattaaaattaattaattatgaaaaatgtacacttttaattaataaacaataatcatctatatttgcgaaatattgtttttaagatagacattaattatgaatgatgcatggctggccttaggcatagacggattaggtccgcgcatagagcccacgatcatgttagggacctaaataaaaatatatatttttttaataatttttataaatatcatttatctttatagtaatggtctaaaatttattttacttatgacacatttcaacttagtactgctcagaatgatgtgttcttttttttctaatatatataatgatgttctttttacgctacactcgtttcttaacgtttatttttcaaaaaaacaaacattaagaaacgagtgtagcttaaaaaaattactttgttttgtttgtattggcttgagggcaatttatgtaattttggatggaataaataataataatataataataaccgttttcttttctgttatgggactggtgcgtgcgtggtagtacagagagagagtgtgacttgtgagtgtaaataacttttttgtattgccttaaggggcatttttgtaaggggcatttttgtaatttcaatgaatagagagaagacgctgcatggtcatggtgtctgagtgtaaaatagatgatttgggtatcttaccttattgagttatttctcttatttttggtaatataacctttaggggcatttttgtcaagttatttgtattatataatttgttttcgtttttaaattgatgaatctcaaaaacaaaattatgaaaaatggccacttttaattaatcatctacatttgtaatatgttgtatttaagacaagaattaattatgaatgaatgacgtgaatgtaatgttgactttggacgtacgactagataaataataataataataattcttaatttaatccctcagagatattatttaagtgtttcccaatttcattgacgcaatatcaaaagcaaaaaatactatttatagttaatcttttatttttgactagttaatcttaattagtggttaactgagtttatatataattttgcttaccaataattaatagtgttttaattatttattatttgatttttctactcctcctcataaattaaattttcactctttctttctctccattttttttaataaaatagtgaaaatattaattaacctaaaaataacaaaatgaccattaaaacgacaccgtacgtggaattgtagtaacggattttcccactagtccgagattctcgggaaatgttttactttctttttattctctcattatccacaatttaaaaacttaatataattaatattagtcactcatacattttttttttaattttttcttgagttttaacatgtgttttatttacttaatagttttttatcacattcttatttttaagttgggatgtaaatattgggataacaattttgtactttcttttagcataattgatatcatataatttttttttacaatatctaacttatttgaaattagtaaattaataaaactaaacattaagaagtaattcagcatagataattaagctggtggaaaaagaaagatagaaaagtgtgaattagatgataatcattttgtaaataaaaaac

SEQ ID NO: 30838 - DNA, 1421 bp, Cannabis sativa
  modified_base (1313)..(1319): a, c, t, g, unknown or other
aatattaaaaattgaaaatatctattatgatttttttttttaataaaaccctaatttttgaaaaatccttttgaattcaaactcataaaatatcacatgtttattattaaaaaatatatttataaaaaaataactaacttacaaaaaatatccataaactaaatatacatgctatagaaattataatttttttttaaaaaaaaaaaaaaaactaaaaattataaacaaaaatataattataacttaacataaactaatcatgcaaaaactataatttaaaaatgttaacattactaaaaaaaaaacctattaaaaataaattaatgaagtatattaaaaataaaataaaaaatgatgttttcttataatattaatcaaattaatcaaatatatttttacatacaaaaaattaaagtatcaaatattactattatttatgtatatatgtacataacattaaagaataaaacgatgacattacaaattatctattattttttataatttttaattataacttgtctaatttaattaggataaattaaaaaatacatataatttatattgtattatattgaatgataatttttattattaaaaaattgtttgatgaaatcatatattcaaataatttaataagaaaacttgattacaacaaatatttgcgacagatgcagtgacgacaactttaaatgtttgatgaaatcatatattcaaatattttaataagaaaacttaattggaacaaatatttgtagcataattgaggactataattgatatgcaataatgacaaaaacttcaaaagtaataatcaataaaatgagaagacaacatttttgaaatcatatagttaattttttatagatttatcaatttatttttttaaatttctattttgtgtaaaaattcttcaattttttatatattttttcctacaacacttaaagatatttctattttaggatgaatttttcacaatattaattatttatctaagtaaaagaatataaaaatttaatagcctaattaccatattaataaaaaatttaataaaaatatcaaaatacaaaatttgatattattttataactaaattatcatgactaaataaactataagaaatgcgatttgttttttaattttatataaaataaaaattgtttttaattttatataaaataaaaattattaaaacaaaattctttaaaaattttgagtttataaataaaatattcctaaatttaaataaatatatatatataaagaacatatcaagtattacccctaaatagttactaaacaaatttaannnnnnntattaattttaaaaatatcaaactgtcgaattttaatttaataacaaataatgaaatcacaaatttaaatttctatatttaatttaattatttaattaaaaa

SEQ ID NO: 30839 - DNA, 1993 bp, Cannabis sativa
tcggttttcgtgtaggcgtgcccatggctgaccgttggatgggatgaccttaggcattcctgctgccacgtgtcacaatcccaatttatgagggatattggtatttaaggcctctgatacaaaatgattctttcattttccctctcgtttctaacttcctcttctccttttttctctagattttttagagactctcatcctccatccaaatttttctttttcttcctaaatctctaaggtttcagaagtgatcgaaaccaatcacggggagaatcaccaaaaactaaaggttagttttgaatccacttgcgtatttgatttctgattttaaaaaagaaaactgtctttctgggtttttcacattttgagaggtttgaaaatgcatgttcgtagggaatactcatagggtggtattttttctgttagaactggttaatcttagaagaaagatagacctgaaatttgtataaccgtgaactttgtattatttctggaatactcgcgggtattcggatgaacacttcgaatactcgcatatctgtctcctttaggtttttctagagactttatcatttttacccgttgtttagaacttagggttttatattttttgggcattttgttgtcggaatattggtgaagtctttcaaatggtgggtgtgtcaccgtattccaatgctcatgcgtgaaattgcatgttccttgaggtactgtgatacacccagccatttgcgacgtatgccagtgttcccagttcccatataaccgtatatttcgactagtaagtttgctcgaaacggtgggtgtttcccagtaacttcagggtcatgctcgaaaacgcatgctccttgggtcactggaaaactcctagccattttttgaggtatatcgctagtcggatatgcgtgacatacttgcacgttgtgattggttagattcctcgaaacggttggtgtttcccagtaacttcagggtcatgctcgaaaacgcatgccccttgggtcactgggaaactcccatccgttttttgagacattcttctagtcgcacaactgcgattttatgccttggttggctgattggcttttcgcgagaatccgaatcagccttccaaggagaccttgaatttttatgcgggtgaggtcacttgtattattttcgcatattcaccacactgaaaagatcttctatctttcagatgagcgatttgtcggacagccaaatgcttggctctggaggtaatgctttcgatggcgaccaggactaggtggacagcttcatcccaacctcgatctcagaagaggagacctcgattgtcaaagatgcggagctgggcccgttatcctccgcagatatcgaaaggatggttcaggagctcgctgaaccaggaaccatcgagattcgtgatagcgagtctacggtgtcagctcgtgaacaccttgttcattccaggcatgctcctgatgctgaagttgaggagatgggcgaggactgggaggctctaaatcgcaagtcagaggaagaggaggacgctcggtggacaacgctcaactggaagagcctttctcatgcgaggattcggtttcgcgagtcaccaagtccgacctgactgcttttacaaggttaaatctactacgccttagcaccatgcatcctcgtcctaccgagagaccgcatttgcccttcaccaatcctgcgataatacctacagagaatgtggttgtttctatacccattctccgttgtggggtatcgcttccttttcacccattcatcgctgctatcctcaagcgatatgatgtatcccccctttcaaataaccccaaatagttaccgcatagccctcgggttttatgcgatgtaaatggaatatgcacatagggagccatcgatggacgacttcaggtatttttatgacataaagagcgtgggccttcacaacggcttctattgcttcagtaaatgggccacttctgaaatcaacggggtggaa

SEQ ID NO: 30840 - DNA, 1614 bp, Cannabis sativa
  modified_base (1587)..(1588): a, c, t, g, unknown or other
cccttttgatacccataacataattggtcacttaattttgtatcacactttataatagcatatacattatacatatgtgcccacaaaggatttttttaatccaacagagacaagtaccatcaaagatcataccaaaattgattagtctatccaagtttaaagtctttgcttacaagctaaccaacttataactttgtacttgggagaactatacatattccaaatgaaggaattctaagctttggttttgttctttgggccaaatctttgaacagagcgtggagatgctgaaattcataatcaagaactagcaaaatctattttccctttgatcaaattattcatccttactattttcttccaataccaactccctccttgtggagctttagctccaccaattttgatcttttatgtaaaccgaattaactattttacctataaattatctttcttttgagctatgtcccaaacatattttcctaaagctcccatattccattgttcaatttcaaaaactcaaaacctccaaaaaattttagttgacacacatcattccaagctatcaaactcggggctgtggtttcatctttacctttctacgaaaagttttctacaaatactattgattttcccccaaaatgtatttaggaagttttatatatatttttgaattgaaataagaatatgtaaacttgatatatgacatggtgtcacgggctcaccttttcaggcagcggaacacccgtgcggtaccttgacttctctatgtcaaggtcagccttctaaccatctgagtaacaaatggctcatttttcgcgcaactgtgtgcctcatgcacacttccgtctctcgaacaactctcgccgagtcatgctcgcaagcatctatgagtgcatccatgcatcgaggctctctagccaagatactcgcactgtccataggttctcactatgataaggcaaatcccaacacccacgctcacctagtcactcgtgaccaaggtagcatgtgtggcaagattccaacaccaagctggcgtgccaacgcttctatcatgccccattcgatactgtccgaacagtctctctcatcgcccaaggactcccatacgtccatggaccaatcctcaaggcgccatacctccacgcatgttggcaggccctccagacaagctgccaaactagtagcatgcgttagacctctatccctttccagcatggtgcatccgtcccatgcgtgcatggaaactagcccacgaatgactactcgtgtcatctcgtgttgagactcgtggccaaggcgcaccacaatgtcccttggaggtttgggccacgtctcgtgcaagcggcataccggcaagccaatgaaaacgtacccgttaacctctgcaccttcttagatgtactaccgggtcggccccataatgtccatgagtactccaactcatggagacatatgagtcccctcgtggttctcatatgcccaccctacaagtccccactgactagtagtagctcacttagcaccaaggtgcaaggggtggttgagagctgacactagagtactgttgggttttatgccctnnataaaactctttacaatctgattagt

SEQ ID NO: 30841 - DNA, 1305 bp, Cannabis sativa
tattttgaattacaatttaactttctaagatattctagaattttctaagtttcttagcttacaaatatagtttctaggtaattctagttttctctaatttttttaattttgtgtagttaatactagaattttctagagaagaaaagtagaaatgtgtagcacttttcatccgttacaatggggcaaaagaacgcttgaaaacatatatcatacatataatattaatacagaaaatatatagaaaattacttattatcctattgatccagatcacctttaatatagttcttaaatattgttaaatccattacaagaggatctaatagaaatggattcggttttgtatccagagaggttacaaaggttatattttccacattatataatataaactaaattttgttactttgaagggtgaacatcgggcgggttgaggttcacgatttcgggtaagaaaaagtgaacctgtacgccagcccgttcacatgttgcgggtctggattgatcgtgtcaattttttattttacactcacctaattctaattatgtataaacatacttaaacaaacgtataactaaatatcctaaatacttacctaaacatataattagaaatagtgtttggtcatataattatagggtagtgagtagagtaacgatggaagtggttttgatacacctcagattttgtgtctcctcctaccttagcttcagccccacctacacgctatacacagtctaaagtaaaaggctcagcttgcactatctgtggctctaatatttctccactgttaattttctttttatgtcttcttcttcttctccttcaataatcaacatcatggttggtttgcaaatttattagtggaaccattctatcatttatgagatggatatagtatatatatatatctatatatatatataatgataccgccactacgtacccatatatactctacaaattgttctattaattacatgcatataataaggctttaatattatatatacattttgagaaattggtttctgtggttcagactccttagaacaaatgtgtggagaacaagtgatataattacttaataaggaaaatggggttgcatttaatagacatggcctagtggcacagtagtgttgtattcatcaacttcaactatataatatttggtttcattattattgttgttcatgtctaccaatcttttcctaatttcacattgcttattaatggtatgtgatatatagctctagtgtgtgtggagtgtgatatattttggcagaggaagatgtgatatattt

SEQ ID NO: 30842 - DNA, 3724 bp, Cannabis sativa
  modified_base (586)..(630): a, c, t, g, unknown or other
aggccatacttctagatacaccctataaaggtgtacaccgatcaatagttgtggcatgttctatagaaacccgaagcgtcacggcgactattcaagtgaaccactgagactctgctaatataagggcacttgtcaaccaagcatggctaacaaaagccaagctctcaccagcttcatggctaatcataggagaatatctccccaaatctctcaaagtttaggataaaatcaaaagctagaaaagaagcgagagcaagagcaaaacaactcaacccaagaggtgcattgaccacctgcctaatccacgcacggcccccagggcacctggaagtaattgatgcacgaggcaacaaagtcagtttcaaagcttctaacaatgaggctgaacatgaagctccgagtgctagcctcaagctagcacacaaagcgcgggctgaccatctagacatacaccacgactctcaactagtcataggttatgtcctacgtgaatatacaattcaatataagaagatgatggcatacttgagctattaagtcagctcaaagggcgtactaaaaggcaagtccccaaagatgacacaannnnnnnnnnnnnnnnnnnnnnnnnnnnnnnnnnnnnnnnnnnnnaggcaaacttggtacccactcagttccttaaagaaataagcatctctgtttcaaaaggaatagacatgttggacaaccaacatgggatacacctacaacagcatacctccaaacaaaaaccttgccagaaagtagtgatttaggggatagctggaagatcctgcacaacataacgcacaaacatggtatcccaatgccacttctaagaagcgttaccaagaaagaagctgaatagttattgatagaagtgcacaaaggctctaagacaatcatgccgtagggtaaagccaactgagtgtagatgggatcaaactgtaactcagcctttgaaaggctagctgaccctggcctcaacaaggtggccgaccatagagtcatcaacctgaccggccactacctccacaagttgcccagccatagaatcaatgacttggcaagccatagcctcctccaaatggccaagtaatgcatcgatgtggctggccacctggtcttgccctggccagctcaatccatcagcagtctgctctcatacttcttgtctacagtgaccaaaaggtaaaaaaaaacatcttgctagcaggatcccttaacaaaagggaaagaagaagagaccaagccaactcaaagtagcatggctgcccacaaagagttaccaggcccttgaacaaacagatcaaggaaagaaattctttgtaagagaattactccctgaagaatactccttggcagcaaatatcctacaagaagcatgttcagaccaaattgagaaggtcgcaccatgttacaagataacaataaaggtgcacacaagtttagcaagtacaacaggaactttgagttagaacttctacccaaacactgaaatagggaacatctctgtaaatagtctcactagccaacttgtcaattagtccttctaacgtttcgtcgtgcaggaacccataaaagagctagtacccattactttttagaatggccttccatcactcttcagtgatggtcattgcacaatacatgatttcaaaagtagacactaagctatatgcttttgttacacgtaagaccaactttgtctaaactacttcctgataaagattaacttcttaaagttattcttttagttccacatgcatacaataggttgcaccccaagaaaagtcccaggcaaggtctgtgaaacttgatgaatagcaagtgaccaaacttgaggagcacccatacctcgcaatgcatcgaactagcacaaagaacttatgtagagaaattttaacgcttagaataagctactaaacctgcctctaagtcgtggaggcatactttagcttgacaagtaaatctagacacttacatgttaaggccataagaagatagctaggacaatcatatgtttatcatagaaggctttaaggctaaataatagtagtgtttgaaaatagagggcctataggccaaagcaagagcatgaaagccttgaggctggatatgaaatcggttcacatgcatgaggtcaaggccctgcaagaaccgtataaccagaaaagaacaggacagagctcctataggggccacgtaccaggctacggctaaggcatggttccttatatgttccaagccatgttgagtcttaacttgaacattcgactataatagactcaccattaagtttcatacagagtttctaagggaattacatatgagactaatgttgtatatgcctacagagctggattcttatcaaagtcaaaagaggacagaaaattggttacccaattggaaccaaggctcatgctggctaaagttctcaagttttgaaagggtcgaccagggtccatgtcttagtcaagaactggccagggtcaccaaacccaagcatgaacagggtagctttatagggtaaaatcctagagctcgccaactcccctgattaagccctagggccgaccaggtttcaatcaagacctcctatgttggccaaggtaaattttgaatcctcatgtgtgtttttcttttgaaactcgaacatgtacctcatattctttatgactcaacgagtcaagaatcataacgaaggtcaaaattgaatctttttcatcaaaaggtcacacattgtacattccaaaactgtcatgaggatcaatataccaaagagattacaaactaacatgagaataaaaaagttttcaaaagcttgaaacttattaatggcaggtacaaagaagaggtatctaagaagagaagacgagacatatatagagagagaagattaaagatctaaaaggatgccatgcaaaactccaacaattgactagacgaggctgctcgatagagactactacaaacaagacgaagatagaaagtccctatccgaccaaatgttttaatagggacttaggggcaaatgttatcccaaattttatccacctaaggtggaatgtccacgtaagccaagacaaagtacatgtggaatacagtcttgctagtagcaagacagggtttccatacaagatatggcaaaaccgccaaacagtaatcgaaaggagtgaagcaagccatcaagaagattaccaacatatctggctagcaaagagaagcctataggccggtcagagtgagtttgtatggctggccaagatttgggcacaagttggctagccaaaaggtgacttccagaccaaaggagcttccatttgaccaaaggaacatgacctctacaaggaaaaagtgtacaaagatgtcctccacttgccaaaggctggtctccacatctaaaagttggcctactcttgataaagctaacagtgacttgcaggatcctagtaggcacataacctgctaggacctagcaggagcatggccgaccagacctcaacctgcaaaccttccatggtaggccagaccatatcctgtagtgtatgggcagccaggattagcctgataggattctctgtacggtctgatacatggactataagctacatgtgagttgggtccttagcagcccaacaaactgatggaaaatatctacttttaaggagtaatttagtcttttgtatttaatcaatttaatatgtaaatatctaagatttcagtt

SEQ ID NO: 30843 - DNA, 2566 bp, Cannabis sativa
  modified_base (26)..(28): a, c, t, g, unknown or other
ctctttctctcttcatcttcttcttnnntcttctcatctactttatattatattatattattttataacaataagttttattattagaaagtaataacttttgatggaaatagtcctaagagtttttttttatccttttttgctctaattaactaaatatttatcataaaaagaaatactttgaattacaactctcatatacattttaaataaagtacatagtacgctactacacaaacttcttatagtggtttcagcacttaagagacaaacaaggagcatcaaatttgcagttatccttcctcaattatcttatcccatttttattattattattttcatttttaatacagaatagaatctgtaccctttttgagttcagaaaaagtaaaaacaaaataaaaaaaaataacatttcttgctttccattgaagctattttggacctgtttattattacatattcttcttgtattttccttttcgtttccttttgaatagtaataatgtaatgatattatctagcttctgctacttcatacaaaagaatcatattctgaaaataataattataatagttaattaaataatttctcttcttttggatttctcacttagtgctttattgaaaaaaaaaaaaaactttcataactattatagtactgctctagctgccaacctttgagatccaaaagtcaaaagaaaaaggtatagaaaaagaaaaacagcataataattaaaaatactgaaaaaaaataataatactaaaaaacaaaactgaaaaagaaaaagaaactgaacattaatttcttttttttttgcttcctaaaataattaattctttgttgtctttcattttctctggatctctaactaggtagctagctagggcatatattattgttaatattattatagcttagctatatttctacttatgatgatggtggtggtggtgatgagaagagcacatgtccaaaagtttctttcttccttcaactatttcatcaaagaaatcatcaagttgtccaattatactctcaacaccatttcttagcaacccaaatcctcttcttaatctatcaattctctcttctattatcatataatggtgatcttcatcatcatcatcatcatcaactacttcatcaaactccactattctttcaagctcccccttgagctcttccatggcggatttcgattcaagaaactcgtggagaatgatagtgtgattattatactgttccataataatggtcccaactctttgccttaatcttgacatggacaccataaatccttccgaaccttcgtcaccgtgatgatgatgatcgaaattgaacaattcaggccaacaaaacacaagtccgttaagcaaaattagcaagagcaaagagctgactctcctcattgcgtgaagaacacctctaaaaccaccgaacccattgaactttgaatccatcggaacattctcgtttagatcacagagtgacaacaatggttgaattctagtttccatcaatactctattgtcttcttccaatccaaccgtttccctttggcaaatacttattgcccggataacctattcaaaatcataacaataatttttatttttctaaaaaaaaataaatacatatataaagaagtaataattattattacctggcgagacatggcgggattgaaatgttgtggagtgttatcgagagcagagagtatgttgttggctgcggagacgtaggtttcgatggaggagaggccggacttgaggaggtggcaggcttcccaaaggcgagagctttcgtccatgtactcgtcgagccatttgtcgccggtgggcaagtggagcttctgaacaagaattgtgagttgggaattggctaattggagagaagagaggatttgttggaggaaattgagggacattaagttgttgttattgctggtgttgtgggattggttattgagattgttgagttcttgagtcaacagattgtaaaacccacttacagaattggtggtggtactgctcaatgaattattagcaggatgatgatccatatcatcaggaaaaaaaagagaggaaggaagaaaaagggtgatatatatataatattataattatgtgcttagagttgttgtatatatagagagagaggatgagtaattatttaaagagaggggaagacagtgaagaagtgggtgtatatttagaatttatatgggattattattagatttatatatgattattggggtataatatatatatatttatatatataattagttaggagtactagctatagctagaactcaggtttctatatggtcgtatagtatttgttgggtgcaattatgagtgtttcctttagggtggaggggatgattgggaatctgctgttctcattgttaaatgggaataatgacatattgagaaaaatacacaaaatatatatcacaactaaaattgatttttttttttttctaaaccttttcaactattattctacttgtatttaattttctaagatcaaattttagtaataaaacttttcaaa

SEQ ID NO: 30844 - DNA, 1513 bp, Cannabis sativa
aaagtaataaccttttagcatttcaaattagacactatttctatagttttttttttaacaaatgaattttgaatttattggaaaatggtgatgtggccaattaagtaacattattgatgcccttatagcattggtcattttcgtaagcattttatttcttgtgtaacttttgattgaaatgagatgaaatttgaacccccaatgttgtacattatattaaaaataaactagtttctctctattttgtatattttcctaaaaataaaccttcaccggccttgcctttgctctaattattagtgtttttttaagtcttgataaggacacttcaacatacaaataatatataaatgacatacacaacagaagtaggccactcaattctacttcacagaaaaatgaataccaattactaaaaatgccggccaaactcaattatttttatgtaaacattttccctttttagtaaactttatttgatatatcaaccaaccctcattacattattaattaattcattgtattttttttaaaaatgaaagtcattttattaaacaaaaatttccgttaccaaactaggcaacaactcaacacgaacagtgtccaagttgaacagacgatcagagtgagatatagaggccctcgcaaaggaatgagccgctacatttactgatcgttttacaaaatgaaaagaaacatcatgcaaagaacttaacaaattcctacaatcactaacaactttgccaaataaagaaaacataaccatagagctacggacagcttgaacaactgaaaggcaatccgtttctaaagtcacataaagccatgaatgatccatgatccaactcaatgcctcccgaagtccaattgcttcggccaccaccgaagaaattgcgccatgaaacaactttgtaccgccttcaacaaagaaaccactggaatctctcgccacaaaaccaactccataggccgaagaatcattaaacatagccgcatcaatattcaccttaatactattaacacttggagcactccattgctcagccccatcccccggaatgaacccggtgaacagtagctcattgcttgaattttgagcaacacgccattgattaaggtagtttgttgcagataacgatgccttcgatccccataatcctatcttgccaaactttatcattcctagcattccagattgcgcaacacaaagccaccaataagtttgtattatccaaatcaagtatttcaaactgatacatgcaccaacccaaaaaagagaactcatgctgcaataccgtgccaatacccacccgatcccacacagctgctgcaattggacacaataaaagagcatgtttttcatatagaaaaccatatatatgctaaaatgtatgtttttctctgttttatctttacatatataaatgtaggaatttttaagataggaatttactatcttgccccctacaccaacaaacaaacgaatcaaataccaaggtcaatttcgaccttt

SEQ ID NO: 30845 - DNA, 1536 bp, Cannabis sativa
  modified_base (117)..(120): a, c, t, g, unknown or other
  modified_base (148)..(151): a, c, t, g, unknown or other
aagtgtaaaaatgaaaaaagcccttttcatttttacacttcaaaataatttttttgcatttttatgaagttctttatagaaacccctattgcgactagcgctgcaacttaaattgcnnnnaaaaatcgtatagaaactcctattgcannnngcgctgcaaccactttaaaaacctaaaccgtaaatttgaaaaaatagtttaaaaaatagtatatgggggtaattccccttttattttttccttctgcaaaaaatgctcatggttttgttattttattattattattaaagaattatttagattttttttttcagtaaaactatattagaaaagtactaccacagcggggtagttcccacaaactgacatctcaatgttttaatttctatattttaattatatgatttttatttttaaactttttttgtttttatcttttttaattttataattaatagttttaaatcaacatagtaagaatcatatcattaaaagaaaaaggaagagacctcaatctttcctaattgctatatatgaaataattggcattcttaataattaataaaatatcatacaatatatacttagatttgtctcatatctcaaagcaaaaattaaaattaaaagtcactttaatttttatttttttagcaaatatcctaagtcattttttatgtcacaataaatggagatctctccataagaatccattcttaaaccacttacattagtttctctactctattttttacaataactcactaaaattttactttctttattttacctcacactattacattacaccatagatcgacttttttatattttttatctacatcattaaaataatatattttcaatacattaataatatataaattaataaaaatattatattatacatgaaatataattataaaaagttaataaacttaaataaagtagtaataaaataattttaaaaaaatttagctcactctctttccatagctacatgtagagatgtattttattggaatttgtgcaaaaatattataggtaagctataaaaatgttgttggaagagttaaaataagttttgagctaaattttttaacttttagctattataaagacacttatgggagtgctcttattaactctaattaaaatattttattattgtttactgattttataatgaaaatcttttatctattgcattttatttttggttttctttattacattattaattttattcttgtacatttatatatgttattttatatttattttaaaaatataaatacaaattaattgattggtgatagtcgttagtgtgttttattatgaattttgttaaaattaaaaagaaaaaatgtggacagaaagaaatagaaaaattaaaaatggagaaaacgataactaaatctttttatcatttatagtaattaaatatatatatatataattttagatagagaggcttcacatatactacatctgcttcagttatttgagatcgtttctggtcaacaagttaatttcag

SEQ ID NO: 30846 - DNA, 2182 bp, Cannabis sativa
ccccccccccccaatatcaaatgaaatctgcaagtgtttcaatgacaattaaaatttaattaaatatgaaaattatatgtacttaaatatgactaacacttaaagttatctcaatgtaatttcatagtctatctttatggaatttcggcactttacgccaatcattatactctaaagggatgtttcaacacacatatgcaccaatcgtgctcacttttatgtcccccgactcattaatgggtgttgtggatttttacacgcaagtatacgtatcaatttcaagtaattactcacacagtgttgggattttatgtcttaaataaaacttatttcaatataatcttatttgttatcaatagaagatttgaagttatttatgtttacgtgtaattattcatgtttatggtttaatatacaatttatgttaaatctataacatatagttattcacaattacagtgatgtcaacacggtggaagacaattgtgattatatgcttcaaaagttaatgtcccgtatgatttatcagtgcactggatttacacgtatgtgatagtcagcgataaagcttacttacacattggataagtgttatgttctttctaggacattggcaagcatactgagattggttgtcatattttacttgtccccatctcaagttgggcactatcactttgcctttattccttcttcattgtagcttgttgacttttttttagtaagtcacgtacgatttctcatttttattttcttttaggtaaactctcgacactttttgcaacaacatcatgagtttaagggaggatgttaaataattaattaagattatttaagtcttttcaattattttagtttttttttatgttagttgcctatataagatattcttattagttgtattatttattacttttgacaatctctctattttatctgcatcttaattcgttacttgctattctcctcaaataattattaaagaccactaacaatgacatcaatattgcaacaaatggaatagggtaaccgaggagagaatttcatttttaaatgtttcatatcaaaatgcaaaattactttcaatgtacagaaattaaaattaaaccattaataaaatattatacatctctttccatatcattttaaagaacaggttagtagtgaacaaaaccattaataaaacaacaatattattattaggtactttaaagtgacctaacaccataccgttataaatggttagcagttttttatattatttattaaattaaaaaatataattaatattaaattataccaataataatttgactactagtggtgcctcttattactttttatttactagtgatacattttagtatatataatttcaataatgtactacaaaattataaataaaaaaactgcaagtgttcttaatttaaaatatttttctaagttgtaaaaatcctttattaatagtagacatcaataatgtatatacttttgctgtaatctttctacgtgctaataatattttttatacgacgaactcaaactcagaatttatttatctttaattaagaaaacaattttttagtggaatataatattggagtaggacaaattcataatatgatattttatttctttttgaaccaatttaagaacatgaatttcttgaaaatgatcaatccaattctctctaattcataacaagtacataccaaacataccaattgtgtaatttttttttttaaaaaaaacaatgaagcgtagatggaaaagtaaccatttgtttcttcttccatgctttgttttgctttggttattcaacgttcacctcccatcacatgctgcagacactctcacagctggtgaaatcatgagagactggcaattcttggagtctccaaacaaaatatttcgtttactgttctttgttcctactttatcaaataagcgttatttgggtattcagcacatgttgtacccttttgatgcgaagtttgtttgggtcgccaaccgagaaaaacccttgatggatacctctggatatgtaaatataaatatagaagggaacttggtgatgaatagcaacaacacaacttccttcattataaactctagcaaaccagccaccagttcttctaatacgagtctcaaactactcgactctggaaacttggttctgaaa

SEQ ID NO: 30847 - DNA, 2062 bp, Cannabis sativa
cactgctccaataccatgagatccgttgctgtgaaaaattacaccatccacgtttaccttgattttattaatttctggtttgaaccaatgctcttcctacaaccaaggaactttttggttacattgactattgaaaaaaacacactagacaccttcaagtcagggattccttctcttgaagttaaagcttgaactaccatcttcgaattcggagaatgtgcacctctcaccagcctaactcaactgccgaggacagagcaaggagaattgctctaaattcagcttccaaagctaattgcaactgaagtttctgtgatttaacaaactagctaccagaggaggtgtcaatgctaatttctgcaatgtcagcttccccccgcacccacgaagcatctgtgaagagaacatgacaggcatgcttgtcacacggccccaagatcatagcattttccaagctctccatggcagggttagtctcaaagtatccttccctgttggaggtaatcatgttctgaagttccaaatatcctttttcaatttttttccaaggcaaaggaagggttgacaagagtgttattaatgtagaaagcattcttctgttgccaaattttaagaaaaaaagcaaccaatataattaagcatctcatttctactaacaccagtcgaaatagaaatcagattttccagcaaacttatcaaggtatctcttgggatattatcaatcctcattggaaatcttcttccaaaccagatggatttagagaaactacatctgcaaaacagatgaaatgcactttcctcttcaacttcacaaaggctacagactttatcgtgcataaaatacaatatattcttggtaggaatagcgtcattcaaaattctccaaagcagcactgaaattctaggttgaattcccacatcccaaatccacttccaaatgtctttagctggggcaaacctccaagaatgcttcacaccataggctgctttaactgagaacaaccctctctgattattcttccaatatacctgatctaggaatggggaaggtatccttggaatgttgaggatacgatttcccaagttagagccaaaaatctacaaaatcaactccacattccaaccattgcctgtcgaaacgtctgccagagactgaattgtatatcctctattcctcatgctattaatcaattccacaaactcttgatactccaaccaaggaatccatggctgaagccaaaaattaatggactctcccaaagcagcaactgaaatcgagcctttgagaatcgtttctctcgtctccagaatacatttccattggaatgaatcgttactttatggttcacacaccagaaattctcatacttgcaatattttttcagcaaacaagagacccaaggtctctcttctttagtttcaagactccaagccaactttgacaataaggctttattcatatattcacatcttcttaaccccaactctcctgaagcttttggttgaaaaatctaatcccaagccttaagagccatatatctattcctgtctacattccctaaccaccagtactttctcatcaatgaatctagttcccgaaaactagcgatagggatcttggtagtggacatagcatagattggcatcgacgaggtcactgacttgattaaggttagtcgcccgacataagagaggagttgcatcttccacccttctaatttcttcaacatactttccttaagcctcatgtaatcatcttttttccttcttttgaaaataaatggattacccaagtgcctctctactccacgaacttgatcaatgttaaggatacccaggatattgtctttccttccgctactcaaatttttcgagaagagcacactggacttggatttgctacacgattgacccgaccatttttcataagttaagaggcattcaatcaacttctgggcatcgttcacattggcacgggtgaagaggataatatcatctgcaaacataaggtgggacaccaggggagctgattgagcaatcttgataccatggataagacctc

SEQ ID NO: 30848 - DNA, 1832 bp, Cannabis sativa
cctattataggtgcaataaaaaaactaattgtcaaggctccaaattatcatatttatacaatgagaagtcggaagcattctctgacaaggacctccttgtggaggttgaggaggtattaatagtggtggaactttgaagcaaaaatttcaaataaagttcagtatgaaatctcatatattcttattctcaggcaaagaaaatataaaatttatgggttgggttcattaaaaattacacacgatattctttatttatataaattctttatataaacattcacaagcttaaaaaacagataaataccttctttgcatctttcttataaacatcataaaaaaaagttaaagtaatctctctccggtgaatgtttatcgcttcctggtgaacttcaattcatctaaaggattatcacttaactcacattgatcacaggaaaaaaaatataaaaaactcaaaggcatatgcgaacataaaaatacaaatacatatatatacttatagtgcaaaaaaaaattgattgagactatattaaatcaaaataagaaagctcaagaagtgaaaaagctgggggattgtcaattacatttgtagttaatttatcgtttttacaattgttgaaagaaaagctataatcgttttcaaatgagatttattcgcttaatttggtatttgattgagagtctcagatttttatccattaattaattatttatatgattccaattccaactttaatttatataatatatatttcatatgtataagatcttgcaaaccttaaaacctaccaattaatataatataatcaaactctactaattacaacatatttgatgtgttcaagtgggatatatattcgaacctcacaccatgtgggatcaaattaaattacatatttttgttttatgttgaatttttaataaatgtgaattttcttcaagatgaacacatgattgtcaataaataagtacaaaacatcatcatcaacttcaaaggatcactattttctgaaaaaaaaaacaaatacttcaaaggatcaaaacacataagtgaaaaaaattcattttattattaagtattcctttgcaattttattattattacagtattattattaatacatagctaataatatatcactgcgtatttttaagtgcgggcttaattggcatttaaagagtttgtttggtacgtcttattatttcgtattgtactatatagtattatattgaattgtatttcatataatatttttatgtaaaactatctatggtattgatttttatagacagctaaatatatatatttttgtataaattaaaatttaacatagtattatataaaaatatgatctatataaatcaatttaatataatataatacaatacaatctaatacaacgtaccaaacgaacccaaagagtataactataataaaattaaaagataagaaatttttgttgccattttttaattaaagtcatacgtgtaataattataaatattaaagtatttcactgtcaatattcttattattaataaataagtgatactatactactaatactatactaaactcaaaaaaaaatcaaaaaaaattataattatacacatagtttaatagttttaccctttcttttacaaaaagtaagttaagacttccaatctaccaatataaaaaaaaaaaaaaaaaaaactaattctaataaaatagtaaaactatattttttaaaagaaatgctaaaaaatattagtggtgtttagtatttacctacgtgttaatatcgctattgatccaactaagtatcaaatcccgtataatttaatataat

SEQ ID NO: 30849 - DNA, 1182 bp, Cannabis sativa
caccatgttttttttttattttaattttgttataaataaataaatatatatacctttgacatagtcacatgtggtggcagaggcagactcaacgggcagaggagagggagatgtttgggttcatgggtttccccgagagagggggggaagcgagggcagccaatggggtttggggtggttgatagggggttttgaggttgggtgacgccaacagagtatttcagagatgagactgacaagacctccggtggcaagagagatcgacaagagagagtgataggcttggggttgttttggggttgaacgaagtcaaagtcacctggagggttttggtttcgggctttggtttcgtttccgcacatatgagaaaatgagagagggttttgtatataagctctttggtgtcgattgagaaccgacgctaaaaaggtttaataactaagtgttggttcaaacttggggtacttatagtatcaattttttaaatttagtgactcttgaaacaacactaaaaatgttttttgtatactgtatttatgagatgataggaatgattctttattggaatcacaaaattttcactgtacacaccgttgtaaatagaattaaaaaagtgaaatttacatctacaaacgtaaattgcatcttattactaagaataacgtagcaatcttattttatatgttttataccgttattaatattattgtatcattttttattgataaatttacggttactttctatttcttttgtattttctttttcatttgaaggtgggacgtcttataattatattaaacaattatatagagatagttaaaataaaataaaatatttttttctctctcttatttctaattttaaccacactactagttgtttggcctcacaaataatattattaggacctacttttcaatgtgtgaatttcaagatatgggaagcatatattttttcacctttttaaaatcaaagtaactatttagttatttaccatatcaattatatactcattagttacatttcaaccatatataattattaaaatatatatattttaaacatttaactcattggtattactttagtttactaattataagatcactaatcgccacaaaaaactcaacattacaacgctttttattggcatcgtaaacaattattattatttttttt

SEQ ID NO: 30850 - DNA, 1245 bp, Cannabis sativa
aaagcagacaaagtaatgaacatgttaattactattataagaaattggccataaaagcattactatggtcttgttggaaaaataatgaatttgttttgtacacacaaattatacttaaatagaaaatttacaaaaaatttactttaatgtagattggtccttaactttgagaaatagtgacaataatctaaattcatgtttgttataagtctgctaatcattaatttaattaattcatttacttatttaaaaattgacacgtgtaaaagtattattagtcaaagatcataattttaatttaaataataaataaataaataattttaaaatcttaaaaattacatttttttcttttcatcttcttcaagattacctatactaggtgagtgaaatctgaggagatagagggaaagtagtaagtttagggtgagattggggtggagatgaagaagaaaaaaaaaatgaacattttaaaacaatttatttgtattagtttttaaaaaataaaattatgatttgaactaataacacttcaaactcatttacaaaaaaaggtgaccttagaaaaaattgttatttttcgaagttagaaaaaacttgcatcatttgtgtgtgcacatatatcaagaaatgagccacatattactacaatagttgactaactcataagatcaagatggactatttgtttatttactaaatctttgtaagctgttaaaaaagaaaaatgttgaaaattacaaaacatgagcaaagaccaaaattcatgtacacttgtataaaaacacaatgttaagggcagcacagcactagtttgtttgcaatctctaaatgaagcatttttaatggggacattcttctcatcccatgatgtacaaagccgagcatggaaaataaattataataatttgatgcaacaaattacagtactgtacatgtgttttaaccactataaactatactatttatagccaataaatggacttctttttaaggatgaataacacccaaaatttcttacaagaaaaagatctattacaacacatgacatgagattgagaagcacaaaaagatgaatataaattacaccaaaaatgcagcacaggtcaagcttttaccaaccctactttcgatgccttcgtttttgctcagctctttgcctcttctcgtcatcccattcacggtcatatattctataagagattgttaaggacgacagctagggcaaaagctcagacatagtgt

SEQ ID NO: 30851 - DNA, 2439 bp, Cannabis sativa
ttttccaccttttactccagcggttgtatcagaaggtattatccaactgaccaccgatcagtacaatgcaattcaagaccagctgcgtgctctgcaggccgaggtggatggacaaaataggactcgacgtcctccccgagtacccgctactcccacagaaaaccctcaggtaactaattctagacgccgtaataatcgtactcagagggaacagagggccaacccagagggactcactttgaaccaaccaacgtcgagggaccaatccataagacacttcaattaggaggcgcagactgaggaggaccctgaacgacgcaatccttacagcagacgtgagacaacgacattgaatccgcctcctcatcctcgcatggccgcacacctagcaggtacactagatcaggttcggtggaaataccgcaaggaggacgatatcaggttcacaggggcgatctacgcgatcaccttaacgttgtcttcaaggcgtgctcccagacgcctcaggatgtcgaagagccccgtgatcctcgaatgggcgatcagggcataaataatcgtatcaactcgcctaccgcaccagctgtgactacttgagataatatctctgcgaacatcgccgcagtagtgacgacgcctacggaaacacaggtcaatactaccttagctgggaatatcgatcaacgtatgcttctgtagtccttaaaaatgctcgagcagcagacaaagcccatatagaagctgcatgggacctctcctttcactgcaaaagtgcgacaagctcgactgcccaagggattccggttaacagaatccgtaaaataccaaggtaccactaatcacatagaccatttataaaaatttaatactattatggaagtggatcaggtacctacacttgcaaagtgtcgcattcttgcggcaatgtttgaagaaaatgcccatgattggttcagccaattgcccgaggcatctatctcaacatgggagacctttgtcaacctgttcctcatgcatttccaagccacgatgacctataggccaccctataccactctggcaaatatcaagcagtaacctggtgattctttacaagactattttaaacgctttaatgccgtagagaaggctcccgagtcttcgctagtatgtaggttgataacaggtgtcctaccaagaactcatttctggaaggaactgcaagcttgaagacctgaatcgttggtcaagttcttcgctatggcggaggcgcataagaggattgaaaattctctggctgagttagataagggcaaagacaaacgtaagtcaccagtgccgcggtcacgatcttgcagtcctagagggaagaagtccagaggaatgagtccgaaaagacgtagtccacagagacaacgaagtcggaaattatccaagtcccctccaaagaaggaatcctcttcgaagaggaaaggttgttcgcgctttgtaaattatacagagttggcggtccctcgggacgatatctatgccattgaagaaaagaatagtttcttcaaaaaacctcccccaatcaggggaaaccgcgataaaaaagaccctaaaaaattctgtaagtaccataaagatattggtcacactactctggaatgttgggaaaccgcgatatacaaaagaagccaaagagaagccgctcaccaacgtgaacaatttaagtgagcggcgaaaaaagctgttcaaaagggagtgtcacgatatcacattcatggaaagtgatgcgagatgggtccatcacccacattctgacgcgctagtaatcgccgggaatattgggggagataatgtccaccgcatactcgtagacaatggaagttctatgaatctcttgaatttccaggccttcaaacaaatggggttgcatgagaaggatctgcgacctgtggcatcaagtatctacggttttactggagatgtcatcgcattaaatggaatgatgaaactcctaatcactttgggaaccgcacctgtagtagctaagtcgatggctgactttgtagtaattgaccaatactcggcatacaatgctgtgattggttgacctatcctaaaggagatgaagatcgtgacgtccatctatcatctcaccatgaagttccctactcccgctggagtaggatctgtgcgaggagtccagtcggactcatgagaatgctacaacacagcagtaaaactcgcaaaaaagaagtcagtaaacgtcatttacttgctaaaggcactgcctcctcgtcaggacgtattcagaataaaagaaataccgcataaagacaagccagatttggatcctaggatcctcgactacgctgtaaccgcccaggccgcgaaagacactatcgaggtacctattgatccaatagataatcataaagttttaaaaatttgttctaaactaacttttcaaca

SEQ ID NO: 30852 - DNA, 2265 bp, Cannabis sativa
ttggataaattcaactcaaccagcatctgaaaaatgatctggaatgagaataaattaagaacattcctttgcttctatatgatattgcattatgacaaaggcttgcctgattaggcaatacaaatatatgagtacatctatttctatgcatatggctagttatattattaactgtcgaatgttatggtgcaatgatatatatatatatatatttttgatgaatcagctgtgaatttcattgccactaaactttttaaaactttacaacctaaatgcaccttcaaatgggaaggccataatacatgtattatctataaaaagtatctcagtatatttatactaaattctcaaacaattcctcgtcactttgcttcattctctttggcctaacacatgaaattttggtttttacttgccaaattacttgctggcgtatctgttgcactgatgcttcctgctggttccacaattttccatttctggctaaccaaatttggtagaccagggtagcaagtgtataagcataatcatgcttcttaagcttgctcaatttgcttcttcctatccaccttaacagcccctgtaaactgctaggctttgtatgccaatgcagccattgttttagccgagtaaggcataaaccagggaccaaacattcaaaaaatagatggtgcgatgatattatatatgatattgcattatgacacgggcttgcctgattaggcaatgcaaatatatgagcagacctatttctatgcaaatggctggttatattacctactgttgaattatatggtcttgcattaccagatatctgtatactaatgcttattcatggcagatgccaatagtgatttggacttcatcttatgaacaatgcgtaacagtttgattctgattgtgtataaataataaaattccaataataaactatatgattattattacttttcttgctgagtccttgtgacatttaactgtgatttttggacggaggtgtacagagcaaaacgaaatgggagtttaggtagttttgccgccaaaatttcagtttttgtggttaagtgttacaaaccgtaaagttcaggtggtttagccgccaatattattaattttattactactttatttgaacttaataactttttatgattatatataatgtataatataatatttttttattagttatattattctaatattgtaaataaaaatatagaaaagttaattataaaaaatcttactttttagtcacaataagatttgtgactaaaaataaaaaaataataactaattataaagtattattttttagattatgattaaaaagtctgtggctaaaaatattagttacaaaaattacaatttgttataattaaatgtgtttttagtcacaatatttgttgtgactaaaactaaattagtgacaacttgtattttaatattatgctttagtgacaaataatttattgttgtgattaaatgtgaaaataattttttgttattaataaatgtaaaataattttttgttgtgattaaaagtcatatttaatcacaaaaaattatgtttctactaaaaaattatcataaaaaataattatttgtagcggttgatgtatggtataatataaaagtatgacatgaaataaaaaaataaaatttgagtgatctattttaaaaaataaaattaaaaaattgatatgagtgctcttaaatgggttattgggttacaacacttattattattattattattattattattacgttatgacaaaaatcaagagcacatggctggcttcaccctctgaaagctaagtctcctataataacactttgattaatatgtgtggtccatcttttattaattagaaactactggcaatgctgtggaccattcatgatcgatcgattcatatctctgtcaacttaattggtcaaatatattttgatatacatattatatatatcttccaaggatctacatatatatatatatatacaccaacttatatataaaaacataagataatgctttgaggtattaaaaaatattttatgtaggattatttttttttaggctttttcatttttatattttaaaataattttatttttgtatttttacggaattgtacatagaaatttctactgtaactagcactgcaatttaaattacaacaaaaaatcgtatagaaactcctatttcaattagcgctgcaaccactttagaaaccaaaaaccgtaaatttgaaagaaaaa

SEQ ID NO: 30853 - DNA, 3234 bp, Cannabis sativa
aacctataacgggatcgagatccggacacgaacttgaacccggacatgggaccctaaacttggaacctgggactcgtgacccgagaacttgagtagaacctaaaccctgacccagaccttaacacagacaaagactgagacccaaatgcacgacccaagccccaatctcaagactcgaccccagaccaagacccaaatatggggcccgaaccaagatcaaggacctgaactaaaaccagatcaagatctggatctcgacccaggacctggggcttagacctaacccgtactcagcgtctaaatttgggacctagactaacctagacccgaacaaggacctagaacctggaccaggatccgaactcaaacccggacctaaacccaaaccaagacttggactctgatctaaacccaggttgggactcaggccccagacctgaactcaaaaccacacctaggacccagacttggattggtgacctacacccggacccagtactcagaattggataggttgggtcaaatcctcgagtccctggtccctggtctagatctacatctagatctcggtcttagatcccagttttgttttagtttgggtcctaagtctgggtttgggtccgaggtctaggtcgggggtcgtgtcccgagtcctagttttgggtccaggtttgggtatgagtttgggtccagtttcgggtccaagttgggtatgggtttgggtctgatctaggtttgggtctaggtctgggtttgggttagggtctgggtctgggtctaggtctgggtccaagttatagttcttgtctgggttcgtgtctaggtttttgtcaggttcgggtctccgtccagatctaaatcccagtctgagttctactctgagttcgggttaaggattttgtccagctccagttccacctccgggtccgtgtcccggtcctgctctatttattgttttggttgtagttttgggtccaaagttaaagtttgtgtccgagctcaggtgtgaatcctagtcaaagttcatgttccagtccaagtccgagttaagttttgggtctaggtcctaggtctcggtctgggtctaggtcttagtctgagtccgagtctaggtcctggtcttagtcccaatcccagtctcgatcttggcccgggtttgggtctgagtctggttttctttttgggtccaggtttagggtttaaggttaagggattaagaatagggtttagggtttagggtttaggaattaggatttaggatttagggtttaggggtttagggtttaggggttcagggattacagtttaaggttttgggtttatggtttatggtttagggtttagggttaagggttttgggattatggattagggtttagggtttaagattctgtgtttgggttcgagtttgggtcccgagtcctggagcgggtttggatccaagtctaggttctggtccttgtctgggttcgagaaggggtgttcatccgatccaatccacacttttttggtcaaacaacatccaatctgcactaagtgcggatttcatatttttgatccaatccgattcgcataaaagtttaaatccaatccaatccaatctgcaatagtgtggattggatcagtaattttggatcggttgtttttttaatgataaattatttaatattttatagaaaaaaattaaagaagactattgtttcttaatctccaataataatctacttctatctccatttatatataaatcaaaccaatatgtatatatgtcaatatatatgtactcatctttatatttaaactaaaatatatgtgtattcattactaaaataaataagttagtatatatatttaaatttgtttgtatgtgtctatgtgaataataataatttttcgggtgttttttattataaaacaaataaaacaaataaaaaatacaccaactcaacaccaactcaataaaaagattaagaaattagaagtttgtgtcctttttttaaatattactagatatttaatatatattatatatataattatcattttttaaaaatatataattaagtgcggattagattggatcggttaccttttgaggtcaaacaacatccaatccatagaagtgcggattttagatttttctccaatccaatctgcgcaagtgcggattaccgcattttgcaaattagatcgtgcagattggattggattgaatacttagtgaacgcctgtaggtccgagtttgggttcgagtcttggttcgcgtcctggtctcattccagttcgggtctctgttctagttccggaccaagacttgaacccaaacttgaacccagacttgggacctagaacctggaaccaaaaaacccgagacctgtgctttgagacttgaaccaaaacctagaccgacactcagactcaaacccgaacctagacccaaaagcaagaccgaaatcgagacctggagccaaacccagaccaaaactcgaacccgaactcgaacatagactaggacccagacctagacccagactgggatcggggacccgagactcagacccaggaaccagaccaggacctagaccacaacacgtactcggacccgcattccaactgggactcaaacctaaacttggacctagaccgagacctaggacccagatcccggtcacgcgtcctagtctggttctggtttgagtcctagtttttaatctagactcgaatctaaacccgaacttgggagctaaaacccaaaacccctgtctcaggacccaaaccagaacccgaattcacactcagacccaaactcagactcagacctgaatccgaaccagagactcgaaccactattaggattgtcacccagacccgaatcgggactgggacccagacccagatcgagactgcgtcctagatgcggacaagcattgcaacctgacctggaccaagagtgtgacacagaccttcaccgggattggacccaaatctagatcaggactcggaccgatacccatgccgtgaccgagagcaaggactgagactcaggctctggtactagaccaggactcaaagcatgactaggttgggacccaggacccgaaccccaacacgtaccaagacccgcactctgaccaaggctggaactcggactgggacgtaggacccagacctatattacggtcctaaattggttcctgggtcccagtattgatcccggtctaggtttcggtccca

SEQ ID NO: 30854 - DNA, 1358 bp, Cannabis sativa
tgatactacgttaggaggaaggtggtacttttgcaaattgatctttggggttgaaattaaaaacttgatctttttctcataattaatttcattatatacgcttgaagccttgaacgtaatattaatacgtgcataaggtataattattattattattattagattaattataaaagaaattgtaaagatatattgtaaagttacttagagtgtgcctaatatttctcatatgttttaagttgatgatggttatttgtgttggaggataaggctaataaggtgatcgcgttgcttcgtagttttgaattagcttcgtatttgaaggcaaatctagcaaagttttctgttttttttagcaaaaatattgatgttaatatgaaagcacacgtgtgctccatcttaagaatggcagaagctggtgaataatgtttttatcttcgactctcagaaactatgagccacatacaagttagtcgtgttgggcttcttataagatgaggaaatagatcgaagggtgagatgggaaatttttgtctagagctagtaaagaggttttgttgaagacggtagtgaaatttctccccaactatgctatgagcgtttttttttttttttttttgcataaattgatgtgtggcgaaatggaaaaattaatatgttctttttggtggaagagacggaagtggcattcattggatgagttgggaccggatgtgtatcccaaaagttcatgggggacatggatttcggaagcttcatgattttaatgttgtgctgcttggaaattagggttggcatcttcattcttgtcaagattttttagttagtcgtgtgttcaaagtttgttattatctttcgtgcgtcctatttgggggaggaattgggaaacaatctgagttttatatgaaaaagtattcatggagctaagtctcttactcagaaagagggtcgtaggattgttggatttgggatgagtatttatatgtaaaagtatccatgaagctcaatttccaatattgttcattttcaaagatagacaatgatcataaatatagttcgatagtagttgtttctgttgagaatcatgaggttccatcttaaaattaattggtgatgagtggagtcatccatgttcttatatatggctcaattctctaccatttattccatgtgtgacaatatccacaatagtttctaatgctttcttgttgttatatcgctattgtagcaaagtatttaatataataacattaaaagaatatcactaacaaatcacatagcgttacctctaaaagttattagacacaaccagtgcaatagtaatgccttaaaattaattgacaataaaaagaatgatt

SEQ ID NO: 30855 - DNA, 5380 bp, Cannabis sativa
ttttactgtttttaaaattttattttacgatcttttaatgtatttttatgttgttcttgttatttttgttgtcatttgtatattattttccttctacttttatgtggttttttgttttataaaataccgtaaatatatataaataactttgaacataaaattatgatttttttatttaaaataacaatttatgtaaattttttaatttttgttttggtattgaggagaaaattttaatataattttttttatgatcgtgttgttatttaagatattttataaaatatggaaaaattcaaaataaaagaaaaatcaatgttaacttatttaaatatcacttaacatttatttgttattttgacaaataaatgagttgaattcataaagcttgttaaaaaatttggctagtgggagtgtttcgggataagaatgtgaataataatatagagagattattatgaacatactgctttaaaaattagctcaaagtgattgtgtggcaaatgaagttgtatagatttcaagtataaatgaccaaataaacaattaaccacaatgattacaatgttgcaaactctcaatacaaacaacataaatgaataaaccttacaaaacgaccaaagccaacaccacataaaacctaggatacaaccattattacaaagaaaaaccaaataaaactaaaaatatacacattaacgagtttctcccaatcacaaccaaaaaacaaaactactaaaacgtgacaataaaagcctatacaatttctcaaatggttcagaaaatggtgaaggagcatcaacaacaaaaacaagacaagggctttcaaattttgagaaggttggtgttaagaaagccttgtgcttgagtttgattttcttgttcttgacctttttttgtttgaagtgtaaaattttatttaaaaatgtgagaaaaagtgctaaaattttctacacctaatttgttaaatatataattgttagtgccatgtggatttgttcaaaatatagggagtaaagataggttaatttctattttttgggcccaaactactctaaattaatttgtgttatttaatttaagttcaacatatttttaattagtcattcttaccttgaaaagtccaaatccttctcctcatacctagaagttggcaacaatagtgttgttggttgttggtattaaatacttaaaattaataattaattgttaagtaggtatttgatccaaattaattacaacactttttaccctaaataatttatatgtataaaaaaagttttccaacaataaaaagaaaagaagctttgtgtgttaaatttgttaggataaaattttcataaaaaatttctaaaattaaaactttcctaatttttgcccctaatttgaacaataataataataataaaaagaatgatttttttactttctgtaattaaatcaaatcataataacaaaccctaaaaaaatatgaattttccttcccaattttattattattattatgaaatgaataaaaagtgggaaacccaaacccttttcgtctttctcttcaacacttttccatatcttcttcttctctccctgtttctaatcttttcatgttctttgccctaatccgccattgtagggtgtcaactcgtttacgcgattcagaaaggtttttttattttttattttctttacgtaccagaatcaggcttgggcatgtaagcctcgttataagttagggatttcattatccaatttctccgcaaggtattacaaatctaaattctctttttgatttgatgtgtttgttgttttcaattccattgatttttcaatctgagcggtttgatttgagtatttatttatgtaattgtgtttttgaagagtttatgtgtaagcattggtatgggtatggatattgggttgacttggaatcttgccaaaagaagataataataatagtgttgagtaggaaaatttgtgtaactgattttagagcgtagaaggagaagaataaactacccatttttgtgtagatatatataaaaaaaatatgaaataaacaaaacatcatacattcattcatgtttgttttgatatagtatgttagatgaaatacttgtcttcttacatgaaatggtaaattgttgaatccagaaagcaattgtgcttcgtgttagttttattcttcatgaaatggtttttagttatttagtcgttcttgacaaacttgtgctagtagtttacatttttgtatgtagaaatagtttttgtatagtcctcaagtacataaatgcataagagctgatagcaaatttattatgagaatttcaatgatggtatctatagttttttaggaattggaaaagaaaccagtgtgtgggctttttctctatgtacctcttgtcagagtcttgttcatagaaactgagctacatgtcttatttctccttctatctaatctcaactcagtgaactcacaagcccctataatatttttttaatcgtgtcttaatattcaacacattggctttttgtatttattgattgtctttgtttgaatttcaatatgataaatgcatatacatgtatttaggtttccatggcgaaaggtacagattcagaggagttcatggttttatctcaagttcgaaccggtttgaagcgagagtttgcctttgctttgaaggcccaagcagagctttctgggtctatggggcgaacccggtcgagcaaagctcacaatgagggtttggataatttaggtgggtcttcgggtcgaactcgttcgaggaaagtttacaatgagggtgtagataatgcaagtgagtattcgggtcgaactcggtcgaggaaagctcacaatgtgggtttggatgatgtgagtgtgaatagtttgaaggtctctacttccttagaatcagaaagagtttcaaaagcaagcaacaaaggagttaaaatgaggatttcagaaccattgagtgaagaggaggctaagagtgatgtggttgataatgtgagtgatgaggagcttaagattgatgaatctgagttagtggcaggggagcaaaaggctaaacgttgtcgtttggttgaaacaaagatgggtgatgaaatggaagatggagtggtcttacttatgaaggatgaggagcccatggatgaggacacagagaaaaccactttaaaaaagcctttagaagttgtaatatgtaaagataacctcgtggaggagcaagttgagagaatggaaccaaaaatattgtcatttgatgattccagtttcaaggatacatccactgaggaatttgtgcatgaagtcaagccgttaaaggatcaaatagaaggatttgatcacccaaaattactagtacatgaagcagcaaaggaagtggtggttgagaaggcaaaggcaaaggcaaaggcaaaggcaaaaggaaagccaacaccaccaagacggtttactcgatctgcgttaaagctaaagcaggaaattgttcaggaagtagcagctgaggctgaatcattgcacaatgataattccattgaggaacaaatggaaaaacctaagcccagaaagtctttaggtgctgaacctatgtgcgtggatgagttcacaaatgagcaaggagataaatttgatcctcgaaaatctgcaggagacgaacatatgtgtgaagataaagccttgtgtagtgataactctacacaagagcagattgatactcaaaagattgcagtggaaggaatcttacatgaaaatatgcccctggaaaagcaagtagagaatattgatctcccaaagtctttaggtgatacatccattgaggagcatggggagaaaactgatttacagttgctttcattggatcaaatctcatgtgaagacaattccgtgaaagaagaagcaaagcaagttgataccacaaaaaagttggttgatgatcatccgtcagtttcaattagtagaaaacataaggcaaacaaggctgtgcttgagacaacaccaaggcggtttactcggtcagccttgaagccaaagttggatatggaaggtgcagtagaaaaagaagatgcaagtgagaaggatgttaatatgactagcttggttgtaacatccacagcaaagcgggatacatacaatacaacgaagaagtttccttccaaattaaaagaccttcttgatacaggaattctcgagggacaatctgtgaggtacatgagaggccaaaaggtactattttctccagttttattcatgattgcagtttcaagatttgcatgcttgtgaatacttgtttcaaatttattcttcatttacttcttcatacttaggtaaaaggacctcaagattctggacttcttggagtgatcagagggtctggaatagcatgtcattgtgatatttgcaaaggaaaggaagtaagaacacaggtcattttgttttggtttgtacaagtccatgtgtgtattatttctggccatatttcgactaaacttctgtttttcgtaggttgttacaccttctgtttttgagctgcatgcagctagctcaaataaacgcccaccagagtatatatatttggacaatggaaacacccttagagatgtcatgagagcatgccaaaattcttcattggttgatttggaagaaacagtcaaaagaaccattggttgcacttctattgtaaagtgtaacatctgtatgaattgcaaaggttgcttttatctctactttgtttaatttgctctaccactagtatctgcatggagtgtaacttctttgatcttttatattcagggtcaattcccaatgacaccgataaaagaacaacgctactttgcaattcatgtatcaccctgaaagaatctcagcctaacgtggttgaaagcactgacaacaatgaagatgctgacaaaaatgaagagtgagcctttttctattgttactttttaaatgcagcttatctctatggaatagattttaggtggtagtgccaattagactgagattctaaaatattgcaagatttatacttgttaaatagcttctatgttcttattatgcatatatgtagaggatcctgtagtattatgaatttttacttcattattggttgtgaagaaggattgatcagacaggatgcatggattctactttttttttgtttgttttccttgtaataattcttttttgctgggttccttataataattttattatttctacaaccacggtttttaagacaaggttatgtttgagatttctcaggtcaccaaaaccagccttttcgcctatgagtactaatagtttgtcaaagaacaataactcatcacaaagtaagagtcaaggaagaataacacgaaagtactctctctctctctctct

SEQ ID NO: 30856 - DNA, 1336 bp, Cannabis sativa
  modified_base (28)..(29): a, c, t, g, unknown or other
attactttccactgtgatgacatcactnnaattgtgaataactatatgttcgaaatttaatagaacttattattaaacctataatcatgtgaatcaaagcttatgactgagtcattgtatgatttttgatctttattgtaagtaaataagattacaataaaattgggttttatttaaggcatacaatcccaacaatatacaacttcaagatctcattaattaaatccccccaattataccaagtcatggagaagccttgtggattcgaaaacaagtaaagaccaaaggatatgcagagatttatactgccttattttggcttttgggacacaaaagacttatcatcactccaggatccaaagatacccaggttagaagcttgcccaagcgatacctaaaaggttactcaaagggcctatcacggacgccgaccgcccaaaaggaatgcagacgtctaccttgatgaagaacctggatcgcccaacgacatttatgctttttctaacacaggatcagatcttgtcccttgtgccaaaacatggtagtgcacacaccatatacacttttttgccagacggttatttcagacatttacttttcaaggttaaaccttttggtgacacgtgtcctatacgaatgacggtcccctattgtccagctgcttcaacgcacgagcacaaaaccttctttggggcccaataattagctttttgcatgtattttaccctactagtggtagtggactttttactgaaaacctgggggggtcatgcttgtcatttagcctataaatacccttttatttccatacgaaggtgtgattgaaaaatcaagtagtcaaatcaaagctctgtaaaaatcactttgagcttttttcttcttcaagagaaaccaagagggcagggttaggatttcttgcaaatactattgtaaaaacacaaaaaactttatcttctttattattgtattttattatttcttaagctcttattttattagagcatctctaatagagatgtaaacaagtggtataaagctaaaatatagttcatttaacaaaaagtgtgccaaaaagtgatgtaaattaggcacatggcaaatttttttatcaaatttggcacaacgtttgctatgatataaaatttacaccacaataaatgcactacttttttatttatatttatgtcatttgtattattttattagtatatttaactatgacattaaattatcaaatatttatattatttttttattgtcttacatattaaaataataataaaataggttataaagtttttagtgttttatttttttaataaaacattaattaaat

SEQ ID NO: 30857 - DNA, 2410 bp, Cannabis sativa
  modified_base (1694)..(1702): a, c, t, g, unknown or other
gagtaggtcattacccgctattaaagggggtcgaacctctataacaaatctatgtgctctttactttttcattctatttgtgtaacacgttgcaagcatcaaatccatatgtcgtcgctgttggttgatcacttttctaggtcaacgcctttcaactttttatttcagatttaatatatgtacatatggagctccttgggtttggtacaatgaatctcttaaatgcttctatttaacacttgatttattaccacaataaaccaacatcatccacaatttagataaaaattgttttgggaaacaaatgaagccatctggatcccagatcaaaagttgggcacacagggtgacagctcccctgagactaggcgcccaggctgacgtgttctacacgaacatgtagtttcatcgatccgattgcgattccgtctagggatttttttcttattttgctccaaaacaagatacgagactttgaattaagagaaatatcatccaagtggtggttcgtctcccaggcaccacactaggcgcccaagttgacattcaacttggagcttagtgtttggtccatcaaacgtcaattctattctaggcatcagtcttatttttcctccaaaataagatttggacgcttgcgcaagttaatatatcatgtacatgtgtcacgtacaagtccactgacactcatgtgcacctaagcattgcacgtgcatattaagtaaaattgctaagagatcttcaccggagttaaagaatgaactaaggatagctatcatatcattcaagcatctcaaaatatgcctaaagctcaagaaaccaaattttgggcacctaggttgacgttctatatcaacttgggcagctaaaggttgacttaaccttgctgtcactttcagtaatgcataccgctcagtaaaatggccataactcactaaatttttatccaaatgatgcgattcaaagaacatatgaaagctattttcaagacggatctaagtgtgtctcacacccttgccatgattttaatgtgtcaaaatcagcttgctagctagtgcagaatttttcgacgaattttgtactaatttttctattattttattgtaatttaattagcttatttttctataaaaggagagctccctcagtttagttggcacattcctcactctctctacaaagtcagagcttctctctttaaaaattgggaagtattagtttttgtgatgataaaagttttaagttgacgtagctctaatatcgtcgcatcagggagtaaattactataattgtggcattctcttttattttttttgttcatacattcgttagccactaccgcttatctgatgatataaagtttgttatttttcagcatcaccatatacattatcatgtccatgagagttggggaaaggaatggtttctattcctcttcagctatgtctttgggaaaacccgcatggataataagctgcttgttccaaatcccttgaaaggtcaggaaatcagctactaacaagttaggagtccaacaaagaagagaaggaatctttcgtaaactagggatccataagtccgtaaaaatgtgaacggattgaccatttccaattttccatttcaaaccattggagagctattgaatatcaatcatacccttagcagttctctataattaatatatatatatatannnnnnnnnatatatatatatataaagtgtaagattttacatcacttagataatctaattttattataattaatataagtgatcagtccttagtaaacaatatttgtcatgttcttattatttttattcaaactagatgacctacctaaacctttttaatctaacgagatctaaacctaataatataagatataaactcacgtttgtacaatttaattggttaataactaaactacattaatcagagacagctggaaaaacttattaagaacctctcgattttggtcaactaaattgatcacatctcttagaaacatagttaattaacattaatctttttcgggaaaattaatacaacgtatagtaataatagaaccttgggttgagtatctttaatacaactcttttatcttgttaaatttttggataatttaatttttttcttcatagttatgttgagcatgttatgttgtatcttgatctattgtatactataattatttagaatatatgtaaatttaaaaaaaaaaaattaaataatttataattaatttttattattttcttatacgtatagtatgtaattatttaatatttattttctgtaaattattaaaaaaaaatattaaaaatttataattaatcttaaataaatataaaatacaccattataaaaaaaaaaacataaatttaaaaaccattttttaattctaaaac

SEQ ID NO: 30858 - DNA, 1005 bp, Cannabis sativa
tataagattgttatgactttggaggaattcttcgatgtcattgtacatcgataagtgtcgtcttctccatttatacaccattagataaattattagtagtagtccaattaatgttcttggtgcccataatcccactggtaaaattgttaaattaatgagtgaaaaaaaaaaactttaaattatcatttcttaacaagtattccaaaagatgtaaaccatttacctgtgtatttgtaacgtccttcatccaataacatgtctgcataaacaaaaggcaagataaaagattaggtaataaaatgaagtataaaaatacatacaataaagatgtataatgaaggatctattcgttcttacatttgatctgaaacatagactgtcgaataaatgttacaaatgtgactgcatcataaaaataacaattaaacaatatatcaatattgtagatatatatataaatgtattcaaaacattattaattattattggaaatgtttttataccgttacaaattttttgataccccggtacatacatatatgcagtaatctgacatttactatagtgacaatgaacttcgttggaattttcatcgaggtaacaatattgatgtccttttgatttgtcaaaaccttggatccatgaaagctgaaaaccatatgctaactgtctattgatgtcatcacaagacgaagcatgaaagctttgatctatgagagtcacttgttgtatcaagcaaaaatccaactcaaaaggactcatttcatcagcatccaataaataatatgaccaaacaaaactattgttattatcatttcttaacatgcatggagtagcatcaatgtacgaagaattcaccactcttctttcgcagctaattaaagcaacagttttcgaaaattttctatattgatcataaattaattttccttttttcgaagtatatatttgtgctgcatatctaccaaacacattttcaagggacaaactattgttggcaaacaa

SEQ ID NO: 30859 - DNA, 1212 bp, Cannabis sativa
tgttggtgatgtataacctgctgtagaatggctttcttatgcttagcccaagtctttctttgttcttggaccaagttagagtcgaaagcactcgacctttcctatcaccaccccagtcctagaaaaacgattttgaggacaaggccagaaacaccatagaacttactaacagaccaaagagactccgatgtaaaattgataggtgtactgcgagagcattggatgaggacctagcgctgaacgatttgaccaatgaagacaacaaatgttgtgagcaagagcaaattgactgcaccagttgcttcatagttcattcccatattgtgctcgtcctttgtcaaagaaccaagcaagtaaagagttattcccaattgcaatagaggaaatcaactcctgctaaagacgaccaaggtaaaggccaagacaagttgaacaaaacaaattgagtgcacacctcgacatgctattcaagcggtgagagcaacaccacctctccttaaaagcaaggcggccaccatcgataacctagtccagcagtagtatgtggtgagccacctcatggagccacgctgatctaacaatggattggcttgagtgcttgtgatgtactcacgccgtctcgagcagcaactgaatcggaacaaaaccaccctccacaactctatagttagcccaagacagtttaatagaagtcatttagtcaatgaattctatagccgcatctaacctaccttctcgtctttacaaagtgtgctgatcaatatactgtaattagtgattatagttgggtcacctcctcttgaaaccataatactcaataacttctctccatcattctgtaattggattacaacctttggcttctgaaaaatttaaaagctctatcatttttcttctttgcactttcccttgataatagcattagaagtacatatcaggaagaagccctctagacgacatcacatccaagagctccatagctttgaaagagcagctcttacctagatcctaaattaccgatagagtgaagaggttttgccccttctccggggtacaacaaactgacttcattgacatagtgcgagggtccactgtgtggttcaagatgtgtgaagggattgagcacaagtgggaggaattaatttcgatggttgttgcggtaccatctaagaagattccgattttgaccaatttgggaaacaacgtgaggga

SEQ ID NO: 30860 - DNA, 1403 bp, Cannabis sativa
atttagtctcgcgcataagaaagtctgacttgaaaacattctagagactgaaactgattaacactggttgtacaaaacccatgtcaatacaatgttcacacctttcttttaccaacacatcgatcattctgactaacgttgcggtgatctttgttcccatccttcgctgtagagtcacagttccattctattcttttgtaaaagaaattctgacatattatgaaaatgtatatataagacccagagaggtagccatgaaacaattgtctccaacccattaaattgagttacggttgtctcgaagcactacaccctgaccccatatggtggtctcggcgtgatgcacccctaagactttctctcagcccataaaaaaatacatgcttcgaactcgttgtgtacccccgaaatccccatctcggggtctatggctttagggggtgtggcttcagggcctcgaggcatttaaaaaaaagagataaaggaagcttggggtgtaccccgagagctcccaactcggggtacgtggtctcgaggggtattgataggccttggggtggggtaacccgacccccatgtagtggtctcgggggtaataaccccaaacccccatctcgacttattttcacctaaaaagggaaagaagcctcatctcggggtgtaccccgacaccccattcttgggatgaggctacattgtagtctcggggtgtaccctaaatctccaaacaaggcattgaagagccctatctcggacacacaaacacactcggggtacttaccctgacctcgaataatgtgacccagcgtcacaaccaatgtgtggtcaacaatctctctcaaggtatgcatcattttgacaaacacatttttttacaactttatgagaataaaaattgaaaaatggagggaaaatgaaactttttcatgttcttcaaatgttcaagaacacaatcaaccaaaagttttaaaattactcattttctcaccaaatttcatcaaatgaacaaaaatacattacccatcatctatactacaaaacctaagcattaaacactcacatttcatcaaaaaatcaaaaaccctatcactacaatgaatttttggccatagcaagggataccgagaagaaagtttcaaaactccatgaaatcttgatttctatgcaaaaaattgctatggaagtattggagacttgcccaaagtgaagattataccacaaagcttccaagaaatcacccaaacatctcaaaaatgcctctactagttgatcttgaagtcacacccgaaatggtaagagaaagagaggaaaaaaagatgcaatttttcaaattggtaatttttgaaagttttttgttcttcacttaatcccataactactcaataccattttttacaaaaaaa

SEQ ID NO: 30861 - DNA, 1538 bp, Cannabis sativa
taaggtagttcaatgaaagaactatcggaagaggtcaggatctcatcagagatcctctctaagagagactaatcaacagatcagggagggcctacagataaactatccacccaagttcctctggaactaggataaaccttccctaacccgaaggaggacaagccttaccacgaagatctagtgttgagaacatttggacactgggaaccattggtctaagggccgactagggatctctggcacaataacaccatcgattggccaacctttggccagccagcaccttagtggtgcacctctagccgttcaataaggtcaactcctatcccaggcatccgagagcgagtaacccaaaggccaatctaaccgactagtcccacaaacgggtggaaacaaccaagatgacaacaacttgagaagtgagaccaatcactttagatacttggatccacctaactgcagcaattgttgtgatctaccccatgtcaatgcacaggctcaaccgatcagtcaaggaagaatggttggccaggtccttcccaatacagggttgaccggtcatgaacaacttccaggctcgaggctggttggccgtgtacataccctctcccagagtatggtcggccaggctctggccaatctagggctgcaactcaatcaagaagagccaatcaaataggtccctgcagtaatagatccttctatgcaagaacagttggatcaaatatatgacatgatcaaggggttgtctgccccaaaaccatcagaccttgagctagataggtcaagggattcacctttcttagcatacatcaatgccttgcatgtgcccaaattcaagatgataacttggaagatgtacatgggaaaagaagataccctagtacacctaaaaaactttgacatcaaaatagatctccaacaagtatctggacatgtgcgatgcgaatatttccagtaactatagctaaaataccccaacaatggtatttgaagttggccccagtaagatttaattcttgggaagaattctccccaaagttctacattcaattctcttcctcaagacaaaataccttcacgactggaggatcttgtcaaaataaagcagagacaagatgaacctttcaaagattacattcaaagattcatggttgaggccaccaaggtcaaaagcttgacaatagaatgtcgatatacggccattgtaatgcctgtatttaaaacttgcttaactcaaaacttaatcttaagtatattataaatattaaatcttatagtcgggatctcaaatttaaaataccgttgaaaacactaaattactacacataaagttcatattatattttttttttacaaacgacaggcaactccaaaatacaactcaaaaatgctgaaagatcgaaaccctctaggctgcattgccgtgatatgtacaatcattaccgagcgccatctcattgttcctccagcttagcttttcctttacctacacaaggtagcaaactgatgagtcaacagactcagtaagatatgga

SEQ ID NO: 30862 - DNA, 1484 bp, Cannabis sativa
tgatttcccaaattttggattgtggttttatttattgaatattggaattgtttctatatcattcatttttttcttcattttgtttaaagttaatgttggtattatagtgaatctagtgatctcatgtccaaaagaaagtgaaccttgtcatgaaatgtgattgtaagatcttggtgttggtcatcgtttgctagcgacaacaggtctgctttgaggccgtgttgatcgacgatagacaaaagttgagaaaattatgaaacatgattggtgcgggtattaatggagtttatgctaatcttattgcttgatttataattgtttgctttgaccatatttatttcctaatcgtttttgtgtttgaatgctttattgtgattgattgtagtaaattatgtttttattaattagtcagttattttgttttggtatttttattagttttaaaaggtttatattcttaataaataattattttggtatgttttatttgtattgtttcaaaatttagttttattaggaaagttttgtaattttattttaatttttttttattaattgatagattatatttaattttatgtaattaattatagtctcaagaaatttatcttttattttccttatatatattctttttttttttattaaagaaaagaatttcattaattacatatatatatataaattttttttattaagtagcaatttaataattatcagaaagttgttaaaattatattaattatcaataaaatatttttttaagtttattttagtttattaatttagatatcttagttgttttactatttctttttattttattttgtttattttttttttggaataaaagctgaaattttatttaaaacaattcttgcacaattacatcactaatgttcttcgaaatagtgtcaatcgaataactacgctcaacatataaccatatgagactcgggcaagtccatcagctacacggttagcagaacgtttaacaaagcgtaaacaaacatgattcaactctgaaataaatctcttgcaatctacaatgcaacagccgaacagagagttcgtgttcaccgagctacggacagcttgaacagttaagaggctatctaatactgcagtgacatgagaaagcttggacgcttttatccaacttaacacctcttttacaccaaaagcctcagccacggccggattgacacacccattccaagaccccgttctcgcctggaagacatgacccctagaatcctggagaacccaaccataaccaaacttgtttctatccgcaaatgttgccgcatccacattaatcttgagtttatttacctctggagcacaccattgctcatccccttctccactatgcattaaaaagaaagagggagtgaaagttttttcttgagcaaaagtccattgtccaagatcacaattagcaaatgcgataacatttttgaccgacttggttttcccattcc

SEQ ID NO: 30863 - DNA, 2626 bp, Cannabis sativa
aaacattttcatgagggcttttagccggggtgggattcagtaaaagataggagatgatggagtggaattattatgaaaaattgctaactattcgtaaagcggtacctcgtagtattgtttagcaatgttctttgattgtgtaaacattttcatgaggacttttagctggggtgggatttagtgaaaggtaggagatgatggagttgaattattatgaaaactgctaaccatttgtaaggcgctatcttatgctgttgtttagcaatatgctctttcatcgtgtaaacattttcatgagggcttttagccggggtgggattagtgatggagtggaattgtagtgtgctttgccttgagctttcgagagttttcctggttcctcgaacatgggttatctctttaaattgtcctttcaatttcagcaataatattgcatatttaagcctactgtttctcagcttggtgtttctctaagtttggtaactatcataccaatgtttaattcatttaattgggttttaagaaactgcattttgcaatttggaagagaaacaaaatcttaatatatctaatcccaaactcactgtcattttactggatcatgaagtgtgtaccattcagaccatggttgatatttttcccaaatgagtgctctatgcagacaatgatgttccatgcttacattctaatctgatgtttgcaggttttatctgttttaaaacttgagaagggatcccaaatgcctgaagattacccgaaatcttttagagaagcagtagcagttttccagcatgctcaaatgtcagtactttattccacatatggactcaattgttatatagcattagtagtgttacattattctgatctttgattatttccatacagatatgatgttgacatgaaaatgctcaagcatatgaaacctcttccggaaaagcttctgcagtctctagatggagagctcgatttcctgggaccgtatccttctctatttttacatttgaaaacgtcaatctctgttctaaaatgcttgaacttgatttttcattgaccatcaccttcataactcgagagagagagagatatctcaaatagtcaggcatgtggtttgcttccaaaacgtctgaggttcgagtccctcccaggtacttggatagcaaatactatgtttttttagtctccaaatattgtaggcttaagtggggagcttagtttcaaatcaaagaaatatgaccttcctcaaagttgtatttgcttgttcctagcaatctaaagactaggagattgtgttttcgccccaagattcttagatttgtttggctgagcttctactttcttcttttagcttctcaggaagctctttcgagaaagctactaaaactgatttctaaaagaattctgaaactcactggttagccaaccaataacagaattgcttttggagcttcgaaagcccaaccaaccagggcctaggaaaagatcatttcataacattagtgtctcttattcttttgattcccttgaccaatatttgggtggacttagtgaactccctccatcaatagctacagcaattgcagaaggaaaaatggatccaattagtatggaagcctttgatcgtatcccaagttcgaaatctcatacagctcctattaggatccaaacttcaggtcagccaccaagagttgaggctcctatggtgtctgcaagagaaagctgctttgtcactttctccaagaaagctaaacaggttgacaatacaggcaagtttaactaaccttttctttatggtttcttaaattccaacattgtcttgatatgcatgttctccaccacttacatgcatatacactacaaaaagtaggttctaatatcaccttaaaatagctactatttttttctcatcgatcttgaactgttaaatcataaatggccaattttgatcggataatactacataaagaatcataaggttctatcttaaaactaattggtcataaatagagatacccgtgagagctgcattcatgcattacatttatctgctaacatcataatgtttcggccacgtgttgggctccattcatcgaacttgttaggccgtaaattcaccttaacttcgacactagtatggtattgtctgttttggcaccttcccaacccgcctcgagtaggtgaatactatatattttaaggcaattcttgtctattcttccgttatgagacttgggttgatacccaataccacacaaaatggaaaactaatttctcttctttaacttcttcaacttaaaaactttaatacaaactgtgaacttgtttggtgatttttcttgctttattgtatatggtattactgaagttaaattctagagccatttttaccttaagttatatcaacatgcttgtatattgacatttttctgtttgtttatattgacagaaaaccacaataaagttctaaatgaaagaaattgcaccaacaaaattgaagcccttcaaaaattagtagtgccatcatcaacaattcaagaaactttagttactacttctactacaatggaaattaccaaaagccctttgaaattgaaggttcccaacaacaatccattcaagagaaaaa

SEQ ID NO: 30864 - DNA, 3198 bp, Cannabis sativa
  modified_base (95)..(100): a, c, t, g, unknown or other
tgataagatgaaccaaaacatacgcaaatgaatgaaaaatacttctgtttctttattgatgttgaataaaatggattacattgaaatagagtttnnnnnngggcataaaacccaacaagtacttgttgaaacagtgctaggtttgcctcccgagccagtttttaacaagttcatctcttttcgagcttcttcctttcaaacaaatacctaagccctctcgttgaactcggtgatgttctcactagacgaccctgtaaggcatcccacaattcgcccccaatggtggagagattagtagtgatccccgcctaaagggcagtaagttgtgtactatcatccaaatttcttactattgcagcagtcgtgctaaacgactttaatacgccttaagcgtctcgccaggctgttgctttatgttggttagtgaggacgcttcgggtcgcctatcccttgcagcctagaacttctttttgaagtccttggacagctattcccaagaagtaatggaataataagtaaatttattaaaccagctgcttgctactccaactagtgaggtgggaaacaaaatacaacgtaaattgtttgtaacattactagctcgcattatagtgttaaatttattcaaatgcgagactggatcagtgctcctatcatacgacgagacgtgagggtttttaaatccttggggaaaaggagtattcatgatatatggatggtatggctcgagttcctcgtctgagtcatatccagattgttttcctagctcccccagttgataccttttgaacttatcctccaactcatctattcgcaattggattggatcatcttgctttagactgagttgttggcgaagatcaggttttttctggttcaagtgctctcgcaaatctggttggtcataattactagcggacctcgttctactcatggactatgtcctacttatagacatcatcctactcatggacctcttcctactcttggacctcgtccttgagtgacttacagtcttacttgtacctgtgctttctcgatgaatgttgcaacgagtactttctccacctcgcgttgaccgactgtgggttcttgtgcagcctgaggttacactcgcttctttaagccctgatcttcccccttaggcatggttcgtcgtgttcccctactgggatttgtatgagccccttccctatgggtctgggaagaacgctggtggttccttactggtgacctacgtcccccaggttgtgtcccaagattttcctcgtttccacgtggaattttttgttccctggttttgggtcgcctcctattctcatttctatgagatggttctggctgatcatttgggttttcagggggaacctcagtttcccaaggttgctcgttttcagggggtcccttagcttccccaggtcattcttcttgagcgttttgagggttctcctaagcagtttcttacctcctagttcgtgagctgtgaggcttgcctcgtggtcttctcactccagggtcaggttgattttgagtattattcccctgtgctgccctggctgcggctggctcacgctccaatttaacattctgctagtttgcctcctctaggcggcacctgagatggtgattttctaattcaacgatgggcatgtatcttgtaggatcataagcactgttatccatgggctgagcacctccaagattgggttccttgtcccttactctagggttttggccatttccatgtaaagtcctccttgaacgtgtggaccgtgtatttgggccaccttcaagttgagtcctcatggagcgagcggttcgtgtactagggccaccttcaagtttggtcctcctggaacgagtggtacgagtgcttggaccaccctcaggttgggtcctcctggaacgagtggttcatttagattgtgagttggaaggcctcctagagcccattggctcttttccaggacggtgaggggtttcttcatgtggtgtgtcaatattttctccgttgtcagccatgaagaagattatttttttgtatgtaaggagggtttttctgagcttttttcacgaatgctctcaatgaaagcaccaaactattaacgcagattttcgttaactatatttgaccctaagtagtaataaacttgcacagaaattaaaagccggtaaagaaaagataagaacacaaaggtttttacgtggttttgcagttaaaattctacatagtccacgagtcaatcttattagatttttgatacaattctcaagcctttttcctctaatgatttttcatccctttttcagtataacttgtatctatttataattacatcatagggtagttaattacattgttgactgatatcttacaacaattatccctcgaaatcgtggggtttgatttcataccacgtaaaataaatgtgatcaatattcaaaaatcacacagctatgatgggtctgcttttaccaggtcaatataaacgtgtattaaatacgttgtaaatcataatgttctgggatgtctcgatgggaacacaacatcaataaccttggtagcgagctggagcttttcccgtgtttcttcaaggttgatgatgtaagcctcgtcgttcctgtgcttgaagacataatgctccgtctgaaaaatcgcagttcttggttacaaagtggacctcagcagtcaacatcatttgaatgttagcttctatctgagagagctgactagacagagctatgaaccccattgaaaggtgtttgaagctgattaacaaaagtaccatgagtgtgccttcctatagcgagacatgcacctcgctattagttgtttggattttcccgactgttatacttagtctgtacaaggtgtattatacactaagtgccttaccaattactatgtctcttctcctaatgcgtagcgaggttgatgcctcgccttatacatctaaagttgtatggtttctcgttaatgtacgaggcaacagtttgtatatctttatctcatataagaccttatagttagcaagttgtaaatatactctgtcacttccacattaatgagttactccattttcaaatataattaccattacatttgtttattcatattcttccaagtttgacacgtgttctcctctgaagtggtagccgaattttgggtataacactacctataaatgatatttcagt

SEQ ID NO: 30865 - DNA, 2321 bp, Cannabis sativa
taagaacaaatcagatgttcaacatataattcccaatttcttcaatatgatcactcagacaatgcaaaagaattgaacttacaatctttctttgcctcaaagagcattattgattaccactcttgtgtggaaagaccacaacaaaattcaattgtggcaaaaacatcaacatatactcaacatagcccgagcactaggattccaatccaacttacccttggtttattggtcttacctagtccaaacggttacatacctaatgaatagaacaccctccaaactgtttaaagggttaacatcataccaagttcttcataatacaactcctaaatatgatcacttaagaagcttcgggtgcttagcttatggctccaccctctcttccaagagacacaaattcacacctaggagtagggcctctatttttattagttaccctcatggcatgaaagcctatattctattggatattgaaaccaaacaaatttatatttcacgagaagttgtcttccatgaaaccattttatctttggtttcaccaacatccacatctaaaataaatcaattatttgctgacattgttcttccaacttttaagccaatacaacaacaggcccctacaacaaaacctacaaatgaagcatccaactcattcacaccagcaaccgagttctccaacccatttggtgtcacaccagatcctactactcacaacatacaacctcaaccactccaatgtggttctgaccatctggtttccacaccagaaactcaccaagggaacatttcagactggtagcattcaggcaccagtagctaccatcaattccaccaaacaacagacagcttctactcctgaagccattcccccaaataccttctaaattgacagcacaccagcatcaacaactccagcttccatatccgaagccaccactactggtcctaacaaaaaagttgtcacaacagcagcccaaacacctccaaaaactaccaaaactggtagaattttgcacaaacctcagcatctcaaagactacgtttgtcatgcttcatctacatcacatccaattgaacctttcctatcatatatcaagttacatcctcgattttgagcagttgtacttgcagcatattatgaagttgagcctaaaaactatgttgaagtagctcaatttcgacattggctacttgccatggataaagaaacaaccgcctttgagaaaaataatacttgggtcattaccatgctaccacccggacataaagtcgttggttgcaaatgggtatataaagttaaatataacgaaagtggggctgttgaaaggtttaaagcccgtctagtagccaaaggctacactcaaagacatggcattgactattcccaaacctatgcccccgtagctaaatttaacaccctttaaatttttttagcactagcagccataaacaattggaatgaccatcaattagacatcaataatgcttttcttcatggagatctccatgaagaagtctacatgaaaatccctccgggatataaagcacctcctaactcggtgtgcaaactcaacaaaagcatttatggcctcaagcaagtctcaagacaatggtttagcaaacttagtcaaactcttatttcggatggtttcattcaatccctttcggacaattcattgttcattaaaaggacaaacaatatcttcttggccattctcatctatgtagatgacatagttgttgcaagcaataatgacgatgccatatcacatttcaaaacatatctccatgacaaattcaaacttaaagaccttggcaccattcgtttctttcttggtcttgaggttggtcgcacaaagaaaggcatttcagtctctcaaaggcctttgacacttcatttactacaagatacaggctacattggtgccaaacctgtgtctactaccatggaaacaaatctcaaattaagtaaatatcaagggaagcttcttcccgatcctacagcctatataagtctcataggcaaactcatatacttgaccattacaaggcccgacatctcctatgctgtgaaccacctaagtcaatttttaacttgtccacgggttccacatctccatgatgcacatagaatcttgcagtacttaaaatcaaccccgggccaaggactttttttcccctcaaacacaacagccactatctcagcatatgccgagacaagcctttccccatccaatgttcaagtgtccttcttttcggatgctgattggggggcttgtcaagacacaaggcgatctatttctggttattgtctcttcctt

SEQ ID NO: 30866 - DNA, 1197 bp, Cannabis sativa
agttgttttaaatacaacttgttttgtttcaaccaatattcatttacaatgatggacaaagtttaatattttagtatacaaaatttaaataaaattaattagtacaaaaaaaaaaaaaattattcttaccacaaaaaatgccatttttgccaacgcatttggccaaatgtgtcagcaaaagtcgtcagcataaataggccaaacgaactgcgaaagcattctgttaacactttgtcagcacactattgcaccaaagaaagtgacatatatcggtgtaattcgtgaattacattggtaaaaagcacgaggtgaacggccttttcgcgcgaaccatttccaaaggtttattgacctttgtcggcacacgcaagtgtcggcaaaaggtcttagaaaaggggagagagaactccccgcgttaataatggattagggggaaaccttttgcaggagtgtatgtacactggcaaaagatcattaaaaataattgtcacattttttagtggaaaaattagattattgccggcataaatatgcactggtaaaagtttcaaaaaatatgtggaaaaattcctgcatcgaatacgtagttgttatacctaaatttcgaccaatataataagaagctgacacgtgtatcaaggttggaatatgaaccagctccaaaccgcacagtattaaatgcacattaaatgactcacctcaaaaaatacagttaatagaactattcgaactcgctgccatataagcaatcaaaagatgaagagtaataattattaactaatgagaccagcgacaaataggtccatcttgggataaatagaatgcacaatgaaagctattaagaataaataaacaaagagcttgtagctcattgacccactactcgtgagtaagagctttgacccacatactcgtgagtgtgcttaaggaatggaaacaacttcaacattcattcacctcgcttttgacatatggaagtaaccacctcgctaatacctttcaaacggcaaaggagcaccatgagatgtattatatcttaacactaaactttttttcctacaaagacagttaagaaagataacatgcaatcggcgaggactatccaacacagtcagtataactgtctatggataaagataataaataggggttgaacggttatttaatattatcttatgtgcataaagatgaaacgtg

SEQ ID NO: 30867 - DNA, 3171 bp, Cannabis sativa
aaaatgaagagaaaatagataaagagagttttttggtgatgaaaatagttgaatccctcacatccatttatagtaaaccatttaactcaagattttggcttcatattattatgttgttataataaaaagtcttcttcggttggcatataattgggccgtttgcgaaaaagtctttatatctttggcatatacatacatatatatgtatgtatagatatatataataaaataattttttcacgctttcaaagaaatttcaaatggatttaattattagctcaagcagatctaaaatcatattacaaagtcaaattagaacaagaactgttcaaaattcttgtacaatatattgcatgtatatatataatttgaaaatttattaagtaataataatattaatatatttatgcgtagtactagatccaactggactttgtcttcttactctcattgataaattatcggtatcgtatgttttcattactctcaagtatttgattttaatattatatatatattgccaattccataatataactaaattatatatattataagacaaaaaatttactttttgtgaatgtaatatataaagtatatgcattgatagttgtaatttgtaaagaatatatggattttaattaatgtagtattatatattaataacaaatataaacactagatataagaaattaatataaatatatgctacagtacggccgttttaaattgatatttcacgcgggactataggtataattagtataacgtaggcatgcatgtattgtatactaagtaatctccttattacgtacaatctcagtccaaattagtgtactaggtaagtgtttattattctttattcatataaaataaaatgtttaggtatataaatatatatacaataataattttcaatgattaaaaatatcatataaactaaattaaacaattaaggtttctcgtttcataatttataactgcaggaagttattttttttttttggtaaatcttgttggtcttccctgggtgtggcttggtcaagttgttttgctatttcattttgatttttgttactacgtacaattagtcttgtctctctaatatgattttaagtattttagtcttgtctgtgtcacatgattttgttttattttgtttcgttgttggttcttccttgttcttcaatggctcgccgtcaaattaatgttagtagttgagaataacaagttatctgcggctgaaaggattgttagtagtgcatttatacgtacatttgcacaatgattgagtgctcgagatatattaaatgaaccagcgaaataattagcttctactattgtgtcttcagagagattgatgaaactggatatattaaggttaactatgatgctacaattttttttatctattttattttaattttttttgtcaaacgatctcgaaattaggtggatgattatttagttcgtttttctaattctcctcgtcttcaataggagagatgtcctgattagattgtaggctattattttaactaattgttattaaaaaaattgcataaaaaatgttttaagtaaatataaagaaaatcttaaaaaaaaagtacatataatttttttaagtaattagtaataataataatcaagaatcatatttttataacaatttttaagtttgagttattaattaatgattattttatttttttcatctttaaataattattttattttatttaaagttattttaaacaatttattttaactatactatctttattaataacataaatttcagtacgtactaaatagattatatatatatgtactaattgacatctactaaatttattatttttttaaaaaataaaataatttaacaaggagatgaaagtgaaatatgattctttttaataatttttttttatctcgattctttttaataattttaatttttaaatttgtgattattttttttccttataatattatctttttttttttttgaggggacttataatattataatttttttcgtattctatttattttataaattgatggtagtaatttggttattaattaccacatcaatttttaaaataaccacttataccaaaaaaaaattgaacagaacaaaattaaaacagtacttcttgctctcttaaaaatcatgcatctatacacaagtgagaaagaataatagagttaaaaatgaaaaaagagactagtatgtgttatattaatcctagtttgaagctatttatgcttacatataaagatgtattattcttaataataagtacttgtcttgataattcaaataaaatgagacacaaaagtcaaaaattcacaatttttttgatagttttgtgcaaagtagcattattttcaagttataacattaattatataaggatgtatatatgtagattcctttcattgtcatcccacaattccttctaaaatcttatctatttattttaatttgatcatgtgtgaataaaaaatatttaaaattttgaactaattgacgtgacacattataatttcataataaacaaaataatatgtgaaaaagtatttattttgaagtaatacgcatcatcaatgatagcaccaaaaagagagccaagtaacaaaatgagtccaccttcgcaaatgaattttattagtgtcttaaatttataatttatatagcttaatttttaaatttattaaaagaatatttaaaattaattgtgatactaaatgtttttatctaaaactaataatttagattttgagtcttacatatgtctctttgtttaagatattaacaaagtgagtaatgatgaaattggacaaaatttacagttttactaacaattgctacatacaggctggtcttggattaaaactggacatgtctgtgcttagggtccactcagcccaaaagctcaaaaaaataattttcttttaaaaataaataaaaaaaaattagtaatttttttaaaaaaaaacatatgttctttgaataaagggccaataattaaattttttcttatgacccaaaaaatctagggccggcggccttgtgtacctataccgctagaaaaattattatatttatgtcaattaaaatatcaaaaatttaagtacttatataccgtaattataaaaaactta

SEQ ID NO: 30868 - DNA, 4318 bp, Cannabis sativa
gtatttctattatgccaaatataatagattgttgctgaaaaaattgctacagcaatcatgtttttgacattcttgttcagctcttcagtccaagcactccactcatctatcaacacaggccatttatagcctatccacctattaatacaatacaattgtaggtaaaaaatcagtgagccaggttcttattagactacacaatagatcagactcgagctgtaaaactgctgtagataatcccgagtgagcagcctatcattcataaccaggcagcaaataaaacggtgttttgacacagcaattctattccaaacaaaccttggaaacttgaatttttcactactgcaaagactcttgtacgtacaacaaagttaatgctgagcttgcctttgcggctagcttcctccacttcctgctgggagaataaggttccaatattgcacagttttttccaataccaacttgtgtcaccctttagttggtactgccaaaacctgtgtccttttaagtacacatggttaatccatctaacccataaagattcaggttgatgattaatagcccatatgttacacaaattcacttcagtttgcatcaatctaagaacctaagatgtgtttaaaccaagaacaagaactctagacacacaacagcagtaaagagcaaagctctgttattgtattatttcgaaatggtgtctattacattagtcttttaatgatgaattacaatcaccttttatagaacaacgaattacagaacaaaaggacagtaactaactaaactgtcagcaattaactaacaaaagactaaccaataggaacttgacacctaggctaactaactacctatattaactaccatgacattaagtaggcaaaccagaaaataacaccatatatacttagcaatcattgccttgttccacttgtagccttcaccaaaacctaagcgcccttgagctttcggtaaacaaatagttgcttaagaagtaagatggaaattacttcttgtaccattgttaccccataaaaactacatgccaagtttatcaatctctttaactgtactttgaggaagcaagaaaatattcatccaataatttctgagccccaaaagcacagagtgaataagttgacatctccatgcataagagagatgtctacttgcccaaataagcagttgaattttaatcttcttgagaattaccacagtcctccactttccattttgtaggtctcataggaattccaaggtaattaagaggaaattccccttcctcaaattataaaatttgaagtaaagcagtcttgtcttcccttgatattcccccaaagaaaacctgagacttattcaaattagctttcagcgccatgctattacagaactccccaaaaatcttcttaacacaagccaccgaacctctattagctttgcaaaaaataatgagatcatctgcaaaacaaaggtttaatgatcttgagattcttacattgaggataaaatctaaactccttatgattagcaccatattctagcatgcgagttaagtactccatgaccaagaaaaacaattgcggtctccttgcttaagccccttagctctcttgaaacctttttacaatcgaccattcatcataagaacatatgaagtatcccgcatacacaccataatctaatgaatgaatttggttgggaacctgtagcatcttaataactcctccaagaatctccaatccactgtgtcgtaacctttacttaaatcaacctttagagcacatctcggagaagcattcttcctattttagctcttgatcaaatcctgaaaaataagaatgttatgagcaagaatcctccctttaacaaaggttccttgattttgtctcaccaacaaagggaaaacttcagacaatcggttacagatcattttttagatgcatttatacaaagtattacaacaagcaattggtttgtaatccacaactttgtgaggcgtctcaacttttggaacaagggctataacagcttcattgaactcctcaagcaaaattccagtatcaaagaacgctaggatagcctcagtaatctcatctccaatctccttccacatgacattgtaaaactcagaattaaagccatcttacctagggctttttgtactagctatgctaaacaaagctttcttgacatcttctttcttaaactttttaattaagttcagctgtaagtcaatgctaagacagggacctatctccatatttctagcatcaatctgttgagaagctaaactgcaactgcccatataacttttaaaatgagagacaaagtgttgaaccaccttattgtagtcatctacagtttctccttgttcattttgaaaagaaacaattctgttctcatgcctccttttattaataaacgcatgaaagtaggcattgttgtcatctccttttgaaagccaagtgactttgcttctctagattaaaaaactctgatacatggctgcatgagtttggaactttgctgcagctattttctccatcttctataagctaaatcatctgtaggggacgcttgagccttagttaaagaaagctgataatcacctttagcttaatgatacctttgttccaactagccaaactagccataggtttgttccaactagccaaagcaacatcctgaaaggtttattagttcccatagtaccctgatcctgagttttaattaaacagtagcagtgatctgatgaggtatcacattaaaaaacagccacagagttagggagcttattaatccaatattcatttaaaaaggcatgaacaatctttgagtagactctatcttattcccatcctacttatttgtccagctatatatcgaacctaaatacttaaccgcatctaccttagtctgagcaagccaagttgttgaatcaattaactcattagtactaacagctttgctgccagttctttcaacatggtgaaaaatggcattaaagtcaccaacaataagccaaggtttagcatcatcatatatacaactaattttgaaaataccaaataaattattttttatctattttatcatatatataccaataaaaaattttacatgattgattaactttataatttattttattttattaaatagcaatacaaatactcaaacttattaaagtgtaattctattagtttcttactattagatttgttagtatgctaagtcaaataacatgtatcatttttttactagtcaaactcatataattttttttaaaattaattttaaaccaaaaaatttatcaaaaaaatattaaaaaaaaaaattctttctcccaatctctcgatacctctctccccctactccgatgatctatttttcatgccggtgacccaatcaaggctccctagattttaattctccttttgctggttttgttggtttgaagagttgaaatatgttgatatggtcataatcaacttggttttaggttttaatatgggtataaattaatatgtgatgtttagttataatttctatttggttaaaaatttgatttttgaagaagaagaagaagaagtagaaggggcatagaaatgtatcactcacaagagagaggaagagagaaggaatattttttttttatatacttatttcttttcattttatactatttaaaaactatttttaattaatttttttattttaaaagtattaatgaaagtgacacatgtcatctgcctcagtatcctgatatttgaaaaaaaaaaaaaaagctctttacctctctatttttttgataattttttttaatagtactttaataaaaaaaactatattttttttttattttataaaattaatttatatttgacaaatttaaattataaaatatttttaaaataatgaaatactaaataaagtatggaacattattgaagcaacaacaataaaaatgactctattttaattttttagctaaaaaaaaataaagaattctattggagatgctgaaactaatggaattacactattaataagtttagatacttttgccataaaaaaaaaatgtttagtttatgccaattataaatatgaaattttaattaatagccgctcatatgggtagtcctgacttatatttaaaaatagtcattttaaatataacgagttattttacaaatattaaaagatgacaaaaaaatttacatttttacaaaaatacaaagtgttatattttatttttgttgtttttaatttaacgttatttttacattgctgctatatgttgagaaatgaggtttctact

SEQ ID NO: 30869 - DNA, 4717 bp, Cannabis sativa
tagttgttgtagcatcttccttgtgttacaccccacttttcaatttcatgagctattattctcctgtgccctccttattctcattcttattattaactttcatactttcttgcaaattcccaaaccaaaaagaatggctggtgatttgttctgaatgtgcttttggaagagttaacattagttcctgattacattttaacataattcattattcaagagacaaatcataatcaaaggtaataagagagatgacttacctgatcggagcagaggagcactggccggaagagatgaaagttggctagagcaaaagcagcaatggaagaagattgaaaatttgtttcataataatttgattcattttattagttatattataatactaataaacaaatttataattgtatctttttatagtttttttttttttttgtttagaattttatcttaatacaaaggctctcacaaaacgttgcctcagtagaaatgataggtacaattgtacacacaaaaaaaatatatattgactttaccttttaataaaaatggctcacactattgactaatacacaattccaagaatgagaaaactgggtaaacataaaaaaaaaatggcaaacacactctaatattccaaagttaagtcactctgtgcaggagtttttcaggagaggaggatgtgtagttctgagcggtaaagggaactcgtgcttctcgttttaagcgcgaacatgggcgtgttgttgggaagatcccttctgctgcaaatccttttgacatacaaccttcaattgcacatggtgacttagtagaagcattcaactgagtattattattacatttactgatatccataaaatcatcattctccgctaatggattatcatcctctcggttttccggtggtctgtaagtaatagaccggtttctctttatgctcattacaggatttaagttggtactatctggaaagattgttattaaggatcccaaatcatctttttcaagctccttgaatgacttcctcttcaagccggggagacttttcagccctgtaatataacatcaacacttttcaggaaaagcttttttattcgaacgaagttttgaatgcgaaaataagtttaccgggtagggagtcgttgtcacatacaccagactcagtttctgagtcaccacaattacatgaaaagttatgctttttattagatccagaaatcctgaaagagaaaaagaatgtcattactgtcatcataccttacatgcaaaacaagttttgattagtcaagagtaccccaccaataacttagatgtattttctgtatttaagatgaatatgaacttctaaaagggtctatcaaaatatagaaatccatatttaaattaagagatgatcatgtatgaattcattttaataatgagtaaacaataaactcttgtttgtagtgtgtggattttgaactatgatggtaaggacctgcaattcagtacatggtgacgaaaatatgaacatgtatttgttgtttcatttcgggctaattcagtacatgatagagcacacaatttcatgtatggatatggacatcgacgatatcaaaacctgccttcaattatgaatgaatagcagatgacaagtattttaggctacactttaatggcacagagcctagccacactagtgactacatgcaactgtaaccctaaagcggaaagagaattcgtactcttaaagaattgtgagtatttttgctttcatgaatcaaaattaaaacaaaaaacaatgtcaacctactttctgccattatgataccacatgtttgttcggtattcatcttttcctaaaccttgatttgatccataagtatgagatgtcagtctaattatgattcatagatataatttatatgatgatacataataaaattcaaacataagctaactataatagattatctttcactgctagttaattgtttttctttaccaattcatctagcaacagataggtatgaactgataaccaattgttgtcaaaaatcaaaaagtcgactcactgatgggcataacatggacgaggatttcgaggtatgatatgtaaattgtgaacaaataaatagacagtacaaagagaaacgtcgatgcaaaacaaaagtactttatggaatattatatcaaacctgtacatgtgctcaacgaagtcatctattaatacgggccaagctcctagaagatcaacgaaagcaactgggagttacttatggtgaaaataatacatgcattaaccaaattaagctgaaacatgaaattaagagtgccccttaatccttattatttaaaaaataattatccaactagactaaccaataaccaccacattgaccgaaaatgatgttgttgcattggcagaacagaataagaccatgaacagaaagaatggacacaacaatgcagccgtgattattatgtacaaagggaaaatctttttcttttttaaaaggaatgtttataccttcgggatcatatccctccaaattttcatgtacacaccgactgaaagctaaaacttgccgccaagtatcctctgagatattatgccgctgatttttctacaaggaagtagattagtattcacagaaaaaaaaaaagcaagataaagtcatgccctagtaaatcaaactatttgtggcttcacatgattccaactattgaaaagtagagcatcatgccaactacatacctcaacaaactcacaccaatgattaagcaatcgaaaccttccggcaagaactaatctccatgcagtaacagccttttttacagctgcaaatattagttaaaggggtcaaacaacaatgtgtggatcaacatatcagtaaagacatttcattgtgaatcaacaaaacaattgaaaatgtaacatagatgggggaacacttactgatgttcttttgaccattttcacggcaaagaaagaaaacaaattcatagaagcgtgagaattcggaaaaatcaacctgcaaaagaaaaaaaatcaacacaaagtaaagaccacgatatgctgattaacaagttcaagggacacgcaaagcatcaacaagcacttgttgaagagcatctacaatctgttatgcagaagaacataaaccttaccatcaagttgagttgtgacataagcttggaaattccatcaaaaacagacgtcctggcagagaaagccattaattttctataagaagacgaaataataggaactatttttcctaatggtagaaaataaaagaatatttgacgacacttaaatagcccattggagtttagccattgaaacagcaaacattctaattaaatagttgtccaatttttataattttgagctaatgcattttaacaacagctttataggagcaaagtgccacaaaaaaaattgactagttccggagctcaaatcatttgaaacacagctaaaatactcggacaggtaacagaaaatcaatcagattttccacaaccacaatgctgtttgacaacctcaaccccaattttggtagttatatacttacattataatcaaagttcatggattgtgatgcataccttccatgcagtcttgactctaccatcttcgaaagctgagtcagtgcctctcgtgaacattgagccatttgtaactcctcattttttctataaccttcttccccttgaaaatacagattccctgatccaatatctgcaagacaaattcacaaatcaaagcccattcaagctccaatctttaaatgaaatctttcatcaataaagctaaaaatgcttagtccctatttggttgtaaatggcttgtttgattaatagaaagattattattcttgatcaaaaaaaaagctaaaaatgcagtcccattccccatttcatgtctctctaatactcagacagactaaaacccctatatccaagccaagacattgaaaattgttaaaaccaacaattataaaaccccatttttcacaaaataagaacaaaaatttccacactaacctatgttccctgatcaacgaaacaacccataattataaaaccaacaagagttataaaccactcatctaaaatccaaaatcccaaaacacaaaatacaaaatttcttaagaaaaaagtgaaatttaccacagaattggcgataagcatcagaaatatcataggaattggaggtataggaatccatggcatccattagtaagagctttagatagagaagagagaccaggccagaaagaggcctagagagagagagaaagtctcgtccttttcccgttatataaattgtttgtaccgtaaaaaaacgcacccagattttgaaacgggctgtaactcgttcggcgttggctattgcttttggctttaatcgctcactatttttattttaaattaagataaataaatacaacaaatgtatgtagtttttctctctttttgtgttttgattttttaatttttatttcttgaaaaagaatattacataattatgcctttagatatctaacaaatatcatcttctctaaccgttatactaattaggtgtaaagaaaaagaaaaaaattaggtgcacatttttcattaatttaaaacaattcttttagtacatataaaagttcgagggacatgatttagtaggtatcaaaatttaagaagcacggtttaatacataaccaatcactgaaatagt

SEQ ID NO: 30870 - DNA, 3066 bp, Cannabis sativa
  modified_base (1719)..(1726): a, c, t, g, unknown or other
agcaaagaactatccaatcaacccaagttttaataaaaccaataaaatttaatgtaagcccaaataaaagtctaacatctttgtcctccctttaacttgtttgctttgtactttatggtttcatctattaaagcacaagttttctctcaaaaaaaaatatatatatagaagcgtggttagtaaaccaagccaagccaataataataataataataaggattatttccacaatcgaaggaaaagaattaattctccaacagaatcatttaaaaatttgtcctacattataaagattcaaatgtttgctttgcttaatttactttaaattttgattttaataaagataccaaattacagttttattattttatcaaatactacaacaataccaaataataaaaacatataataagtactgaatttccatattattaaatatgaataattttttttttatctaattctaattaatttgttgcaattcgcaacttctaattttttacaacggttataattaaataaaaattaagtatttaaatacaaacacatacataaaatttagatatttacattgttaatattctattagtttacaattttaatcacacaataatttactactcatgaaaatttcttatatgatgaggggggaatttttataaattgatatgaacctttctatataatcttatataatattatatatattaatataactaaataacccctcaatatttatataaataaataagctttcttagtataaatcttcttcagtatgttatttcatactgagatgtcacgtggtgtccttacaaataaattttagcaacacaaaaaataaatttatatggtaaatttattcctgcagatcgaagaatattttattaaaaaaaaaaaactgtttcatatattaattgttggtattggatcgtcaaaagatcttatttagacttctgaaaaatatatattattataacaaattattatacacaataaacgtttatcaaaatgataatgaggaagatgttttacctattttggttggtacagattttttataataaatttatatattttttgaaaaggaattttatgttattaagatccatgttattattattattatatatgattattattagcacacttgtattataaaaacttaaataaaaagccaacataatcatataatttaaataaattaattaatcacaattattagattctaagtccaagttgaggttctaaagcgtacgttaattttttattttcctggaatctttattttctaaccctaaattaattttaattttctttatttaagactgagggatccattaatcttataataatgtattattatttgtaattaattttaagtacacccctgaattaataataataataaaaaaatacagtccaaacctgaatccgaaccaaaaccatttccttcaatagtaaaattatttattaaaaaaacaatatgattatttaaatagaagaaaaaatgtgatctttcattgacgataaagacaaggagagatgaaggattttgtttatgttttatttatttatttatttatttatttatgtataataataacaaaccataaataaaataaagagttttcttctgattctctctcagcattttttgtaaactccgctttttaattaattactcattcatctaattcaaaataataataataatannnnnnnnaataataataataataaatactttacattcttatcaattattctactttgtcttttaaagtactttattaattttattttttttttccattttacatcaaatttttacataatatcatacctcagtactctattttttctctaataatttaactattatattttttaatatattttaagattttttttcatttttacactttaaaacattacataacaactaacagaacaacttaataaatcgtaatcaaaattcatagtgtaacctacaaagcattctaaaccgtaaattttaaaaaagaaattaaaaaaaaaaatatataaaataatttctccatattttattttatatatttattaataatatagataatgtgaatgaaagaaaagaaaacaacaaaaaataatgatgaaaaattttaaagtattataagttatttattgaaaatgtccttttaaaaattttcaagtctattttaactttgtagctattaggacaaggcatttatttttgttggactttttttttttgataaagaacctgtatccattatgaaaattatcaagaacaagatacaagatacaattaagattggaccgattaaatcatccataaagcttcctgctctaagtttaaagctgtcttagctaaacaatagacaacattatttgctcctcttgagatgtagctaagagaaacattagcaaagtaaaactagctcaaatagacaataagattaatgttttttttttaaaaaaaaaataataaatctaaaaaataaattatacatagatgataaaaatagtaattttttttacaagacaaaaaataaaaaaaccacctattaaatgttcgatcgttttcttttggaccaagtacttgtgcaacaattaatgatgatataatcaaagtgccataataataactataaattaagaatcatataattaattaatgaaaaaattagtggttgttgtaatataaaaattataatggggtataacaatcattgttttaaggccaagaatgaaataattaataactataaatatagtttatgaattaaagaagttcatatatgacattgttaaatccttcaaataaaataaaatattattagctggaccaattagttgatgaagtggtagttgaggtactcatgaatgtagtttatgggacaagaaaaaaaagaaaataattatggaaacaaagttgactaaaataatagttgaaaacacatgggaacaaattttattagttggaattagcagttgctttttgtccattataatataaaagaataaaaaatataaattaacaatgagagttgagatcaaaat

SEQ ID NO: 30871 - DNA, 1357 bp, Cannabis sativa
atacttgtgagtagatctaagagcctggtaaaataatttccaacacttcttgccctgaaaaagccgacgaacgaaggaatcagagttagaaaaagagagaggttggtgaagcaataagtcaaaaaatatatatctattggctcaactgttgcttacctatcgagaagcgcatgataggagccgagacacggtatccctttatcgagaaattagttttttccctcctgatggctttaagaaaactaagaccctacttccaggcccatcccattaaggtacttacaaatcacccactttggcaagtcttgcagaaagctgaagcctcaggaagactccttaaatgggccatggaattgagctagttcgatatacactatgtcccgcacatctccataaaaggacatgccctagcagacttcataacggaatgtaatgaagtagaggcctgctctagtaggccagcccagcagatgccggtatggaaactgttcgtcgatggggtgtcaaatgaaaatggattcggtgctgggatagcaatgatatcgccagacagactccgactccaggccgccgtacgctttgcatttccagcttccaacaacgaggccgaatacgaagcgctaattgtagaactaagactggccaaagccgtaggggctgcaagggtagaagtctttagtgattctcagttagtggttagccaggcatcaagagaataccaaacacgtggacaaaaaatggccgcttacgtagcaattgtcagagacttgctccacgagtttatagaatacaaagtggaaagaatctcacgagaaaagaacgctcatggggactgtctggctaagacagcgaaatagaaagactgggggtagtacctgtcgaacacctcgcggagccaagcatcaaagccaaagagatggtagctactaatgaggaaggaccgagttggatggactccatcatcaaatacataacgcaaggagagttgcctcatgaaagggctgtatctaggaggttacagtaccaggcgcatcgatacataatgatggataatgtcctttatcggagagggctcaacataccgtactcaaggtgtgtgtcggaccctgatgctagacggatcatgcaagaagtccatgaagggtttttgtggagaccacacaggaggtctgagtctctcgaagaaaatactgagacaaggatgcttttggccaacaatgaagaaggattgtgtagacaatgtcctaaaatgggattcgtgccaatgatttgcaagcataccgagagccccgcccaacgaaattaccttgatgactagcccctggccctttgcggtgtgggggatagatctcattgg

SEQ ID NO: 30872 - DNA, 4830 bp, Cannabis sativa
aaaatacaacctataaaaataatagtgtactccataaaacatcatccattccatgcctatttatgaatccgataagtgcaagtttggtaactattggacgagtgtttttttattttaggtttgaagtcctttgcagagtatggggtccaccaccacgtccatatcagaaacccaaaaataactaaaatctgtttattcacttgcttaaaaagtcggtgatcataaaataatcatcatcaccataacaattacaatcagctatggtttaagtagcttaatcaaacaaactgatcactactctgagtaaacttaaagctaaacaactgtaggaccgatcgtaggctaacattttcacttcacacgcgaacttcaaaaccaaactaacgacggttgaagcctcaacaaaaaccacctctctctctctctctctctctctctctctctctcctcacctctctctctgctacttcatacgtttactaaattatataatatatatactatttaacctcataaatgaatccacaaatggaaaaacaaaacaacccaataactggaagttgattctttatgttataaattaaacgactttgaagaaaaaaaacaaagacaaataataatactaataacagagaatgttgcagaatggttttcctggagaacgagaagttgaaagctccggtggccggacggtgttggtgggtataaagttagactctccgagtagagagttgcttacatgggctttggtcaaagtggctcagcctggtgactgtgtgattgctttgcatgttcttggaaaaaatggtaagagaaattggatttttgggtgttttgggtaattgggttttgtttggagactgattaagttttggtatgtggaatgttttgtagagattttggatcgagatgggaaatcaacgcttctttcgcttgtcaaagctttcgactctgttcttgctgtatatgaaggtttctgcaacttaaaacaggttgatttctcacacaatattatatagcacctttttatgttggtttcatttcattcatttgctccattttaattttgttgtatgagacaatgatgtaagtaagaagacaaagtaaatttggatcagatatattttctttgtcgtttctgtcaagttaattttccagaaataccaaactcaaaacaagctgaaaattttaatgttgggttacataataaacatacatttgtttatttatttttctccgttgtaaaattttgcaggtggatcttaaactgaagatttgcagaggagcttcagtgaagaaaattttagttcgagaagctgattcttattgtgcgagtagacttatattaggaactgctcgaaaccaccatacaatccgttcaactacttctgtagccaagtattgtgccaaaaaactggataaggattgtggtgttctcgctgtaaacaacgggaaaattgtcttcaaaagagaaagtagttcatcaggaaaaactggtaacccaaaaggtttagttaactcatttcgtacattactaaattgggtatgtcggaaaaatcttaattgggtaaattttttgtttgcaggtaaagaagaagatcaacaccgaactgatgttgtgggcgggttgtcccttacactaaatgagaccccaaaaggagtaaatgatgatcattgcagtgactgcaaagttccggacttcaacgagagcacagttgaaaaaaagagctgtacaatctgtacccccatatcttctttgtcacctaaatcttttgaccaaaccactaaagagagagaaaaagacgagtctttggctctagttcaggtccataaagcagagcctgcagaaaattcaatctctttagtgatccgagaattgcccgaagctagacccggctggccgttacttcgatgcaccaccttaccggaccggagtgaaccggaaaagattatggtgcggcagatctcagtggttcagtgggcaatgcaactcccaactcggcaaatttcatctaatggtgagtttggtcctagtgaagatcagtcttcttccaatcttaatagcgaaagtggagcgattgttccggtggattcagaaacgacaacaacgaaatcttcaccgagtaccaaaaccttaccccgccgggagttggagggtcttcatgagaagtactcgtcaacatgcagattgttcaagtatcaagaactcttatcagcaacatcaaatttcttgccaggttcgtttcaaaaacgacttactttttattttcattacagtttttgtttcaggtaaggttctaaaaaccatttcttttcttctcaaaattctagaaaatctgatcggaagaggtggaagcagtcaggtgtacagaggctcccttcccgacggcaaagaattagctgtgaaaatcttaaagccatctgaagatgtaattaaagagtttgtgcttgaaatagagatcattaatactttaaaccacaacaacattatttcccttatggggttctcttttgaggacaataatctcctcttggtctatgatttcttatctagaggaagccttgaagagaatcttcatggtatatacaatttgtttatgtgtctttttcttttttatgaaaattttacaagtacaataaccaaatttatcaactatcttctttcttgtgatgaataataatttatagggaagaagaaagatgtggttgcatttggttggaatgagagattcaaggttgctttgggtgtggctgaggctttggattacttgcatagcggttgtgctcaacctgttatccatagagatgttaaatcctctaatatactgttatctgatgattttgagccacaggtaaccagtgttaaagacactgagatctttgaagtttgattactattagttactactttgtactgatctgctttctacatggactttttcagctctctgattttggacttgctaagtgggcttcaaccttatcatcacatataacttgtactgatgttgcagggacttttgggtatgtgaaaaatctgatcttattatcacaactatattatgtattattgtctaatctctttttagtttgtataagttaatgctaatgacacctgattttgctgcagttaccttgcacctgaatacttcatgtatggcaaagtaaataacaagattgatgtatatgcatttggggttgtactcttagagcttctttcaggaagaaagcctataaacagtgactatccaaaaggccaggagagcctagtcatgtgggtatgtctctctacttgaaaaggaaaaaaatgaaccttttaatgtatgtttttctaaagaattttcttttttaactggggaataaacttttttgtgcaggctaagccaattctttatggggggaaagtttctgagttactagatccatgcttaggcactagttatgagcaggaccagttggaaagaatggttttagcagctactctttgcattaagcgagctcctcgagctaggcctcaaatgagtctcgtaagtcagctcacttattgctcttaaatttcttcaatgagcctaggctgtcagctgtttggtgggcatggaatagcacataaaagttatgaatccagacatgcaatgcgaacccaattttagaattcagtacaaaataattaacctctttgaaagtcacattggcatttaatgatgttattgttatacccttttacttcaattgttgaagagtttcaactccctattaatattttatagtacactattggaaactagacaagctttattaatggtctataattttgatgataatcacaggttgtaaaacttcttcaaggtgaccctgagataactaaatgggcaaggctacaagttcttgatgtgagggaagctgacattgtggacgaggacgaagcttttccacgctgtaatctgcaatcacatctaaaccttgcactgcttgatgtggaggatgactcagtctccatgagcagcagcagcattgatcaaagtgtgtcattagaggattacttgcaaggccggtggagccgctcatcgagctttgactaataactacaattttacatgccaaatcctaaaaacttgttaattcacctatgtgtgtgattcttttgtataatagtctagccctcctccctcccctcccaaaaagaaaaaaaaaaaaggtaaaagctaaaaaagaaaaagagagacaaaaacaaatgtacaaagagggttttggatgagaggttgtttgtgggtgttccctcctccttacccttttactactccacaaaacttgttccttgttgttgttgttgttgttttttcttttttcttttttcacatatgatttcttggtgttgggtttttaatcccttgatcccaattacagagcgactaatagtgtgttgtaattctaaacaaagacaatgagtttgtaattcttattaattaagaaccaaaaaaaaaaataataaaaaaaatcatatattatctcatttctctaataataaatggtaatacttgtcaaaattcaaaagtgggcaatacgtaggtagtggttgtggtttctacaacatccaacttggttgtcaattgtcatggtctttggcatagaattgcttaatttgctttgcctttcaaatcaaaaccattgttcccccacacccatgttcttcagccattgcccatcaccatctccttttttcaatcttcacatgatgcttcatgtttagtgcgcctaaatgttgtccctacttttaagtcatcaagtcaatacctcaaaaaaaaaaaaaggttataatatatatatatatat

SEQ ID NO: 30873 - DNA, 3966 bp, Cannabis sativa
gcatcttgtgcatactgagctgcaacacttggttggtttgatcagtttttctatattcccagcttgttatgtttttttcttagtactaagctatgcaagtattgagcatttgcaggccctgtgctttgaaccattcttgagaatgcactttcttcatttgacaacaattcttcaggggaatcatactcaagaacctaaaaatttaacaataacataagataaaaccttgacttcttttctgaatcttgtgatgtttaatgcacattactcaatcaaaaatttgtgaagtttgatttacctgaccagcatcaagtacaagtacccgatcactgtcgattattgtgtttaacctatgagcaataatcaacatagtacatgacttgaattcttcgcgaattgttttctggataagtgcatcagttttgacatcaacagctgatgtcgcttcatcaagaacaagtaccttggatctccgtagcaatactcgagcaaggcttagtaattgcctttgtccaacgctaaaattatctcctccttcaacaacctagacacaagtagatgcaaagtacttaagcgaaaatcagttcattcgacttattttcatactctcaacttacaacaaaatatataactaaaagtacataacaatcctcaatactatgcaagtagaatactatgcaattaggatttgaagcatgcattgagtgttagagagtctcacattactaatgtgtggaaagataatagaatgtataagatgaatggactactccttctatagtcaattggttttgagatggaaccccattcacctatctcaaattctaacatcgagcatgctagatttcccagcactaatataacaaagtagtggttagttagtttgacagttaatgctgttagtaactgatttcactttggtgcaaatatgtattggattgatacttagctagatttagtgactctcatctcttggcttatgctttagtaattaagaacttttgaggagaccagagaatggaatctatatagttcactgttttgatttatgctttttgtatttgtggaaataaggagaaaaagatcagggcaactttctggatacatgctcagcttcttaagttttggtcttgggaaagagaaaaagagttatgtgattatatttacctttgcatccaaaccaaaaggtttccttttgataacatccttaaggtgtgctctttctaacgcggcccaaagagcattatcagtatgctcaccgaatggatcaagattaaaccgtacagttcctgcgacgaaaagaaaaaaatgttttcttgtgttctttccttccctcaagccaactaatgaacattcatatatacattgcatacctgagaaaatgacagctgattgaggtataatgctgaggacttttcgcaaatctgtcaatccaaacttggaaatatcataaccatctattgagattcttccttcttccatttcaactatacgaaatagtgcattgagcatgctagatttcccagcaccagttcttccaactattccaaccttctcacttggacaaattttaaaagacaatccatgcagaactggaggaagtccaggtctgtaacgcaggacaacattgtcaaaactaatacctcctaatgatggccatgttggtggtggttggttgttttcgattatatctggtgcctcgtgttgcaaatcaatataagtcccagcacgctcgacagcatttaaactattttcagctatactagctactcttaataaattactaagaaggtttgtgatatttaatgtatagctgagaagtaagcccattactgatgccaattcagcttggttttctgctcttccattctgcaaaacagcaaagcttgctgtgaaccaaatcataatacctcctaatgtttccaatcttatgaagagccagctagttgaagccatgtctgctagagcaaatcttgtattgttgtccatagactttccatttacataggctattcgatcgcagactttgtatgcgcgaatagttgacaaaccatttagtgcttccccaaattgtgcataaacaggagatcttgtaatggaatccaagcgtttcacttcacgagatgtgttctgcatgaataaggttcattagtaatggtgagcagaaaaaatgtttattggcttcaggagatcttaatcaaatactgaataatactttacatttgtttgacttgtgcaaaagaaaaacactgctatacttaccaatttccactaaacttaagtgacaactttctttcatcaagcttctgttagcttctagtgttataatttgtattacagagaaggatcttcgtttcaatcttgtaagattaatactagttaacaatggttgaaatcattaagttatgtaattatttttctaaattgaaaaaggttaaccctcacggttttgtttttgaacactttcccaaaaagtctctggagtaggtggaatacttataatcaaggcaattcttacctattcttccgtgggattaggtttgataccccaacaaaagtgaaacttttcataagatcatgagaatgacatgtctgataactgattagcaagaaagtaataagagaactttgagtctaaaaagatgttacttgaataaaaaaaaaactcctttggtgtataaatttggataaagggaaagaaagtggaacatggaacaatgtcaagcatacctgatagtataagtaggccatatagaacaagatcaaaagtggcatgatggcccagagggataccgtgctcacaattcctattagcgcaaaagttgaaagaagcagccacatttgacccagaaatgaattcatattactagcaacattccgatctatatcgcctacatcttttgaaaacctattgattattcgtccagttggattagagtggaagaaaagcattggagctctcaatgtggaatgtaacatggcattgtgcaatcttttggctgcacctagactacatatgatcagcaaaaaagagtttgctagtgtcattgtcacctgaatcaacacattgcagtgatcagcatagcatttaaaccatgtcattgtattataaccaaaatgaaattgttgccaaatatggatcaatgattagagcacctggccaaatgaaatcagtgcataaacgaaaatatagaattcgggtttatgacttcttgatctgctttgatctgtccataaacttagccaagtgctacttgaaactcgaagaacttccgttaaaaaatggaaaatcgagacaacaatgaccacacaaaatcctcctagtgcattttggtacctgcaaatagaaacaaaatcaatattttcaaaatatcaaatttaggtaataagagcatataggatgattcccatttagaattttaatcagataaggttatataattttgatttccattccatataagaaataatgtttatataataattcaaaatacctttgatttaatttccaaataagaatctttgagtttatcacctgtttgttttgtttgtttctgttatttgtgttcttgtttggagcttggtatccaacagtccaaatgaagcacattcacattcatattcatgtttttattttcattaggattttttctttttccatttaaatctttttaatcataaagtttagattgggcaccatattacctcatcaagacattccaaccgacaacaccagtctcccgttcctcttccttgattaggacaaccttctccaaattccctttctttgaattggttggatcagaaaataatccatttagaactggtactggtatattctgaaaacagcttttattgtccactttttcttttacattttctccagttttcgatgcattttccattagtttttggaacatctttccatttttagtcagctcctcataggttccttcctccataatc

SEQ ID NO: 30874 - DNA, 2043 bp, Cannabis sativa
tagttgatattggctgagtacttggacaagaaatctattcccagaatgatatcagttttgtcctattggattttcctgataaggtttttaacaaggcaactttaaatcatgttaacatacttgcactttatgaagcaagtaaagaatgtaggagtgagattattgacataacatatcaagaaacatataaatatattacactcaacaaaaaagtatcaacacaagtagttctctatgaaaataatactacttgcaccacttaattaaaaggagggtacattgatagagatagaactagaacacatttcaccaaattcttctttatacatttcaaaagaatgtatataggtgtctaacatattcaattaagtgtcaattttgcagacttatttacaaagttattaacaacattaacatttgagaagacgacatacaagattaaaattcgttgattaaaatatctcaacgaatgcctaaataagagggagttaattcatactgtactttttttcttttgacaaaatttttcagcgaagtaatgagtcaattattatgaacattcaaggaagagtattatgaaatattatatatcaatatccaaatcaagtatcatcattaatgtttgactgtattttttttattacattaatttaatttctaatttttttgattaataattttatataaataagagttatctgaaaataaacaacttagaaatttcatttaatttctcattctcttttcattttttttcttaaatattttatattattttataataatttgagtgatatgaaattttgtggcaagtattgcttgtattatagatggtgtttgtagatattgatatatatgggaaactgtacgtactaaactcaatcaattgacgaggacagttctaattaattttgatcctttaaatagtgttttttctttaatggtgtactataatattaatattataacatgccaagagagagagagagtatggctgaatgtggagggccagggttcgatctgtacgtatatatagttcatatatataaatatgatacccctacctaccacaccaaatatttcttcaacttataacccactaaaatgataaccatgaaggcataaaacaaaaatgaaaggatttcaattaattatgtacctttcactctgtcactttcaaaaagaaaaaaaaagaaaaacaattaattatgtacctgattatagatcagatattcagagttttctccagtatttttgttttcttgaaacaaattttctccggaatccaatgcacatgtttaattactagtactggtgtctcatccttaagaagaactacagtatatacatggatttctaatattctatgtacactcacaatatattttgaataaaattacccttaattatataaagaaacataactgtaaataaatttcttgaacagaaataattttataacaacttgattcaacagaaactggtgactcaaattaactaggtacagatataaaatattgcagaaagtaaaattaacttaattttctgattaaatcttgatgaaacacaaagaacaagaactcattttctgatcttgatgagtgcttcctacctcccgatccaagtgtcgtagaaattttctcccgaagatagcgtgtcacattcaatgacctttttactactttttaagaatagaaaccagggaacaaaaaatatagttgaacaacaaatgccttaaaaaactatagaaaatattagcttaaggaagagacaagcaatgacttgcagcttggaaagtatttaaactgtttaagtactaagctttacacgttcatctcacaatctgaacacacaaaaataaagttcccaaaaagaactttcaattatgatcattatatcagatgcgatgaatatatttagactaaaactgagctaggttctttattctagctccaaattcatacagaaatcaacgaattaatgaatgaatattggaaataaataaagaaaaaagcagacttaaattttacaataagtatagca

SEQ ID NO: 30875 - DNA, 2831 bp, Cannabis sativa
ctaattagccttttttttttttatttcttatgtgttggtatgaatttttggtataaatatattttgttgtacgatatatttattttttgttgtatgatatggttatcctatttttgcatcgtgatttagcaatgagctggatggcacgtggcctgtattttcctaccttggtggaaggaagtactgctagcaaccctcgaaggttgatataaatgtctgtcataacaagatgtccgagctaagtaattaaaagacatttgaccaaagtataatctcgtgatcaacccatatgcactgagcaagatatgtgagttggcaatttaagagataaatctcttctcttccaagacacgaagataatccctatattctttggattacattagggaataaaagtagtacaccttgatttcccattccttgcattgtaattatagaattaatatagtttcctattttatttattatagattaagggaaaccattcttcatgtaacaagctcctgtaaatagtggcataaactcactattgaagacacgaaaattaatccagaagaacactcaagagagaaaagtgatctaagagagagaataactcaaagatcaattgtaagagctttaaagaggaagaacacttcattctttttctcaagtcaatacaacaaaaaggggttaggctattaccattctcacggggtcgaacctctagaaaacctggtgtttttttaaccttatcatttttgctttctattatttattttgtctaatcattttctcttgactcactgtcgttggctagaagcgaggtcaacattttggtgctttcattgagagcaaaaacacaagcttttgtcttaaagtcttgacaggttaacaggatggtggtacaaactcgaagggaggcctaattgagtaaggcaatccaatggttatagatgcaaacgtgcaaactcttagaagcacgagaggaccactagggacaaaccccgaacaaactaatacgcaaccaccaacggcaggccacgaagtgacttcccctctagctgggttcactccaggcgtacaagagaatgggaacaccagtacggcgaccgatcaaactactcctagcaccgaggtcccgtccactaataacactcaaaggcctattagaaatgacactaaacttcaaaatttataagaagcactcgggcctatgcaaggtcataacaacaccttacaccatgattagggagatctctaagcaactattaaccttgcctttgatgagaaaagacatcaattcatagaatggagagatcaggagatggaagtcgtgagggctcggtaggcagccatagacaagtgttccaggcaaaccaccgtgctgatcagaaggtcctatcaggttaccagtcaacaaccaacagctgtgtctagtatccccctaagcgagttagaagggtatgtagctgatcataccgcatagaacataatggtcaggcgtccaatccaaggccacaagtccaaacagtgggccaaacgatagacgaccaaatcttgccaaaccaccccttgggaggaggcacacattccaacaactatactcatacagaggtatcaggccaacctctcatccaaccaggtcaaacaccaagatagcttggtgcctcaatgttcgatcagctaggcactatgcatgacctcagacacaatctaaattgcagaaggggactgagtaagaaaaatagtccatcaatcgtccagctagataactacgcccaagatccagttcaaagagatctcaatgtgccacaggtcggtcaggaggttggccaagttaatccacttgtacaagtacaaatagatcaacttaaaaacatggtataaggcttgactggcctaaaacacacagatctcgaacttgaccgggcactgggatcacccttctcacctgaaatcgaggctcttaacctactcctaaagttcaagatgctagtatggaaaatgtataaggaaaagaagaccctttatcccatttgaagtacattaaaatgcaaatggacctgcagggagtaagaggcaatgtacggtgcaaaattttttctaccacattcgtagaggccgcatagcaatggtatttcaaattgcctctaggaaagtttaattcgttgatttctttctcctctgactttcacacacagttttcttcaacttgtcagcatcgctcacaccaaagagacctacttgaagtgaagaaaatgctaggagaacctctaaggacctacattagcaggtttatgacggaagtaacaaaagtttaaaggtttactgaagagggaagattggaagcaatattggggggcattgagcctctggaagaattatggaaagatttcaagagattaactgtgggattgatggttgagtttttggattgagcagatggattcattaagctcgaagaagcagtacgacgtgtggatacagtaggacaaaagaagaatcagcaacgcaccactacaattggtgcatttttccaggattcacaacatcctaatagttcaaatccaaatggaaagaaaagcaagttcactggcaattctgagcagcatcctatagagaatgcctctaaatttacgactttttcaatcttaacagataatataaaaacaatctatgcaaccacccaatttatggtattgtacaagaaaccctctcccataaagaaggacatgagaaaaagagataaaactaaatttgttgtcctcaaaagtgagtgttttaatatttatactcgcaagtgcacgaatcgtttcggaatatagtgttcatgtaagtgcaaggtcgaa

SEQ ID NO: 30876 - DNA, 4263 bp, Cannabis sativa
tgtactataaacctttttatatgcatctctaaaaatatttttaaaaatataataaaagtaataagtatgtatatattgttttaaaaaaatatatattattatccctatattgtattatttttctaactatataatatgaaatttatagatttaaatagtatactacaatacatattttagaatttacataatttatatttactatttatattaaagattgagatattcaattttaataataaagtgaatgtaagactactttatttatagcttagaaatacaacacacacatcatctccaaaccatgtggaactttgctaaaaagaaaaaaaaaacacaaagttatactaaattcactaattctaataaaatagataaaataggtgaacaaaattataagatgccacttcacctactttataaaaattataactaattagacaagattaagatattcaatttcaattacccatgacaaaataaagtgaatgtaagactactttatttatagtttagaaatacaacacacatatcatctgcaaaccatgtgggacttttgctaaaaagaaaaaagaaatcacaaaattatactaaatttactaattctaataaaatagataaaataggtgaaaaaaattataagatgccacctcacctactttatactttcttttatattaatatataaataatttatatttactatttatattaaagattgaggtattcacaataataaagtgaatataagactactttatttatagcttagaactacaacacacgtatcatctccaaaccatatcgaacttttgctaaaaaaaaaaatagagatcacaaaattatactaaattcactaattctaataaaatagataaaatatgtgaaaaaaattataacatgccacatcacctactttattaaaattataactaattagacaagattgagatatttaatttcaatcacctatgacaaaataaagtaaatgtaaaactactttatttatagcttagaaatacaaaacacatatcatatgcaaaccatgtgggacttttgttaaaaaaaaaagaaatcacaaaattatactaaatttactaattctaataaaatagataaaaaaaattgtaagatgccacctcacttactttatactttcttttatattaatatataaatttatataaatagtacattatttttttgaaagcatataaagagtaaattattattactattaataagttacatttgcaattttcaattggataataactatatacttttaaccaccgtgatatatggagacaacaattcagagaaaatctcaattatttcatatcttatcataaacaaacagaacccatctttcttctttctttccttttctaaattgaaaaaaaaattatttaatttattcgtcagatattttctaataataaaataaatatctgtgtgatagacagtcaaaagtctaacctttataattttcttttaggaatatatttttctttctctttgcttgtgttccaaagcttttttcaataaatccttaccgggaaaaaaacgcttttcaaattttgacgtaatttcgttattatgtatcaacatgttgttaaaataaataaaactaaaattgagtagtcatatgactttcgcatcattgtttggtgagttatggaagtcaagctcacacatttgtatatgtaataagttatgagattagaaatgagattaagcattatattctaggattgtcgacttaatactaagtggattacttatgttttttttttttgatgaatgattaattattgagtattgttattgggcaccagtagtgcctagcacccttaaacatgttgttgttttgcgattagataacgatattatttaaatgttattttattaaactatatgggatctgatacttaattagatcaatagcgatatttataagtaggagaatgcttggcaccacggatactttttagcatttctcttaattatttaagttcatctgcacaaatttattcttagaatgagaatcaattatgtggtttttaatcaaattttacgctcaaaacttatattcccttgtgtgtgaataaaaatgttatcttccaaaaattgactgggcattcttgaatgaatttcgtcttcattgtgcttttttgattgccacttgattgattcaaagaaatacttttgcctagtgcactatatagatataatcttgattcttgacctgctaaacccattattaaattaccaaaaaaaaaaccattattaaaggtaatttattgaaaaaaaagatgaaaagtctattaattacacatatatcgatgcatagcattgagagaaaagaccacattatttgactattggttaaaaataatgttgtacattattacgtataaattttgtgtcatccttgaacaaaatctggttgaagtaattaactttgtactttaaagcaatgccctaacactaaagccacataagttttggcccatctaaattgggtagacggccttaaattcaacttttctttacgcctattaactatatcctctacctctactatggacattcaatatatttatgtatacataacattaatttttctttttatatataaataaaatttaatcatatatctggatttcaatttatattactacatacagaattttattttgatgtacaaacgtttcttgtggattttttttatgttgaattaatctcccaataataatactaatataaagaatgtttttcacaagaaaaactatataaggaatgatgtacatgcatatatggtactaagtgattaatgcataacagtaacaaaaaaacaaaaaataatgatattgagggtttctatctcaggtaaggtagttcatacataatccttaatccttatttttttttttaaaaaaatacatgtagctaaaaggaaaggaaagaaacaatcagacttagcgaatcctaagttatagttacacaaacgagaggagaaaactaagttctccaaaccgaatccttatctaaccgtaatgcgtttcttgtattttgatgagctttaccgttgtcattcctagagatgtgaaaaagagatgcatctggaaattgtgatagaaattctcgaatcaactcgacgaggctggagagagctgaattgtccttctagttactcttaagctttaagaccaattgagagcactcagattcaatggagttaaggggaacgttgattgtagaacaccatctaagagcttccacggggcttgtgcttcagcaaagagaggtgtagaaacaccccattttggaattgataagcctacaataatctggttttgctaattcttgaccgttgcaccctaacctgttctaagctgctttgaatcaaggacaacatcaacacttagcttgcagttgcattgttggagaacatgtgttgatggagcactgactggtgaatgggactgatctgcgttaatgtcctctaaagtgctaaacataggtttgagattttgagctgcctagtaatcttgcagtaaactacacacataatcctccacatcaaaagattattagaattttggttgaaaagagcattattcctcctgtttcaaatctgccaagtcaaactgataaacaatgtgaagttttctttgttaaggtggtctaaacctcttaagtaatattctttaatatcacttttatgattgtagtgtaaaatttgtggagtgaatatttccttcaaacagacttagctttgaggcaatctaaaagagcatgggtaactgtttcaacattgcttttgctaaaagaacagtaagggtgggcgaggattttcttgttaaataggttcaagccataaatgaggacacgattaaaggttttttttttttttttcaggtaaagtgttttatttttggtgctctaaacagttttccaccaatgtttaaaatagtgagggttggaagatgagggtagtgttgacatggaatcggaattggctaaatgataggttgaattgacagtgaagataccagaatgatggtgcccccagatgaggctatccttcgaggaaggatcaatgggaacctgaaatatcacatttacctaatattgaggtaaaaattgttgaagtctaattatgtcccaattactatcattgtcaatgaaaaaagagacattgtgatcatcaaggctaaagttattcaaaaaagtaagagacttcaaacctggaatcca

SEQ ID NO: 30877 - DNA, 1616 bp, Cannabis sativa
agaatccactttaacacttgatgcagcagctcaattaactgcaagaacaatcaaaacacaagtggctaatatatataaacaatacatgaaataacctgtctctagtaccaagtgatctttgtttcagtgctacccaacaaatgactctatgcttaatttggagtagaaaaagatatatagtaccatgcatacttccatttctccaacccttctagcttgctgaaatttatcacaaagagctgcaatagagtaattaattggtttgagatctgaagacaattttatgtttttgaaaatttaaaaggcctttgattccacctgaaaatacttgattgacaggggtgttttcaaaaattaaatttggatatgattttaagttttaagcttaaaaatgaaaacaataattttatgttttttttgttttcaaattattaaatctaaaaactcttcaaatgctctcttattttttaattttgagattcccaactaaatcacaaatccaactttttaaaactcaaaaacacaaaattacactacaactaatcacatatttagaaacaatttttcacatacaaaattcaaatttttatttccaaaacaataattcaaaacaaagtaaatgcaagaccaaaaccaactctaccaatttgaaactccaacttcctagtccacattacaacgcatatctacattacatacttgcgaacccaggcccatttagccccgagcagagtcgtacataacaaagttagagaagtcggcccagcccataatagcccaaccataccagaagatagcgcatagtgccattgaaaaagagaaatttctacaaaacagattttcttttttcttttacggaccttttttttttatttggcaaaagtgtaaacaaattatcactttcaggtatgaagtaatcccttagaaaaaaagatgggttttactcaggctgagtagcgaaatttcaataagaaaaaatacacaaaagcatcaaatatattagctcaataaattaattattcaaaggtaagagaaaaaaaataattaatagaagcgaatgttatgcgggaaaatcagttccaaatacaaatatttaaagttaatttttgattgattgtttgtgttttaatattatgattatttcctgatttgtttttaagttttctttcaatattttttattattatgtattattattttatttaaagaaggaattatatggtcaaaaaaataggtatttcatcaacattaattttaattaaaatttcagttttatttctatattaatatcaacaacgtttataataaatttcatttatattactttgcagctagttttattattttgtatgattaatgtggctaattttttttataagactaataatgtagttagttttagttttataagaccagtataactaattttgattttataagaacaatttgattgggatgacttatttttaattttgtaaagccatgactagttttgtttttgtaaagttagtttaatcaaataataatacatcaaatttaatatagttactttcagtaatgaatataatacagatgagaataaataagtttagtatgaattttatttaatatttatt

SEQ ID NO: 30878 - DNA, 4902 bp, Cannabis sativa
attgaattttctattttattaaataacaaatattgaactctatattttctaaaatagtactaaatagaattataaaataattttttgtcaaaataaaacttaattgtaacccgatctaaaagtgttttgacaaaattgattacgttttctgtatctattagtgctaggaattatcttcaaattgattatattgattatatcaaaaaaaaaaaaataaataaataaactcagaatcatatttctactattttaaaaaatacaaaatttattttgtcatttaatgaaacaaataatcaatccaataattttgcaaattacaaaatctaaaatagtcttaaccaaagaaaaactagcaaactgaaagcatagtaaaaattaatataattagaaaaattctcaatcagtttttctaatttatttttacatggagaggtttaataagttatcatcctaatttgttagagtattctataaattttcacaaaattctatattagttctctagctctccctctccctcttcttcatgtttatatttatatttatttatgataaaaaataattaaataaatataatttttagtaaaaaaataattaaattacaagaggactgagactttcttttacaatctctccactattagttattagtgacaagtttcatgttttgtgttaatttaattatgttcaataattaggcatatattattctcttattagtcattctaacacaattattctactaattttttacttaaagctgaataaatattaaaatatatataaaagatagctcattattcaactaaggttctaatttagttggacttttaatagctattttgggacttctaaagctccaaatatactttagttaggtaatcaataaattttaatttttagctcgaattttttttttttcaccaaaaatcaattttaatagctttcttaaaagaccttcttggaaagatagaagcagaaaccaaacaaaaagtcaaccaaatagagcttaagtatgcaatggtagaatgtctactcttcttccattgtagtgtttgtttgtttggtaatattatgttattttccctcaaaaagaaaaaaaaaataatttacagtgtatatactatgtttacagtaataatatttaattatatttttaaaactttcgttaatacattactattaaattttaagttattatcatttgtataattaaattaatttttaaataaaaattaaaattttaataatataaactaatcaacttcgtcttagttcaaattctactgaaaagtctactaagaatcaaaatttatggaagaaaaataataaaaaaaaaatagttaatatattcaatgagctcattcaagatttactcgttctatacaaaaaataagaagaattttaatttcaacactttaggatagaggtaagtaaaaaagatatttttgtttcgttgtttgcaaatcattcgactaaatgtcacgtaatcattaacttaacactaaacaatcatatacttacagaagatctaaaaatataacttaaatattattaccattaaaaattaaacttaaatatttttctgcaatttgagaattaaacttatttatgcggcaatttacttaagaaaaaaaaatatatatcattgtaagtgtgggctttggaatctaataaatatatggctgtctcctttgtcctaaccaaacatagaataagacaaccaatgaaaaagaaaaaagtaaaaaagacttaaatttgtaataataacaattcccaagcaaagaagatgagatgacaaatcaaatttcaagcaaaatggcatctttcttcacactcaaaataagcaaaaataaataactgagaagaatttactttacacaccaaaaaataaagagaaaacaaatatagaagcaagcaagcaagcaagctactgttgtgtagcatttttaggctgcaatatttgaacaagtgaccataatatatccattctgtgtaagcttctgttgctctgtccctgccaaaccattaaaattaatccaaaaactccacaattattatatcaaaatattacacaaaattatattcatcattaagtaagaaatggtacctcaaccacaaaacatatccatgtcttatcaccatgagcttctgttactccttttaagattgtaagaccaaggcttttaatagcttctgctatctccaggaaatggctgcattcttcgcacatcatctgcatatcaaatccatcactccaaataaataaacactctcactcaaatggaaaaattaattgcttctttggatttgtcatttcttcaaacctttaacaagtttaactaaacaaagatttagaaaagaaatagttgcatacctccacaaccatctgcccattcttgttcagattttccactattatcgaacaaacttttagattgcctcccacctccactgcccagctcgaaccccgctcatagctcgaggattccagcatgcttgtttctttatgacttgactgcaaattcatcaacattttttaacaacagcattagaaacaggccgtgcacgatttgtttcataacaaggcctttaaaaagaaaaactttgagatgtgtaatcccttcttttacagtaaaagcaactttctaaatgaacttcaactctggaaacaggtgaagaataaaataataagtttaccttcacatcagtatatttatttagcttgtcagcatgcttggcgatactttgaaggtaaagcatgtgcttgatcgtgcgttccaacagtgaatcaatactacactgaacaaatatcatgaaattttaacacacaagaaagcaaaaacgaagcataaatatgaatagcactatagcaggactgcaattaaaaatttccacaactttggcgaggataaccgaaatttacctttgctccacttggtattagctcccttagttctttaatacggtcttggatcagttgtctatctcttggcctcggtctacagttttcaccaggtctagctctctttttgttgttcttagcaggtgctgaagacctttcaagctgctcgctgcaagaacttggacagtttgatgaaaacccttttggggacattgcaccgcagacccctgatgaactcaagcagtgtggtgtgtcctctcctacaagggatgcagggccattggaatgatttgatgaatcagtaacaagcgttgtatggcttgaaggctcaggatagttttcggttgtcaacaaagattgcactgatttacaaaatgacttttcactcctaacatcactatgactttgacaaacactagctattactgcttctaggagaggttctggatgaaaatcagaagttaactggctacagattgtttgcccgggcatctcgggaattctcccttcacttttagttgcttcccaatcaaaatacttgcttttcttgaaaaaagatggtccaagtgcctcatggagctcgtaaccagcaggaaactctaaagatgccgtagatgtatccatatggcttgactcagttagaaacttcagattttccagatctttctggaatttaaaatctgagggctcacttacgtgcagcaccccgttttggtagtaatctacattatccaacctaactcggtcacaaatagcagagtcaatagggacagatgaaaagttcacagagtcaacttcaaccttcttagctggtacaatagcattgacactgtttattgaatccacttgagtaactttgcagctgctaatctcctttccacccttccacttatcactcatattcatcccaattactttgtgatgctcaagatttagaatgttcgattctgattgagctaacttagtatttttgtcagccccacttgcgggcaactcaggtcctccgttgttaatcacaatatcagctgtcttttcttgctgattatcaagcagtgaccaatcgtaagaactatcattgtctttccccaagtacggaaaaattgaaaaccatatatcttgcctctcttcgttcaaggctttgtctaaattgtgcaagcagtcagaaatagcctctggagcgaaaccttttgaaggtatatctggctgacaggcaaataaaatatatattaattcatgtatttatgctttgtccagaaaaacattctttagttcaaatggagaggcatgcacacgcacaaatatgtgtgtgtagtgtatgtagagagagagagagagaggattaccaaatttgacgaactattcatactggatggcattgaactaggaatgcaccctaatgaagaatcttgaagagccatcaagacatctctaatatgagcaatcatcttcatatcttcaactacctgttcttcccataagcagaagaaacatgtaagctcaacacaaataaagatcatggaacacaactcaaaaagttacacatgtaagccaagtcaacttactttattcaaagatccaagctgtacaactccaagaggagcaacagctacaacagcaatagtctgcatgagataagagtaaaatgccacttagaaaactatatctagagcattaagcagaaatgactatgttcagtaaaattagtagaatcccgatatgacttgaatatggatgtaaaaagaatcatctatcgagctcatatgaatcattatttttcttcaacagtgaccaatgacaccgatcaaattgagtagctttcatcaaagagaccttaaaaacgcatgaaataaattttacagcttgaagattccaaaagttttagatatggctattataatatttgaggggataaaccataagggtaacacttgataaaataacattgcaattcaactgtctttcatcttttgctaatatgttattatcacctccaccaa

SEQ ID NO: 30879 - DNA, 1599 bp, Cannabis sativa
ttactctattattatgagaccactaatatggaagttaagatgtaacccaccaagatagaagaatgaggcctaaaataaccccatacattttattatatggtgatatgcaactctaataatttacactgaccatagaatcaattatttcgaaataatttttcaatatgattaaatttgaactcgagtcattttgactaaactcgaagttacttttgaaaaattaagtggaaagtattactttttcaaaaattattttattgaaattaaattcaaattatcaatttaatttattttacaaaataataattattattatttagcaaaaatatatgtcaagttattagtattttccttatattatatatacaaagaccaaaagaaaaagaaacataaagagtagagagatcatagtacttttgtatttttatgtttctctcgtgccaatttttctttttaattgaactcatatactttataagtaaaataaaaataggctagtgttttattaagaaaaaaaaaaacatgtgcttgtttgttgtgtgtgtctctctctcttttatatgcatttcaatataataaaatacactttcttctccactagatgagaaataatcaaaattattttaagtatttataaaaagtttttaatcttccttagaatgaatctgttatctaattatttgaactattatgatatttataatttttagctttaaaaatgactcacaaactacattttttcctttttcttttttctttaaaaaaatcatataaaaattgaaataagataaagtaaaattgagggatttgtactaaaaaaagttcaatattgttttactaagggatctatactaaatcaagttaatttcttttttatcacaaaattatgggatgtaatgattagagcactaacaataggctctttaaaattgttaagctttgaaaatttaacacaaaagtggtaaaaataggcttgctttactttataactattttagctcaatctctattcactactattcattcttcaaacttatttcaataatatttctctcatctcttacatcttactttttcatcttttcttttcttgttaaatatattttaaataaataaataataaaaaatatatatttaaatgttataaaaaaaaataaagaaattaatatatagtaatatgtaaaaatttaagataaatgaataaaaagagttttggggcacgttcgtggtctattatattgtattatataatatattatagtattgtgttagattatattgtaatactattatttaataaaatgcaatatttaatattgacttgtactaataggttgtgtaaaattgtaaattatttacaataaacttgaccccaacccgattgcagcttggacttggacccagaccccatttcgaacccgaacccagacccaggacccggaacatgccccaaacccagacccaaatcgggacttggaccctgaatccacacccgaaccacaaatcttgcccccaaactcgaacaccgtaccccaacccccggactcgggttcgagtctggagtccaaggtcagggtttggggttcgggtcaaggtcca

SEQ ID NO: 30880 - DNA, 3783 bp, Cannabis sativa
gggtagagagtttgtcaaatggattgactttaaatatgagaggctccctgatttttatttcttttgtggtaaacttgatcataccaagaggtattgtcattttttccttcaaaagtgtgatgaaagtcagactgaacctccttgcccttacactattctcctgcgtggtaaggaaaaaattgtggacaaatctatgccatttcaataccctcaccctcctgccattactgttgttgatcatgctcctgttaacctcaatcttcctactaggaatttcttggataacattatctcttttccctcatttctggctgttactggtaactctggatcagactttctcagtcctcatacttcttctactgtcatgattcctactcctcttagtcctaatagtggtcatgcttttcatactggtctcaatccttttggctgccactctttgaggccttcagcattcacttcttattccactgattctttggtgattgctaccactgcttgcactaatgttatgcattctgttgctatgggtatttcgactaatcctgctgctgaggctgtctctgctagcccagttgtggttgttgagactcaggctgaagttggccaacctgattctttggttcgtgggaaagggctggcctctgcttcgggagttaaatgcccatctttccatcctcaacaggtggttattggtggttctgtcaggtctcaattgaagagagctcgagctggggatagagaggaggaatcttcatctgcttctacggacatggatcaggcgggtggtgctttgcacacctgcctagaaaaatgagtcttatgtgttggaatgcgcgtgagttggggagtacacgtgcattctgaagactctccctgcttgtgaaaactcactgtcctgatgttctttttttgattgaaacccgtttggttgttggttcggttgataggtttaaggttggtcttggttttatccatgggtttgaggtccctaggaaatattttgggggggacttttacttttgtggaaggacagtctttttgtgaatattataaacttctcttgtaatcatataaattgtaaataagtattaatgataatgaactgtttcatttcacttgtttttatggttctcctatctcttctcaaagaccttttacttgggctcttcttgataaacttttttacaatgcccttaaccttccttggttaattatgggtgattttaatagttttctttcttatgatgataaagtaggaagtaattattatgatagtaaggatatggactatttctctaattttattcataagtttcatctttcccctttgccttttgagggtaacaaatttacttggcataatcatttggtttcttggaatgatcattttcctaatgcttctttgcaccatctttctttttttgggtcggatcatcgtgctttaaagcttattcttaatgatagtggccttaattctcaccctagacatgggaaaaggtttcattttgaaaatgtttggcttgagaaccctgattttttctctgttgttaagactgcttgggatagcagccttctcaataagaatcctttgtccccttttcactcatttttgtccactcaggacttgtgtatttctgcacttaaatcttggagtaaagtgtccaatttttccattaagtctcgtatctctgatctccaaaaggaaatcgcctgcatccaggatatttcctttgttgatcctgaaagccgagttcggcttaagtgccttcaatctgaacttgatagtctcctttataaagaagaggtttattggaaacaaagggctcgaactcagtggcttaaggctggagatagaaatactaagtttttttaccgttttgcttctcaacgaaagaggaagaatactatcaaatttctcaaagacgacaatgagaatatagtctctggtcatatggatatggaaaatttagtagtttcttatttctcggacttgtttagttatgatggtagtgatgctgatgccattagccttattattgattgcctgggtcctcctttggaagaattggattatgctttcttggatgaaccctttactctcaaggaagtaataaggaaagccctttttaatctttggagataaggcccctggtcttgatgggctaaatgcctacttttatcgaaaaaattggtcaaccttaggggctgattttgctaaggctgtcctttcttgtcttaatgagggggttgatttttctgtaaacactactcttatctctcttattcctaagaaacagcatgcccacactcttaaggatttcaggtccattagcctttgctctaccttttataaggttatatctaaggtcttagcaaaccgtttaaaggttgttttggataagatcatatctccttttcaaagtgcttttgtctctggtagagtaatctttgataatattcttattgcccaagaagttgttcatactattaattctaggaaaaatgggaaactaggctgggctgctcttaagttggatatgactaaggcttttgatcgggttaattggcactacttagagagtctcatgtttcattttaactttccttctagatttgtttctctaattatgaagtgcatctcaactacttctctttcttttctgattaatggttctgttcatggatctattcagccttctaggggacttaggcaaggtgatcctctttccccctatcattttattctttgtgctgagggcctttctgctcttcttagggcaaggcaagatgctggtttacttgctggcattgctatttctaggaatgctccttctttatctcacttgttttttgctgatgacagtcttctcttttgcactgctaatcgtacttcatgttcagctcttcaaaatgtttttgatgtctattctagggcttcgggtcaggttattaatttttccaagccctttattcttttctcccctaatactcagcctgatattcgtaatgttttcttctctacttttaatcttgaagataggccctttatatgtaaatatttgggccttcctcaatgcttaactcgttctaaatatcactcatttgctttcttaaaagatcgggttaattctgttctcaggagctagtcttctaagtgtatttctcgagctggtaaggaggttttgttaaaggctattattcaagctattcctgcttatgccatgtcttgttttcgtttgcctgttaagctgtgtaagggcattgaagctgtgatggccagattctggtggggatcatcagggaattctcataaaattcattggaagtcttggaagtccttatgcaaatctaaatttttgggagggttgggttttcgttctcttatccattttaactaagctatgttggccaagcaagcttggagaatctttaagaatccttcttctctccttgcttctgttcttaaggctagatacttccctcgtactgtgtttcttgaggctaaacctggtcacaacccttctttcacttggagaagtattctctggggtagggagttgttgcagtcgggtcttttatggaaagtgggtgatggtagtcatatcagaaccattgaagatcattggcttcctcataatagggttaaatttttctcttctgaacataggcctccttctccttttttgtcctattttattactgagaatagggattgggatgtttctaaacttacaaattatttttctattcctttggttgatgatattcttagtgtcc

SEQ ID NO: 30881 - DNA, 987 bp, Cannabis sativa
attttatttataaataatatctatgtgaaaaattagttatatgtattagagatagaaaattggattgtacaggttgtggcaatatcagttggggtcgttagtgttgcagttggtataggcgttcccatcttctatgaatcccaaatcgacaatgctgtgagtttattacttataattttttcaaaaaaaaaaaaaaaaaaatcagtataaatttggtattgtaattagagtggttattgccttttattttttagtttttaattattgctgaaatttatgacacaataatgcttcaggcgaaacgagacaacactcagccatgcttcccatgcagtggttcaggcgcccgtaagtggccatgattaattataactctaatttcttaattcaatagtggggaaattagtagctaaaaagttgttataatttgtaacattagtagaattgaataacagaatttagttgtgtgcatatatttttgatgaattggtactagctaattgttttgttttatgtatgagaatggattagtgatgagaatggattagtggttttattcttacagaaaagtgcagattttgcttgggaagtgggaatgtaacagtggagcttggtggtgatgagaaagaagtgtctcgatgcatcaattgcgatggtgctggttccttgacatgcactacgtgtcagggttctgggattcaacctcggtaccttgataggaggtaaatatatatgccatggattttggcaacaactagtttcaagattacattatttggtgggaatgggaagggaacgacatatatatcaacgatggggatgagggaagggtctacaatatgatatgaaaaaaatgccaaatcccaaccttttaggctgtacagaatttcatcaaatttcttttaattttactaatgtgacgactgtttttgtaccaaatcgtacactaactttcattcacatcagactcccgtcagtaaaattgga

SEQ ID NO: 30882 - DNA, 4009 bp, Cannabis sativa
  modified_base (3976)..(3982): a, c, t, g, unknown or other
actaccttgaaaggctttagcgcaaaataaagtccaagaatcatcattagttaaaggagttaagattaaggtcttacccccaagatctttggttgaagaagaagccacatctacatttcgagttgtgatcattactcggctatcatttttgttgtttcgaaatgaaactttcaatgcttcccaaacatccacatcccatatgtcatccaacacaaccaaatatcttttgtcactaagaaaatcaacaatggttttctttagcaaatgggtgtctgtggagttctcaacttcatcaggaactaattggttcatagctttgaaaaattgctgaataatttgcctcaaaacttcatcaagcttgaacaattgcgaaacagtaacccaagcttggagttggtgaaaatgattccttacttgtatatctttatatactgaactcaccaaagttgttttgccaagccctcccattccaacaactgcagccacttgtagttgggagcaattcgaattcgccataagaaaactcgaaagatcttgcttttgtgactcaatgccaactaactgagcatcttccagcaaccgtgcatcatttctaagctcataaaagtagcaaggtttagttccatagctcgagctcgacccgagctctttgaaaccatatctcttgtgtccctcagaaatatcagtaactctgagtttgatacactgcaattggtatgcaattctatggcgagctttcaagttcttgattcctcgaaccatcttgcttaaataagcatagaatccaccatgtctcttagattgcttaaatctatacaagaaatcatcaatgatgtcttctgcatcataagcaacatctctaacttgcttaacccaaactttgatttcctcatcatcatcttcagcagtatcagcagatctcaaaaaggctcttatacgatccaactcattcttcacaaaaacaacttcgtttcgaaattggctgatgagtttcacctcatcttccaacaaggttgaaagcttccccagtagaaaactcaccacactctctgccatgacttgctttgatctgttgtagcaagtatatattgcaaaaattaaatctctcccatgatttgtttcgatctattattgtattatacataatcaataatcatatctgacaagtgatgtagaaaattgagttccaaagattaattcttttgagtaacaaaaagtaaggaagaaattaagagcagataaggcaaactttatatatatatatatatatttattgaactgataatatgtgacaaaattaatttagattaggtaagcaattaagagcaaaatataccgtttgattgggtggggaggtaagcaggttgaccaaagagttgaaaaaatgaatgagaaagaagatgatgaactctgactgcatttgaagtgtggacacagaaaatttcacctcatcttgcaagtacaggctgtattgaaatgtgtggttttctctttttgtcttcttacaaagccaattcttcatttcctcatcttgtggtgtggtgtaaaactgtatatcaatttataccatgcaactccaaaaaaatgaaatacagtaattatttcggaatttacaaaaaaaaaaaaatacattatttttaggttgtgttggttataatttatttaagatattctgtttttaaaatatttcaaaaaatttaacacgttaaaaatttaatacattttacaaaattttataaaaatttgtgagaagttctaatagttaaactatacaccgtcatacaaaaatgaaatttaataacttttttttgatcaaaactagagaagctcctgctagtgggaccaacaagagacttgcctcgaccaatgaaattttcatataattatattgaacattgttattggacgctaatggtacttagcactttttataagtgatagtctacgattagttagcaatattttctaaaaattattttcttaagttatatgggataagatacttaattatactaataacaatatgccaccgaagaaagtgctaagcactaatgatactttttagtaattctcaattgtattagtaattatacaagttagtttggttcttcatagcatatagcaaacatctttccatgcagaacatggcagaattggctcaatttaatagtaattaatatgagctcttaactgtaatacattcttattggttcatgtatttagagagcttaatgaaaatttggttttacttaacttattgaacactgttgaaaattatggggttccatctcaaaactaattggtcatgagtgaagtagcccatgttcttatatatggctcaattctctaccattattctatgtgggacaatgtccacaatattccccctcaagatgatggctattttttgctcatcaatcttgaaccgtatcagagtagacatgatcactatctatataggtgcggatcggataggatcacttgcccacaaggaacattaagaatcatggttccatctcaaaaccaattgaccatgagtggagtagcccatattcttatatattgctcaattctctaccatttattttatttaggataatgtccacaataaacacaaagtccaaggcagctgtatatacttaaaagagttaagtaaactatgcatcgtatcaaattttagccatcagactagaattacatatatattaacattactatgggctacaatcttaatgtggccaaagctttaatacgatggttcaaggtatcacgggtggtggaattagtttggctgggattatcattgatttttgtgaaacttatggtgtcaaccaacttctctatgacactaaggtgcaacctcaatggaagattgacgtaagcatggtgaatcgacttaagaatctacatcccgatgggcaatctcctcccgaagcccaataacaactggaaaggaggcgcccaactggccaagaagagaatgaggatgagttgcctcaacaattgctcagtcttagtgattcgggaatgcagtacatgcatgcccaactcagctatattattcagcagaacaatcatgtgcagagttatatggcgtagatgagtcttttttatgagagtcaagttcaccaactctcataatttagggatttgatcatgtgcagaacaatcatgtgcagagttatatggcgtagaaaggacaaaaactttcaatttaggaatttgatggatattcactgagattattccatgagttaatattagttaattgttctttcttctttaattgtgtgctttattcatctttgtgtatattacatgtttgagcttgatcaccttgagcctgatttatgattctaatgtgaaatctgaaaagtgaatgttaagaatgctctaaataaataaacataagttttgatgtaaacgaaagtatttacatagcttgtgtgacttttagattattgcttaatgtgaattgtttgttgagctaactcagagatgcaatagttgacatgtactttagtacttttattatctgaaaagaatttaggtggtttttataatctgtcatcacataggaggaagaagaatagttaattaatattatcaattaggtaatcaaagcaattgaaatcaattccctaatttcacatctatttattgaacccttttgtattgcttattttatttttctgcattcttgtttccaatactaatttttattttaccaaatagaaatataaacctaatttgattagtacttagttataatttctttgggtttgatctcacttatgcgagttactacttaaataatatgtgcacttgcgtgtgtaaatatttacaacaattacgacaaatcattagagagagagagtctaaatttgcttaaatcaattacttttgtaattttcgatacttcactaattggtttcattctataggcatgggtccatgtgttggaaattattttacnnnnnnntaaatttactaacaagtatgttggatt

SEQ ID NO: 30883 - DNA, 1370 bp, Cannabis sativa
tttttttttatgagtgtgccttattgtaattgcttccataaaatatgagaaatgttaaaagataccacttgtgtctagtaatttttaggaaataacgataactaatcgtaaaaaactatttctagaaggtgttgagcaccactcgtgcctaataacagtactcataaaattgatgtaggagcaagccttaaccctcattggttgggccacttaattgtagttgctttaggacttctactaattttttttttatcaaattatattataaattatctaatatttatataaaggaggttccaaataaatgtattatccttattacataaaaataactaaataaataaataagattgtaacctattcatgtgttctaaaaacaacacgaaaaatttgttgcctaacataaaagtagagagatgtttacaatgatgcacatagttttcgattcccaattggaacaagttctctttagagtcttcataactgtctcagaaactacaagaaatgttacttttaccagcacatttttgtgctagcaaaagttaatattgcgatggtaaaatagaatttacttgtgatgtggttgcaaaagggagttggcaaatcaatgttggtattagaacgtttgccagcataaaatgaaaagcgctggcaaaaatgacttttaccagcgcgtaaatgcgctggtaaaagttagattttagccactgtaaatgtatgctggtaaaactttgacctctttactagcgcagtttgcgaaatgtgctggtaaaagttacttttaccagcgcagtagcgaactaagctgataaaagtgatatttcttgtagtgtagttactctcaaccatcacaaaagggtatagaaacgaagcagtagtctccatggctaaaagacagactgcagcttctccaataaggggatcatagaagttaagtaagtttgtggccacccacaaaattgactctgtgtggtccctagccaaagccacaacacacatggaatcgcacccaactctcacatcaaattaattttgacccaatcattaggtggaggggatcaaacaggagactcaacggcttttgacgaagcaaataaacatagcccatagtctacgtaatagatagagatagagtcaatacaatgtttaatgttacacagaaaattattgtgtaccttgtcgttgcgaaccctgcaaatcgaatcttccacaattgaggaatagagaaataatttgtcaacatcaaccccttttgattttagattccataaaaatttaatccaatcccaaacctgagcgccgaaataaaaaactgacatcactctccaaggagaagatcgccaaaggtgaaaagtaaagttgcagtagaa

SEQ ID NO: 30884 - DNA, 6620 bp, Cannabis sativa
  modified_base (5111)..(5113): a, c, t, g, unknown or other
cttattcaaatttctaagtattttcttagggcctctttcataagagttttttcgtccccccttttgatcttgtctgccactatttataattgcatagtagcaattaattacaaagctgatcaaaatatgtttacagccattatcccttaaatcgtgggatctgattacaaatcaagccaaacaaatgaggtttttacacagctatgaatatctcgcttttattgggtcgagatgaacgtgcaatcaaaaatatatggtcagccttatctcatagggatgcctcgccgagaatggagccaagaactttgatagagggcagttgtttgtcatttggcttctcgagactaatattgttttaactcttgtaactatactttctggtgtcgagatgatcttccttgcatgcatactatcttctagcgagataagcacctcactgtctattatcttgactcgtcgcactatctatactcaatttgtatatcgtataatatacgctaagtatttttagtgttgtcattttctctttcatgcaaggaggttgaggcctcgtcatgaacgtgtgcactcacatggtttctcgtcaatacataagttagtagttcgtacgtttctgtctcgtagaaggctatccagccagtcgagttataaacataccctgcaaattatatttccaacaagttgttccatgctaagtatacttttcgtttgcgtgtttgagttcttcgttcttcccagcttgacacgtgtcttcctctgatgtgattaccgaactttgggtataacattaacctatagtgttatggtgaaaataattctaaaaagcttatagtaaatgctaaaagataatattagtaataattagttcaaccaaattcctaaaattatcacaagtctaaataataatcaccatatagtaaatgctaatcaccaacattagtgtaattcctaatcaccttacagtagtaagatgaaaattgttccaacaaacttatgcaatatataacataactaaatataactaatgaactaaaacctaacttttgtaatagttgtatgcaagatagctacaatagtgtttgtgaaccatgaatgttactacttgtgacttgatgccagccttttaggacttgctctttctagtccacatgttctcaaacctagccttcactgtgctgaatcgggggtctcgaggagacttagatggactaagtactggttttgttgtggatgctgatggaagagttttggtcatttcaaattgcttcttaactccctccataaccacaactttagccttgttactctcgtgggtcacaattttcccaacacactctagtctagcttcaattggatcaaactgacaatacatttgggatccaatttagtaaatagacatgaggatgaaattccgaaaaataaatcaacataacataaattgacagctttaagacctcaatttagttataaacacatagctaaatagatgaaaactaatgaaaacaacattaaactactcttgcattgtttcatttccctcaaccattgattccatgtacttcattacaaaaacccataatcgtgcccattttgttgctgtgggtagtcactgttggaagaaataattagaaattggccaaatttcaggtgtgttggctgcacagaggcgaacaataggtccaaagtgttcagcaaaaaaaaaaaaaaaacaattagagctgagatggttgcaattagactaatagaacaacaaactatgtaaacacgtgtataccatctctaggcaaacgtttcgacgtgacctcttatgcattgcagtagacaatgaatctctgatttccactgttgcattatccatggtcagatttgctgcataccagtgcggagcactctcagtatctaataggggtatcaccatctgcgacaaagtaaaacaagcaacgtcataaaaaaagttaactaaagaaatatgcaaaaacacaaaagtatcaagaaaatgcaaattacattgtgacataaattcaaatcttcatcgtaataaagagtggaacactgttgctccctcgccatcctctccacagccattgatcttccaagtaactgccttcacacaataagcacacacaatagagtacattttaaatgaaagcatagtcgacattgtattaaagcacaaatacaaaaggttcatgtggatttttaaataaaaaagttcgtacagaaattcttgtgggcataaaccaagttctctttgatccaatgtcattacgcttccttctcaataattcattatttgagcaaagcaatcaatgagtttccatttacacaagcagtatcgattatgttgtgattcatacaatcacagtacaaagatgacgaactaaaataacaagattcatgagcaaagcattcgaaatcaaatgcaatacgcagaaatgaaattaaaccagtaatggtgcaattcaagcttaaaaaaatgggatcaaaattcagatattaaggcacttagtcttggatacacattaactcaactttcaattatggttatgtctatttatatacataacaaacataactaaccaaactgtcacaactcacaaaacagttaggtaatagtaaataaggaatgtgccttaaaaccaccaaaaaccaagtcttactttctagaccataacacaatagattacaataattaaactaatgaactaaaaattaaaaaacaaccaaatggcattttttacatacactgtttgagatattggactctggtcttatgcattgaaatccccgacgatcaacctcaaccttcccaaaataggctaacacttcactgaaacacaaaataaataatcaaatacaataaatatactgatatcaacgacataaacaatattcaacaaacaagagattacctcggatcattggcgcgagagaaaatgtaacgaaagaactcgcacatttgattcgaataaacattgttgacagtgaagggctcaatcacctttcctccaaaatctttgaatttttctaaggcagcagcatcaaaatcatccttgacggtctgctcaacttcctctttcacaataactgggacttcttctacccaaaagttgatatcttcaaaagactcttcaaaaacagccttctcaattggaacatcgacattatattctgatagattaagtgaagggacccttagtgcatcatcgacagcctcttcggatttatccttcgtcctttcaccatctttttggtccacacccacatcatccttcttctcggtctcccccttgaaagaaagcgagcgctgaactttactcatcttaggtatctcgaacacttcatttatattacccttgccaaagtaacttgagactagcttcagtaacagctcttttgtactattcaccttcaaatcaaggcggaagacctcttctttcaactcacagatagctttgtaaattgtatcatttgttggttgcccaactacagcgaattcaaaacttggtactaacacataggtattagtcaatttcacctgcttagtacaccaaaaaagttagttagcatatctccgaaattaaattctaatgcatcagaaaattgaagtagtaaaacctttccactagtgtgaccatcgtggtctcgaatccatttgtacactgatttacactgttttatgttccaaaagtcaattggagccacagtgcggtccacatgactagcagtccagtccacatgagtcaaatatacaagctgccacaaaacaaaagtacatatatctataagccttgcagtacacaagcgaataaaattaataccaccacaataaggggaaaactgacctgtaaaagtatggtgcagccggaaacattttcatgttcttagtcttgtaccgctgtagagagctcattagatatcgaaagccagcagtcgcccaattcttcttcttaattgaccttgtatcaattaaagaatgcatgtagctagtgctgaccttggtaccattcttgggcagcaagactgttccaatacaaacaagtagaaacttaatgagaaacaagtaatcgctctcgttgctttccttcagatccttctccagcagagtcagggaaaacctatattccttacccttcaaagttttctcaaactcaaggaggtcacagtcactttctgttaccacaagttctctcccatccctgattcccatgacatcctcaaacagcttcgacgatagttgaatcattcttccaaatatctccagccgagaagtggttggatccacgtgatcgatcagccaactaactatcttagcatcaacgtacgggccatcatcccttacaaatgtcgagaaaccagcatttttgaccatttctttttgagcgtcgttgagaagtgggactattctacccaaacgttcgaaggagaaacgaccagatacttgaacatcccctaccctttcattgttctcaattcctggctcagtagatattgtctcctttaacttcttccctttccctctaacacaaaccttcgaaggggaagcctcaacttcatatgaagcccaattttcaatctcttcctcactaagcagcttaatttgctctttaaaactaccaagcacctgcaaaattaagactctcgattaagtaaagaacgctaaatgatgaatatcaaaaataaaagatccataacacactccaagtcactcacatctgcttttgatttatctgcatgtgcagcagcaaaagctttgaaattggcttggctgcatcaattaaataaaggaagggaattacaaatattgttttcaaaaccaaaaaatattagcgcaaaaatactgggaaaaataacttacaaatatttttcccaagcttccttcggattctttttttttttatctcaactgcatcctttttctctgcaccaggacccctctttcgtttaaacaccattgtaaaaacctattacacaagacaaaatatcttaaattaacaaacattcaaaacactgaaatgttggaagatgaattttttgaataattcattacaatagtctaaaatttcagtgcattcatgacatccctacacttattttcctgtatgtttccnnntaacaggtaagcatctcttcctatataatatcatttcactatatgtactatagtctaattgttaaatttaattttgtcatacttataaaaaccaaatgcagtggagcaatttgcttaaaaaaaggattctgaactagtaacatatttcatttaagagtacctaatctttgtcattcatgtacaacaatcattctaaacacttcaagtaaaactactcaaaagaagtagcacaagcatcaccaacaatcaccaacaatcaatctacaatttcacatttaaaagcctagttatcctttcatgttagagcaacaattacacagattaatagagatgtctctctttttctattacagcacaacataaacagacataaatcaagggtgagatcactctcctccatagttttcaaaactcatatattcatttttaatttttattacatgttacacaatcaaatactttaaaatgatgagaaactcatttacttttaaaataattccaatatataaaaatgaaacaaaacaaaaaccactcctagaatttagacatgaaacacaacatggacaaccaacaaacacatatgataagtaactttattaagtctttttacagatctacaaaaattttcctaaatagaatttcaatccaatgctttgatatcaagtaatgttagtcaaatctactatggtacctactctataagatctgaaaaaacatatttttcaaccaaattaaatgaataaaaaccaccacatataacaagactatgcaaatctattatcactaaatataaataattatttacacaattctggttatgagtgactaatgtacctaattttcattgacaatgaactagaaaactcttcaggccaaatgtacacatttagagaaagcaaatatttttctttttctaccactaacagtgaagataaaataagctttaatggctattgggtgcagcttttttaaaaaactatcttaaaaaaatatgtcactttttctatctcgtaaaaattacacttaatcaagcaaatcttttttctcttttattaatactaatagagtgtagttaaaataaggttttaatgactgttgtgtatgaatatttttcaaaataaattttaaaagtacttaacattaataaatattatctatttttatatacaaactcctaatcatttgtttccataaatacagcaacaaatatagatgaaaaataagttttaaatatactaaatgacaactcagaattttcaagcaaatattgctcaaaccaactccatttatccaatccccaaaaaatcaaaatccaatcaaatcaacaaacagagatttcttcaatgaaattaaacaatgcaagtctttattgcaccaaaaatacctaaatcaaaatactaaatgacagattccaaaaaaactaaaacgataaacctaaaataaattactgtacaatgcacactcagaatcagaacacatgcacggagagagagagagagagggagag

SEQ ID NO: 30885 - DNA, 1082 bp, Cannabis sativa
gtaatattgaaatattacctgaaacatttcagaaacaactcccaagaataaaatattagaaaagtcatcttttagctaaataattaaactaaattgataattagacactcaactcaaaaaactacaaaagtactaagtacaactcaaaccttacaaaatttagagaaatacctaaccaacggtgttactctttgtttggctaggaacaactcactagaaacctaaacaaaatgcaaaagaaaaaactcaacagacatagtaacaccgatgcaaagtccataatcttaaaacgaagcctaagcacacaaatacgatattaatgaaaaaaaaaaaatgaaaaccctatctatcttttactaaaatagaaataaaataaatgtttgtcaaaacatgccatttacaagtaatttatatcaaatttattcttcttctttaatgtatatccttttttttttccttaacataattaataatgtatatcttaaaaaaattattaaactaaaaataaatcaataatcaaaaaaccaatatcaaaactttcaaattatattttaaaattacaaacgtgacacttacatcaatggattaatattcaacatagaccatttttaaaaccatttaaaatcacatagtgcttgtaattgaaatcaaaatggtccatgttgactgtatacatcatctgtcaaaactcctaaattgttaaaaagtaatcttgtttctattcaggttaacgacaattctatattctaatggagtttttataaatatattagaatttgggcaaaaatttataattttagtgttatacaaaattttttacaaaaatattttttttttataaaacaacataaaacagccgtaaaataataaaacataacaattaaaaataacagtaaaatattaaaaaataaccgtagaacaacagtaaaaacttaacacaatacacagaataaaacttatacattatttttttaaaaaaattccttccccagtaaaaaaaaggataagttgaaaaatacctattttattaatcaattaatcaaatttacttctaattttatatttatttgaaacatacctct

SEQ ID NO: 30886 - DNA, 3767 bp, Cannabis sativa
tagatttttaccttattaccgaaatccgccaccaataccgacaattaatccggcaaccactgcaaccccaaaggactcacaatcttaacaagaaaaaccataataaaatttacaaaataaaaaataatgcattgcaccttaataaaattattaaagatcaaatttttaccttaataaacgttgagattcaacgtttttatgtctaaaatcctgttgccggagctacaaccaacacaaccgcaccaacacactcactttgcgcttacaagactaaatattattattctaatactagtaatatcattttggctgttgaaaatgataaattttgcaacaaaaaaaaaaaatggtggagaaatgggaatttggggctaatttggcggtggttggtgagggtttcaattgggtattttgggaggagatgaatgttggaggagatgaagtgattcattagggtttgttgaaggattttaatgccctatggagtcggttattatgtaataatcgattctataggagcacacatacacgtgtcccctatggagccagttattacataataactgactccgtaggcccttcaaaaatacacgtgttctcaatggagtctgttattttataataatcgacatgaaataacttactccataggctttttcatgagaccaaaagactttggctaccctttttatattactcaactaaaataaccgcctctaaaggctaattttatagtattgcattgagcacactatcgactacctatggagcttcattgaacaatttttttttatgaaaatcttgatttttaaggccccgtcgagttgtgcatcgagtttccttcaaattctatccaatttctaaaaaaatttgcatttcagatctgaaaaaatcgcaaaaaaaatcagaaaatcttatgcagaatattttgaaatgcatatattagtgttttaattgatatttaagatgagttaataaagttttaaattatcaaaatcttttgtgtaacttccatggagatgttaagaaaatatagagaagaaaaaatggttaaaaaaaaaaaaaaaacatgaaaaactacgtaaaacagtgagaacatggtgaatagtaaaggtagatctttgataaattttgtgatgatcatttatagagatggtagataaggcagagaagcgagaaagagataaaagaaagagaaaggaattgagtaattttagaaaagattgtagcatatttttagaatagtgataaaatataaaatgtttttgatataagatgttacttgaagtataattaagcactcaaatttcacttcgtaaatactctgagtttatccgtaactcaataaattgtaatgagcatgagggtgagtgagggtgaggatgaggagggtcaaaattatcatcattccattattatgattgcaaattgtaatgaccatgtaatttacattactgcatattttgtaactgttaagttttttcaaaactgagaaagaaaaaaaaaattagaattggacgaggtgcaatgggtacattaaaaaaaagtttacaagaccccgtagattctttctcgggtaaagaaaaatgtattattatcttttatcttaatctcaatacatggttttttttttattttttttgccattaatagatgtggatataattatgtgtattctattagcgaggcaggaggcagaaaatggttagtgctgacactatgatcgagacagggtttataatgttaagagtggctactcgttggcgtggtcgctccaagttgagaagggagtcgcagattcatccaggctaactcgttggtggaatggagtatgtaatcttactataccactaaaggtgaaagtttttgtttggcatatgttccatttggctttaccagtagcaacacaaattatctcccgaaaagttcaggtacctcgttgttgttcacgatgcggagaagaatatgaaactcctgagcatgctctattttcttgctctgatttgattccagtatggcatcggttgggggtgtgatcggtgctacgccgatgtgtatatgaaccaatacaggaaattctcttatttctctttgacaagctatcctgtgaggctttaaattgatgatgacaaccctttcgtaactatggtatgatcgaaactcaatattatttggcaacaagcaaaccaagattagatattattctagatttagctcataaccatctgtcggagtttaagaagtatggtcggcgagacattcatttgggattgggccttgtaaacccaattgcaagccgacctactcgatggatgccacctcctcctgattcctttgctctagcgactgatgcttcagtagttttggggaggggctttgtcggattagggggagtgatacgggatgcagcgggtggtgtggttggcgtggtcatcaagtgtggtaggggatttttctgctaatgtggcgaagctgcttgccatttgtctggggttgacgtttgcgcatcaatttagttttagtatcttcattattgataatgattctactgtagcaattggttggattaataagtttcacataaattttatttttcactctattttattagatatccattctttattagctgttggtggttgtggttcttgcagcgccattccaatggtgttgcccacacattgacaatctctgttactagtttagggtaggactgaatatttcgagcgggtgcgacccgaacccgagcaacccgcccgaacccgaaccggtgaacccgcaatttttttttaaaaaaaaatattcagcaagtcaggttcaacccggtacccttcgggcgggttcgcgggttgattttttaggagtaccgggtttcgggttgaacccaaacccacccgtcaacccacatatttaatatattatatatatattttatctttttattacattttatatatatattaattaaaaaataattttgtatctgaatcctaggcatagcctcatagttcatacatagggaaataatttgcagataatctttccttacaatttgtatctgaatcctaaactagttgtcaagcagtattaattctggcacctcgtcacgaatttcttgtactttcgcaaaatgggtatttgtttattccttaacattttactatggaaaaggtttattgtcaattctcttgtacaaactcctcgctgttagatatccttccacccaagcaaaatggaaatttatgtaactctagtgaaagttaatggattgtgtttcgtgaaaaaaagtttgtgttgatcaatgttatttttaacatagttatattgtggcattgccagacttgaatttgatgttccacatgttctttcttgctcgatactgcaagcttcttgaagagaactccttcaagggaagagctgctcatttatatatataacaatgttacttttattttattatatttttattttattgttatattatatatgtttaatttaacaaataaaaaaaataaaacgaataattatttgactaaaaaattaattttttttaagagttgatcgagttgaccgggtcaacccgccaacccgtcgaaccgatttttgagttcttatgtaacagtttatcttaatgaaatatgcctttctctaaaaaaaatacataaaatggtcataaaataataataataataaaaaagataaaaaaaaaaatctcaacttaaaatttgatttttttttcaaaaaaaaaaatacacaattttgagaga

SEQ ID NO: 30887 - DNA, 2042 bp, Cannabis sativa
actgtagcgtgccttagcattagggcgttacacagagtgaattagttgcatcctccctgcataggataaatgtctagaagcccaagaatgaattcgtttttttttgtccacaataaccccacaatcttccattctctatttagtgggtctcaaatgcactcctagatactttagaggaaactgaccctcttcaagcccaaattcttgagctattttccttctctcctctatctacacgcctccaaaggaaacctgagatttagatttattaactgaaagaccagcttgaagacaaaaatcttccagagcttctttgaggtatcgaacagctaccacagtgcccttactgaacaacatcaaatcatccacaaagctaagattaattaattgaggcttttgcacataggatgatacctgaaggaactagcttctccttctttttacaatcttctggtaagaaattccataacaagaacaaataatagaggggacatggggtccccttgccttaagcctttcttcccctcaaagttaccatgtactcttccattaatcatcaaattataagaagttcctctaatacacaacattatccatttcataaacctagatggaaaacaaagataattcatccaaacttctaaaaacacctaattctctatgtcataagttttgcttaggtctattttgatagcacaccgagaagaaaacattcttccttccatagttttttgttaagtctaggaagataacgatattatatgctataaatctattcttaatgaagactccctagctttgattaaccacaacagggaaaacctcagcaagacataagcagataagcttggagatacagttttaaatagtggaatagtaggctatagggcgatagtcaattgccctggaaggatttttagtctttgggatcaaggatataacaatttcattgagctctgctggaatcagaccagtttcaaaaaagctgagaactaaatgacaaaattcatcccctagctccagccacatagatttaaaaaatttagaattaaacccatccggaccaggacttttactattaggaatactgaacagagccctctttacttctttcttagaaaaaggttttaaaagtttaggctacaagtcgagggatagcttgttacctttcaaattatgaaaattcagattagttgtagaggagtcttcacttcccatataactcttaaagtagttttgaaaatggttaatgacctcttcatagttttcaacaagtttttgcttctcattgatgaagctagctattctattgtcttctctccttttctttatgcatgcataaaagtaggttgtattgtcatcaccctttcttgaccaattagctttacttctttgaacaagaaagttatgcatcagcctttccttttcgctgtagtcctttgttgcctttttttcctcttgaataataaccaagttctcagggttagatggagctgcaagccttgcttcaagataaaattttttgcttcttcaaaaattaacttccacatccccaattatcttcttattaaacttccttaaacaatgtttaagtctcacacactttaggaacatatctttcagctctgtacctctaataggtttattccaactttccataacctcacgtttgtaatccttatgatccacccagaaattaaaaaacctgaaaggtttaatgctaatattagtagcttctatagaagagaccacacaaaaatagtggtcgaaaagagtttcccaactcatattagcagaggagctaggaaaagtatctaaccactcttcatttttgaggacatggtcaattcttgaaaagattctatctttggcatcttggttattcgaccaagtaaagaaagatcctattctatgcagagcattagccatacccaaagaagcccaattagtagcacattcaatctcaacttttgacaccccatgacccccactcctattaccaaactcaaacatcgcattagagtcccctaagatcatccagg

SEQ ID NO: 30888 - DNA, 2312 bp, Cannabis sativa
  modified_base (1573)..(1573): a, c, t, g, unknown or other
atattttggagaaaaatgaagaagccccaaaacgataaaacaattaaactcaccgtatttggcaccaattgtggcataagcctctaccactggctttgccagcaacaaaagagtacccctagcatccaataacagtccagcatataccctcctagtcctagcagaaaaacctaattcatcatcttcaccaaatttaattaaattgtaactaatttcacggtctaacataattgaacatattgattaaaaaagagagagtaccaaagttgagagtaccacaggatcaggggaaatctctactccatggacctaaatagcttagtcaattttattatctacaattttaaattacaattccaagaagaaaaataattaaatatacaaatttatcgaatgttttacaaaaatagctattctattcaagaaggttatcacacacacaaatgaagattgaaaagagaaataccacaatatttaacattggtagctgtaattggatgaaaaatcaacaaaagagtggggcagagcacaacaaaggtgaggttaaaaatcttcaagcgaaacagtgaagccatgagtgataactaatagtcccaatcccactctcctagaccaaacaagcaacatatagaagccattacataataatcataataataacaataataataaataaggaaagtcattaattcacgttaattttgggagagataacactataaagggcctatactcactaatgacagggcaaacaccacatgacatagaagccatgactcctagtttagggcctcctctaccttccttgtttgtatattaatttatagctcactttcccaactggaatagaatcaaagcccttacaatatgaaaaaaaatcttagggggttagatccggacttggggtgtcggtagtatctcatcaaagtataaaaaatatacaaaattatacctgccactgagaggaggacgccaacaggaagagttatcggagtcagagtttgggggtggtctgtcggagctactggtggtggtctgaatgggttataaatattaggatttggctccgagttttttaggtggagggtcggcgaaccatgcaattaagagagggagagagaagggtccccatccacgattaacagaggaaaagagagaagggtcgacagactgtttgatttagcagatttgtggtcttcgatggggttagcgaaatagcagagaattcgcttacccaaagtcatgtgtgttttttaactattgcgtcagtttaaaaggctagaagaaattttttaactgttattttttaataaaaaacttttaaacaacaaaagtcatctaagaatttctcgtaaaccaagaattctgttatataaccacactttatatagaatagatatatatctatttatcgatatgaaatacttcttaatgagtattacccattaatgggtaataaataaaatttaactataaatattaattttaaaaatattgaatcattagattttggtccgattgcaaagaataaaagagaaatttgaatttctatacttaatttagctacttaatnaaagaaaatatcaaaaaatacttatttttacactgtatcaaaaatgtgtttatatgataatattattaagtcaaattcaacttttttttatcacttttttgcaaaagaacttttttttattaatttttttcagctgatgaaccaatcccagctcatataatgtaaaaatgagaaatttttctaattacatagaaaaattaatcataaaaactcaaaattttctaatattacctatttattagtaatacccattaagagtatgagaaacttaaaagagtgatgtgacatcttctctttctaagattttaatttctctaatttttgccacttctctacacattcaattcccccttcacctctgcgacttttccacacccttgagtatcctccattgaaacaagcatgctctgtacccagatcttttcatcttcttcatcgaacttccacagtaatgatgatttttcctcttttctttttcccaaaccatttttccacccttctccgtgtcgtggtggctcaacattaatgtcgattgatagccaaccatctctcccctatcagatgcgatcagaatcgacatctttgctgaagagattgaagcaagtgtgtcgaaccattaatgcatcccttgcaggtttgatctcttccttgaacaaatatcatgatgaaccctatttgattttaattaccattgtcctttttgattctaataggatttttagtcttaattgttgtgtct

SEQ ID NO: 30889 - DNA, 2737 bp, Cannabis sativa
  modified_base (2698)..(2712): a, c, t, g, unknown or other
aaaattagtgagtcttttacaacagcagatagaatagctgagggaaagtcctcaagccaggtacaaacattatccaacactaaagcttgtttagccaaaccgtgagctacttggttagcatcacgacaaacatgattaacacaaactgaaaggagataggataattgagtttgaacatcaataattaaatcttgaaaagaagattaatttgatgttgctttgtggggagcatttgcaaggatcaaggaatctatttctaccgtgtcaaccttgaagttaaactgtctagcccattttagactataaaagagacccttagcttccatttcttgtggctgacagcaaccattaatagggtgagacatagcagccttgactatgcctttggaatcccttattatagatccaaaaccaatcttatgacaagctgcattgaaagcaacatctacattcaacttaaggcagtttggaggaggaggtttccaaaccttgcaagtcgaaggaaagccagcgggtgataaactagtaggaagtgagagctgctgtgaagacttgtaattgttgagaaaattctgagctttagcaaagattgttgtcggctgttgtgcaagtttaccatgaatgacattgttccgatcagaccaaattgaccacatggtgcagaaaatcgtttccaactctgatttggtataacattctgataactgaaacaaaaagtcttcagctttcatggacacagcagctttgtagttaaatgcaaacccaacaattttccaaacttgtcttgcatgcttgcaggagaacattgcatgtcccacgaattcccatgcatttaggcacaagctacatgaagctgaagtaagtgattttttcttgaacaattctgcaggaactggcagggcattttgaatagctgtccatgcgaatatcatcaccttaggggccattttaagattccaaaagacctccaccaggaaatatttggattcgaaacagtctatggtatcatttgctaaggaacaagcaaagtgatacctagacttaacattatactcaccacctgtgtagtgccaaatccaataatcagaggtaacattattagataaaggtaaagagagaaccctttccatatccacagatgaaaaatcagcagacaacttgctgaaattccattctctatctggtgtaatatattctaccacacagttattcgtgttgccagtgtagaacattggggtgaagattgaattccctgggacccaggatcagttgcaaatgttatagtagatccatcccctacctttaattgaatacctttcttcaataattctttgccccaacaaatcccttgccaggtgagacaggacaaaccacatgtattagctgatatgaaatcgtttctagaaaaatatctacccttgaggacacgacataaaagtgagttaggattttgaaataacctccaagcctgttttgccaagatagctaggttgaaatggataaagttgtgaaatcctaaaccaccttccaatttagatttacaaagaaatttccattgttctaatgaattttcttcttgtctgaagtagtatcccaccaaaagctagacatcatagcctcaatttcacgacagaattttacaggaagtttgaagcaactcatcgcgtaagtggcggaatggattgaatgtcagccttcaaaagtacttctttacctccaattgagaaaatcttgtcagcccaggtatgcaatagcttccaaattcactccttaatgttattgaataattgctttttatcccgttcagaataagcaggtaagcccagataggattcgtgacaatcacatatagacataccaagtatgttttggaaggagagtttagcggcctcaggtgtatttggggaaaaagacatgacagatttatcggtgttaagttactggcttgaagctttgtgataagtgtccaaagctctttttatagcaccgcaagatctatcatctgcctcacaaaacaacaaactatcatttgcaaagagtaagtgagagatggatggagaatgtcgagatatggctaatccttttagacagccaatggactcttcatattgtaataagcgagacaatccttcagaacaaataaagaacaaataaggagataaaggatctccttgtcttaggcctcgttgaggtttcacattgcccgaaattgcaccatttataacaaaagagagttgagtagtttgcaaacaattcaagataagattgatccaacgaatattgaaccccatcttacccattacagcagctataaaagaccactccactctgtcaaatgcattactcatatcgagttttagagtagaaaaacctttttttcctcttgttttatgcttcaagcaatggaccaactcaaaagctaccaaaatgttatcggtaatgagactatttggtaagaaagcactctgtgtctctgagatgacatgggggagaatttttttgagaggaatgaccaaagacttggagattagtttgtagactacattacacaaactaattgggcgaaaatctttcattgtcttcgatttcttactcttgggaatgagtgtaattagagttttgttgagagcttcagggctgcccccttcattcagaacatgaagaaccgcctgcgtaactaagagcatgtttggtattnnnnnnnnnnnnnnnttttcaaaaaattgtttttagaaat

SEQ ID NO: 30890 - DNA, 1504 bp, Cannabis sativa
tttgagagggctccgtccgtggtgaatgaggagagagttaagggaggagggtccgacaaccccatagaaccagacgaagtggagccagcctcaagtaaacctctcctttcctttaacccatttttctcctattctcctttcattatttccccacttcgatctccactctaatttggtattctgtgtgtttgtacgatctccttctatgaattctgggtgtgcttttgaccatttggtttgtgttttgtttttgtgtagctttgcgtattgtggaactgattttctctaaattctgcttagtgggattctcccaagtcacacaacgccatggcttctttattcaaggtaagcttttttagtttctcgtataatttttttaatggtaatactggttgaaaggtcggaagaatattgcaatgggaatgtcatagaggtggtcagaattaactatctaaaattaaatttgcttaaaataaagatgtgctaagggtttagggttttcagaaatgatatgctaattgtagtgatggtgtatagtttctcatcatgttgggaatttatgcatgcttcatataacattccgtgaagactatgtatggtgtattattgataataatatttttatacttgggactttttttattggcaattatgtactcagaacaatttcaaattttatttggataccagacagaatgttggtttctttatgaaatcattaccctaatgagtggtcaatgtattgtgcgttggactattagtactctgttacatgcgtatttagttaatttgtttcttcttaattttgtcttaggatctaacaaagctttcagcatatcgggatagaagatttcccggctcgcaagaggaattcgaacaagcacttttggcatcgaatacttgttatgttgggaatatgtccttttatacaactgaagagcaagtttatgagcttttctcccgtgccggagaaattaagaagattattatgggattggataagaatacaaaaacaccttgtggtttttgttttgtaatgtaagggctccattctccttataatcaatattaattcggcctttgaaatctttaaccaagtaaagtttataaattatttttattagatggaatctctgaaaaatgtttgttgcaagtcaaggttatatatactttctatgtcgaaacacttaatctataatcatttgatagatactgatgacatgcatgtgctgatagtaccgattgctgtgttttctttatctattgaacttcaatcattatgctctttagggttggagtgcaccatgtgttcccgtgtatcttgaagctaattttagaatcatgatactgcattgttttcacatttcatttgtttctaacattcatgttgtgtgcaattttcttataaattttgtatagcattgataggagtagactttgagtattttaatttctatcctggttttatatatcgaaattgttcatttattaatgtctttgagtt

SEQ ID NO: 30891 - DNA, 1286 bp, Cannabis sativa
acaaccttcttccaatcttttcgtttaactagtcacataataatttttcttaaataaattcatataatatcaaatagaatttactaaagatagtataaatatgacttagtgattctgttaaaaaaataacagttacacttattccgaagacatattttgtattgattatttagctgacaactttccaacttaacataaacatcggataacaccactttttaaatctcaagttttaataacacattgtttggcacaaatacaatctaagacaagaattctcaaacttctcaaatatgaggggtgctatagacaaagacaacactatgggaacaacatacaacacttgagagtttcttttgtcaaaggtctggattttcatatataacatgacgtttatatggcttttatgggaaacagtttaaaatatgggaaaaagaaagaaaagtttacaatatggaaagtttgatttcatttatttaagtcatttccatatcaatcttcatcaattgaaatattggtgtgtccgcgaatttgcccaaataagcaatcaaatactttcaagcacgtttatacaaccagtaagttgtttcatctcttctctggtaaaccgtttcttcttcttctaataccaatttcaattttaattgtttcttcattttcttatggattggttgctggtttttgtagctggattgttacgttttctgatcacaattatcggacgaaacgaaaccaatcacattaatattttggatgaataaagcaaataatagtcacctaagcaaggattttgattaaaatctgttacagttacacatttcaactgagctgagccacctgattaccgcaaggcactgactatcattatatatgtgtgaaattacaaattgagaaatataattctagctacaattcttcataaacaaaaaagacgttcatacatgtattatttattgtgtgtggaagtaataaataacgaaaaataatgatatatatattaaattggtaaaaaaaaaatacacgcataaaatttacgtagtttggtaatttgctactttacggagacagttgatattattaagctcagtagaaaacatacagaatacagatgcagattttctactaataatatctctcaagtattttttttaaagtgtttctctaaactcactaaagtattttccaaagcttagctatacaaatgttctctttctcagatttttcaagtgaacccgattgcaaaaccaattgcactcagttgcaatgctcttcaacgagctccatat

SEQ ID NO: 30892 - DNA, 1895 bp, Cannabis sativa
ataagctctctccaattaacagaagagatatttcaaggtctggacacataaaatgcatacgagtgaatctctttttctgttatagctaatcaatacaaaaagagaacagaaccacagaaaagaagagaattaatgccacaaaaatattcaagaaatgtattcacctaatacgaaaaagagagagagagagagtcgggttggggtacctagattttgggggtcggggagttaggaaattgcctccgtttaggcggtggacgaccgaagttagtccctccgctaggagaagggagccgtggggtttgggaagagagagactgacaaagtcggtagagagagaatgaaaatgtgatgaaattagggctttaaacgaccgtggtggtggtcatttcgggagcaggtggccgagacgaggcctggtcgtggctgctggcgtgcaccatagggagcagagcgagagagggtatcgagggagagtgagaagggaagagagaggattttccaattagggttttcaaatattctatttatactttttttatactgaattttttttataatttttttaaaaaatagtgtctttaagtctctgtttataaccgacactaaagaatcttttagtgccagttataaacagacacttatactcaatcggtatgtatatttttttttaatttttttttttggtctcagttatacttttagtgtcggtctattaactgacacttaaagtcattatatgtgtcaattataaaccgagaccaaagactgagggtgattttttgtatcagtttttttaaaaaaaaacgtcactcgaaccgacacaaaatgtatattttgtagtagtgccatatatacatattatgctataattacgtttatttgtataatttatattaaatttataattatttatttcgcgttatatcattatattttatttatttattatatatttataattaaatgtttagttagaacccctaaacattttgccgactctgctagagagcgttttcttcaaatagttcacatatacttatatatatatcaataaatatactttatatatatactaaagaaaacgttcaattcgttcacttgaaaaaaaaaattattctctcatttaaatacaaatttctgtctccgatactcgagagccagactgtcggatccgaatagagaccttgcgaaatgataacaacaacaacaacaataacaacaatactaatctgacgaacatagatgaggttgtgttagccagattagaaaagctccaaaaggcccaagacgacgtgatgcagctactgagttcgcttctaccacaggcacaccaagaagcatctgttgaaaggagtggcttacctgaagaacgtgcagtaaatgaatctttgataaggaaagtacatactaatgaacaacgaactcaggcgacacatgataatgctcgaggaatcagaacttttgagattgctgaaaggattggtgaagaggctcggtcttcctctgagttcgtcacaaaagacgaattgattggtctcgactttaaaggggtaaatcatcatcatcagtaacttccatcgactttcatccaccctaccctgtggaagttgtagtcaaatcttacccttgtggttacatgagtccggtatatcgaaaataaaatgggaaattcggcaatgccaaagaacatatccttcaatttataaatgatttaggtatatatgcgcatgatctttaattaagaagccgagaattttcaaagtttctcactaatcgagcatactcttggtatgcaagtttgccattagggagtataaggagttgggacgacatggtctctcaattttgtgcaaagtgttctttacgaatgaagataaatggagcatagctga

SEQ ID NO: 30893 - DNA, 3254 bp, Cannabis sativa
  modified_base (643)..(644): a, c, t, g, unknown or other
tacattgaagggtaaaacggtaaaattatccctactcgatgtaaataattaataggggatcattgattatttggattgaaataatggataatttatagcgtatctatacttggtatagagcgttttatataattaggagtgcaactctgaatctatagtggagttaagagaaattaataagataaaaaatttactcggtaaattctaaaactacttattgggagcttgattatataggtgcatggttcacacactagttgagataatattatcttgtagactcaattaattgattttattaatcaaatagaatgttgaataagactatgtcttatttatgagttttactaagcaagggcttctttgagaagaaaaaaaaattaggatttgtttgttaattaaaagactttgaaaggtctaattaataaaaaagttaaatgataattttatttgatatttaattttaattattaaataaatagaattggcatttatagatttagaattgaagatggcatttgaggaaagaaagataagttttaataaaatggcaaaattgaaacccattaggctcatgaggaattaagctaaggaggtttaaataaagccaattttatctttttttagggaaatttacatggtnnactaacttttgtcatttttttttacaaaaatactgccaggcgatattttttacttttttattgtgtttttttataagtttcatactacagtatactgtgttaagttttcactggtgttctactggtattttttagttgatctactgttgttttgagttggtctgtattgtgttctactagtgttttataaaaatacagtatttttgaaaaaatttccgtgtgacagtatttttgtaaaagttaacccaaattctaatatttttgtaagttttcctttttttattctattttaattcaaaacttaaccctaatagctatcatataaatagaataatgtagctcttattttcataacaataatttactctctttgttagataaatagaagataaacagagctatctctaatttcaaattctattctttttcttctcaaaaatttcaaaccctatagtgaatgagtgatagcccacacaatttaaggcaatgctcaagatagtgtggaagattgtatagtcacttgtcacttgaaggagaaaccaagttcatatcttgatcataccctgcaacagaaatgaccaagggttagagatctgaacggaaggagtcatattattctgcaagtttttttaataactttatgtgtttaatttattattttaggaaattcatatttagcatattagattatagaactataattaaacctacatattagcaaatctagatcctagtaaaatatttctaataattggcctcagagtaatgttaataatttattttcatgaaataagatatttggttgatttgtatgtgttcatatgttggtttatgtgattttgatgattgattatgatattacaatttttttttatgaaaaataatttaattttcgatttgatattattttatttggatagttggttaaaaattaagcaaattatctttttacagaacttaatttcaattaaaaatgaaaaaactatgatattttgaagttttgaaaaaaaaaattagttaaggtttcccctcatgcgcacgcggaatgaatgatgccctagcatcaagctcagacaaaactcattttcacaagcatgtccgagttttcttggacggatgctgtctgaacgagcctcgtgcgcccgaaatgaggctactagcagccttgtcgctcgaccaagtcccatatgagcgcgcgtggacagaatgcaatgcatctgtccgattttcaccatatttttatttttttcaaaattttgtcatttctttttcatggaattaaattttgaaagtttggtagatttttgtgtagattttaatttttaaaatttaaaaactaattatcagtataaattaattattattaatttaattaattttaaatattagaagactttgaatttaaaaattgatattttctacaaatttgcaagtatcgttttttttttaaaaatttgattatttattattttattttaattataaggtcagatattttatattttatttaattaattaatttatatgaaatgaccttatttgacgttaaaatattaatataatttaaaaataatctagatatatttaaaatctaaccatatatttattaatttttttaaaattttggttattttatatattttattaaattaaattatgaaattagaaacatagtaattatttaccattttatcttgttagatatttattttattaaatattcttttaaaataacataaattttgaatagttagttgatttttttttaaaaaaaaatatttagagttgttataaccataatttttgaaatttgaggacttatttaatttaatataaaattaaattaaatcatataaccaactatcctaacttattatatgtttgtttatttatttaattgtttatttaaatcttgtttaattaacctattatttattttatttaaatgattatgattaacttgttgatggattcaataatccaaattaatcacagttaattgtcaataaactaaataaataatttgtaacgggtaattgtataatcttctttcattagtatcataaacttagtaacatgataggtctcagccaaattagtgtatatatgtgagcctacgtatgttattgagcttagatgcatataggagtccatttaaatttaaaaattcaaatagactaggttgctaataataaaaatatcacattgataattttatttaagtccaattagtattggacttattcaattaatgacaattatttatttaagtgaaaattataccagatatgaaattctataaaaaaaaagtttcataaatatggtatttttaactttaccattggcatttgttcaagtttaaatttttttatggtatttcagttgccaccttttttgtaaatttaatttttaaatcttatattttaagattgtgtattcaacccaatttcttaaggggtaatttaataattttaaatcttttttttcaattcgattcttatgtttttttagaaaaaataatttttaagattaaaataggagttatcttttatagtccgcatgtaaaagtacctctatttctccttcactatttttattgttctcttagtt

SEQ ID NO: 30894 - DNA, 2987 bp, Cannabis sativa
tccttttcaatgtctctttagcataaaaccagattattctttcttaaaaaaattcggtcgtgcatgttttccatttcttagaccttataaccaacacaagtttcaattcaagacatctaaatgtgtctttcttggttatagtcctttttataaaggctatagatgtttatactcctcaggaagaatctatattgcaagaagtgttaacttcaatgaaaaagaattttcatactgcaatatgtttcccaaaccacagactgctagatatcacagaaattttcttgcaccagcctttattattcctactgtaactccccctgaccactcttctcagtttcagtttggatcacttgatttccattctgattctccaatcaacaccatatttgaatcatcacccctgcagcagcctaatgacccacatgatgctcatttgacagcaactgaaaatcctggtgccactactactgcaactccttcatttgacaatgaagcacctgcaacccctacaccagaaacccctacaccaaaaattcctacacgagaaattccttatcctccaccaccattacctcaaggccatcccatgcaaaccagatcaaattctgatatctacaaaccaaaagtatttctggtaactgcttcaaaacaacagctttatgaggaactaaaaatagactagcaagctcttagtatgcctcattgggagaaagcaatggaccatgaaaacatggctttgataagaaaggaaacatacattctggttcctcgtactgttgatatgcatgttttgtccaacaaattgattttcagaaccaaatacaacaaagatgggtcactagagaagttcaaagcaaggttggttgtgagaggctttaaaaaaactccaggtctgggttacaatcacctttccagtaatcaaagcctccactataagaataattttctctcttgcagtgacatatgattgggatatacaacaaatagatgtaaataatacatttttaaatggagagttgaagaaaaaggtatacatgcagcaacctcaagagggtatgaagacagcactaaacctgattttgtatgtcaattaacaaagtccctctatggtctcaaacaagcaccaagggcttggtttgacaccctaaaagacactttaataacctagggatttaaaatatctgtatcagactcttctctattttacaaaaattagcagggctcattgttgcttgtccttgtatatgttgatgatttcttaatcacaggtactgattcacataccatctccaagttgatcacagatctgcacaacaagttttctctgaaatcccttggatatgtcagttacttcctcgggtttgaagcttacagaaatgcttcagggatttatctcattcagtccaagtatgctgcagatcttctcaacagaacaaactttgaagatgccaaagaatgcaacacaccgatgatcttggccaataaactctcccaagatgacagtcccaactttgacaaaccagaaatctatagaagcactataggagccttacaatatctcacattgacaagacccgatattgcttattcagttaacaaattaagtcaatatctcaagtttcctactctaaatcaatggaatgcatgtaaaagaatactcatatacatcatagggactcctcatctcggtttgcacttcagaccatccactcttctcaacattgaatgatactctgatgaggattgggcctcaagtcttgatgacagaaaatcaataagtagcttctgcatctttcatggaggtaacttggtaaattggaattctcaaaaacagaaagctatagctcgatcttcaacagaatctgaatatagagctctgtcctctgctgcaatagaactggtgtggatcaactcttaactaaatgagcttggcattactctcagcacacacctccagttctgtcgtgtgacaatcaaagtgcccaatctcttgcattaaatcctatctttcacacaagaacaaagcatatagagcttgatgtccactacatccgagatcaaattgctcagaacaagctacaagtatgctatatacctactcaagatcagactacagatttattcactaagcccttgtcttcccctagatttcagtttctatgtaacaagatatacttagagcattccaagtatagcttgagggggtgttagtgaagatagttaggtagttaggaattagttatttcactgtacatgttagttatttgtcagctcctttttcctaagtgtattctgttagttgtattaagcttggtccgtatatatataaaacttcagagagtctgtgattttaacacagctcatttcatcaatctcaagtataatacatcaaaatataaatattaatttttatatttacatatttagttttatgcatttttttttttaaagttatcaacagattaaaatcgtaaactttatttataaatattcataaaattatgtagttatattttttttgcatttttttttatgaataatattcatttacttgtatattaatgaaatttgctcccaaaaaataaaccactagcaaaaacattttatgttatttgcccccattggaataatattctgacattgtggaactctagtgtatatcattcaagtattagttcacacttcacaacccaacatttaagatttttcaattaagagaaaaaagaatgtaacatgtcatttacttttcttaatgaaaaaaaaggtttcatgacaccactacagcttctgaccaagagaaaacgttacacatcaccttctttacaagaagaaatgcctatacagcaaaaatgaataacagaatagtgacattcttagtactagaaaacatctacatatgtcaactatgtgaattatcaaaagccttaaagagacattcttcaatgtacaaacacattcatgtggttacttcttccccttccaccaac

SEQ ID NO: 30895 - DNA, 1058 bp, Cannabis sativa
aaaaaaaaaaaaattccacaggaacccaacccaattactccaaaactgaaatgcaatcttttcttataaaataataaaagaaaatgtccttgcataaaacttcagcggcgaaatatagatatacctcgccaataaatacacttccacgaaatatatacaaattagttatagcttcctagaaaaatccaaaccacgcttaacagtaaaacaacacagaaataaagcttaaatcttgaaatacaatacaataaccctaagattatcagagaacgatcgataaacctaaccaccccgtttgcttgtgtagaaaaacaaaatcttgcagtatacataaatgaaaatacattgagttccaaatgcaaattccttttattattattattaatttgtttctgttccatatttgaaccattcacacttttctcaggaaccaatcaccgttttaataaacaaaaaaaatattaaaattaataaataaatatagcttcagcggatgagattgacttgcctgagatgataatggttcgcggtttcaactttcaagcctatgatgaataaaaaaatagggagggtttttggataggaagaaaacagagaggtgaaaaagcgatcgaaaccagggggagagagaaaaagagaaggagagagataagggttggggttagagagatcgctaggaagatttaagagaatgaagatctctgttcgagttcaaaacgacgtagtttcagagttttgggtttcagatcgaagaaaaaagaaagaacgaaaaaacgagaaagagagagaaagctccctaatagagttaaagatgtacgaattgccctccaaacactaatataggtatttttcaacatatattattttttttatattattcaaaaataatgaatggataataataataacaataacaaaaaaaaaaaaatacaaaacaacatataatttctatgttatttttttttaatttaaatttaaacccattatatatattttttttactttaaaaaatacattatacatattaaaaaatacatttttatattattattattatt

SEQ ID NO: 30896 - DNA, 1054 bp, Cannabis sativa
catgaaaatggaatcaatagtaactcattgttcttcagatttatatggaagtgttggggactagttttattttttttaactaattattttaaatatactttttttttgtaaaatcattaatttgttattctatgccaaacatcatatatcatatctcccatattaaattatactaatatgatgttaaacaatattcgatcaaattagtatctaaagatgatgaaacattttttagatcgagtccgagctcaacaaaatttagagtaatagattggaaagaaggaagagcatttgagagaataaagaatgtttgtttcatttggtaaaacactaatgcaaattggtattctctcgtctcttggtcatttgggcttcctcatcatgagtagatttagatataataatattaaaaataaaggggtatattgaaaaatacatcttttatttgtcaattaactaaatttatctctaatttatatttaattaaaatatatatttttttatatgtattgtacctaaaatactttgatataagagtcacatagggagtatattgaactttgaagtaacaggagtaaaattggtaaaatgttaaaaaatataaaaaaaaaggataaagaataaaagaaaacaatataaaaaatgtatacagtctaattttcttaaaaataaatgtaatgaaaaatataaatttctcacaaagttatacccaccataagttctaaaattaatttaagaaaaagttattagaatcattttagtttagaagaagttgaaaaatacttttttatatacattaattaaatttaccttcaaataaaatttaatttaaatatacctctttttataagtattgtacccaaattgtttttatactctcacataactaagacataatttcaaacataatagatttgtgttctttggagatagatgtgtaagtttgtgggaaagttcggataaaattttaattagagaagaatggagattattgtgaagtcgtaggggtaaaatcggtagaataattaataaaaaaaagtaaacataatagatt

SEQ ID NO: 30897 - DNA, 7169 bp, Cannabis sativa
  modified_base (957)..(958): a, c, t, g, unknown or other
  modified_base (1013)..(1014): a, c, t, g, unknown or other
  modified_base (2041)..(2043): a, c, t, g, unknown or other
  modified_base (2170)..(2178): a, c, t, g, unknown or other
  modified_base (7100)..(7101): a, c, t, g, unknown or other
tatgttataattatttaagatatcatataaaattataagaaattcgaaataatttaaaatataaaaagtaatgttcaaacagtttatttcacacgcatatacaataaaagagtcactcgtaaaacaaatgtttgaaccttattttcaacgtgttaaatttcttcgaatgtctcaaattttgtaaaatatcttaaataactataacgtacataactataaaaaaattggacgtattaatttttttttcggataccaaaatagataggaattatcagtatatctctattaaaatgacgcgatgtacaattttccaatattatttcactatttttattggaaaagaattggaatgattgagggttctaactaatgttaatttctaaaagtaagtaatttgacgttataatcaatgttcgttatatcaatatgtatatataaaaatatttagttgtgattagttatcctaatatatacgtattagtgacgatgacacactcattagaaacataattattttaataaactttttttttttcaacaaataaagtctttattttcatctcatatgagacccaatttcgtagaaattcataattttttattatagtataaattcaacaaagataattgatagtaatgatcacttcaattcaagtcatcaaatttttattattgaaattttttattgctataaatatttttggaaaattttacaatgcatccccttaaaatggatatattgatatacccctatctgttttagcatccgaaataattttttagtcaatttttttttcatggtcatgcacgttatagttatttaaaacatcctgcaaaattttaagaaatttagaaaagtttaacacgccgaaaactatgttcaaacaatgtattgcactcgtaactattttattttatacgcgtgtaaaatcgactatttgaacattattttctatnntgtaaattattctgaattttctaaaaatttataggatatcttaaatagctataanntacatgaatatgaaaaaaatagactaaattttttttctgaataccgaaataagttaagggtgcatcaatacatcccttttaaggggtgcattatagaatcacccaatatttttttcacagcaataaataattaaaaataaatagaaaacgcaagtcaacaaaatcatacaaaattttggttttgtttgatttacatttgcattaatgtcctgtaatttaataaaaactaatataaaaacttaaatttacaaaattatggtgtttttgtaaagaaaaataaaacagattattattgtaaaaactttgtagaactgttattacagttagtttttgggcctcaatgtaagaaagagcccaaaatctttagtagagggcctagcaagcccatatagtttttctttgcttgtaagcccatatagcaagcccatgtagttgatgatcgtttccttttcagggcaattttgatttttatggttttttaaagtataagtttgtaaaaatattttcaaaaaagttattttatggaaattttttagaaaaatgtttaaaaaatatggaaaaataacataaagtacctggttacctctttatggtaattgattatcttatggatacttattaccctggttatccttatatgattttttcaactttctcttcaattttcttataaaataacatttttgaaaaaaaaacatatttttgcacaaaaatataaaaacccataaaatttgtaattttctttctttgtatagtaactttcaatctaaatccactaagttggaaatgggtgagagtgtgaggcccaacttcaaagagcctcattaaagcaccaaaattgtactaagaagtctaggggtgttcatccaattcaattcgcactattttgtttatagtgcatccgatccgcactaagtgtgaattttattttttagattcaatctaatccgcacgatagctcaaattcaatatgcaaaagtgcggattggatcggttattttatattgattactttttaatattaaannntttaatatttatgaaaaaatatattttttttcactaaactagtagtaaaaaaaatagttattttatgtctcaaacaacaaattaaaataaaataacaaattcaaagaaaaaaaaaattgtatgtatnnnnnnnnntttaattttattttaaattgcatgtagaaatatatatatggaacaattcttaatggatattatttaatattattttagaaaatacaagatcaaataagtaatttttgcaaaacacagaatctaaaatgatatctacccttttattaggaaaaaaaaaagtttttgacaactaaaccctccaaattcaaactattatttcgcttacacttaattctccaagcttaaactttggcggtaaaatcctctaaactactaaattagcaaatttaagttttcatccggttatctgtcactataaactgcttatgtgtacattcttatacacgtgatatatttatattagtatacttaatattattattttaagattattttaaaatttattttaaaattaagtaaaatatttaaatatttattacctttcccaagactcaagctccgattcacttatttattggtcacgacctctttgtgggagaactagtaactctattatttcatgagagcctttctatgcagtatacttttgctccgacttccactctttgctctattgatatcagacttctaaagtcgaaactcgttggtatttctttttataatttttaaataataatattaagtatattaatatagacatatcacgtgtaaaaaatagtgcacacattaataattcaaattcttaaatttgttaataattttctagtttaaaaagttttactaataaaattaaaaaaaaccttaaatataaacaaaactcgaaaaagaaatgtatttattatagacaaaacgacgtagtttgggcacgacttcatttgtaatattctaaaccctttaagcccctttgcctcgtctcatctattctcttcgatcttcacagcttctccgccgtgaatcgtcgcctctccgccgcgattcttcacttttcatcgattcaggtatgcacgattttcacaattttttcgttatttcggtaaggctctgctttagtgtggcaaaattttgatttttgatttcgttttggactgtttattggggtttctgggagtgtaaattgggtgtgaagtacagttttatttattggttgagtttattcaatttgattggtttgatttcaattcaaacaaaaatcagttcgttttctgtgtttttagtgtttttgagttagaagatttggtttcttgcttggaattctgattcagtagttgtgattatttgagggttttggttcgattgaagtgaaaactaagagttaattctagctattttggtgtgtggccttggaattccttagttacaaaatacgctactttgtaaagattaagatacattgatttatatataatcaaattagggttttgttttgttatgtaagctgattattatagtgtttcttcattttagattttgtaaggggagaggagaagtaaaagaggaatattgatcaactttaagctatggcttcttctttgaccgataatgctgccccggaagaaacacaggttctttaattgttttcctttattattatatctgtttatgtatgaatgaagataagtatgtatgttgttgatggtgatttgttcactggatggtcttaacaggaagttttggtggagtttcgtgctggtaaaatgaattttgaagggaccaaagttgtccctgatacccgtaaaggacttgttcgcattacaagggtatggatcatgctatgaatttttgtgattgacaaaatacttgatctttttttattgattttttattttatggctcagggtggagagggattgctccattttcaatggcttgatcgaagtctaaatgctgttgaagatgtatcctattggattgtttgctcttccgttttttcttcttcacattattagtactatgtctctttatactgtttccttcacttaaggtgtcacaggatcagattattttccctgatgaagccgtttttgagaaggtattgaacttggatagagctatgcattatttatgtgctacatactttatgtctggtttggttactatgacaatggggattggtctaagtaatggttcatctcacttacacaggttaatcaatcatcaggaagagtttatatattgaagttcaatacagacgaccggaaattcatcttctggatgcaggttgatactcgggctctttgactgtagttatccattctcactgtataaacttatggtccactttaacttaactcttctttatgattttactaatgtctttccaggagcctagtgctgaaggtgactctgagctgtgcagctctgtaaattactacatcaatagacctttaggtaaataaaatcgttgactgattaatgctttcagtatatattggctgtagctcaataataagtaaacattttgagctggattcttgtacgtacgattgctattgaattgaaatatttgcattgtttagcaatctatacagttttcattagtgattagtcttccgcatatgctagcatgaaacattagcaaggattaatgttatatttccccctggttttgcattgtctaatacaaaaggacgtagcatattgacatggaaattgaatataaatttttttctatgcttttctgcataagtttgattgtgcttatcgttctcttttggcagacttccttagtgaagaagaacctgatgcttctgttccactacaagtttctgaagatatgatggacgacgatatgtcatcaaggtcagctactagtactaacatgtgaaccttaccaaactctcagaaaaattgtaatacaagaaacctagggacatataaactaggtttggtgttatatgtataaagtggatcaagattatatctaggctgtgtcggactgttcagctgagcacagcttagagctgttggaccaaggaatccaaaacatacttgttgaaattgttttatgttgaagtgaaaattggttatagattgttaagaatttcaatgagcagtgctgtatatacacagattgtgatcatgtttaataaataatagtgttctaggtactatagtgatgtttgcacacaaaatatgcacaaaaatatcacatattctcatgacaatattcccaaccaagtatgtttatttaagataagatccatatgttgtaaaacatgcaagcaagtagtgttgtgaatgcgaatattttctgcaaatttatagtgtttactttaattttaaaagtgtttaaaaatttatttattcgtatttgctagttgatatttgactttcttctaagaggtaatgagatggaaatattcaaatttggtttttggccaacttggctttctgctgagaagatatttcttgttgattcacatttttccatgcgatttgtatatttcactgtatctgtgacattgttgcaacgtgttaaatgacttgtacttctttcagagctggaaacttgattgtcccaaacttgggtgccgatgtatctagtgatgtttcctcatcatccggtccagttaaattagaagatttgcaaaggattttgagtaacattggacctgcagctgcaggtgtggagttttttcttacagtatgctcataattatagattgctatatagatgactccatacatatgtacatgaataaaatttcactgaactaataattgttcatcatatggtgcttgttacagatgttgctggagaccctgatggaggtttatgacacgactttgttgttttcttatttatcagctttactgtagaacaaatttgccgtttacttattttcgggtgtatatatttttggtttgacattgcttcattatattaacttttcttttggctaggcttgggacttgatgatatattgaagcctgatttgataatgccattgatagagacattgccgttagaacaacatttagcatcttacttaccagaggtcggtaataaataacgcgttgtctgaatttgttatcattttcctactcatttttgtcatataattccttttggggctacagggccagtggtcaccagaggatatattggagttgttgcagagcccgcctttccgacaacaagtagattcatttacatatgtaatgatgaatttcgatatccatcccatatgtgtagcaatagcttttactatgcattatgctaactcagtttccgggataattatttgcttaggtacttcgaactggacagatagacttgactcagtttggtattgacccaactaactgtaagtgttgttgatatatatagattgtgttattgtcaagtgattgtgtgtttgttttaactttgtctttcattattttgcagtcaaatttacagtgctgtcctttctggaggtgctggaggattctgtgtcaaagacatcggaaacaagacaagatgaaaaggatttgagatctcagtcttgtaaccgaaatgaaccgatggacgagtcgtagttatatagtattagtgttgattgtcactttcatgggagaaagaaactccatcatcgaatcccagttgctcaattgtcctttgttgattttggactttatttttttttgtatctttgagggtattttacattaattatatttcaagagaagaagggagaaaaaagcattgatgtttcatgtttaaacatttttaatattttgtatacataaaagaccaaccaataaatttaaagcttttgattggtttcttttttctttttaaccttaaaattaatattgtaatcaatgcatataacttcacatagattaaatttatttttagatagtgagtggaaaaaaaatcatttttggttctgaaatttcccttggcttaatgaaagatcaaatgaaaacatcattttattatgtaattcttattccaaactttgaacatggtaagaactaaggtggcgtttggttgnnggtaatgaaatggaatagaatggaaaagaaacaatttttattctattcctttgtttggttgtatttta

SEQ ID NO: 30898 - DNA, 1883 bp, Cannabis sativa
tggtatggtgactcattctagtttggttgggataatcaggtaaagcaaaaaaatggaatgaagggagggaaggaaggaaggagaagaagagtaatatgtgtatttctgaaacgggagaaccacagaacaattttgtcattgtaccactttgaagataaaatcttggttggaaaagcaggaaagaaaataaattaaaaaaaacaaaacaatgagagcttgaactaaaagagttggaagaagaaaaaggaaaaaaatgcatctgctggttgtttttttatttcaggcatatgctcttagaagaaaagagtacttcacacactcatatatgcatgcactcagcttaataggtttgataatataatttatattattagagcttgaagaagtttgtacttgtagtcacctacttctgtatcttatatatcatcatcatcatcatcttcatctctctgtattgtgaatattgtaggcatgactatgctactttgcttatgtgatatatatataattataataataataataatataaattcccaggttttaaaccaggctcacaaatggtattactatctcttctcttctcttctgtcttcatttattactcttttgtcattgtgtaaagtttactctcttatatcaccatccataattgccctcttattatggtcaccacatgttattgcatctttgtcagtatcaccatctatgctattaaatatatatatacacacattagaatgaaaattatcaagagttttattatagtaaatttgagtggtgtgataaaaccacccaactcatcattcatactcaaatctcaattggggtcccctcttaaaaaaataatgatgggttttgaccactgtcttatttgagttttgaggtactatattcatacaatatatatttaatttttcatcaacttgattaggcataatactttcaagttggtgattatttaaagttgaattaggcataataacctaggctattatcatatatatatatgagcaattggaagacaccaatcatgactgtgtacccccaatatagagcatcttatgtgtgtgaaaatcaaatgtttgtcttaaaatgaatggagggtagttgagttgtataaaataaaaaccaattcatgtgattgtgtttaacatttacaaaaagcatatgttcttttattttatgatgatgatgatgatttaggggtatggaccagcttggtttttagtaagcttttgtccactttaatttctggaacttactacctgttttgcaatgttcttagggtcccaaaataacccaaaaagtttgcttatttgcaattttatccgacacccaaaaatgtcacttgtttaatttattattattattattattaatttttgtttttcttttcatttaaaaaagttggaaccaagataagggtcggtgagaaactttattcccttagcccttataaacttttatttattgtctcttataagagtagtagtatgtatgtatatatactacaaaacaagcatagtgattttatttatttggttgtagaaaaaagatggttttctttgttcaaacaatattattattattattttcatgattcatatccagaaaacacaaacaatatatatatatagttctagaagatggtagtgagtgagtgagtgaggacagagtgtgagaagagatttgtttatttatttatttaataatggaagagagttcaagctggttccagatctcatttggtaattaatataaataaattaagtagaaaaagaaaaagggtaaatatcattttggaccttctattttataaaagttaccaattggatcctgtgttttgttaaatgataaaatggatcttgtattttctaaaat

SEQ ID NO: 30899 - DNA, 3016 bp, Cannabis sativa
aaaagtgcaaaagcattacttgaaggcttacaagcacatacttttgggggcaaatattatacctagttttcgcaaaacataaaatagctactcttgcacaaggtcccacatgccaaaagtacgttgaagacattaaagtcaacctgtcgactttgaccaagactcataaatatcaaataaatcaagacatccttcttgagggccccatggcactgctagagggctcgaaaacttcatccaaccatttggcgcctggagtcacacacccaagtgtgcccaaactagggttcataggccctcgcaagcattttcaccgtatagacctcaatccgccaagaaaaccaataaggacttgacttgtttaggcatgaaaatgacttgggtttatgtataaagtcaaaatagcactaaaccacaagaaaagaggaataggtgaccactgccacaaggaaatggcagtcgtctccaattttggagaccactgccataagagaatggcccaggtcactcctcgcaaaccatgaaaggaaatttgctcgaacggattcccttgacatcaaagagcaagggacaagtgagaaaagtcattttcggcctaggagtcgccttaggtgacctctaccataagagaatggcacaggtcactccttgcaaaccatggaaggaaattttctcgaacgggttcccttgacatcatggagtaagaaacaagtgagaaaagtcattttcagcctaagagtcgccttaggtgacctctgccataagaaaatggcagtgctctccaaaattggagaccactgccatagtaaaaagtggcacaagtcggttactacacaaggaagaggaatttattggccaaattctattttcaacatccacataccaaataccagaagccatgggtgacctgtgccattatccggctcaacctggtggcagtggtcacctattagggtttaaaacatcaaaatgaggtttttgggtcccgagactccaaaaatatgattcaccataaaaaaaacaagtcaaaacacccccgaagggtctgagaacatacatagctgacctctgccatttggccatggtagtgctcgcaactggtacaagccagcataaactgccttcagtaaaataggaataactctctcaatttttatccaaatgacctgacccaactagattagaaagataattttgagacggatcaaagtgtgtctcacagccatgactcaattctgaggttatcaggtccaaaagtagcttacaaagaaagctagtgcattttactcgagaattggaaaatgcggctgggttagtggagcacattgccacagcctatatggcgttgtgcgcgagcatcgacagtccaaaacacatgtgttcagcacttcatttcaaattgatgcatcctcaaccaaaaataaccaattgtccaatattggtgggatatttacctagatacaaggagattgttattgatatttatttatttgtaatattttattcatataaaagagtggtatacgagattttttaaggagatacccgatgtgtgagtgatcactaacagaccctctagcctatttatacatcaagtaggatgctgagaaagggatctcttttttttttttttttggcttcttccttttgggacccttttcctttctcacttctggatcttcaactctgaaaccttctcctagaaaattatttgaaggcaaccaagagcaccacattgatttcttcaccttctccattgagtccaccatactcaggcgacgccagacttcaaaacaccattgatacacacttttcttttcaaattattggtttactgttcccaagaactttacaaccattaatttagatcagattcatgaatgtcaagtctcccatgagccttatattcataagtctcgattaagatttcacctagaattgctttgctgtacttttatccacacacacttgagaacataactctggtgtgtcggatccaattaataaaaataaatagatgtagccccattaccatcgcgacatgaggggtgaactactataaatttctggtgtccgcttaatttattacagttttattagtcagattaattcaccgtggtcctcttttattttacgatcttcttagatcagttgatgaaaaactgcatcaacaaaaaccatctacataatttttatttttaaatatatctacaataatactataaaatcaattaagaatattttgttaaataacagtacattttgttaaaattaataatgaaaactcaaaagtatggttaaatcaataattttgttacataaccacattataaagatatatatttatatgtatgatatattgcattagtaattttttttttttaatattgagggagaaagaattcgaacttgagacttcctttttatgagaagtatgaaactaatcaacaagcttatgaccacatatattgcactaatattaaattgattaaatataacacaaatatgtttggcattattatagggtgatatttatttctaagtattagaagtaattaatcgtactattgttataaaacattacattacaccatacaccgatttttttaaaatacattattaaaatttcattgtttaaaaaatttaatacaatttatttattttaaatatataatattattatgtgtattcttttacaaaaataattattaaaatccaaaacaattaataaaatatgtttacagcaataaataatattttataaataaagagcctgaataataaatttaaaaaaaaaaattaaaataaagaatgagtttaagtatatatctgtattttttattcaatagtttaaagtatttatcatgatgtgtttttagtaagtttctttaaaatttttaaagtttttgtagaaaaagttctgtgagtgctcttagatatgccactaaatatataatatatttagggttcgtttggaacgccgcattaggtcgtgttgtattgtattgtattatat

SEQ ID NO: 30900 - DNA, 2158 bp, Cannabis sativa
  modified_base (2107)..(2109): a, c, t, g, unknown or other
cggctactggatccccctgttgggttgacaaacgaagtccactggtcataggtgttggagcaggcttggctccaaccatttgagctttctgtaggagatcccatgcatatttggcctgacataagtgtaaaccattctctgttgtgtgcacttcaattcccaggaaaaagtttagattgcctaaatcttttagtgagaactgagtgttaagagcagagatgagttgagagacagtcttggaatcacttcttgtgattaagatatcatcgacatagatcaatactaggatagtcaattcagctgatcgtttgatgaagagtgagtggtcagatttagagggtgtaaagccaagtgagacaagactgtgatggagcttctcaaaccatgcacgaggagcctgcttcaggccatacaaagccttattaagtctgcaaaccagatgagttttgccaggaatttcgaagcccggtggctgggtcatgtaaacttcttcttgtaattcaccatttaggaaagcgttgttcacatctagttgtcgaactgtccacccttttgacaaagcaagaaccaaaactaccctgatagtaacaggtttgactactggactgaaagtttcagtgtagtcgaaccctacttgctgatgaaatccttttgctacaagtcgagccttgtactgatatatagtgttatcagggttttctttttgcctatacacccatttacatcctttagctgtctttccaggaggaagcctgactagaacataggttttgttccttatcaaggctagaatttcatctctcatggccttattccagtgttcattgagtaaggcttcctggatgcaagaagggagtttagaaaccagaagtactttgggtttgtgaatcccagattttgatctggttttcatgtgatggctgttggctttgctggtatcatttgaacaacctggcatgattggatgctgaaccacattagcatcagcatttgcagatcgaacagcagcagtagtagtgccattagcagtggcaactggtgcatcagtattttcatcagctgctatgttgacatcagttttaggtgttgagacatgttcatcaacttcagtagtgattggctcagcagatattgggaagcttgaacctggtgtcatagtaggctggggacacacaccagaaataggaccctgcaatattggttcacctgtagcagcaagagaattttcgcttggacagccattgttagttgcacaaagtagagtaatgttgtctatttaaacatgttgatcaaccctttgattattagtgacagagtgtgagtgcacaagatcattgattgtgtaaggctgcctgtaatgagagcattttggaattaaggctgatataggattgtggattatttgagatgaatcaagagaatcatgatccacaatagtctcataaggaaatgaaaattcatcaaagactacatctcttgagatgtaaagtcttccattagaatcaaggcatttgtatcctttatggttgagactatatcctaggaatgtgcaaggtgtagatctgaaatcaattttgtgtttgttatatggcctaatattaggaaaacacttgcatccaaaggttttaaatgttgtgtagtttggctgtttgttgaagagaatttctaagggtgacttgtggttgagaactgaggtgggttatctgttgtgtatatacacagcagatctgaaagcttcgtcccataacttgaggggtagggaagcttgtgccaacaaaggcagaccattttcaacaatttgtctgtgttttcgttcggccaagccattttgttgatgtgtagtggggaaagggtgtctacccatcggtttgtagagttttaatagatttacctagttgtaattcagcttcctttttaaagttgagaaagactttaaaggcatttgatttgttctttagtaggtataaccaagtaaatatagagaaaacatcaacaaagtgtatatagtatttatagccattgtgagaaaccttgtgagaggggccccaaagatctgaaaccacaagttgtactagttctgagataacatgtaacaccctaactagcnnnggcgtattacgtgattttttaaacttgctgtccagctcgttgctaatca

SEQ ID NO: 30901 - DNA, 2828 bp, Cannabis sativa
gaatctcaactttctcttcttcctctacattgtgcaaaactaacttggtttgagccacataacctgcttccctttgcaaagtcttagtaacttgatctaattttctgtatatcttaacagactctggatgtgatttatctctggcactaaatgtatggaccttgtttttaacttcaatccaactacatccaggatttttcttcaacccacttcctttcattctcattctcaattcatgtacatctttccactttccactggcagcaagaacattagatatcagcacatattttcctggattctcggggtccaattctaagagcttcctggctgcaatttctcctaattctttgttagagtaaaccctgcaagccccgaggagagcacaccacacctcggcagtaggtttaccttcaatgctatttacaaactcgtaggcctcttccaagcagttggcacgaccaagaagatcgacgaagcaagcataatgctctggccatggctctaaatgataatcccttcccatggaattgaaatatcttcgaccttcttcgattaaacccgaatgactacatgcatatagaagtgccagaaaggtgatatgatcaggaactaatccttcgtcctccatcttcctgaataaatcaatcgctttcttgccatgaccatacattccatatgcattaatcatagtagtccacaggactaaatctataattttaacgctgtcatataccttaatagcgtactctaaattcccacagctggcatacatctctactaatgaccgaaaaatacgtccctctggggaaaaaccctttctaataaagaagccatggatttcttttcctttatttaaggcagacaaactagctgctgctgaaagtatgctcactagtgctatcgtatcaagttccacattggttcctttcatcgcgtctagaagttcaaatgcctcatttgcaagcccattatgaacataacaagatagcatgcttgtccaagacacaatatctttagactctatcagttcaaacattcgattcgcatactctacgtagccacactctccatacacattgacaattgcattttgaagcacttgatcatacaatccccttctcataatataaccatgagtttcttttaccaagtaagtattttttaaccctttacatgccagtaaaatactttcaatcatcattgaatctacaaccactccttccgtttgagctttcttgctcaattctaaggccctcacatgaaaattgttctgagcataaccagcaatgattgtcgtccatgaaatgaaatccttgacagccatcctatcaaaagcgcgacccatgaagttcaaacaacaacacttagcatacatatctacaagtgtgtttccaatctgcaaattagaatctaatccctcttttattgcataagcatgaccttcctttccatacaataagtttcctaatcgaccagatgccgcaatgacatttacaatcgaaacatgatcaggtttttcaccataaccttgcatataacggaacagctttagagcttcattataaagaccgttttggacatagccagatagcatagtgttgtaagagaaaatatccttgtcctccaggttgttaaaaactctcatagcctcaaccatcttaccaaatctgacatacatagcaagtaaagcattcaccacataaatatcaagattgagacttgatttcaatattgcagcatgaatctccatgcccaacttctcaaaaactgaatcttcacaggcttgaagagcagagaccaaagtatatgagttggatgaaacattcaacttctgcatttctctgaaaagctccaatgcctccagagcttttccattggcagcatacgcatatattattgaattccaagacacaatatcatcttttacagtaatattgccaaataacttccttgccccattaagattattgcacttagcatacatagaaactaatgcattcacaacaaacgacacagaatggcacccagttttgatagccagaccatgaatttcagtgccacatctaagatcgttaagagaaccacaagctttcagtatgcacggaaatgtgcatgaatcaagagaagctcctgaaacccgcatctctctataaagttcaattgctcttaaaggctcaccatttgaaacacatgccccaatcattgcattccacgtgaaaattgttctctcacacattctatcaaacagcttctgggcattcacaatagaaccacattttccatacataaacaaaagcttagtactcagaaacacagaatcagatacgccacaagattttgtgatatgggcatgaacttgttggccttggagtagagctttcttgctagcacaaagttggagaacagttgaataagcatcgtcaagacaaaactgggcgtgtgaagtttggtctgcaaacaaactgtcaagtgattgaaaagcttcacggagctcagaaatgtgtttgaaggattgaaggtgggtttggtttcgagagaaattgggtagcgataaggaacaagatttcttgaacataatggagtggcgttggtatggtagatttgaggaagtgaagtaagagtaactgagtgggagtgaagaagccattagagagtaacactgtgagggtggccgtaccatcgaataatatcatgatttattgaattgctgtgatttcataatgcagctacaaaaatatataacaaactaaaaataattattcttacataataaaattttatatcaagttttacaaattgttcattagaaaatcactgattttgat

SEQ ID NO: 30902 - DNA, 2800 bp, Cannabis sativa
attaaaattaattaagcattattgtatatagttggagagtatttcaatcattattcatagcaatatgctactttctgtaatacttgacatggccaaaaatcattctaagtccaacaaaatagtccaacgatcaaagtattgtccaatcccacttataagtcagtaagaagaagatcgtaggcccaatggctcacatgggctacgcccaaaccatacctttcgggtcatactcatatctaagcatccaacccacaataaagtatgatcctaaattataacgttagggttgacacgtagaagaagaatgatgatgagtttctcaattaacctataaaaggagcaatctttcctgaagtaatgaagggggaagaccaacactccaagtgacacactgaggagatatgtccaccctttaactattctagaaatagcgctcatccctaaaaaagtggagaaagaccatttctgtagagatggactacgtttgggaactaaccattctcttcacacgataaataggaccttactcgaaccgagtaaggcacaactttttgaactatcaaattagacactaatattcgatgacactctttctcttgctttacgacctaatttatactttctctacgatctgacgtactcttttttactccggcctatcacaagtcaattaggagccttgggccaaaaatctaattgggcattatataaatatatttgcatatgtagtggtaaaaatctaaaatatagtattttgaaaacataattgggtcttttatcttaataaaattttaaatgtattatcttaaaaaatgaattaggtattttttttactaaataatagttaaaatataaaatatggtattttttaaaaaataaatttgtggcctttttattaaaaaggctttttgggtttgagtaggggccttgggcatgggcccatgctaccccatccttgagttggccttgtcggtgagcaaggtttgactgtcgatgatcggacaaccattaatcaagaagcatgtatttacattcttattttgttttactttatactataggtttacagtttactgatttgatcgtcggagtactttcggtcgacactacctcgatgtcccaaaattttatggtcattgtctttatttcgcaaattatgaatgcccacaaacattcattttgatcattgtaaattttaggctctacaacaccttataagttataactaacggaagataacataattgaaaagccataaattaatgcagaacctcaagagctcgtgtgaaccttattcacaagtgatatttaaatataatataatttggggtgattttacagtataaattccccataaaaaaattgtataattttccaaactaagacactaaaaatataataacaatctaatttttctttcaataaaataaaatttttattctattttataagatttttaataatttgtaaatagtgtaaaaatttataaatatataattgtgtagctattatatatttataaacttttacattatatattgtgtagctattggtgttttggtgatttcattaagagcaccaattaattcaatattaattgtatccacacacactatttgagtcagtagtatcaaactccaaatgcacttttaaagtagtgtcaatcttcaattgaagttatattttctcattccctatcctataataactacacaattattgggttagtaataagagtatgatgtgttattagtagagtaataataggaatagagtgtttggtaagttacttcctagtcttaagctaataaccgttgggtagtgtgtgttaagctagtgtttggttctattttgtagcatatattaactttttattaagagctcacacgctgtaaagtatcaattattagttgttaatttgtcttactcttcttcatgctaattatatattcctatcagccttaacttgacacacataaaaaatatatatggagtcgtctttcgtaaacggtgccgtttcaccaccgccacgtcatcacgtcgtcttattccctttcatggccaaaggccacacaatcccacttctccacctgacacgtctcttcctccgccgcaatattcccgtcaccttcatcaccactccggccaaccgttcattcatagccaactctctctccgacacctccgtctccattatcgacctccctttccctgaaagtgtccccggaatcccggccggagtagagagtacggattctcttccctcaatgtctctggtaccgtccttcgccatggctacagctctcatgagacctgatttcgaccgagctttgaggaatctggatccttctccgagcttcatcgtctccgatggattcctatggtggaccttagattcggcgtccgaattgggtctcccacgactcgtttcttacggtatgtccacttacgctcaggtcctgattagagtttcgatccagtacgggctattccacggtgttcgaaacgacgaaccaatcactgtccctcctttcccatggattaaaatacgaaaggacgaccttcctatgttttcggatcctaatcccgggtcagaattcattggcaaaacaatggaagccacgtcacggagtttcggcatgattgtgaatagtttctacagcattgaatcaacttatgctgactattttagtcggaactttgggccgagatcctggtgtattgggcctctatgtttgggaagcccattaaggaatacaggcccagcaaacaactccatgatcattagatggctagacca

SEQ ID NO: 30903 - DNA, 2133 bp, Cannabis sativa
ttggtcacttaattttgtatcatactttattttattttgttgaggttccagatttatttcttaatcaatgacaagtgtgaaagcctgaacgttatcaaaaatgataatagaaactacgtttgaattcattttctcctcaaaagcaatgtctttaaccttatttctcccgccaaatttaacattctcaaaaaatattgtagttcccgtctcaaaaatatttatgactgtgggatcataaaacttgtagtcctagatcgctcagaataatcaataaagtagctgctaactgttttggagtccaatttcttttcatgtggcctataaggtcggttggacatccccaaatgtggaaatactttagactaggcttcggacttgtccaaagctcataaggtatctttgcaactactttagttggtactctatttagaatgtaagttgatgttttcaatgcttctccccagaaggacttagataagttagaatgagcgatcatgctccttaccatatccttaagagtcctatttaattcttcagcaatatcattcatgctaggtgatcctcccatggtatactgtgggaaaataccacatttctctaagaatttagcaaacggtcatggacgttattcacctgggtcatcatatctaccgtagtactcaccacccgattagattcgacattaattcttaatccttttgttaagttgattctcaacttcagctttgtaactttgaacacgtccacaaattgagatttttcatgaataagatataggtacccataacctgagcaatcgtctatgaatgatataaaatattattgaccattccaagatgtcgtagggaatggcccacaaatataagtatgaatcaattccaagacttttgaagctctattagaacctagtctcttagttttggtctgttttttcttgatgcaatctacacaaacattaaaatctgtgaagttaagaaactttaaaatatcatcagatacaaaacgctcaattctatattttgagatatgacgcgtttatgccataatgacgtttttctttatttaatttgtgttcagtgcctcgtgattccacatggaaggttttattataagatgcaattatttctagcaaataaagattgtcataagcattcaaataacttgttccaataacatttgaatttaaatacaaagtaaactgattgtttctaaataaacaacaatgtccaaaatagtccaacaaagaaataaaaactaaattctgtctaaaagacgacataacgaaagtttctttcaaattcgaataaaaatcaattctcaataacaatctaaaatgcccaattgcttcaatttctatcgattgtctatcacccacaaagatgtgtccttcaccatcacttgactttcggtagctcaagcaaccctaggggtgccgaaacgggttcgacatggcacacgaacacgaacatgaacacgacacgaattttacgggttcaggtcgagaaaattagatgtgggtcgaaaatgggtcgacacgacttgacatgaaataaaaacaggtcaaacacgacacgacccacttaacacaaatgtgacacgtttgacacgatttttttaaatataataaaataaaaacttaataatataattatataaaaatatatatttagtgatttaatgttaagttaaaaaaatttaaatttaattttctttaacatgaaattaaaaatatttcatgctgcacttgtagccacggcttaccacatttggagggtccaaaatgatgctctttggaatcaaaaagtgtggtgtattcggcatactgtacagaaaattaagggagacttgcaatatagaatttatcatgtaatgctaaaaaaggctaaagctatagatagagaatggtttatgagaagatgtacaaaatagaattgcaagaagagtatgtgaaaagcatgtatgagttgtaattggtgtatgtaattggtaattgagcaatacaatgatccttattcatcagaaaaagaaatttattatatatatcaaactatataaatgtatataagatttctaatggaacttaaatctattatttttctctacaattctagcttcaataatagcaaaacgggt

SEQ ID NO: 30904 - DNA, 2300 bp, Cannabis sativa
  modified_base (45)..(59): a, c, t, g, unknown or other
tgtaactagcgctgcaaccactttagaaatccaaaccgtaaattnnnnnnnnnnnnnnnaaaaaaaatagtatatgaagcaattcccttttataatttatagtattatataaatatttatatacatatataaatgaggtgaaagaagaattatgagcgtgacttttcataaagaaataaaaaaatggaaagtattacatcttaaaaattttaagaaccaaacacacatctgaccgaatcagatgaattaagtgcaaaacagtggttcaaaaaaataaaaacaaatgatattaataggtttaaatctgaacgaatcagatcagttatatcattaagtgcaaacaaatgcatgcgcctcaaatttagcaaaaaaaaaagtaagaaatatgctttttaattactagaagaaaccccaccgttagaccatctctagtgtattaatgtcttatatttagtaaataaaataagtaaataatatatgggtaaattacatttggtactgtattttttattaaaaaataattgttccattttgtaaaaacctggccgttcaacatttattctaaccaaatttattatattttaagtttgtaaaaattgttgatttaattgggcatatcacttttgttgtttatgatttgtctcatgtcaactaattcacatgtgcaattaggagttagttggtcgaggttgttggtctgttattacagttaattctgttaactgtttttagttgtaatctttgtattctttgcatttcagttcagattgtataaatagttagatttctaattctttggtgtgattaagccttgtacattctctctctcattgtaattctctccaagatcaaataaaacaattcagattattcaaactgttcttattttttgttcattagttcttaactggtttttgtaccagtattgctgcaacattgctacaacattatatgctgttagttttgttcttttgcattgattcttagtattcaatcttgattgcaaaggtgatcatcgatcacaacaagtggtatcagagcaaggtgtttagctcaatcaagattgaaactcgaggacatcaagaaacttcaagaagatggctccagcaagatttgaaatcgacaagttcaatggagctaatgactttgggttatggaggatcaagatgaaggcattgcttgtccacaatggaatttcagaagcaattgatgaagagagtctcaaagaaattgaagatgagaagaagaagaatgagattgaaaccaaggcacatagttccattcttctcagtctaggtgatgaagtcctaagggaggtatctagtgaagacaaggctataggtttatggaacaaacacagttacatatacttaaagaagtccctggccaataaactatatttgaagaagagaatgtacactcttagaatggatgaggggaaagatttgaggaatcacctagatgagtttaacaaaatcactcttgatctctgcaacattggagtgaaacaggaggaggaggatctgacaattatactgttaagttctttaccaagatccaatgagcattttgttgatacaatgctctatggcaaagaaactctaacaatgtctgaagtcaaggctactttgaattccaaagaaatccagaagaaaatagagggtaatcaaggtgaaaatggagagggtctgtttgctaaaggaaagacacaaaagaaagacttcaagaaccagaaaggaggctacaagggaaaccagaaaaccaagtcaaaggatgactcaagaggaactacagacaagaagtgcttttactgtaaaaaggaaagccattttcgagatgaattcttggctctaaaggccaaactcaagaaagaaagcaggaagaacaaggagaaaggagaagttggtgttgtagcagatggctatgaatctgcagatgtgttggtggcctctaatgcagattctggtcatgaatgggttcttgatttcggatgctcatttcacatgtgtccaatcaaggaattgttcaatgatcttgaagaaagaaagggaggaacagtttttcttggagacaacagagcctgtcacatacatggtactagatcaatcatgctcaaaatgcatgatggagtcaagaggaggattcagaatttcaggtatgtaccagacctcaaaagaaacttattgtcaattggtgtactaactgaaactggttgtaaagttgaaattgatgacaagtttcttaaagtcatgaagaattccaaaacatgttagaattatatattttaccaggatcttaga

SEQ ID NO: 30905 - DNA, 5440 bp, Cannabis sativa
tcttgacaatcgatccaaccccaccatgctgcctcctccgatcgtctcgacattgcctcctctaattgtctcgacaccgcctccttcgatcatcccgtgctaccttcttctccatttctttatcttgtctcgacaccggctcttccacccacacagcgacgagccaaatgggccatgaatggcctcttcctttctctttcatctcgacaccatgccggttaccatgtaagttttcgctgatctctctttctttcaatctcgtggttgaaatatcttttttgtacagatttttgagttggggacgaagacgaagaggacaaccattgtctattttttggttttgatttcatgatggtggctattgtgttttgtatttgaatctgttttaaattttctttgtatgtttatttgtgtagatcttagtgttgtttaaattttatgggtatttgctttagattttggtgtatctcgggatgaatatctaaatctattttttaaaatttttttattgtgtcggtacaaaattgacaagaatgttgtaaataattttctttacactattagcgactattttcaagtgtcgctaattttttgtaccgactgttgaaaactgacgcaaaataatataatttttgcatctacagtatatacgtcggttttagcaactaatgctaaaagaatatatgtcaattgcaaactgacaaaaaataccatgtttgtagtattgactctcctcatccccttcattctctaagaacctccctcttttgtgtcgataaaacaacagaccatttatcattagccggatcaaaaatgtaaaaaacttgtactgcttggctggccataatgaatagatcattcttgcttcacctcttacttaaatcaaccaaagtaaaactaagctcgtcaatttttactccaacattattttcaacccaagaacatttaaaaagtggaattcagaacgcaaaataattgagctcccatatttcttcaataaccccattatacgtcatggtacctaaaacaaggtttctatcttttgcacttgcaaaatgcatggtttctgtgacgatacatatgccactattttgaacctctcgagcatcctctcttgactttgtttgaaaaacgtttaccccttataatgtacgcttcatgttcaccatgccaataccaagtagtataacttctattgaaacctcataaatacacatggtccttaatcattgtaatatttccttaagatccattataacaatctacacaaggacaatgaatatgttcaggatttttagaattatttaaggacaactctaaaaatacatcgaaccctacttgaaatcacaatatgtctctctcctcacgcatccatgatttatccataacaaaaaaaattcagtatttattagctaattataattagttactacttacacaatgtttagttcatgttattaagttgtataaattgtaattaattaactagtgtagtgtttagttgaatgtaatggatatgagaatggaatgtactttcttacaactagcaagcaattaactagttatttgtgttatgtactttcttttaatacttataattttttagtaaaatttatcctaattctactgaaatttctgcagcataacgactgtaattagacgttcccaaaaattttaaaaatgcctaaagtaacaaaaaaaaaaaacaaataaacaatactaaacaaacaaaataacattaataatataaaatttattaacccatccgaccgcagtatatgtattcgcagaacctacttcacaatggttgaatatttaaaatattcaaactcaactaacatgcatattattaaactcatccaatcgcagtacaacatatcacagaacctacttcactacagatgaatatttaagatattcaaactccactaaacatgcatggattattaattataataacaaaaaaagttagtgaatgtttatacctatagcaagttaaaatctgatcaacaccaaattgtgtcgaaccgcaaaaattagttcacaacctacaatttaatgaaatacaataaattaaaattttaattatttaattacttactacttataaaaaaaaatagtaacaagttactacttactaaattatatataaagatttttttttgaaaacaaataacatatacatacatatataatcaattatatctcacattaacacaatttcaaaaactttatttctaaacgaattaaatctctcatatatcattcgttcacacaataaatatatatatatacacatacatatatattacttaaaatatatataatacaatttacataaataatatacacaatacatatatataaacacattattctaaaaaaaaaacacatattcaataaaaacacaaaatatatacatatatatatatatattatcaagttaataaatatttaccttataagcgcaatccgacgaccaattctgacaaaaatccggccaccatgcgtacaacaacataatgttaataaaatgaaaaattccaaaaaaaattacaaaaacgaaaataaaaataatgtaaattaataaactaaaaatcatatttataccttaatagacgttgagatttaatattttctccactaaaatcggtggctagagttattccaccaccttttttttaatagggtcaggtatagtgaattatgggagaaaaaactaaacttttttagtgtataggtttaaatattgaaaatagaagatttttaaaaaatagggtaaaatggtgttaaaatgagggagatatatggattttaagggtggttggcaagggttttcatgggcagttctgggttatctctggtatatcgtgttgctgaagaagaagaaaatggggaagacgaaggttagcgttcttttatataaccctatggcgtcagttattagggaataactgacgctataggtgcacacgtgtcgtataaggagtgcacctatgatgtcggttattctataatagggttaataaaaaatcttgaaaattgtccaacccccaaccgacgggatatggtatataattaatttctatacctacggtttttacgaaaaaactgcatctaaatgtcaatttcaaaccaaacgggtattatcacaccctttagcttcttttttttataaaataagttaaaaaaaaataatttttaaaggctcatattgtagtagtggttataaatagatgcaacataatatctatctatgaccgatgcaaaagatctttacatgccaattttaaattgatgcaaattttgtcgatcgtaaaccgacaaaacattttaatgtggtttatttttttgcatcgattttgggcgttgactaatgcaaaacactattttgtagtagtgtaaacataagacatatgcaagcttaattaagaactctatttataggtttaaaacaagctttcctccaactatacataaaaaattgcgatgtcatttcttcctttagactttgaagagagtgttatagatcactatatacccaatctaaattctcgtttgttttgttttacaaatcttaatttagttgatcaaagatagctttttcaatagttaaaggtacacaatcttactcctatatataacatttcattttattttgcctacatattagaattgttatggctataaatttaatcatatcattggaccacaaaaataaattatattgtaattaatagttgattttcaggaaaaaattaatcattttttttgtagtgatataataatctttattatattatataatatatataagtgcatcagaaattaagaaacgagtcatattaattatacagtgggttttcaaatctaagatgatataatttgtctggttcatgcaccaggacaatataatatatttatatataattatgaaaataacatgattaaaagattttacaaccaaaagtaaaaagaaaaaaaaatcatatcaaatggtggaagactaactaaaccagaaagcttctttttgccaacatttgtcaaagatttcaaaaaaaaattcatgaaaagtatatatgttttcagggttatttcgtgtaaatcacttcactttttatatattttctttcttttttagttctttttgcatgattttcacgaatacaactaatagtttccacaatatataaataaatatttatcaatgaaaattttaattttatactcaactacaacaaccataaaggaaaagagtaagtaagcaataccactagattgagaaaaaactattgttatgttattattcattttctttagttaattaattgttttacttcatacctaattcttggattttcatcaattgatatcttattgatcattattttctagattgatttgacctccttttttctttaatcgtttaagtgcatgcatatagaccctatgaactaagataaaggaagcattaaaattaaaaaggagtcaaaagaaaaacgtatggtaaactaataattaatcttaagcaagatacactactaaaataaagaagtttagacactatctaaaacaatcggatatagtattcttgtcggttcataagatcgacattgtatgctacagacgcaaaacaggatgaaataggcatcggttgcaaacaatcggtaatgagcattacaaaccgttggaaacgacaataaaggagtacatgaatagacaaccatttcaagtggttgctaaggaatacgaaccattttaaatggtcgttgttaagtttagttacaagtcaccagttactaacacctcatgtgaattatccaatacctattttgagttgttgctctgtgttttagttttgtaattgtagcttagttcattgaagatcaataaaacaaatacaattttatctttcctgttgagtgttgtgtaccttcaattcaagtaaattctcattgtttgtcataattggtttgttcttgattgaggtgatctgagatcacaacaaatgatatcaaaacaaggttgaaggtgctccaagatttcaagaacaaattgaagatcgaactctattcaaaaatgacattagcaaagtttgaggtggataagtccattggaactaatgagtactttagtctatggagaatcaagatgaaagttcttctggtccaccaatggattgaaacagccattaattaatgaagagcttgtggaagaattaaaataagagaagattcagaaagacatagaatcgaaagctcacagttacatattgctgagccttggtgatgagattctcacgaaagttttagatgaaggatctgctttaggactatggaaaattttagcatcaatttcctttaagaaatcattggctacacaattattgttggattatgttttaccaggatctagatctactaacaagtatgtttcatta

SEQ ID NO: 30906 - DNA, 1596 bp, Cannabis sativa
aaaataatactatattatataatttataaataaaagtagacaactaatataatgatatttaacctctccaaaacattgatcccactaccataacattacttcaagagaaagcaatttatcagttaggtttacatgatttgttttgttaatttatttatttataaaatttagtgattatttctataataccattatcattattgtctagattctattgtttttataataataatcatatgacacaacaacacgtatagaccctaaaaaatattacacattagcatcacatggccattctatgcatttttatgaataaaataaaagaaagaaaaaataaatatttctttttcaatagccttattgcaaaagctcaaaagactataaaacaaaaaaagaaataagtataaagataaggttctcaccacaaaagggacttgaattgagataatctgtttgatgttatggtgttattgggtgaaagtgttattcataaaagtaatggctcaacaaaaaattggttttaatttatacttaaataattatacaattaagataaaaaaattaaaagtaaaatattttttaagttctagtaaattaagcatcattttcttacacagtctaattacatgtaaaaaaaaatttaattatttaattaaaacaaaaaaaaaaaaaaaaaacatgtccactagcaattgcaaaaataatgaagcacataataaaataattaaattagagaaaagaaatggtaaaattggcccaaattatgagtaaacacttttatattcccatctttgagacaaaattgattattctaattattttattaatattaaaagaaaaataaaataagagaaaacataacattaagataaggaacgttttgatcggagaaacgttgtcttgttggcgaggagaattggtaggcccgtccttgggcataggcgggcttggcctgtgcctagtacccatctaacccaggggttcaaatttttctctctagtttaaaattatacatttttttttttactaattttaaaaaatactatatttttttttaaataaggacttaaaaatattttttgtcttatgatctactaaattttaaggctggccctaagaattataaacgcatggagggtcggcagagaagaaccaataccaaaaaagaatcgaagaaaatcttaaataacatttatttaattactaaaatccttaacttacctataataaatctttgccaagtcccaaatagatagaaatgtatggacttcagccactaaaattaacttagtggtgaagctcaagacctttaagctattaattgatggtaaaatactattatatatatgctacactcaaaaaaaaatattatgaaattttaaacaaaaaaaaaaactaagaataacctttaaaaattttaaactagaattaagtattaacgcaatactatttccattacattcataatgattacactataaatattagttcttgggtttcatttatggggtccaaactttggtgcataaatgcttggtttcaactctgagagtttaggttttgtcccggggataaaatttcacctcaatttttttt

SEQ ID NO: 30907 - DNA, 3641 bp, Cannabis sativa
agcaaaataaaaaagaaagaaagaaaagacacaattttggtataataactctagtaaaatctgatgccttttcattgtatttgtctactatttatagtgcaaatttactcttaaaatattgtattttcgtgtaccatttagtggggtaaatggcatgaaaagctgaagaaaatgagaattatgagggagttgcgtcaggttcctagccacgtctgcgttagcgtgttggtggagaagtaacatgggacatgtgttgattgtttgagcttctcgatttacgtgggaacaagattaatggaagtggcctgcttgctatgctgttttcggtcaaaagcacccaaactaatttgggcttaattgatttgtattgaataatcaaataggcccatcaaaagagttaactagacttgaatagttgttttgggccgtaactttggtgagcagaatggagattcattcccatcaaatatatattgctttgcatggtcatgttttatgggattagttggaccaataattgagaccatcttgaaactctctttcaactttctattgggcttcattttacagcatgcttaaaatctgaaaaatgacataaaatcaaaataaattaaattttccaattaaaataaatttattattaaaaataaggaatatttaatttatattaattatatatacacaaataaaggctttaaatgtatcaatttcagcctttatcaatgggttccatctattgctccaacacaatcctaataaaatatatataattccaaataacatattagtattgtctgtaagtctaaaaaataaatataattatgttaaatatctttattatattttttttttaaaaaaaagaaactaaccttaaaccaatgataaaataattgattagaggatatctcttgtggaacacctctacctgctggagtgagataatgttttcctagtcttacacatacttgcaaacatttgttaaaatgatgattgatagtttttccagaatgttaaaaacaattttgtactactctattcctctcattatgagctaatgtaaatataaaaattgccagttgttccgcaacactaactattctggaatcattcagtagtcctctcatctcatttgcaagtcgcaaaaagcatgaaatattcttacgtaataagtcataacatctacgtggatgtccttgaatcaattcattgaggaagttagctctagttaaaattgatcagtgaactttttctttcgatccaacacctaaataagttctaataatccaaactaaaagcacacatttggccataaataacatgaactcatctccatttgccattcctaattattatagaaaaaaaaaatagaaagaaatccatatatcaataataataacggcaagttgaacaacataatcaatataacataacttataatgttaaacatctcaatgcatgtttcataacttaaatattgttcttcaacataaaaaatatatatatatatatatataatgaaagttccataataaaaatctaaaatgcaaactaaaaattagctatttagaagcctagttgttgataaatccatttctttctaagttctgggaacattgcagaaaaaaactcagccttcctctcatctgtatgaatgttaataacttggacaatccattcatcactgagtcctaattccataatcataggcattagcttctcgacataactatttttaggttctcgttgcaacttaatttgctttttaaatattgatgtccatctatcaacagattttgctaaactacttctaatggaagttttatttctttttggacgagatgtcaatgttggttgatcaggtaaatgtttttttcccatgctcttatcatgctgagttgattgattttgttcactatctatattattcatatcatgatcaagcacattttcagactcagaaaattgtgtatcaccaactacatcatcatcacaaaatttattttggaagtcttcaacatcatttacttcacaactatttctaccatcagcaacaacatctccaaaaattaaagccaaagtattatagtcaggtaacttctaaatcctatattgagcatcttttggatgagcctatcacaaaaataatagtaataattagtacatgtacctattctcctttatcattaaacaagaaaaatagttactcaccataagatattgctcccatacgtcatcctcaccagtgacttttcgatttgcttcatcccacccaaagccactatttagtagcattctcttcatggtagcataagtttttttcaaagttctcatcttattttttattttagtcttatctaatttatctccatacaataaactcatttctttttctacccccgccatccctcattggttaagcccccttgttgtatctttcctaatttaacttgttgagctataaaaataataaaatactcatcttgactttcattccatttggtgtatggctttccaaccttagaattttgagtatttgtcattcctatattaattaaaatttaataaaaaaataatattaaaaaatatctaatttcatatattcatatcatttgtttttttttacaagataaaatgcactcaaaaaaatattataaaatagcatcatacataagaaaaataataaaattgtgtacatgagaaaaagaaaaaaaaatatgagggactaacctttataggaataggaggagaccaaaataaaaaataagagatggaatagattttttttgtggctgatggtataggtaggttgatttgagaaagtaggttagatgaatggttggtgtctttttgtttttgattgatgagagatggaatatatagaataactaaggttgtatggctgtatatgggaattgattgacgtgataattgataggaaaaggaaaattcaatacataatcaaaaataattaaatatcgtattaaataataaaaataatttgaatttatttttggtatgtaattacatagtgtaattacacccaattatcacaggggctgaaaattagagagagtaattgaggtctttgaattacctctaattacacagttatgatgtaattacatagccaaataaacacatacgcaaaaccttataattaccttcaattacatccaatttcaattcccaagtagcactgtggcccttagcatttctcagttacatgcttaataaagactaaagaagaaaggcaccagcacttgaaaggtagatgatgtgccatgctactatttcctttaaatattggcataaaagagaaaaaacatgcttgatgaggctataaaaataatagagaaaattacatacattttttaatttgatgcttttgatttgtattttatttttaaaaattattattttttatcttttttttttaattaattctattaattttacctctatcattttaccataattttttatttttccctaattaacatttgctccaactttcccacaaatgtatacatccatttaaaaaaaatataaatctattatatttaaaattatatcttagttatgtaagtgtatgagaataatttaagtataatactcgtaaaaaaaaagatatatttaaatta

SEQ ID NO: 30908 - DNA, 2564 bp, Cannabis sativa
tattatatcgttgattaatttatgtagggaattatgatattcagtttgggaatttatttacaaaccatagtaatgagaagaaaaggtccagtgtttgccatggcttttagtcctttgtcatctatatttgcagcaatcatgggaatactgattttgggagacattttacatctgggcaggtcatattatatttattttgaattatgtcgatgtcgttttgaataatatatatatatatatatatatgttttatttgcaaatttttttcttaaaaaaattacattttttcagtgtaataggagctacattgataattattggactctattcaattctatggggaaagaagaaagaggaggacatgatgatactagagcgtaccaaagcaaatgaactactagaccttaatgaaatcaaagcagaaagtgtcaaaaacaaatctgatcatttgattattaattgatcatatacctaacaaaggcaccaatggtctgaaattttaataagtgaattattggtgtataggaggagctaataatagtgctgtcaaaagtacttggttacaagccccacaagaatttacctgttaattagatgaacattatgttacgcgtgtaacgtttttttttataatgccagataaagaagtatgagtcactaatcactagacaccagcactatcttgtttctttgtgtgttaatagttttgtttatggttagtggaaggagaggtatatatgtagtgggaaataatctatcaaaaaaaaacatgaataatatatttatatatatatatataatgcaggaaaaaaaagatagcatgataaaagaaaatattctcttatccaaaatgggtatagaaatgagttgattggaatgaaataactccaatataatagctataaataacttcacacaaaaacaaaatcttataacagaaaagctaggtcattaatagtgaagaaaatagaaagtgtgtaaatgcaggttaggttggcttagctgaagagagatttggggagattatttcatttataagaatgtgcaactgcacaaattattacagcaggagaatattcctaatgattctaacagatggcaattgtatattctggaataaaaacaaaaaggcataacagaaaataaacaagataaaacagcaaactagaaagagaagcttttgagcttaaatatatcattaggtacactaattccctgtattagtttgttgagtataccttagaaccacccctcaaatgcaagggtgagctagtcacccaaggtttgtcttgagtgagtccctttgtaagataattagcaatgttctcttaagtaggcacatatttgactttaattcttttatgtagaactttatattgaatgaaatgcacctcaagctcaatatgcttgattcgagcatgttgacaggattcaaggcaaccatttacactcatgttgtcacaccaaacaactgatgttgatacaaactgaatttctttcatcaatgatataacccaagtgatctctgcaaagacttgatcaagagctcaatattcggatttgctatttgagcaagcaacaattgattgcttcataggcgaccaagtaataaatgtatttccaaaatacacacagtagtcagccacatttcgtatcatttggaaaacacactcagtcaacacatcacaatatctagttataggcagcttgtcaatatatttgatgtggaataccatgatgaattgttccttttagatattacagaaccctctttgttgcacttcaatgtgtagttgttggataattttagaactggttgtgcttatttgcagcaaatgcaatgtttaggcatgtgtatgtaagatattgcaaagcacctataacactcttgtactgtgtataatcagctagttcatcaccatcttgcagaaataatgacttgcctcttgtcataggagttggacatggcttaatttgttatttccagtcatttgagcaattcaatcaattttttctttggtgacaaatgcattcacttgaaacacctctatcccaaggaaaaaattcaaagcccccaagaccttaagagaaaaaacttttctcatcatttcaatgaaataattaagctcttttgtgttgttttctgaatgactatgttgtaatgctcccgctttaagtctcattgggcatccaccccacagacttatggctctcatacacaggtgtgtgactggttgcttcctggaataacgtctgaccttacaaaccaacacaagttattccaacgtactttgttctcactcacacacttcttaggaaaacataccaatataggtcacccatcctaagatttcttcagatcaaacatgctaaaatttggtgatgggctactaaaaagaaaatgcatcttgttgatattggtagtacccatttatccatttaagttattttcaactgtgtaatcatatacacacacacaaacttatatcattacacttgaccttctccaggcgatgtggtattgcacatcttacccagtctttccctttacggatcatgggact

SEQ ID NO: 30909 - DNA, 2050 bp, Cannabis sativa
ttttataattgtatacattgtaattatttaggatcacccataaatttttagaaaattcttaatagtttataatgctaaaaataaaattaaaacagttgttaacatgcgtataagaaaaaaatagtcgtgcaaaaaaaatatttaaaccttatttttcgtattgtaaattattcaaaaaaatttaaaaatttacagatagtcctaaataactataatatacaccatcataaaaaaataaaattaaaaaaaaaaaaaaacactaaaagcttttcattatgtcgaaagagatataaggtgtataaaataaaaaaaaataaaaaaaaaaaaaaaattgtggctagagtcttcaaaaaaatttatttgatgcagataagattccaacctcaaaaaatagcagcaatagtcctcaagctcgagatcttgtaagtccgttggtcctctatttaacagatcagataatttctccctaaaaatatcacgtgttgactgttgatattaaattgtggcataagtccctaaaaattttattttgatgcagataagtccgcaatctcgaaaaattgtgacaacagcccaaaactcaagattctcgttagtccatatgtacttaatttaactgctccatttcttgttccaaaaaatattacgtgttgattttttattggtccaaattataattttaattaaaattaatttaaaataataaattaattattttaacaactaaataattaaccttgtttttctattttttttatttttcttcttcttttgattcactccctctcgtctgttctactactctccaatttgtaatagcaagagaatttgctctaaaaaaaagttaaatgaaatttgaaccagagaagctaaaataaaaaaaaggccaccaaaatctacaacccaccagagacagggactggcagaatagattcaggaagatcgagttggagtaaagtgtagctatttagggttttttttttgtttttgcttaattgtttttctgagttttctgcatgggatcataagatgagatgaggaagaaagtagagatgaaggaaattaaggaatgacactgtagcagtaaacctccaccactaagaaggatggctggcaaatcataaattttttttatagatacagggacggagggacttaagccattgtgtaggcttaagccctcactcaattttataatatatgaaaaaaaatatatgttacatatatctatttaaatttttgtttattataaatgtgtattaagccctcactcaatttgttcctgccaaattttaaaggtaataccactaaaatttaacaccaaattcaaaaaaaaacaatcaacactttttttttctaaggacatatgtaacactctatttaaaatgctttttttttcattcaatttttattcaagcccttgaaaaagaaaatattcaagccctgaaccgaatttctggctccatcactgtatatatatatatatataatattttttaatctttaataaaagaaaataaaaaaatattcaattttttaataatatttttattatttaaataatttttatgttgtgaactaataaatttttgatacatggaaatttaagaactacaatcagaactgttaaattaggtacctatagactaccgagaatgccgagcttaagaaatataaccatacttttcgagattaggacttatgtgcatgaaagtaagttttttaggaacttatttgcatcaaaataaattttttaagaacttatgtcgtaccttaatatcaacatgtgacattttaaagaagaattaacgaatctgttaaaaagatgacctacaaacttataaaaatatcaaacttgaaaactattgttactattttttaagattaaaaacttatttgtatcaaaataaattttttaaagattttttttgcaattttttcaaataaaaatttacttgtcaaaattgagtcaaaattaacaaagatagagaaagtagaattcgggtacactcactctatcctgttcctctattaaacagctgacataatt

SEQ ID NO: 30910 - DNA, 1899 bp, Cannabis sativa
tccagacacatacatgttaaggctataagaagatagccacgacgatcatatgtcggtcataaaaggctttaaggataaataatagtagttttcaaaaatagaggtccaataggcaaaagcaagaacatgaaaaccttgacgccagatatgaaatcggttcacatgcataaggccaaggccctgcaagaacagtataggtaaaacaaacaagacaaagctcctataggggccacgtatcgagatacggataaggtagagttccttacaggttccaagccatgttgagtcttaagttgaacattcgactatataggctcaccattacgtttcatacatagtttccaagggaaccacgtgtgagactaagattgtatatgcctacatagccaaattctttctgaagtcaaaaaaggacagaaaactggctacccacatagaaccaaggcccatgacggctaacgttttcaagctttggaagggtttgccaaggtcccatgactctgtcaagaactggtcagggtcaccaaacccagacatgaacatgctagctttatagggtaaaatcttagagttggcgaactcccatgattaagccctagggccagccaggtttcatgcaagacctccaaggccagccaaggtaattttgaatctcaatgtttgtttttctttcgaaactctaatatgtgcctcatattccttatgactcaatgagtctagaatcacaacgaaggccgaaattgaatcttttcaatgaaaaagtcacacattgtacattcgaaaactgtcatgaggatcaatataccaaagagattacaaactaacatgagaatcaaaaacattccaaaagcttgaaaattattaatagaaggtgttttgaccaaaaagtgtagatgctttttgtcaaagaaaacagtcagtgtattttttttgtatatgtgttcctttttttccagttcataatgcgtgctttttctacgtaaacccttcctatttatgtcctacattctttcgtatgcatgcctcatttgtctttattttggtgtttggcaaacgggtgacttttatttctttttaacttcatctactacgtgtcttatttagtggagataggttttatttccttaaactttgttcctattttatttatcagtgtcctactataggacttctaatgttatagtctattaagaataatttctttctaacgagatattttgtcttggtccgagattccgaagtgacattagcttcgattcgttgagttcttttagtttttcctgatgggaatctcatcttattctatctaagttttaagtggttttgctttttaaaattattcttccaaatgcttttcggttctggttacattttgtctgttggagagtgtttttgtttatctcgactagcttatggctttggtctatctcagactttggctctttattatgctttcgggtgtgtcatcgttagcctagtttgatgagttaaggcttgaattactattactttggatggcgggtcctcgttttgatcatttcttgggtttgtcatatattttgtcggcattgtctttttgctaatttattggcttatatatattttaattattttatctctttgcgggctattttatggtagtggcggtctattggggctcttttggggaatatatttgattggtctttcatttttttaatctttttccttttttttccccagtttcgtttatgcttgtgcataatcaagaactgcaataaattatcaggtttattttatttttgttagtattattattatcattatttttaagatcattattgtacgttattgtgtcagtttttttctactttaatttcaaatttataaatttttgtaaaatggttgtttatgttattt

SEQ ID NO: 30911 - DNA, 1413 bp, Cannabis sativa
tctctctctctctctctcttcccgccatctctctctccccgctacatctctctctcctcgctacctctctctctccctgccatctctctttctctccccgccatctctctctcccatctctctatctccttctcttcactcattcactaccctagtcacaacctaataccacttgctccatacaaaggagcaataatacttcgagggcatatgttgcaatagagtgactaccaaagggggttaaggaggaagtcactactaagtctaagcaacaaaactccctctcatggacttatcacttagttaaatttccgaagtgttacactcacatcataagcgtaaagaggaagatgctaagggaatgtacgacaaaagatgaagtcattaaagcatgcacaccgctaaataagtagtggttgtacgtcccgtacaagtagtggagacacaatttgtctcactcagagtaccaacttacacccgaaaattgataggctagttttatgtgcattttaaaaagtattttagaagtgtatttcaattgattatatatattttgtgcagaattacacttgttttctatttatttcatgtttaaatgataaaattcataatatgtattgaaaatgagaagaaacatgttaaatgagacaaatatgatgaaattatcatggaatttggagttctaagatgtaagtggtgaaaatttctaagttttggatgctcaacacactctgtttgtgatcgaaaatcaagtctgaaattcaagctaatttttgactatgaagcgttcaatttgagaaaaaatactgtgagtacaagttatggcaaaaatagtatcagttatcgtactatgaagctcgctgtcaaaaatcgagcttcaagtgtcgtgacactacatggtagtgttgcgacttgcctctcttatattgagagaaaaatatgatttattcttttctagctatataaaggccccttttccaacagttgtcagtagacaactttgaaagtacaaaaattagaagcgagaagcggctctggagactttcaacatttattttcaaagagttcctcctttcctctgtttttcattatgttcttaattattatcatatgctttcaatgattatgattagctaaaatttttattagggtgttaatgaagattgtttgacactttatttttattttaatatgatttaattgttccccaattttctatgtgtatctatttcattcgtacttaattacttttaattgtctaataaccaattaattgtttaatgatttcaatacaaaattttagaagtgagtattgattatgctctagtgaaatagacatagattttgatataggacgagagtacctatattgtaacaccctaactagcctaggcgtgttaacgtgattttaaa

SEQ ID NO: 30912 - DNA, 6433 bp, Cannabis sativa
tttgtttttccatatacaaatgttaatattaacacatcttttatttctgagaatttgccgtaagaaaaagtgagggaaaataaatcatagatgggaaagaggttttagcaattgtcttttcttttctaggttttacccatttcccaatttccctaaagttttcatttttgccattttcaaatttcaagtttcaagattccctcatcgtcttcttccttcggttccggcctaatcctatcacttcgcttcgccgccacatgatcatgtccgcccttataggtactacgtacgactccttttgtggctctttaatctttatcttttccacctcatgaaagaatgaacaacaaatctgaaaataattatacaacttgcttgttcttgctaataatgtttctggattttggttatgggtctatctggattcttgcttcatttaacttctgaggacaacatgagttttttttttgttatacatttatgtgttttgtttttctgtttcagaagaattaagcttaattgattttattattgtaagtagaggagctttaggtagttttgagtcccaaattggtgttcttggaatggatgatatgttgttttactttccctgcattggagtgaatttctttgaggtgtatatttgatcaacttgtccattgggggtacttgaattgttgtagatttagtttaggtatgcaaagttcttatgtgttagttaacacttaccattcttatcatggttctatttggtctttcatattaataagtattgatccaagttttaacaactaatgcttctggttattgaccctcaaatcctattatcttccttgtgcagatatgtggtgatatcttcttagttggcctctctgttaagtttttccatcatatataaagcaccaactaagttaagattagcaagatgagcacatcacatcgattgaaagaaaagtatgacaaaagcaatgcttcctcgttgcataatggagatgaaggaagtgctgctcgaacaaggcctttaagctttgaagagattatgctaaggaggaagaagaagagcttatgtgaagaagtcataggagttgttgaagctgaaacaatctcaaaggaagatattgttaaggatgcacctcatagctttgaatctgatggggattacagatttcacaaaggctcttcgcccaatgctgaagtgcatgttgcagaggaaacaatgaagataagctccagaaagaaagagaagttaacttctgttgataataaatctgaagacaatcatttgaaagggaaagatagaagagattgtgaattggaaaacaaattgaatacaaagcccaataattatacgagcaaggaagctaaaagaaacagaaatgataaagaaacacatgaaaggagagaacttgacaagcaaggaggcagaagtgacaaagaaatacatgaaaggagagaacacgacaaagaaatacatggaaggagagagcatgacaagcaaggaggaggcagaaatgacaaagatatacatgaaaggagagaacacgacaagaaaggaggcagaaatgacaaagaagtacatgaaaggagagaacacgaaaagcaaggaggcagaaatgacaaagaaatacgtgaaaggagagaacatgacaagcaaggacgcagaaatgacaaagaaatacatgaaaggagagaacgcgacaagcaaggaggtagaaatgataaagaagtacatgaaaggagagaacatgacagacaaggagaccgaaatgacaaagaaatacatgaaaggagagaacatgacaagcaaggaggcagaaatgccaaagtaatacgagaaaggagagaacatgataagcaagggggcagaaatgaaaaagaaatacgcgaaaggagagaacatgacaaagaaggtggcagaaatgataaagaaacacatgagaggatagaaaaagacaagcaacgaagtacaaatgataaagaaatacatgaaaggagggaacacgacaagcaaggaggcagagatgacaaacaaatgcatggtaggagggaacatgacaggcatggaggaagaaatgaccaacaaatgcatgataggagagagaaggacaagtgtttgactgatagcacacaaaatgaagctggaaagaagcatttgagggactcaacagggaaggagagccattcagacataaaaagagggaaatctgaaagagaaagcaagagaaaatatcaaaatggagataatgagaaacctaaagacagaaatgttgcaaagaaacttgatacagggaaggattatgacacagacatttcagggaaaagcaagggaaaagaatcatcaaaatcacatcatgaagatacaaagatgagaaggggaaggtctagaagcagagatcgtgaggatagaaataaaaggtccagatctgcctctcttggggctcacaaacgtgcttctcataatagggtggctaataaagaggatacttcccatctttctaaggatagatctgaaaaacaactttatgttgacaagagtagattatcaagtaatggcttgactagtcaccatcgacggcatgatgaatcaacaagtgggcttggtggttattcaccgaggaagaggttgagtgagactgctgagaagactcctccacctattcattcatctgagaagaaaagtgccaagtgggacctcccacctgtaggagctgaaaacatgttatctggtttagctcctactaattttcagtcatcaaacattgctgtgcctgcaagtgtgcaagagttggctagtgctgctgctatcgcttcaattcctagagagttgccttatggatttttcgcgacttctttatccaataaaagatttgctaccattgactccatccaattaacacaagctacacgtcctatgaggagactttatgtagaaaatataccctcttcaacgactgagaaagctttggtggactggcttaacgatcttttgctatcttcagctgctaatcatatccaagggacccaaccgtgtcttagctgtattgtaagtctgtaatgcttatgtgcacttgcactgttcctcaatatttgcatgaattcagtatcatgaggattttgttcatgcacatttgtattgcctattttgactgtagattaacaaagacaagggccaagctcttgtggaatttcttacacctgaagatgcttcagctgctcttgcttttgatggaaggtccatttctggttctattttgaaaattagacgacctaaggactttgttgaagtggcagtaagaataacaatcctagtctttgtttcttattctcatcattttttgaaacaaattttgttgctgttttgattttatcttgttgatgcatgatccattgagtatgcagtatttgaatttggtttcctgattctgtgctaagttttatgtgatattgttacaacaactagtttttataattttgtttaattatctaaaaatatatgtgtttggcttatattgctgcgatgactcctcatttttacttttgttagtcaatgacacgctagaagttgtacccctgaagtcacagtaattctaaaggtgaagccattttatctgttaagatgaccctcactgaggaaaaacatggaccctaattcctaaatggtagaatgtggggagaacacagagccttggaatgtgaaatgtgaaatgcgaaatgtataacttatgaaactttggttgagatttaatttattaggactaggactttgacctttggcagaagctcaaggagtggttgcaagtgatattagctaactagtttttttaatcctgattctaattttgcagtttggtttgtaatgtgtattatggcatttagttgcatttgcatattaaaaacaatcaagaataatatcatatctttgaactttcacatttgctcaaattaagatgcatgttcattatcacgactcgaggatagctcaagtggttggttgagtgtatttggtgattgattcaaggttcaggtcctgtagatgtatcagttggttgggtggataagtgtgttagtggttgtagtttaaatttgttgtttttgatcactacttggttatggaagttttatgcatgcatggtctgtatgaatattgtattgaaactggttaaaccacaacaggttattttaactaaaatgttggttttatttctaggacatgattctcttttaatatgctgttaacaaaagctaattttagatgcactagtactttatactgcctgcttgcagttttctgaggtatgttgtggttaccatttatgtagcaggttttcagacagttactattttcatgcagactggcgatcaggagaaatcaatggctgctgtcgatacaattacagatgttgtgaaggattcgccaaacaaggtatgcaattttagcagcttaccaaccaaatttgtgtgtgtcagtgcaagcttttgtccctcaattgcattgctttaacaagaattatgagggttattactattagtttcctacatctttttttccttttcttttttgaaggtgcaaaaagtttgttattttgttttctgcgaacccatgaataaaaagaattgcagactaaatatttaatcattttaaacaattggcctataataatttagtgctattgctagaattatttaatagaattagttgtttccattagatatgaagttcatcaagtgctcatgtaatattgtaaatttaaatgatacataaaagattaaatagtttcggatgataaatgatgacatcagtggaacctctttatcaagtataagataagattcaattatatgttctcatctctataagtgtgtccatgtgtgccgcacacatacacttttttagcttttacgcttggtcaatgttttctctaagctccctaggaaggacttcttgattggttattcattggcattattgtacatagttatatttttaacatcggttaagatagcatgctgttccgttagttgtgatcttgaactttatgtatatgtttgagcaactattagatttttctttttctttaaatttctctgtttgactttctattcaatacttacgttgcttgctttggttcatatgtagttttttttcttctttctctctctccctctccctctttttcttctttcttttatatgcttgtgttcttgcagatcttcattggtggaatttcaaaggttctttcatcaaaaatggtaagtatggcttcaattgtagcacatttccttgattccttccattcccacacatggttttcttctaattgctttttgttacttgtctcatctctctgtattgtgactttatccttttgtgcttcttttgtagctcatggagatcgttagcgtgtttggatctcttaaggcataccattttgaggccaatgacaatctagacgaatcttgtgcatttctagaggtatggtataaaaacatacttgtgactcacatttgtttctagtaaaaaaattttaggcactacaatatcgatttagtggtactattgtcataatggtttgggatcccggaaatagtttcaatggtaaatggcctctttagaccaattaataatgagtaataatatgctttgggcaatcccaatgtcatagttggatatgtgtgtagactgtagattctctacttatatttcataaagtttgagctgtttaatcattttcttgcatcaaaccaaatttatagtgttatcttattttctcgcttttacaacataagctttgatactttctgagctttatactctttatcagtatgtagatcgatcagttactctaaaagcctgtgctggcctgaatggtatgaaattgggaggtaaagtattgactgttgttcaggcacttcatgctggagcgtccatggtataccgtcgctctcttgttcctcttagttaataactgggtcatacactaatggttctagaaaattattatgcgtgttgatttttacttaccttgatgacttgtttccttaccaaacgaaaaatatttcccaggaaaatactgagaattcgtcgttgtatgagattccagaatttgcaaagccacttctgaaagaacctacgcaagttataaagcttaaaaatgtggtatggtcacttcactgcactatagttttatgaaatgtagtatcttttctgtatttaccaacctcccaattaatatatttttctgactaaaaaagaggggaagaagaatgatgttgtcactgacagatctttctgtgttcttcctttatttatgttttcattgaaaatcagttcaatgtagaggatttctccttactctcagaaccattgattgaagaagtgattgaagatgttcgattggagtgtgcaaggtaccagaatttttcagtattttct

SEQ ID NO: 30913 - DNA, 4735 bp, Cannabis sativa
tcttacagctctaatcttataatattttattgagccgaaaacctcgatcaacaatagaaaatacagatatcattcaccaaaatatacatactaacaataatatatatatattactaatacatatatgtgtatactatactaatcaaattatataccaccattgtatataataaaatataaactaattaaatattatttaaaataaatatatatctaaaaaactatataaacataataattaaatatatgtaggatgtcaataaaatcatatatgtgcattaaaatatatagcaaaataaaaaataaatatcgtctaagaatactaatatactatacaaaagtagaaaaaaaatctaatcgacattacttttaaataaaaaaattaacaaaactaatatagataaataataaataatcttaaaaaatcattttactacaagttttaaaatgagtacatttactaacattcttataatttggggcatttattatattttcccaaaaatgaaaacttaacaaaaaagagatgattagtaaaatgaaattttaaagaacaccatcttgcaacttttattcaatttcctttcggctttcatattttttaatttcattttaaattacacgtcaatgacatagattgacatcttgacacgaacaattttctttgaaaaatttacatgatatactaatttttgttattttttttacaaaaatactgccatgcgatattttttacttttttattgtgtttttataagtttcatagtatactgtgttaagttttcactggtgttctactggtgtcttttagttgttttactgttttgaattgttctgttatgtgttttactggtgttttataaaaacacaatatttttgaaaaattttccgtgtgacagtatgacaagcaccagcaaaaattagtttgtgtactgagcatcgcatgaggccagaaaacatgatttaaattcgaattgtagtattaagcaaaaaataaataaataaataaaatcgaaaaaaataaataaataaataaaatcgaactgtagaataaattttaatcaaaattctaactgacaagtctgtagtacgtataattgaacgagcaaaactttatcaaacgattggactattaacttaagctagataattgcgataccgatacaaaagaaataaagggcccaatggagtaaatattattctacgaggtatcactgttgagcacactgaacacgggacattgagggctcgtcatcatcgtcatcctcatacgactcgtggaagtggttttgctgcttccgcctcatctcctcctcaatgttgacatcatgtaaggtggtctcttcgcattcatccacttccatgtctgtcaaagtcttactaggctttggagaaagtatggtctccaaagtccggcattgatcaggagatagaaacccagaatctgggaaatccacactaaattgaatgtaaagccggcccttcatgaaaggcctctggtgttgtggcatcccttcatcgttgattgctttatgttgaccttcatgcagtaaccagaacattaaataaacaaacatgaaaacatataaccgaggaatacttccattggtcaagtaactatattatttatttatataccaggcttgatgacttctccaggatttgatttaataagaagctgtctgccgtcaagatgattcaaggcaaactgaaaaccacacagtgcctcagttaagctagggttgtgttctacgtacaaatcatcatacttccgcttgaacatgggatgctccttttgttgcaacacaaagacgatatctcctgttactgtatcaggctgcaaaacatagattcaaataagcaagaatcaagaaaaaaaactataatttaaagaataagcaagaattaaagaaaaactaaaatttaaagggaaataaaaatacacccagatttaaagaaaaactagaattttaccaacaaaactaataattcacacatttttttttctacatatatatgttatataagagagaaagagagagagagagctaacaaaatacaccctgcacagaagaggtatcacaagacttgatttttattgcatcgaaaaatacacttacagcctcatctgcctgaccatcaaatacaatcttctggccatgttgcatccctttttccacatgaacctctagtacctttttttcctgagtaatcttttttcctttgcattgtgtgcatttatctctgtcgctaatgaattcacctgcaacaacattacacaataaaaaactgagaaacaacaaaatgcaggtgaatttagttaaataccagagccttggcaatctggacagacatgttgcattcgttgaatcatgcccagaccaatctgtcgcattgaaactttcattccactgccctgacatccataacattttccagctatcccacttttacatcctttcctgaaaattataggaagcagattacattcgacctattcaataacattcacaaacaattcacttctacaacatttattatggattaaacatttcaatagaaaatgaccttgctttagaattaggggcgactatttttgatattggaggcaataaggaagtaaatttcagctattgacactcatgtgcttaattactagcttgtttagatattgttgaagaaaatcaagaatatactgtaggtatgaccaaatcatttgaattttatataaatccaataatacttgagctacacaaggaacacaaaatatcctcctttgaattgccatgaataagaaaaattggcaacagtcataccctttacatttttggcacaaagcgttccttgaaagagaaagcttctttgatgcaccattatacaagtcctccaaagaaaccttcaatgtatgaaccacatcttcaccttgcttctgtcttcttcctcgtgagctagaaccacctacaaaatcacactcttcgttaaaaaaaaactagtaatcatggatatccagttgaaaatattagaagaataaatgagtgtaagaagttagaaataaaaatcaaataagaatccaatgaaaactactcttaccaccaaaggctcctcctccaaaaaacgattcaaagatgtcaaacggattgtgtgagggaccgccaccactcattccttctttaagggcatcttcaccatattgatcataaatttcccgtttctctggatcattgagaacttcataagcttgagctagctccttgaactgacacaatatacaaaaggtatattattagagcattaagagatagataaaggtattactatctctctctcaattgaagttaaaagtttgaatcttcatggcagagaatttaaagaaaaatcatgggatggcaacaatatcaagattcatgaaccaaccttctcagggtcacctcctttgtcgggatgattcttgatggccgctttcctataagctttcttgagctcttcaggagtggcatttttcgaaacaccaagaacctcataatatttggtgctatcactctttcttggagcacgcccaaacatgatcttgggtctttaatacaactgctacgacaaaagaaataaaaaagcccaaaacttgaactcaactcaaaatattataaaccaataatacataccttatgtcaattgaattgaagggcaatacacaaaaacaacagaataaaataaacaaataagcacacgaagatgaaaaagagcagttcctcagaaagcagaataaaataagcagaataaaataatatatatatatattttttttgtaataattaaaagaaaaacgagatagagagtaaatatatcttaaaaacaatcaatctcccatcccagcccatcccgaatggtcaatcagagaaagagaaattaaagaatgtttgtaaactacataactaacctaactcttgtgggaattttcgcagagcacaataatgaaagacaaaaaggaaaaagaaaaagaaaaattgaagtaactacggaaaacctaaaaccctatgaatccgtatgtccatcaaagaatcagaatctaatacatcaactgatctatggaataaaactaactatagagagaaatagataccttatgagattcgcagagagaaaaaggaaaacttaacgaagagggttttagagagagaaagagagatgggttaaccaggtctctcctctcagtgcgccgaatttaccctatagtgggtgatttatagagcgagattggggtggtaatttcagtatgccgccacagagaccttcttggcgtgctctttgtatctaaaaacagagagtagggtctactctcattaaagtgtttatgtaggtcataaagattgggcttcgtccatacttcattgtcatttttatgaaaagtggagtcgacgacgatttgattgcagttacacgtctacacgaaaaattataagtttaaaaaaaatatttaccacataaatacaatatgaatatctcttataaaattatcttaataaaaacttgatcaaaagaaaaagagtactgtataaattaactcccttcatttaggccttcgtgaagatcttctaaatgacgaatttcgatcttgtcttccattttctcaaatgttgatgttggtaataactttatgaataagtttgtaagattgacacttattgaatttgttgaacaccaatatacattttcataaaatgtaaaaagaagaatttgg

SEQ ID NO: 30914 - DNA, 3499 bp, Cannabis sativa
ttgttttttagtatttctcaaaagaaaaaaaatgttaataggtataattacatgtgaattcctaatatcttgtttggcaaaatagttagtaattaaatggcataataatatttttagtagttaatgtttaatatggaaagtttttagtaattacacaatgtaattacattcaattctcatggggggccatgagatttggagagtgtaattgcaacccctcaattactttcaattacacagttacagtgtaattacatggtcagacaaacatgccaaattgtgtaattacctccaaatacacacaaatctaattacagtgtggctttccaaacgcaccctaaatttgaattaacataaaaatgatagaagtttaacacaaaatttttgaagaaattgcattgtatgcccactttattttaatttttatcttcattcccatattttataagatatcccacttttataaataatgtccctattatactccttaaattaatgtaaatcatagtgggtagatttcaatgaaataaaatatgagggtatttttgattaatagataaaaaaaaaaaaaattcctcaacttatttcaaaaaatttctattctaatcataacattaaaaattacactaaaattatatttttattattattatattatttcattaaattataaataaatacaaattatatacaaaaaaaaaaaaaaatttacttacaaatatattatttaaatattaaaaattaatttaaaaagagatttagtgtagtctataagtgtagttaaaataaattgaatataaaatctcatcaatattttaataaaattccgttggagttggccttacacctccaacaatttacatattatgtttgtaaaaaggaaaagtccacaagaataaactacaccctaaaatttcttcaagaaaaaaaaaacttgaccttataatttattttagaaaataatatttcaacaaaaatatatacattttagttagtcaattttttttcaaggaattatcataaacaaacaaaaaaataaagttattcaggtatttgtttgatggtaaagcttctctaaatttttaacaagaaataatatttctaatctaaaaaggagttgtgtttcttcttttaaggtaaatactattttgaatcttatttttttgcaaaacttattaattgaaccttttattttgttaaataacaaaatatacctaatatttttcaacataataaaaataagacctgagtttaaaatagacaaataatttagttaataacttttacataacacgaaatttaaaatggtattttctttttttttttactccatcatttatgaaaaactgttgttgttttttatttatgaatcacgggaacattatctgagaataaagtacttaataagagaataaaacactgtatatgcatttttcactcggaaaaaaaataaatataactactaatttatttattgttgaatatttagaaaaagtcgcgccaattgcgtgtattccctctcccttctcctcacgtttctataactgaaattaaaataaaaaataaaattttataaatttttttataattatagtgtatgtgtatcatacaattttatctattttggtattttaaaaaaaaattagtccaattttttttataatgatttatattgtagttatttaagacttttaatttctcaatggattccacccttgtgttcatgtggagtattgatgggttcctagtattgatctgtcacctctacacaattgtttggtcatatttctcctcttttagaagagtcaattagtttgaagaaagctttgaactctatcaaagaacgaaacctaaatcaagttgttgaatcagattataaaaatatcattgatgctctatttagttccgctcttttattgtctcgctttaatttagttattttttactgtcctactttaatgtttaatcttaaccatatttctaactttttttttcaggttgtgactgtagcaggggatttagcagatgatataatttttttttttttttgaaagaaatgggtgtatttaccattttgtagtgtgcaactacaaatagaactcctcaattaaattaccatttcgttattacaaaactacccttcacttttttcaatatcattcccccaacaacctacttcttctactctctcctcttcactctcactttactcctttcacgcttatttacttattttattttttcgtttaaaagaaaacaaaaatggctaagtcgtcgtcgacgatagcctcgacgacgtcgcttccagccatcaaaccagccgattactctcacagtccggttcactacgccgtctcattgcgtgaccacactaccttgtcccgaattgtctctactctacctcgactcgctgagccaactcagatccacaccgagtccgactccctcgcccaagaacgcttggcggataaggtatcttctgtactagaccgccgggatgttcctcatagagagactcctcttcaccttgccgtccgagtaaacgacaccgttgccgctagaatccttgccaatgccggcgctgatgtctcgctccagaacgctgctggttggaaccccttgcaggaggccatgtgccgccgtagcaacgacatagctctgattctacttcgcttacaccaccgctcggcttgggctaagtggcgccgtcgtctgccacgtgtcatcgcagtccttcacagaatgcgggacttctacatggagatctcgttccacttcgagagctctgtgattcccttcgttgggaaaatcgctccctctgatacttataagatctggaagcgagacgggaatttgagagccgatacctcattggctggattcgacggtttgaaaatccaacgagccgatcaaagctttcttttcctcggagacggcgatcatagccggggtgtttctcctggctctctgctcgttcttaatcgcgacaataggaaaatctttgacgcctttgagaacgctggttcgccgatgagcgagtctgacatcgccggattctgctcccagacgagcgtctacaggcccggtatggacgtcacgaaggctgagctcgtcgggaggaccaattggagaagacaagagaagactgaaaatgttggggaatggaaagctagggtttacgaaattcaaaatgtagtgtttagttttaggtcaagaaaagtagctaatggagatgctgacgtggctgggagcgaacaggtactacctcttgagctcgacgaagacgacgatggttttttagttgctgaaaacccaaatttcctcatgcctgatcgacgaaggcatagtagttttgttaaggaagataggccaaggccaagtagctttgtaagagaagatagggatttattgactttgggaaggaagagcgtggacctgccttctgtaattgcgccgccacagaggagaactatggctccgccgccggtggcattgccgc

SEQ ID NO: 30915 - DNA, 1467 bp, Cannabis sativa
  modified_base (1062)..(1072): a, c, t, g, unknown or other
cctactgctaaggcttgttgggatcgggttgggatatggactgatatgcagtaggaagcaacctttttttgtcttggtgcattggtaaatttcagctgctggtggctttgtgttggtcaatttggaacgcgagaaatgacaaggtttggcaagataaaagagttggggtggatagcgtagtttcgttagcaaagagcttccttaaccaatggaaaaatgcacaaaaatcaatcattgagattacattttctggttttttaccagaggatgcagctgtgtattgggtgcctcaacacgtagatagtgttaaggtaaatgttaacgcgactttgttcaatgaaacctgacaatttgggattggtttagtggctcgtgattctcggggtatgttagttgaaggttgcactaagttgtttcatggccaagttcctcctgctacagctgaagtcatggggattcgagaggctttaagttggatcaaggtgcgacaatggacacatgtggttcttgaaacggattgtctcccggtagttcaagccttacgaagcacaattgatatgcgatccatgtttggtcaagtggtgaatgtttgtaaggatatgcttaaggatttaaacaatgttgatatttattttgttagacgatcagctaatatggtggctcataactttgctaaagcctctatattttattctgattacactttcagtttagaagctgttctaactgacttgttatctattttggtaacggagatggttatttaataaaaatattatttccattcaaatatatatatatatatattatgatgttaaaacacatgctaaaatgatatttatttttaatcaaattataatctcacttatttttaatattttattttccaccacactttattttcaccataccatcacactttttttccaaatcttaaaaatataaattcaaatgaaaagtatgaataataagatgataatcaataatttaatacaatattattattatgaatttttcatttttttaaaaaatacaacactactactactattattattattnnnnnnnnnnntattattattattatattttgttattgcgattcaattttttttattgcggttagtttatttctgtgatataattttaagtgttttaatcttatatatatgacatgattttgagagatttagtcttgtttgtgtgatatagttttattttgttttgtttttggttcttctttatatcgctattagtagttggtaataacaagtttttttgtgactgaagatgttgttagtagtgtaattatatacttttcacaataattgagtgctcaagctacaaggttcaatgaacctacaacaattaggagtgttcattggatcacatccaatggattttgacccatccaatccaatccaattatttattggatattgtatttttccatccgatccaatctaa

SEQ ID NO: 30916 - DNA, 8692 bp, Cannabis sativa
  modified_base (1124)..(1133): a, c, t, g, unknown or other
ttgtttaaaagcgaagtcaacaggtataatactaattctaaatatattaaaattttatcaagttattgttttaatagtacaccgtaatgaatatgagtacttttgttggatccgtttcaatgttactttgtttgccaaattatataggtataaatatttgttttgtgagagttgacaaataaataatggttgaagatatacttatttatttacttttgatcataggtgaagatattgttacaagtgtatgtaacaatgttaccaatacaagtttagcctcaaatataaggaacaatagcattagaaaagaaattatctacatgacttacctatggaagctcatcttgtaacattgtcgacgttgtgcaaatattgtggtgtgaaaaagtttcaatatgaaactaaagggttttgttgttctcatggagaagttgtgtttttttttttttttgaaattaaactcttaataacaataatcagagtttaatacttcaatacaaaagatggaaaatccttaatccaaagctaattcaccatttaccctaagtgcatgcactactaattcatgggtacgaacatgaactagggatgccttaagaaaattggaaagtaaactagcaaaaaaaaaaaaaaaaaactaataagaaacctagctcattacaaaaggaacagcgcctaaaaaaataagaactaaaactaaacaattagattccaaagaatgaagaggggagtgtgtgagatcaatccacaatgatgctactgaatctgcttgaatataacaacttcaacgtgaataactaacaatctagagctatcgtcaattccattgcatccacttgaatgacttcaaaactccctacaataacaataaaatcaataatgagtctttataaaagtaaatattcaccatgagagtattaattaaaaaattaaaggaagaaaacttatctatataagtgtctcaaaatgtggtgaagaactcctccgtaataataaccaaacataaacaaaacatttaacataatacacttaacaagcaacaaaaaagactttttcaaaagaataaataaataataataataataaaagtctttaaatgtgtccaataataataataataatannnnnnnnnntaataataataataaaagtgattgttaataaaaatccaacaaaactaacatgtgcaccaaactcgtataaccgcaacaaagcaattaaaaagtttaaccgcaacaaactcagtcaaaatgagtataaaaccgctatccttatatccgacaatttgtgccactacatgtgcaccaccgtctgaaactgccaccgtaacaagaaacgagactgctaaggctactacaagcttccgtcgtcatccaaaccatatctatttttagtcggcgaccacgaactccagtcgaaagcatgatagcaatcgccatgagcagccaaaaactgtcgaccatttctagcagaacccaaaatcactttcctcttctgagaatggctcgacaaacctgatttacgatgcctgaattagatctagactatagtccatgctgttctcatcttcctcaaccaattcatcttcaatgggtctatcttcatcttccccaactcatcatcaataccatcattcttttcatcaatctccgaacccaacaagccctccatgcaacctaccttttattgtacccctttagaattttgtcagtgttcatgtgatattattagtttaaaatctatgtaactggccgaaatgatatattacatagtttgaactggaaaaaaatctaaatccgggcacatgaaccatcccgagtctgccaagagctccaccattgagagcgaccccccaagcgctaaatctgaaaaatctaagcccaagggcgtgttctctgaggccgaaaatgttcatatattgggttgtacttatagacaaaaacgtcatactcggtacaaaaaaaaaattagttttgaagcaattaaaattaagaagaaagtgaaaacactactaaaagataaaagttcaaaaaggaggaagacttatcaatattaaagcaatatgataacttgcattccctccgttgaactagtaagaatctcagtcacagaatagtgtatcattgtcatcttcttccctttgataagtggccattgtcaaaactctaagcacatcttcttgtatcagaagcgatacaaatcgaccattttgaaatatcaggtgtgtttaagaggttgattagttaaacattgagaatatggtggtttgaaaaaaaaaaaagaaagagaattccactatatcatggataagttgtgttaaaaattaatggaattcgtaaaaatttatacgaattatttacttcaaatttagataaatcacattttagaacttatgtacgaacgtataataataactttgaatttacttcatttagtgtaaaatatgataaaaatttatgtagaagtattaaagaaatttatacttttagagtccaagatcagatttattacatcaattaattagttcaaccagataaccatcctaaatatctttagttatatttttatgacacaaaacatgaattagaaaattgattcaactttttagataaactatcattaatatctaccctaagcaaaataattaatataattaacataaattcatactcgcagtttttttttttttgaaactttaattatgtttctaagttagaaatttaccaaatcaaaataagatcaaagattatataacactcctttgacatctcaagttacaacagtatggattgatgatgatctatctatagaatatactactcgtgatataaatgtaaacgaaatcaggattcttgttccaataagaaactaattgattttagccaaattcattcaccatttgaattattaatttgtgaaaaaaagagataaaatgattacattactaattgttgtttcttcttcccttttattttaattttcaattatgactttgaagtaattattatatgttgattagaataagtttatatcatttcagttcatcaagcaaggaagaagagaaattgtatctcttatcgtgaatattattgctataaattacaaatttgatccttacaaaagtcaatactattacatgggggtcgtttattacaacaatccactaaatttgactaatgcaaccttcatgctacagagcaggaataattagttactctccaaatccctcctgagtttccacaacaatggatagaccaaggtctaactcacatccatttcgggacagtcaaacttgccttaacccatcacgggaggaaaggcttaccagtctgtataagaataatgttgcttgatacaagaatgagaaaattctaacatgtctctataggcaccctagaagcaacactcaatgcaggtacagtaatcgtaatattctatcccaatttttgtatgtccttaagggataaatgattgctagaagcttcaaggttcaactacatattgtgggcatagatcaagatccatattccttaggatctataatacactatcaaatggcctacaagatgcaaaaccatgctattgacatctcggtaccaggaagtttagattcgctaatgatagttgtcaatacaaaccacgtaccgacatacattcacattccttgctagatgacaacggaagaactctaacaaatacttctaacttcatggatcaccaactatgaaaggacctaaaggccactaccagcagtccactcaacaaatccccttttcaggtccaaaaaggatggttctatcaaaatatccttcccaaacaatgaagcaactccaagaatcttctcaactcaatacatatgtcatcaatcatcctagaatgtgcagagatatcatcctttgataaggatgcttcccctatatatgctttcaaatccacttcagggcatatatactgggacgtttgcaactgtctagattgcgccacacctggtgagcaaaaagaagcacccaaaagaaaagcgttggaaagaagctaaaagaaaaatggaaaaacaaccaaaaggatattggcccacttggtgaaccctcgaaaaaatttgactacctagtcaaatattcctacaaaccattagttcatgaggacattcaccagacatgatgggaatgtgaagattatgagcataagtcattactctcatgttacaaaccaagaaagtccaaaccaactgcctcacatctcttcatgctaaaacgtagcaatgataaattcccacttccattcaactttatggatggaactggaaaactcactcaccagccaaaagttctcaacccaaacatccgagaagctaatggtaccttaagaaaatcactctggccaaagttgtcctcaactggcaaacagagaataggctagcccaaaacaagaccctccaacagatagacgagaaactttctacagtcacccacagagttacaaagatcaacggagaattttaaaaatttgacaccattatgaccagattcgtctacaaaatttttcaagtgcacgaagaactactacaaatggtcaaatctaagcaagttccctaagagatctttcttgtaaaggaagcagagctaaagggtctgaagagccagtacgtctcgatgcaaactcaaactcaatttaaggacagatcacctctcactccaggcttagactctacaccatggatgttttcaacataattaaaatctatgcaaccattagcacctcccccaaaaatgggagaccaaattctttcgtctaaaaagaatcctagatgaaagaagaacaacttaaaagaaaaaagaaacaagaaaatcaaggccaatgcaatactcaactcatggtcaaaaggagaaatgacattacaaacatcaccatcagcactgtctaaataatctcccatatatcaatctcaacaaagatatagaaaattcagatgatgacgatctgtcatcatcgtccagccaatctaatgactgagaaactgatgaccaaagcagaagtgatgatgaagcaattctgccacaattcatgaaatctaaccaaacaactacaaccaattgaaactaatgggtataaaatcacatgactgttatgtgttaatgcaacatctacttacgatttccattagatcagtcttgccaaaaaatattcaagattatttgacacatgcttgcattttcttttttaaattatgctggaaagaattagaaattgataaattatatgcattacatgaacatgtagtcaaaacattgtgcaacctggaaaagttttttctgccatcttttttcaatatcatgatacttttaaagattcatctaatgagagaagcaaggttgtgtgggccagtatgggcaagatagatgtatccatttgaaagaaatatgaaggtacttaaaagttatgtgcgtaacaactattagctagaagcatctattggtgagtgctacatatctaaaaaaggctgtaaaattttgttcagagtacatggccagagttggcgaaattggtattggcaaaccaagaactgacccagatgaggttaatagaggaatattgggtaaacatgacttaagagataatttaaaataattttttttattataacttgaaattatttttacactatcttatatacatgtatatatattttttagtgcctattagatggtagaggtcattgcgccaagaaaaattatctatttagaccctatatatggccacaaaatttcccaacaaattcatgtgatgttgaaaatataaaaatttaattactctttatgtaacaaatcttttaattaactaagttatatatatattaatgttaattaattgaaatattaatataattttcaaaatagtggatacgagaattttcggggatcaaatgcatttattggggagtatccaggaatatcacttgcaaatttttcaaaacaacctaaaaactaagaatgtagtttttatgtattgaaatacatgcgtgacatcgttgcatgtgcaaattctaaggttatttaaaccatcaaaaagttgtaaattttaattattaattatcttatttattatattaacaaaaaataatatatatatatatatactaatatatatatttacttctttttttatagtttggaaaaaaaaaggacatatgatgcaaaaactaaattgttactgttacaaccacagtggatagaacaattgctggcggtgattcacgaaggcttagattgatgctgaaatgtataagaatttttcttccttagcttattttttttttatattaatttgtagtttttatatgtttaactagatatattaacttgttaatacttgaactaattttaaaatatttgtgtaatataattgttatttttttagttgctttcatgaaattaatttaagcatattggctagccatgaaattaatttaaataaattaaatttgtgaaattatatttaattttaaaactaaaatataaattgatttttataccctatggcgtcggttattatacctatggcgtctatttttatttcctatggcgtcggttattgtatagattgtatagtaactgacatatgtcgtcggttattatacaataaccgacgccatagggtccctctatggcatcggttgtctttgaccctacaatgtcgcttagatcagtatcggtagcaatttttgccaaaactgatattggaaggccttaaaaattgcctctaaaatccagttttgtagtagttgtcttttaagattatgagataagttggactttcctatttctcttaatcattcaacatactcatgagtatgtaggtcaatgagttgcaagctcttaaagaactcttatctaccctttctagtgatatagttttgatttgttgtaccggagaagacttttatcttatcatctcaccatacgttgcttatctcattgtcttattaccaatgagtaatgcgagattaatattgctcgttattaataatctcttcaagataattcacttattatgcaattaagtaatccgtaatttttttgtctaattatttatgtgtcatgtctatatttatggctcgaaatatgagtatagcaaacctcaatactttgcaccttacagttgatcaaacatctcatccatcgtggataaatgatatttgttcttaattgtaatttgatgattcaatttcttataatcaacacaaactcgcacagattcatcagtctttctagcaaataaaactggagttcctcgtagagaagtattatattcgtgatgtaaaccttatcaattaacttccccaatatatgcttgaattctcggaactaagctagcccaggattatctccatgcggcagaaaataaggactacgtgtttcatcagagtgatcggttttgtgaatcaagaacacaaaatcgattagattcatctaaagaattctctctgttggtggtgtttcatgtctgaacttctctacgaggtattgatcataaattcaagaaagatgaaaataaagaacataaatggaaatggaaaaatagaaggaaataatgaattatttctcatggattcaagaaatgaatgaattacaaagctcaatatttatacacaagactagtaactaaattcagcaacttgttactaaacgatgagaaaactcatctaactaactcaactaagactctaatcaacttacctatctgtctaaactaactctaactattagtccaaacagtttgatagttgtgttattgaatttgaagagaacttatatttgactttaaacatcaaagaacttttttataggtaattccaccagtttttatatctaatcacttttcatttaaccaagataatatcgttgatcaatcactcatgcactttgtcatttatttacccattcaacaaattcagttactttactattaatgataatcaaatctttaattttgaccactttctagtttctatatgtcagcccttatcaattatagaaattaatttttggatgtaatatgtagttttgtgataaacaaataaatcaataaaaactttcggcaacaattttttttgcagcaaccatagtaaaaaaaattatgtgcagcaaagtaaaatttgaagccttttctttttattcgcagcacttttttttttttaaatggagaacttgcagcgtcttatatgcagtctacatcgaaggatatattgtagttaggaaaggcctgagttttcattgaaaccgctagttttatacttgatcgtagtgaaagtacaaagctttggaaatggttatttgccgtgacaaatttgtgcaattaatcaaattttcatactgttgggttgtactttggattaatccaaagcctggagcacagaatatatcccatttcaaccaagtcagttgcggtaccttgacatatacattcaattacgaatcgacaatctgctaactaaatgaataaaatgccacaattaatacaacttctactacatctagatgcttacataagtaataatcatcaaaataacaaaaaagaatattgcacccatgccttcttcccccttctattcttgtgaaagaatttaatacattgaaaattatcaatatgaacaaaatataaattttatcactattatttatatatatgatttatg

SEQ ID NO: 30917 - DNA, 2851 bp, Cannabis sativa
  modified_base (799)..(808): a, c, t, g, unknown or other
  modified_base (1940)..(1941): a, c, t, g, unknown or other
  modified_base (1967)..(1980): a, c, t, g, unknown or other
aaaagatgacaactaatatacattgtcatatgttacatattattaatttattacacatatttaatctatatattatattattataaataatataacagtaagagcaaaaaatatatgtatacactcaatcgcaattttgagtgtagattaaaaaagatcaccataatttaaataaggtattacacttttattcaaaagtaagagaactccttaagaaatagctttggaaattatgaaatcttacggttttctaacaatgtacttttttgattaaaaatttctcctctaaataagcaaatgattagactcatttatatagtgttcaggtgatcacacttagaattcaaacataccatatcatcaattttgtgcaacatctcttttattacacaaaaatgtgatcaaccgaaataagttacagaagctattaatattgtaatttctctctatgttacaaagtgtaggttgctattttaagttaaataaatcatatgttatacaatttatttaccaaacacttaatatatattattcacataataatatatattacatgtgaataatatttattaccacatattaatctacatattatattattaaatataacaaatagcagtaaagttttgaaagctttcactgtggggaagaggggtcattaacaaaaattatttctagtcactacaaaacttgtgactaaaagtaataaaaaaattgtaactatataaatcatcattcttatattgtgactaaaaggtatgtggctaaatatattagtcataaaaatcacaatttattnnnnnnnnnngtatttttagtcacaatatttgttatgactaaaactaaattagtgacgacttgtattttagatctgaaacgcgtgaaattaaagcatgagaattgccgacggtttaaaactgtggtctatggtatagccgacgtcggttttaaaccgttgacaattttcttttacaaatacacgagattttttaaggtacgtttaaaaccgggaataccctatttttttcgacgctaaaaaaaatatttttaaaaccatcgcaaatacttctttttgtagtagtgaagcgtaaccagcaacgcgatgatgggatcattgtgagtcaatttttcatggctagggcctagaggttccaagtgtttactaatgttgcagtgtggggaagaatggcctttaatgtggtgttggttttgagtgatcatgtggtgactttgtggaggcttttctcttccaatgtataggtgagttcccctcttgaagccgatcgagttgctggctttctagtctctcatttccactttaggtttaggggatttggttaaaaatgtgttcgttctttctctttgagagaagtagcccttttttggttactacaaactaaattttgtttttgtggtttctgcaacagaaattactatatctgaaatatatcatctcaagtttaatagggtatttcttatttatatatatgctataaatttccttgtataaccttactcttttttgaacgttattagtctataattggttaatagttctctttttaaacttccctcagcttaattaaaacagttcaacaatagaattattatcaaaatcactttcttccttcaaacattttggcaacctttgaaaaatacgccaattaagaaaggattctaaccttacttaaggctacttaagtcattttaattagtaggtataagattgtttttataaataactcttaaaatgatatatatgttatgtcaacaaacaaaaaataatatatatagagggttgcattgcctagcttactacctttcctattgctcttcactttgttataaagagggtcttttctagcactacaaaaaattgctatatatttttagtgacaacattttagttacaatatatattttttgtgactaaatgtganntttagtcacaacaaaaaattacttgnnnnnnnnnnnnnntatttagttacaagttgtcactagctaatttagttttagtcacaacaaatattgtaactaaaaacacatttaagcacaataaattgtaatttttgtgactaatacttttagccacggatcttttagtcacaacacaataatagtaatttataattagctacaacttttttatctttaatcacaaattttattgtgattaaaaataatattttgtgtagtactgtaagttaaggcggactaggtctggacttagacctacttagtccaagatccttaaggaaaagttttttttcaaaaaaaaaatacacttctgaattaattttattaatttttgaaaataccaagtaatttttaaataaggacccaaataaaagaaaatcctaaagcccaatataaatgcttatactcatgacattatttatttatttatttttatgcaaaccaaatttttttattttttaaaaataaaatgtaaaaattacttaaaaataaaaataaatattttttttattttctattatcaatcatatattttaggtcactagctaatgcatttgacaatgtagtacgtagtgcatgcatgcatggaaataaaatagtaccttgcatgtatagttttatgagaaataattgtgtatggatgcttatagtaaggatatttgcatgtgaaatctcaagattatactttaatgaataagttttaggcaaacgtttgccttatgtgtgcatatatatgtgtgaagaaataatggtattcttgcaaattatgagatgctatatatgtgataattgtgaatgttatttagtgttagcattatggccatgtgataatcgggcttattagaagctcaaacttttaggaattatttca

SEQ ID NO: 30918 - DNA, 6617 bp, Cannabis sativa
aagtaaaagaaattatattattattattattaaatttgatatatataaatatattatttgtaagagcttttatattctactaccaaacacttataaaagctcttctaatagaaaagaagttgttcttttgaaattgaaatccaaacactaaatgaaaaacttaaacttttacttctcttcttctagtgtctaaaagtaaaagtataagttatgccaaacaaacctattatgatttttattaaaaaaaaaaactaacaaaataaaatatataactaaaaaaactcagttgattttaacactgtagttaatttagaagtttcttattttttttttgctgaaaaatttagaatttttatatatgagaatcctttctagcgaaatccaatttttgtttaggtaacaatatgtcaatattatacattttttcaaaaaataaacaaaaatgctatcaaaaaaccaaaaaacaaaaaaataattaatttttttttgttaaaatatataacaaaacaaataaataattattaattacctatataattttttttagggcggggttctcgttgtgacttgtgagtaagggagcaaagcggtgccaatagcgtaacgacaacgttgaattttggttgcatcgatataatttagctaacttaactaaacgacaacgtatcaacttattataataaacataaaattatttaagaatatacatcgaattaaatttataaattaaaaaaaagaacgtgacatttttggaaattagaactacatttatggcattttaagaaataaatgtgattatttttgaaaaaaaaaaagccaggacacatcgtcggtgtggctcattcgctatcgaaaaaccaaccgtatataacactctttcttgtgcccctcgaatctcatttctcactctctctctctctctagagctcgtgagtcttgtttctctcagattttcagagctgggagatctctcggctggtgaactgaacttttgttgcctaacgctttagatgaattatatctttatacaggtaagtttcgttctttaactttttgctttgcgttgttatggatctttagtgatatagttgttgtgatgtttcaaatttcgtatttgaattcaacacatagatagaaatttgttattttatttggcttttgtactcattttctgatctgggtttctcagatctgacgcaaattcaccgtgagaaattcgaaaaatggagttttttgatcgatttaggatctgggtgttggtcatttgcttgatttttaatttgggtcatgggttttacctccccggtagttatccccataagtatgttgatggagattacttgaatgtgaaagtgaattctctgacctcaatcgataccgaaatgccgttcagttactatagtttacccttctgtaagcctccagagggtgttaaggatagtgctgagaatctcggtgagcttctcatgggagatcggattgagaactcgccttataaattcaagatgtacaaaaacgaatctgatatctttctatgcaaatctgaggcattgtcgcctgatcactttaagatcttgaccaagaggatcgatgagatgtaccaggttaacttgatccttgacaacttgcctgccattaggtatacccagaaagaaggttacaccttgcggtggactggttaccctgttggagttaaggtcaaggactcatactatatctttaaccatttgaagtttaaggttcttgttcatgagtatgaggatgccaatatggcacgtgtgatgggtactggtgatgcagcagaggttatcccaacgatagcgaaaggagatgaagtgcctgggtacatggttgtaggatttgaggtcattccttgcagtattatgcataatgctgattcagtgaagaacttgaagatctatgaaaaatacccatctcccattaaatgtgatccaacctctgtgtctgttccggttaaggaagggcagcccattgttttcacctatgaggtcgaatttgagaagagtgacataaagtggccttcacgttgggatgcttatttgaaaatggagggatccaaggttcattggttctccatcctcaattccctgatggttatcactttccttgctggtattgtccttgtaatccttttgaggactgttcggcgggatcttacccgctatgaggagctcgacaaggaggctcaagctcagatgaatgaggagttgtctggttggaagcttgttgtaggggatgttttccgtgccccaagtcatccagctctcctgtgtataatggttggtgatggagttcagattcttgggatggcagtggtcaccattttgtttgctgctcttggattcatgtcgcctgcttctcgagggacactcatcacaggtatgctatttttctatatgattcttggcattgtagctggatatgttgcagttcgcctgtggaggacaattggctgtggagattccaagggatgggtttcagtctcatggagagctgcttgtttcttccctggaattgccttcttgattctgactactctaaatttcctattatggggtagtcacagcaccggagccattccattttccttgtttgtcattttgcttttgctctggttctgcatttcggttccccttacacttgttggtgggtactttggagccaaggctcctcatatcgagttcccagttagaaccaatcaaattcctagggaaatcccaccacagaaatacccatcttggctgttagttcttggtgctggcacacttccctttggcaccctcttcattgagctctttttcatcatgtctagcatttggatggggcgtgtctactacgttttcgggtttctcttcattgttatgatcctccttgtcgttgtatgtgctgaggtttctcttgttctgacctatatgcacctctgtgtggaggactggaaatggtggtggaagtccttctttgcctctggttcagttgccatatacattttcttgtactcagtaaactaccttatctttgatctgaagagtttgagtggacctgtgtctgccactctctacttgggatactcactcttcatggttctagcaatcatgcttgcaaccggcacagttgggttcctttcttcgttctggttcgtgcactacttgttctcttcagtgaagcttgactgaagaatgtattccagcaaagattggaaaaggagaaagcaaaggaaatttacaggagttgttctactatgtgttacttcatttttaaaatttggtagggaacttagtgaaatgtaataactaataacaatgattcgttcagttttgttattctttaatagatgaacctcatggcatattatagatatgaaattggagttatttgcattctgtaggtgcataagaggcttttctagttgattatagatgttatttctgttatatcattaatgtgtattttgctagtctttttaatgattattattattgttttaaagatttcactccaaaggctatttttctggtattattattttgctagtcatcttgtccatttttaagcactttcatttttttttatgtatggcatattgatttgttctccatttttctccattttgttccattttgttttttttttttaatttttttttattagtatgttgggagaggggtttcgaagttgagttgagacgaaattattagactatacctacaactactactattgtgttgtaattttttttttttgaaaattgtaacttcattgaaataggcaataagcataagttacataatacttaaatttggaatacaaccattctaaacaacctctctatctaatcctaaagctctttttgcaagattatgagccaatacattcatgtttctagcaacatgagagagggaaacatcagaaaaaaagaaaggagattactttttgaatcaaattcgaaaaagaagatttagagcctatttgtcagtgttttcaatttttaaaattgtgtttttaaaagtgagaatagaaaatagttttttgtcataaatttaatgttgtttggcacaaattttttaaactatttttagatttttttttttactaaaaaagatcaatattttaacaccataccatgatataaacctatccgggtctgggttcgaatatggttctgggtctaagatccgagctatccgaatccgggttcggatatagttctgggtctaagatccgagtatgtgagcaaaaatataaaatataatatattagacagaaaaaaaaaaattgtttttgaaaattgaaaaacaaggttgtttggcttcaaaacttagaaaatgttttgagttttttaaaactgaaaacagtttttaaaaactaataggggtcgtttgacaaaattttttaaaaacagttttttaaaagtcagcttttaaaaaactagaaaacagaaaacattaaaatgttgttttcaattttcaaatataattttttttttgtccaacatattatattttacatttttgctcacatattcggatcttagacgcggaacaatatgggttcatgtcatggtatagtgttaaaatattgattttttttagtaagaaaaaaatctaaaaatagttttaaaaaacttatgccaaacactattaaatttttaaaatgacaaaaaattattttctattctcacttttaaaaatataattttaaaaattaaaaactaaaaaacacagccaaacaaggtatattttgatgttttctattttctaattttttaaaactcaatttttaaaaaattgtttttaaatttttttgctaaacaacccctattagtttttaaaaacacaaaacaatttttaactttggtgaccaaaacaagatagtctattttggaaagtctaccaaagagcaccagttcaaatctcggcataaagcttctgcttctgcatagattagaggctgcctactggaaattgatgacagacaagctgccacaacttcaccttgggaatttttaacaacccattaatagcagcatcaatatttaatttaaatcttcctagaggaggtagtttctccaattgatcataacatgaagacttccttaaactagaagcagtattaggaaccaatctatcaagtcttgagtctgaacattgtcctgcaaaaaggttttaacccaagttttcacattggcaatgtcaaaacttttaaaaagtaaactattgggataattcaaaatagaccacataataccaaaagacaaaggaatcatcttttttattgatatcaaaacttcttaataaatattctttcatatcataaatcttattgttaagataaaattatttgaactaagtacctctccaaattgatctggctttggaacaatttaggagagcatgagtaatagactcaacattattaaaacaaaaggaacaaagagaattaggagtgacatttttcttttgtataaatttaaagcagaagaatgtgattaaaagctttccaaataaaatactcgaaagatttttccaccaataagaaaaaaaagaaagatgagtaggaaggagaagaaacataagatttagctaagtggtctgcagatttgacagtgagacaacaattggaacctgcaaaatagaattcaccatttcatgatcaaaatatatattcaacttatcaatatcccaaggactattgtgagtgatgaaataagaaatagtatcaacgaggataaacattatttttataatggaggatcttgtaactagagagctagaaagagccaatagtagagataaattttccattttcaatcttctagattagtcactgcttaaggtctttgccccataataagctttctcgagtaaaagaaggagagtggcctttagaaacttggataaaagaattagccttgaaatatttacttttaataatatagagagaagataatcaagattagtgaaagctctaaatgcttgcttaacaagcatggcttgattatgaaaaataacagacttggatcccaactctccaaagaacttagaatcacaaagtttagtggatgaggtgtttctttatgtgtctatcgtggtggacactaattggcgggctcaaaatcataaagtacacaataataatctgggtaacataaattattatattgattctatttctttttgttagataaattatagagctcccctattcactctccgacccgactggatgtttggtgtccctctctgcataggtcaagctgaactgtgatgttagagtggcaatagagaatatgtgtattgtcgttgttgctagagattatcagagtgtggtgctttgggtggttacgacgagattagactttactgacgctctttatggcgaggtcgcgacttgttgcttggccttagagacatctgagaaggggtgcaactttgttatcgtggaaagcgattctaaggtggtgatcaactctctcactagggctaactcttgttgggggattgaaaactactcaagttgatgtaaaagcacttcttcatatttgtgggttgtgttttttctaatattgtttagtcttgtaattttatggcacataatgt

SEQ ID NO: 30919 - DNA, 1662 bp, Cannabis sativa
taggtatcatggtcacaatcttatatattttatattgacttggcttatttgcaatttattttgctttctacattaaaggatgttaaaacaacatacttttgttggtttcagaaatgagtaaatctcgtagagaatttagaggttatcatgtcatggaagatattgattcattccagatcctattgattattcttgtaaatcatttgaatgagtggagagctactttttcttgaacttattatttcgttcagtttcacaaaaaaacttgaatttcttttttgatgccaggtgtaaaaaatggctactgtgagcatggcaacaatgaaacttacaactatttcttcatttaaaaccacaccacatagtagatcgcttgccttaactcagaatagatgttctctgggctctttaaggaaaacttctaaagcatttggactgaagtcttcctccttcagagtatctgcaatggcaaactacaaaatcaaattaataggagaagatggaaacgagcatgagtttgaggcccctgacgatgcctacatactcgagtcaggtgaagaagcaggtttggatttgccatactcttgcagggctggttcttgttcgacctgtgcagggaaactcatttctggatcagtggaccagtcggaacaatccttcctcgatgacgatcaaatcaataacgggtacattctgacatgtgtctcaaagccaacttcagactgcgtgattgaaacacacaaggaatctgatctctactaagtattgtgactcaagtagtggaccctcttcagatgaataagtaatggacttatgtggcttgccaactaagtggcaagccaaatgggatgatgttagctatgatgtcaatgtacacaccagatctatgcattgaattttatttattttttgttgaaactgaaatgctctggtgattttctggttacatatatattggcttgactcgaaaacattcacattacatttggtacttgaatttgatgttgatcttcttagtattttttctctgtttgtgttctagacttcgagtatatatactgagtttttagcaaggttgcatatcatattcgttgttcgatgctcagttagcggaagaaaggggatagctagaaaatttgtccttgtagctaagtaaatttgttggcttattttggatataatatctatttttttttttgtaacatataatatatttcttgtaatatatattgttgtaaaataaatttagacaacactaaatttatgcgattattcaaaggtgatttgaatatccgacaataaacatggaagtactcatagcgagtgttcaaagagttgtacaaaatatattttattatatattttttaaaatatatatagtggtttagtagcctagtctacttttgaaagaatactctttgctctatatattctattttggttaacccatctcctttgaatggaggtgacttcatctacttataggttgtagatggtggctacaaattgtggttattatgatagacctttacaaaattataagtggcttattaattacattgattacaatagttacaaaataaatgtaatctttcgtttgaatgacactgaaatatgcttaaccgtttatatcacgattttgactagttatgcgatacccgt

SEQ ID NO: 30920 - DNA, 3362 bp, Cannabis sativa
  modified_base (2748)..(2757): a, c, t, g, unknown or other
tgcagaagatattgttagaatttattttcctaattattataaatgttttagttaacctgaaaacaatatcttcatgtaatgaattatgtttgagtctaacacacctaataatagaaattttatttaccttaaataaaataaagtaaaatatttaaaaaaaaaaatgtaatttgtagcgtaaatatttaaatttaactattggttataaataaatacttatatttaatttttgataataataataataattaaattttaattatcaaattaataatcacatgataatttttaattggtctaagtgattaaatttttatttttattaaagacttaaactaaatatacaaattaaaaaaaagcaaatgtgaatgtaataaaattaaacttaaaagagaaatattaatgtgataaaatgtttaaaatttatttaattaattcatttataccattcttttctttagcttctccgacattaagacccaaattttaagaaaagaaaaaaaaaacacaaaagaccaaaaaaaaaagagcgtgaaaattgggacccacaaagcgaaaaaaagaatggctcgaaccgtaattttctcaaaatccaagcccctttatgtaaattcctcatatttcttcttcttcttcttctcactctctctttcactgaaactcacctatatataaacacctcttctctctcacttctcattcctctctctttctctctctaaaaactcctttcactttctctctctaaattctcagacacaatgcagctccgtccggccttaaccgccgggacactggtcctagctatggccgtcatcttcatcttctccggcaccggtgtcgatgctcacaacatcacgaagattctcgctaagcatccggagttctcttcattcaaccattacctaaccctaactcatctcgcctcagaaatcaaccagcggacgacgattactgtctgcgccgttgataacgccgccatgggcgatattctctcgaagcatccgaatatctatactgtgaagaatattctctcgattcatgttcttctcgattatttcggtgccaagaagcttcaccagatcactaacggtactgctcttgctgctactatgtttcaagctaccggttccgctcctggatctactggattcgttaatatcacagatctacacggtggaaaggttggattcgctcctgaagataacaacggagcttttgctgcgcattttgtgaaatctgttgaggaaattccttacaatatatcggtgattcagatcagcggtgttttgccttcggctgcggctgcggcgccgactccagctccggctgagattaatattaccggcattatgtcggctcacggctgtaaagctttctctgatgctttacttgctaacgacgctatggaaatttacgaagatgccctcgctggtggtttaactgtgttttgtcctttggatgatgcgttcaaagcttttttgcctaaattcaagaatctaaccaaatcagggaagaattcgttgttagagtaccacggagtacctgtttaccaatccatgtcgatgttgaaatcaaacaacggactcatgaacactctcgctacagacggagctagcaagttcgatttcacagtccagaacgacggagagcaagtgactctcaaaacgaagctcgtcacggccaaaatcaccggcacactcatcgacgaacaaccagtagtgatctacactatcgataaggtattaatgcctaaggagcttttcaagcacgagaaagcagagactccagctccagctccggcaccggaaaaggcagcagacgcacctaaatcttctaagaagaaaggcaagaaagcggcgccgtcacctgacgacgacgccgatgccgacgctccggcaccagacgatgatgacgtcgcagatcagactgctgatgataacggcgccgttagatttgacggtaacagatttagcttcttcgctcttatcgctactgcatggctaggattttcagttctgtaagtttttatttatttatttttcttaatttaattttatttatttcttttgttttatgttttattactcttttattaattaataatggagtttttttttggttaattaaatactctgagataatgtgtttgtgagaattagagtgttgatttttggatttgtgtatgtattattattattacacaatttatttatcttttttttttaattaaattaaatttaaatttgtttctgtatattttttttgagtaataactatattattattattatttaaataatataataatgtttgctggacatgtgattatttgactaatttaattatttaaattagtaaattatttatgtttaatttaagtaataaatatatttggtggaaaataaatgaattattatatgacctaattttaattaggattgttgtgtttacagctcatacatatgtttattagctgttcctcattatttttccagtaatagaattgttttttttttccgaaatttcttactttttattttcttccctattttgtcaacctttttattatgaaataaataaataaaataattgtctttagccattaatgaataataatattttaagaagcaaattgataattaaaaggttaattagtaattttttccacctaattttgacattactaaatcatgccctcttaattctttttgttgttaaaagtttgagggacatgatttggtagannnnnnnnnntggggagcatgatttagtacctgataccgtaaaattgaatgaaattagacaaattagcctaattaaaataaagggatatctgcaaattaattattcaagttattttatttgtagcaattttaaatacacatattatttttctagtgaagaaaagattttaattattaagtttgtaacatttaaatattaaaattaggtaattgaaagtattgttatttggtacttttagtaattttttatattatttattaaataaaaatttgtagaacttgatattgaaatattatgagtgtaaattttgaatacttatcagtatcaaaaaataaagctcttgtattctaatttactatatgtgtaaaaaattattatttgcaattataatgaatattgtcttaaatttttttttaaaatatttttatatgtattttcgaacatgaaagtttactaagtggtcgtaatagaaaaaaattgatggaatttaagtatataattttttggtgcttaaactctttatgcctactattaacttaataattatagtattattattgttaaggaaataatttttgaacttcaatatgtttagctacttttgtagctaaaaa

SEQ ID NO: 30921 - DNA, 1222 bp, Cannabis sativa
aaggtgacaaatatgaggacttggattccagccgattccgacacaaagtagtagagaaatccagctaatggcgcagccaaaagcaagaagagaagcctcaaaactccgcccacttcgaaagcgattagagcaaagtaagggaaagagcttcgccctcttagtaatgtcccgtccatgtcagctaccacagtatgtttttctcgtccggttgatgaacatttctcaacggttgggaacacagcgctcagtgacctggtcacggtagccatttttaattattgtttctttttctttttttccttttttcttttgaaaaaattgtgttagggttatacaaggttatatagagatgaagtaattggagaaagacaaaggttatctcagctctggttggtgtataaaattaataagaagaagcggtttgaagaggacaaaagaaaggttataagaacaatgaagggttgcgccgagatttccgaaaaagacttttgagacagaaaatttaatttaaagatatgggaatattgatatgagcatcaacttgtatctattaggaatgtcccaagaattaactgactttgtggtcttgtatgtatcgatgcaatcgtcaaatcttgtctctttaatttagacttttctttgagctatgaaattattatactaacaaggaaaagttatccatattcttacaactagaattttttttagaaaatagcccgagaaaataccatccaagcgcaacgagctcaaaggaccgagagttaggagaattcattaaaacatggcatcatccaaaataaggtttcgaatacaagaaagataagtagaccaccacactatgtttggagtaacggttaaaacaaacttagcttaataatattcaactactgcagcgactacgtttacaattctagaaccataattaaaactcacaacattgaaatgagaacataaagttctaatatcttcaagaattaaacctaaaattatttcaattaaatatatcacacatataggcgtgtgaggctcccctgcttctcccatggcgaagaagaagcggatcactcgaaagcctgctatttaaactacagcgaccgatgaatccgtcgaagagcctccttcgatccacgaattagctcgtgaaggcgaacatgttgaagaattccatgacaccagtgaaaacctgatgttagataccggaatagagaatggaggtgaggaa

SEQ ID NO: 30922 - DNA, 929 bp, Cannabis sativa
taaactttcaccgccccaaagcacttggcgaaaccagcttcgtcaaagatgacagccgccaccgcaccatcgtcgatcgacgaagcatagtccacaaagcatttcacacggcctggtctaggtagaccccaacgaaccacttccgtaccaccataattctcactgttaacattgccaaaccccaacaatggacagtgttcttggaagctattctccacggcatcacgaaacacggacaacaccaacagaacactgttgtgaaaaatttcattcctaacaatccacaatttatagtacaaaactgcaccataaagaaaaaactcatctttttctttccacatcgaatgttgcataaaaggagggttaagaagccaagaaacaacatctctcccattgccaaggttgaaattgttaaatacgaatattctatttggtagaaaaccagaggtacctagtgacatagcagctggctacaaagtgccacatcatcactggcgatatcaccacacagcacacactgcccaggatttaagccaataattgactgcagcttgaaaccgaaaggcagtgcatcctggaagagcttccataggaagagcttgaacctatcatgtatcttagccttccaaatgtgatagcaggtatgatctctaacactgaaatgagtcgcattaagatcccaatatgcccgtttgagtgtgaactcccctgtaggggcagatttccagcagagcgagtcattactctggagcaaattggtcttgatgccattaatcatgctagaaaattctggtctaaaccagaatgaaatcaactaattattccaaccagcccccgattccgtcataagatccccccacagaaatgttctctttggatatcggattgatggcacccgttacattcaacgccatctctacccatccaat

SEQ ID NO: 30923 - DNA, 1889 bp, Cannabis sativa
atgtcaaaagacaagactaatggaaaaactaaattagtttcaacacataaatacgatcacaacattaaaattaattaagaaaaattacatcttaataaaatatatacatatttataaatttatttttgtaaaatttataattttattataaaatattatatgtactcaaaaataattctattatgataaagtattaaagattgtttattgttattgttcttacattgatatgttttggtgttttaaattttctttctagtatcactttacttaatcataaacttttaattataatataatttacttgatctcgagtgtattcaaataaagcttatactgcctcaccaatttactaataaatagggattttgggttatgtcctttttttttccactcctccctcactcactaatgagtagctttaggggcttttttttttcttcttttttttatcaaaaatcaggacaaaattttcaaaagaaaaaataaaataaaaatttatgtaaggaaagttgcaaaattattattactaatattttctttaagccataaatggtgtttacgactagggttgaagttgatgattttcctcctcagcacctctcacttgctctgaatctgattgagtaggtgtccttgttagtgggcccatttgtatggcagccaaattttcctgatatttctaggacaaaagaaggcccacatgggggatgggaaatggttttgtttattacattttgaaatatttgtggtgagggcgatacttcatctacaaattgtttactctctctatttatcctttttgtgacaaaaatcaaaagttagaaaacttagggtgaattttgcatccacccattgaaaacttcagcactcctcaatcctcatcctcaacatggtatgtctcttcttctatgatatcacatatacctagtttgagaaaacaaacactaaactactcttataaattggtgatgaaacacaattactcttcaatattatatctactactctaattggtaatgaatataatattccttgttctacactaggcatgagcatgagtgttttgtgtacaaactacagcaaagtacttttttttttcggttatatggataatataaataaatagtttaagggtaatttaaggtgagtccaaattgtttggacaatgaaataagaagacatttaaactaaaatgattaattgtgggattaagagtctattctaaacaaaagttagcttcattaggtaaatctattcttgacttgacctgagaaattgcccatcaaaatctaacttcacagttccaaccacttttgaaatatctaatgacttgtcattgggttaactccaaggaataaaataaaatcaaaacatgtaaacaatattgtggttgaatttaaatatgtcattaaatgtgattaaactgaaattatatatcaaatttatgcataatattccacacaaatccactttattgttattatttttttattgaatgaaagaaaccttactcaatttgataagtactctcttgacgtacatgatataacaaacaagtcaatcctactaaagacttagctgtctaataaaatcaacacaaggcattaaaatcaattcaaacaaaagtaaaagaaaattagtgcacaatgacagttaaatttagttgaaattcagtctaaatgaaactgaatcacagtgactccagattagctgaaagaaattttggctgagctctctatctatccactaactccattaccattggatcaaacaacaaatatatatataccgtacaaaggccactaatgtttaaattaatacatttagatatgcttttctatttcagagtaatgatcaaagcactagaagccaatacaatctaaaca

SEQ ID NO: 30924 - DNA, 2154 bp, Cannabis sativa
  modified_base (1591)..(1611): a, c, t, g, unknown or other
  modified_base (1842)..(1852): a, c, t, g, unknown or other
  modified_base (1913)..(1940): a, c, t, g, unknown or other
ctctagaaacaactccaggccttaaccacttctcccgaattgcataatttttccttcttagagtagttttcaagtcgagtgtgtatggtttctgtatttgttcaaaaaacggagtatgaaaaagctgctcgtaaaacctcttcgaatgaccaaggatgccacaaataaagcagaatgtagataatctctcatatttaaattgtgcataacagtgaacccctccttgcttttcaatcttcttcttacgttttaaagggcagtcaatattaatcctgacacgaacccgaagataatcacgccacacaccaataaaattattcggatcacctttgatgaatgtccccacaaagttgcgaagatcacgcacaacacgttccaacataaaaccagttgataagttatgtatttgcacccagaaatccaacttgttcaaagtaatcattcttggattctcaccttgttatagtcgttcaaatttcaaagggacacaatcaaatatttatggactcccttggatcactcgttcaatatcaacttcatggtaaaattgaaatagaaatagattattgtcaagttccttaacatacatacctcttcccggttgccatagcattgccattttattctgcatcgcttaaaaattcactcctctattcgtcaggaaccgacccaccaaacaccacctatcgtcaatctcagtcagatcatcattatcccctacataaaccaaactgtcttcttcctcatcctctattcggacattcgcatattgctcctcaatggtaggttcagattgattcccaggcttcattgaaaggacaaaaggtatcggacataaagaaacaaaaatagatttagagagaatatcaaaccatatcaaaagacaagttatttgtttattcattttaattagaagaggtcatctattattattattattggagagaaaagtgcactgttatttgcatgaactatcacaataaataataaattatacaatacatataagattaaataatattttagatcttgtgttttataaaaaatatcacttagactctttattttgttaaataacaaaatggaccatgtattctctaaaattttacaaataagattttgattgaactgattttttgtcaaaattaaacttaataataattcgatcaagagatgttatgataaaactgcttgtattttctgtatataattatacaattctttatgtactttgactcatatgaggtgggattactgaattccaaaggatacattgctgtagcctaaagtaaatgttatcaactcaactcaaggtagctagctactgctcaacgagaggtcattgtaaataattttttttcccacttgttcacttgctaataactttacaattaaagaactcagataatcaataatactaaagaattagccatcataacaactacactttaataaaatataatgcactcatcaatatagccacctaaaattgagaaatatttaagtggtatttaataacacttttttaattagttttttgtttctaaaagtaaaaaaagtgaaaatgtttttcaaaaacatgttctataannnnnnnnnnnnnnnnnnnnntcttaattgagaatcaaaattttaaaaacatgataaaatcacttttaaatatttttttaaacagtttttttttcttaatcaatatttggacttcgatcagacccggactcaaatccccccacagccctggcgctaaactcagcctctgacctgaacccgaacctagacccgacgtaaataaaataaaaaaataaatataaaaaatgaattttacagaacacacttttgttnnnnnnnnnnnaaattgaaaaacaaaagtagttacagaatgtatttttgttttttaaaaacaaaaattttannnnnnnnnnnnnnnnnnnnnnnnnnnnaacaaaagtgttaccaaacgatactttaatatatcgacaatataaatttagagcaaataagcatctcaatgtgggcagtacgtacacaatctctactattttagaaacttattttatataaagaaataaattaatatcaagctacatttgaatccaaaaaagtttataaaatttactaaaataataggttcatttagataaaggagtgcactta

SEQ ID NO: 30925 - DNA, 1668 bp, Cannabis sativa
gtgggtaaacgcctacttagccacattatgggcagcataattacagtccctgctaataaaagagaaaatacaactagaaaacaaattaaagttactattacaaaaagagacatatttaccaataactcagtgagactccttcccattaagcgcattgataactaccctcgaatcgctcttcacaattacaaacttggcaccaatatccttggcagtcaaaatggccaaacaataggccgcctcttcaccacaaagagcatcagaaaagtcaacgcaggatgtctgaacccaaaccaccctaccaagatggttcctggcaacaactgctgaacacatgctatcaaacccaactctaacatcatggtttagcttgatccagtcttgaggtggaggagaccagctcaccttcaaataagggctaggggaagggaaaattgtagtatgtaaatctgcataggaagtacaaatatagtcaatgcacttcttcacatcaacagtatagttattatgtaccttgtcatttcgagtgcgccagctggtatcaactacaacagacgcataaaggaaaacctcctctgcaccaatccccttgtgtttaaggttccaaataaattttacccagtccctcatacgacttccggtgtcatagaccggataaataccccaaggagatgactgctaggcatggaaagtcacatcacaagtaagaaaaaggttttctaaagattcattctccctctcgcacaaagggaaactcgcatcctcaagatgaaatcttttcctgatcatagacctgacagggagggcactggagagaatagaccaccataaaatcttatagcgctccaacaccttattgttccaaagcttatttcagagcgagggagtaacttcacagtagggagctctttccatagccagaataagataagcagatttgcaaaaaaagcactcattactttcaagggtccataaccactgatctttaccagtgctagagggggcaccacccattactatcaagagaagcaccaatgttaatttcttatcttgtgggtttcaataattttttaaaatttttcttatatgtattttttttttttgcagaaagattttttttttaatttggttgtattatttatatttaatgaatatctatttgaaacttaacctaacctaatcgtacatatctctcctcccacacttaattaactttaattttttttcattatttattataatatttaatttctcaaaccaaccatacaatatatttatagggcatatatattataattttaaaaagttattaaaaccgcgcttcggtactattccctagttgtaatatataggagaatatatcattattagataaaatgaaaagaaaaaaaaatacatgtaaatacagacaatggtaaaatagtcatatgacgatcagtgacacaatctccttccccaaatgtcaacaaataaatgaataaaaataacacctgtaataagtaaacattatttgatatcacattatcaagaccaatacgtgtcttgtacgaaaactaataaaataaaattagaaagctcatggctaataatgtaaaattgtttattagaaagctcaaagcttgaaatcattacaaaaaattccactagaaaccaaaaaaaaaaaaaaaa

SEQ ID NO: 30926 - DNA, 1037 bp, Cannabis sativa
tataagtatatgtatatatattcctttagtatacatatatggtatatatgtgtcatgatgatatgcatgcatgcattaattaatgtcagcttagctagctaggaatattattgcaagaaattaaaaattgaagaaaaaaaaatattgttgatgggaaaaataaatgtgtatatatatatttatatctatatatgaaacatatatatttgggcatggccacgtgattccaaatccttttcattttctatatggggtttaaaaaagaaacatttgtcttgtaataagtatttcaattctccccggttaaataatcttacaattattattattaggttttaatatgtgtttcttctgtaaataaacaacaataaaggtcaaaagtttactaaatgtgaatgagactgaagctatactaaattaatatattaataatattagtgttatatagtggcagattcaagattaagatttaaagtgaaaggtatttttgtgggatttaaattcttgactttctatcatacatgtgaatatgtggtatatatatataacttaaccattttattaaacttaatattatgtttcattgtaaaattttttacttttagttacaataaaatttgtgattaaaaataataataaaaaaaagaaatgactaattgtaaatcatcattcttattttttgactaaaaggtccctgaataaagatattagtcataaaaattataatttattgtgactaaatgtatttttaactacaatagttattgtggcttaaagtaaattactgacaacttgtatctaaaaattatgttttaggatcacaagtaactttttattgtgactaaaagttacattatatttaatcacaaaaaaattgatgttataactaaaaatttgtcaataaaaataattatttttgtaatctataaatattagagaaatttgcggctaaacccccttatgtttcaattgtaacacacttaaccccctaatctttgtttttggtggtaaaacccccttaagttttattctgtttg

SEQ ID NO: 30927 - DNA, 2898 bp, Cannabis sativa
  modified_base (97)..(100): a, c, t, g, unknown or other
aaaaacaaaagtggttacaaaatgtatttttgttcttcaaaaataaattttttaaaaataaaaattttactttcattttatgattaaaaaattaaannnnaaaagtgttaccaaacgacaccaactttcatgattttatcgttcaaaatttatatttttactctctaaactttttaaataatacactttttcaaaaaataagaaaaacctttaaataatacaaaattttccctttcaattttaaaaattaaaatattttattaattctaaaaaaaattaataaaaattattaaaaaacttaatgaaaatattaaattaattaaaaaaatattaaaactaaattgttaatttacaaagaaacaaacatttaaacagaataataagacgaaacttaatataaaaactaaatttttgtaaatgtaaaaatttagagatatttttaacaagctttatattttaaagggtaaaatcagtattatcgaaaattcaaaagtacaattgttaatttataaaaaaaacatcaatatttaaacggaataatgagacgaaatttaatagaaaaattaaatttttataaatataaaagttcaatgaaatttttaataaattttatattttaaggggcagaattaatattattgtaatttgtaagttcatagaataaaattactaatttttttttaaagaaaaaaccttctttagttctttttattttttttaaagataaaaatgaaaaagagcaacaccacaacctgaagggatagaaagatgacgaaggcaaagaaggagttaatggcttcagctccatggagggtgaacgaggagcccaaagacgagttcaaagacgccaagctcaaggtaaccaccaagccagggggctcttcaaccatgcatgtccctggtaagaagtcacatcgttccatggaccaagacctcgatgattcccttgtcgaaatcgacccagagctccgttacagttttcatcgaaattttcaggttcttttcctctatcttttcgtccaatttgggtttatccagtgtttaaatgaatacccatttcataaatttcatttcttttgattttttttgggtacccatttgattatattactcaagggaataatgggtaatcaatttttatgtgacatttttgtggcttgcttgcagtttcttcaacgggtttttagtattgacaccattgtgaaacctcttccacctgtcatggcttacaatgtctcccgcaacttgagcttcttcactcgcattttcacgcagttcttcggtaagtcaatttgcttatgccttaaatcttgattgaaagtccagaagataaaagtttcaatttttaaattgtagtagtttttagcaaaaccctttttcttgctaatccaatatatgtttttagaatctagtatgatctttatagaattgaataagaactagtctttgggttgtgagatgtgagtttgagtggttgtgattgttatttattgatttattaaccatgattttactcttttgatatcatgtcatatgttatgtatctcaaactcaaattatgtccttgtcagtaggccatgtgattttagacttgtggcattttccccttctgttgttttagattgctaacatacttaaagtcaccttctgttgttttagattgctaacatacttaaagtcaatttaggtggggtttggtggaatggaaaggaaacaactttcattccattcttttgtttagtttcattttaaagtattagaatgtcattcttattctaattatgtttttattctttctaaccaaacaccatttaatgggatatttattatgtgagtttgagttggagagaatagagttggaaggagtagatgatacaatatcaattgtctcaggatgcactctttgagacagtgccaaactccaaatacactcttcgagacagtatcaatctccaattgaactaaagttctatttctcaatccatattccacaagagctacacaattacatatttataggctttctcaccacttacaatttacttataagcccatatagtattttcagtctaacaatatacttggaggaaatatgaaacctaagtgttgaaggggattaacattactaccatcttaatttaagaagtatgatccacttagaaacacaaacatttaatttagtttgatattcctattttcattctcatcaagtctaaaactcataccaaacgccaccatattttcggtttttatagttattttcattgtgattaacccatcatactactactaatgatattgttaatgatcttccatattatagaccccgaaggtattgcaaatgctcagagatctcttggtataggacaggaagaaagagctcgaaaagttcgttgatggcggaaaaacatgaaggaatgaatgaagcaaatgatgtttacatgtattaaggttttttttttcctcattgcagtctatgatggctttagatgttaaaaatacttctctagctcaagtttttgtttttgttttattttttaaagggaaataaatatttcatcaactagttaaatggaacaagttttaaccaaaaacaacccaatacagttcaattaaaaatataggacaggcacataagtctgataaatgtaaacttgttctagcatggagaaatttgagtaactttgctataatatgattcaagctatatctaggcagctggagagcccattgttgtggcataaatatgtataaaaataaataaaatgaattaaagaaagattttttttttaattaaagggattattttacaaatacacaaaaatagtaaaaaaaaattgcaaaactatgatttttgatgtatattatgttgtattattgttaatttgttgttgattt

SEQ ID NO: 30928 - DNA, 1526 bp, Cannabis sativa
  modified_base (51)..(58): a, c, t, g, unknown or other
taaattttattttaccagcgtaatactaacttttgccagcacaaaaatgtnnnnnnnnaagtgacatttcttgtagtgatggtacccttgcaagacataacccaagcaaagtctgtgaaacttggtgaatagaaaatgaccaagagacttggtcacttgggggcaccatactgtacaatgcattgaactaacacaaagaacttatgcagagaaattttaactcttagtataagctactaaacttgcctttaagtcatgcaggcatacttcgacttggcaaagtaaatctggacccttacttgttaaggccataagaagatagccaggattaaagacagcctggtcggccacataagaagatagccaggattaaagacagcctggttggtctgcctagagttattggaagaaataagaatgtggcgtttggttttttgatagagaaggtgaggaaacgcattctaaattgggatagtaagttactatcgagagcgggcaagaaagtcttattgaaatcggtcattcaatctttgccctcatacactatgagtgttttcttaatccttttggaaatttataaagatattgatcgacttatggggagattctggtggcattctaagtcttcccatggtaatggaattcattggaaaagttgggacaagctttgtcttcataaacataaaggatggttgggtttttgtaatttgcaagattttgatctatcaatgttaggcaaacaaggatggagtttgctgaccaatccttcgtctcttgttgctcgggtttttcaagccagatattatccccaaggtacgtttcttgatgctgaattgggttctaacccgagttatgcttggaggagtgtttttgaagcccaggatgttgttaaattgggagctagatggagggtagggtctggtgctgctattccagttcttaatcagctatggcttcgatccaaggataacccttttgtggtctcatctcatgaggcacttcatgattgtagagtctttaatcttctcaaggttgatttttttgactgggatgaagagcttttggaggatctgtttgtccaaagagatttggagttgattcgcagtattcctctacctttgactctagagatggacacctggttttgggcttttgaagcttatggaggttactctgtcaagagtacatattgagctttgcaagtgcataatgggagatggaatttgcaagataactctggtttttggaagaagttttggtacttgaaattgcccccaaaagttaagaacttcctttggagggcatttaccaattgtcttccaactcttgtttctcttcaatctatatgggttaatgtgtatagcatctgcccactttgtaatggagaggaagagattatctttcatatcatggtttgctgccctttcacctgagcttgtaaagatcgaggtctggggtttaatttttgtgatgggggagatgagtttggtagctggtttgagaatttctacaatgctcatctaggg

SEQ ID NO: 30929 - DNA, 1350 bp, Cannabis sativa
  modified_base (46)..(66): a, c, t, g, unknown or other
aataataataataatctgatctcatttatataataataataataannnnnnnnnnnnnnnnnnnnntaataataataataataatctgatctgaattaaaccaatatgttaattaagtgaataatatagtgtttattaaatgtagctatagtctatttatgttgtttgtgtacatgaatatatataaataataattttaaaatataaaataatatttcaaagtaaatatctaaaaaaataatagttgtgtgttcaaattgttgacgcgattttttgtcaacgggtctaagaagatcataaacgagcaagatgaacacaagtgtatatcaatcaaaagtaaaacagtttatagaatgaatttgataatgatggacaacgaatttttaaagtggatcaccccctttcagagatagtataggctagtccacttggacaattattgttctcaatgcttagggagagttctttagggttatattctccaagaattcaatcctcaagtgagtttttaaaatgtgagaaagtgagagttcgagaaaatccgtcccttttacaagtgacttcaccaccttacattgtagggtttaaaatttcttaactcaatatacctcatttcctaactatagttgagttaggtttaaaatataaaataatattttaaaacaaatatctaatagttgtagtagatattcttggatgactttgagggcatgtgactaacacgaaagtgcttcttcacaaaagtgctaagtacttcttcaaggatagcccctacaagctggtcatattggtcacgctggtcatgttaattatgttggtcatactaggttggtcatattggtcacgttgaaacggtgacagattatcttggtctgggaccgacgaggtggtgctaaggtggtgtggtatggtggttcatgtacatgatccatgtgctctaacactaggttggtcatattagcattatatacatgcacgttgtttgacacgcggagcaggccaacatgctcatgaagctcggtcggggagaaggtgaggcttcagcacctcggtggcttagtagctagtgaggaacaggtgcctgagtaggtagggttgtatgggaggccataattaaggccttgatagctatcaaggtttaggagttgggtgcctcagtctctctcgaagactaagtgcattcaggcagttgttggggcctccgtgagcatgagggtcgagcctcttggagttcctcaacgcctcgtgcataagcttggcaactaatggaatttgaggcgatttgatccctagttgcaccaccttagtccttctcaaactcaacatatactcatggaccatgtgacactt

SEQ ID NO: 30930 - DNA, 2913 bp, Cannabis sativa
tttgtcatttagctaaacaaaaacatttaccctttatttcaaatcataatttttccaaaagagtgtttgatttgattcatatggacatttggggtgcatttcacatcattagtatagaaggatacaaataattccttactatagttgatgacaaatctaggtttacttctcaagaataaatccgatgtccaaaatgtaattccaaattttttcaacatggtttgcactcaatattcaacaaatattaaggccatccgttctgataatgccaaagaattcaatttacattctttctttgcatctaaaggcataattcattaccattcttgtgtggaaaggcctcaacaaattccgttgttgaaaggaaacaccaacacattctcattgttgctcgtgctctaggtttccaatcaaacttacccttagtttattggccatatctagttcaaacgaccacttacctaataaataggactccttctaaattgttcaaaggtatgacttcttatcaagtgctccatggcactgaccccaaatatgaccatttaagaagttttgggtgtcttgcctatggctccaccctcaactctaaaagacataagtttacaccaagaagtagagcctcggttttcattggctatccccaaggcatgaaagcctacctacttcttgatattgaaacaaaataaatctatatctctcgggatgtagtcttttatgaaacaatttttccattgttttctaatacatcttcttctgagacaagcagcttgtttcctgatgtagtgcttcccactacaaaaccagtgcagcaaacaagtgttcaccaaactgtgaacaatatatacactacccttgcctgtcaatctgcaccaatatctggtgcacacaacactgccaattcagggagcactgctccttcacatcactctgctgattcaagaactacagctcctataccagcagctcccacaccagaaactccacccagttctggcctaaaatcagcaaccaaatctggcattctcacaccagatgagactttacagcagaaccttgtttctagctctcctggcacccaaatccccacaccaggtgctcccaacacaccacctacatcgggcactactgaccttattacagcagtccctaaaccaacagacataactcatgttcatgacccttctatgacatctacaagggctggtagaaccattacaaaaccaaaacatctcacagattacatctgtcatgcttcttctactaatcatccaattgagccctttctatcttatattaaattgcatcctcaattcagagcagctgtgcttgcagcctattctgaagttgaaccacaaagctatgctgaagcatcccaatttcgacattggcttcttgccatggataaagaaactgatgctctcgaaaaaaataacacttggattgtcaccaagttaccacctggccacaaagtcattggatgcaaatggatttacaaagtaaaatacaatgaaagtggggctgttgaacgattcaaagcccgcctagtagccaaaggctacactcaaaggcatggcattgattattctgaaacttatgcccctgtggcaaaattcaacaccctaaagatcttcttagctctttctgcaatgtacaattggaatgtccaccaattggacattaacaatgcttttctccatggcgatcttcatgaagaagtctacatgaaaattcctcctggttacaaagcacctccgaacactgtgtgcaaactaaacaaaagcatttatggcctcaaacaagcatccacgcaatggtttagtaaacttagccacactctcatttcagatggttttcaccaatcactatctgacaattctctattcataaagagaaccaaaaccttttttctagccatcctcatatatgtggatgacattattgttgccagcaataatgactttgctatctctcacttcaagacataccttcatgacaaattcaaactcaaggaccttgacaccattcgatttttccttggccttgaagttggtagaacaaaacaaggcatttctgtctctcaaagaccatttgcaattcaattactcaaggacacaggttacataggagccaaaccggtctccacacctatggaaacaaacctaaagttaagtaatgacaaagggaatctcctacctgattccactatttttagaagcctcattggcaaactaatatacttaactataacaagacccgacatctcatatgcggtcaaccatttgagccaatttttgacttctcctcgggttcctcatcttcatgctgcacaccgcatcctacaatacttaaagacaaccccgggacaaggcttattctttgcctccaatacaacccccaccatatcagctcatgccgagaccagcttgtttgcatctaatgttcaactttcctttttctcggatgctgattggggctcctgcccaagacacacgacgctcaatatctggctactgcctcttcctaggtatctctcttgtgtcgtggaaatcaaagaaacaacaaatggtttctctatcctctgctgaagcagaatatcgagctatggctaatgctacctccgaactcacttgggtaattgccctcctacaagactttggcatatctcattcaaaccctgcgttgctatattgtgacaatactgcagcgattcacattagtgaaaacccgatttatcatgaacgcacaaagcacgtggaaattgattgtcatttcattcgagagaaagttcaacaaggttccgtcaagttactacatgtctcttcccaaaacaacctagccgacatcttcaccaaagctcttctcctaactcatcacaagaacattgtctccaagatgggtttgatcaacatc

SEQ ID NO: 30931 - DNA, 1391 bp, Cannabis sativa
tcacatttggaatcttaagaactctaatgggcggcttgtttctaccgaaaaggagatcgggtttatccttagggattatttcattaatctgttttcttccaacgggaatgattcctatgaagggcttgaagatctgattagcccgtccatctcttcgctggaaaataatatgctcattgctattccggataaggaggagattcagtcccatgtttttcagatgcatccgctcaaagctccggggcccgatggtttttccggatgtttttatcgtaaatgttggagtattgttggagatgatgtggtgctctgtattcagaaattctttgccacgggtattttggagcggggtctaaaccactctttcatttgtctgattccgaaaggaattaatccggatagtgttgatcgcttcaggcccatagctttgtgtaactttgtctataaagtcattgcccgtattattgcccaaagattgaggggtgttcttgatcactttattgcccctattcagtcggcctttctaccgggaagatggattgctgaatcctcccttctcacccaggaaatcatggatgtgataaaaaagaagaaagggaaaggaggtttaatggccataaaaatggatatgaacaaggcctacgataggcttgaatgggggttcttaaagattgtgatggaaaaatgtggcttttgtcctcacttcatcaagttgataatgtgttgtgtcactacagtctcttattccattcttctgaatggaactcctctgaagaagtttaaaccagctaggggaatccgccagggcgatcccatgtcaccctacttattcctaatgtgtaatgaagtattttctcgtttgctctatctcgaacaatgtaagggattattccacgggatcaaagtggctcgggaagctcctcaaatttctcacctcatgttcgcggatgacaccattatctttactagagcaaatctccaagaagtggagacgcttaatcattgcatccagaaatttgaagtgtggtctggtcaagtctgcagcaaacagaaatctgggatcttcttctccaaaaattgttctaattctttaagactttccatagaatctggtctaaggatgggggttattaatgattcagaaaagcatcttgggaatcctttcctctttggccgaagcaagaggaaggacttcaacttcctcaaatctaaaatatgggacagacttgaaggttggtgggttcgtaccctttctcaggctggtagagtggtttatattaattcggtggccttggccatgccgaactacgccatgtctacttttaaaattcccttcactacttgccgggaacttgatgcattggtgaggagattttggtggactggctcac

SEQ ID NO: 30932 - DNA, 2643 bp, Cannabis sativa
tagaataataactatttatgtgctgaaaacacgatatagatatatattgtacaattattttttggaatgtattttttatttttctatatttttaaccttacaaatagttaacagtgatcattaatatttgattaattataataatagtgatataatatcttatagtaatattgagtataagtagtattttttttctcaatatttatatgatcataaatattttgctctacgtgcgtagcacgtataactttaactagtaataaaaagggggcattatatggtggggggaccaccatttatttttatttatcatccttttcttcctcactctctcctgcacatcactctctctctccttctttctttctttaccaattgaaaacaccactattggtggagctccgacaaactatctctggccaccgttcgaccacaggtgccagagcattcaactcctccaccgctggagacctcaaccccaagcgaagccacctcatttgttgtcgttagctcgagattgtgagtcaaagtttagatattcaaacttttaatgcatttttcggctagctccgacctctgtctcatgatctatcttcaccactagattcatctcatcgaggagaacaactacactaagtcattccacccagcttgctacttttttcagtgacgtttttgtagctcggcccctcttcggttactttctggcgatattgtgtactattttgaaaaatggttagcgtgagtgtgatctactcatcgaggtggtcattttgatatttttgacctcacttttagccaacgacactaagtcaattaaagtgataaggtaatagataataattaatataattaagcaaataagaacacaagatttatagaggtttaaccccgtgattatagtaatagtctactccctttttacttgtattgctttgcagaattattaagatcacaaggagttggccaagtgagtttctcaataattcttaagaaaagcttacaattattttaatggcataagagctctcaagaacatctgatttcatatccctgaacaatggaatgaatccactatttatagggaaaaaaagcatcaattaagtttcctaatacaattaagtataaattgggaaactaggctagttccctatttgtcagtgcgtgtcaatcccacaaaaatagggatatttaatttgaataattaaatgaagatatatttatgaaaaatatccttaaagatcttattcatccgcgttgtcctgcttagaggatctagcttcactggataatgaagatctgtgcggacaatcacgtacaagttctgtccagatgattcctgctgatcaggcattaactttctagatttaagtatagaattccctgaccgggccatggagagaaaattacctgtccagacttctcaatattctccacatatcaccatgttggatgtcacatcaccctgtgtagaatttggcataacattttccccctaagtttgcatgggaaccatctgcttatacgtggacttatttagccattaagttggtcggatgggtgacacgtgtttggtcttcgtgctctatcttgatatgatgtgatttgattgagggaatacgaagatacgactgtctcttcaatatttgggcatttaatgccccgtcttgaaaattggagctcgagacatgcaatgacggctacaaggtattgcatgcttgacatttgtgctcttctatgggtattaactattcttttttgggggaaaacccaaaatttaaattttgaattactgaattagccatcaaagtacctataaaagggttaatcctctttgacactcttttagccatttctattctaaaaaaaagagagaaaattttccttttatctctcaataccttcaaagagttctttttggaaacccaatttgctgaggtcgtccaagtgcattcaagaatctgcaaacactaagtaagttttctttcaccttctcatttcttttaagttattcactttatttacaaatttgtttctgtaaaaatttgggatatatgaaactgttctttgacgatagagattaaggaaatcagggctttcaaattctggtctaaatgaaattgcttaacttatgattctcaatttccagttgattcccaactatttgtgctgaaactacttgaaaatggttattgagagtttctgagcattttttgggttcttgtttttcctttaaatctttaattttgggaattttatgcttggaatgaaattttctttcttttatgcttttgaatatgtctggttagagcatcaaacatgtttcttccttgcaagatttacgcttctctgtctagttcttacctctttttccttctttttaagatgaactcgagtcatttttggggaagtaagcaccagatagataatgatttgcttcatttgctttacaaaaactagcccagattctatgcattttcatcctcaccaagcgagagttcattgactttgagctatgatgagtgggaggttacaagtgactcatcagagtcttcggagctcgtcatgcaacaacactattatcctgacaaaattcgtggagaagggtacggtaggttcatttaggaattgaataagggctag

SEQ ID NO: 30933 - DNA, 1124 bp, Cannabis sativa
tatgattgcattttgaaaattactatcaatggtaaattaattttcaaaaataaaaactatattatatatatctcatctgtggggtattatgaaccacgtctaattattatgggcaaacaccaattaaagttaaatcataacaaaaggatatatattaagaaaataaaattatatttaatggggaataattggggtagaggtgaatgggacctagtgagaaattatagaataacccaatcaaacattgattgattagctcacttaataagttaatccatggggtcacttttaaaatagaaaataaaaagagtaggagagggtgtgtcgacatctccacacttcaaatttagggattagtttctttttttttttttaataagaataaaaaaaaaatatatgtataataatactatataataaagggaggtgtacttatatatataatttattatatgtacaataataaagagactaaaatatatgtatatatataatttgggtatagatgacacatacatatacatcaaattaaaaatattctacatgtttattatatttcgttttacattatatattcttttttcttaacaaatgtgcacctcaataaattattaaggatgatttgagaaaattatttaaataaaatatatatatttatatatatatgaaggttcttaagtatacatttgagaaaaataattttttaaaaaacaaaagtctaataaatacacgtacgtttatacttacataatgagaaaattgtataattgtattgttctaataataaatattattgtttcaaaaaaaatatatatatattataattataatatatttataaagattcaatacaatgaaaaataaaatattttttataaacaaaataaaatattaagtaaaaaaaaactaagatatattttttaaaagaaaatggattgagaagtttttactaaacttgaaaattatagtaatgttagatttaaaaagtacatttagtaattttatttaatagtttattctgtcaataaaaataataataataataaactctatgaataatttattttgtaaaatttaatcctgtttagtattaattttgactaaaaaaacacatgttagcatca

SEQ ID NO: 30934 - DNA, 2945 bp, Cannabis sativa
  modified_base (27)..(27): a, c, t, g, unknown or other
  modified_base (2693)..(2694): a, c, t, g, unknown or other
  modified_base (2861)..(2900): a, c, t, g, unknown or other
taattaaattaatttcatcattttacncttctcgggtcataattactaaaacgcccctagctcacaaacgtggtcttgccatgtaataaattatattaattcacatatactgaactatataataatataattcctcgattattcataattatctaattagggttttgctaatccattacataattccagggtattacagatttcttcttatgggcggtggttttcatttgcctcttgggaggaaccacttcagtagctgtagggacgccagggttggttgcctttttcttcccctttcggtccatgatatcttcataacccatgtctacaaaataagaaaaagcgttacaattattataaaggccgatgaggaagggaggaatataattttccacctaacggatttaccaaagtcactagaaggcgagctatcactagatgaaggggtagagggaccataatatccactaaaatccgtaatgcatgtaatcttgaatatattaaaaggctcgattggttctaaatcccagcttgcatctatgcgacctgccatatcttccatagtaccgtattgctcagctataccataatattagtcgtgacagttaacctggacgtggaatctaggctaccagctgtcaaacttattagcaatgcggtccacaagaagggaattccaaatataaaaattaaggcaggagtcttggaagatgactaatgtactacgtttagccctaagtatagtgggagaccaaccacattgattacctcgggatgctccttcatcggattcccaagggacagtgttttgaaggtattgtgcttgagccaagcaatcctaagccttgtcctcggttggaacagtagtctactgccaagaagaatacttgggaatcttttaatcacaagtatattccttatcagtgagaaggcccgccgatcgtaggttagcctcactcaaaaggaaatcgcatgaccgaagaccgtagggaagagttatcacacgcctatgcgtactgaccatctcgggagtaggagtaggcatcgtcaagagagcttccaaaacaaaacatttgttagaaacttgaaaaacaaagattgatataaatgagcaagaagagaacaatcacttacgaattttgcgaaacgtggttttgctgatgtgggaaagaccagatgtccagaagaagttgttcttgaaggatactttatttggcaagtctacaataattttaggctcgtttgaatgagtaccgggatagaaaaagccccctacggcattcttccttgacggaacggccttaactgagtaaagatactcaatctctactggtgtgggacacccctagtttagaattttgtacaagactttcaaactagcgagaatcctgtaggagatggtagtcaacttgaatggggcaactccaatgtgatttatgtagtccttgaagtagtctcgaagaggaagtatggcccctacactgatatgctcaaggctccaggtgcccatactagtcgaaccattgttactagtctcactattggtccctgggttagttcttaaaaaacgtgtaggggggtagaaactgaactcaccctcccatagtatctaacttggcatgattgtccaagtttgatcccgcaggtcttaagcatctcgctcgtgtagcctgagatagaccacacctttgattctatcaactcagcctcaaaagtgacattggggtcctagggagtcttcgatgtacgtggcttggggggcataatttcaaaatcaaagtcacctggttcaaaagcaatcgtgatgttgggttctagccaggttgcctctcgcaagaattgacgtttgccttcgaagatttcttgcaagaaacgcctgtagcgactagcaatatcttcctagtgggttctcactacgtgttccctaaccctagcatcgttcaactctaatttggaggtgggtttagaagggttgggttcatatgggatggttgattctgtaggaaactcaaactctaaaacttctggacgataaattcctgaaccagagtaggacattgctgcaggcaaagagcagttcaatccctggaaagaattttatcaaacccgaaggtaatgagttggagatcttaaaataacctacatgttgcctgaaccctagtatgaacctaaattcagtttaaccctaaaaaactaccacaaccagatgaggtgacaacgatacaaacaaactaagtaacacatccacacaatgtaataagcatgagaaagaagacagcaacttagtgtttgaagttagggcaatgactggttactccgtcttcaaatcttcgaacagggcaaggatcgcgttgagaggatgaaatggaaggaaactcgtagaaaaaaggtcaaggacagagatggcttgcaagtactcgaacaaactcaatggtgatccttgacgaagaagcttaagagtttttttagactttctaaaatggaggaaataatgcaaaggtggctctttctttcttgctttatacccatgatattggctttgttagaccagagaagggtttgatcctacagacataattcaaagtgggagtggaaaagatagtcatttaattttcatgtacctcgaaaagaggaccatgacgaaaataccctttgtaatcattaaaaagcactttttattaaaaaagaacttnntaaggggcaattgttatacccaaatttcggtaagcacatcagaagaggacgcgtgtcgagcttggaggaacgaagaactcaaacacgaaaatcgtaagtacacttggcatggaacaactcgtcagaagcacaatttgcggagtatgtttatgttgggttttatgccnnnnnnnnnnnnnnnnnnnnnnnnnnnnnnnnnnnnnnnnaatatagatcagaaataacattaaatgttgcatggttcacatgat

SEQ ID NO: 30935 - DNA, 1110 bp, Cannabis sativa
ttgaaaaatataaaaattctattaaaattcgatgagtaacttatgtaaaatacaacaaatttttgcaaacattttaggacagtgtattgaatatactggacactatagtgcagtactatatatacctgaggagttaatttatagtatataaatattgatttgtgtaattgcattgcaggagttggttgtgtgcattcaaagttacgtgaacaagatgagtgtaagtgtagcagtggatgaaaacaccattcctgatccacatcagctatgcgatgacattgctcaatcacttacacttattaaggatattgtcaaacaaaattaaacccacttatctaattaattatatttatatataaactcttcttataaatttattattctagtccttcaaatccttgttataattaaatattaaccatctgaatgaagactcttattaattttcatgattattattatttcttattaaacttaataaataaagaagaagattcgtcttgcatcttaatttcaactatatattagattgcaagtattaccttaaaagtgtgaataatttgaactcatatataatttatttacctttcacacctatcttacaccatccattagaatgagaccttttgagaaggtgcccaaaaataaattcgttaaggttaatttcggctcagcagacaatcttataccaatagaggaatagatggtggcgacggtccttgcaagtggtgaagcttgctgctagagccgtcggaggttcaaaatttggttcgaaagagggatttcgaatctagatggtgaagggattcatctagcttactgaaggggttcttgaatgttggaatcaagagattcatgtttattagatctgtaactgcctaaggggaggcaagatggtcttttgttagaggagagaattgttgagtgtacaactaaataagttctacattgactagaaatagaaaggatggatcttgggtatataaggatatacattatctctattggaatgagacattttgagaaagtgcccaaaaataaatttgtgagggcttaggccgaaagcggataattgttaggttatttttagtattaattttagattaagtt

SEQ ID NO: 30936 - DNA, 1241 bp, Cannabis sativa
aaacttccagctcaacctgtcgtaagctttaacaaggtcatttttttatggcaaagaaaccttccttacctttcttcctattgaaggagtgaatgacttcctggacaatcacgttgttgtcatggatgttccgccccgggacaaaggcagcttgagttgggcagatgagagaagggagcaaaggttttattctgtttgctaataacttagcaataactttgcaaaccacattacataaggagataggcctaaagtggttggtacgtttaggattttgaaccttcggtatgagcacaatgttcgtggcatttatccccctatgtatattgccattcacaaaaaagtcttgaaccgcatcactgaaatcatcaccaactgactcccaatagtatttataaaacaatactgacatcccatcaggacccggagctttatggttattcatggcaaacaacgtttttttgatctcgtcagcactcggagtgctaacaagagccgacaactcctcctgagagattcgctcatgaaacaactgggagcaattataatccagacaagtcattgccttcgtaaaaatacccctaaaaaaatcaatgaactcattcccaacggcttcccgcccagagatccagacattatttttatccataatgctctcagtggtatttcttcgccctttaatggcagccgaaaggaagaagaacttagagcatttgtccccatctttgagccaagagattcttgccctttgtttccagtagatcgcctttctttctagaaactcattcaactctcggcggatttctcgttcccgagacccagccgggaggctctgcagagagttgagcttgagttcaagatcttttatagccacatcaagcttaccaaattgggacctactccagttttggagggccaccctagtggccccaacctttttgaaaattcttgtaggggcccaatcatgattaatagaattccaagcattgtccacctccaggttgcttctagtatcccgggtccaaccttcctcaaacttaaagcatcttttaaacttggtgtgcagaccattcgtcaaaatgcacaaaggcctatggtcagagttgcaggtctgggacgagcaaaggatagccttaggaaacaaattgagccaagcgccattcactaagcctttatccaacacagatttcacatgatgcctcccagaccgatggttatcccaagtcaggttgtccccttgg

SEQ ID NO: 30937 - DNA, 1608 bp, Cannabis sativa
tctctctctctctctctcctatgtaggtcgacggtcgtgggggaattttgtcatgggtggttgttggagccgtcctcagctctatagttgtcggagtcgaagatgagaccttatttggttgtgtttctttttttttttttccttaaatcatttttttaagatttgactgtattcgaacttgttctctctctctctgcaggtcactgatttcgtcagggttatcataggtggttgttggggtcactggcagtgggtgaagtttgggtttgcaagtggtggttggggtttgggatcaatggcgcaaatagatttcagttgtggctcaatcgagagagatagagcaggagaaaggagttaggatttctagaaaaagaaagaagaaaaaaaaggaaaagggaaacggaaaaaagaagaaaaaaattaattttattttaaatatttttaaattagtttttaatatttaaattattaatattaagtggaccaataaaattttgctgcgtgtacacttgtgtacagagagtggcaattcattttggcatttaacaaacaaaagtgaacagaaggagtacataacaaaacgattttgtagattggagagttcaactccaaaaattttaggagttgattgtgccaaacttcaaaattagaagtttgaccacaaattaccctgttattgccaattttatttaattcaatttctcaaattatatatcctaattgattgtcaaatattttaatattggtcttcaagttcactactcactaattgcaaatctttacctcactaattcatttcctatattgcagatctaaagatctacatcaacatcttagtagaaacttacatttatcaataggttttttttttttttttgaaaagaatctcagttcggatagattaacaccaaaagagaatgggattcacagggggaaatccctcccctttacagttcaaggaaccgctatgagaatgtctagcattcttaacaagttcatcagcgaaagtgatagcatttcttttcacaaaaacaacattacaattagagcatgaatttaaaagctgtagaatagaaggaaacccagccgcttggtgccagtcaggggtcttcttgtcacgaagagcttcaaccagaattttggagttggaagcaattgtaaaatcgtcccagcctgtatccattgcccaccgaataccatgagacacaacttccatttcagctgcaagcgcattgccacagaaaccagcagttgaattataaaaactattcgatcatctcatcatatatacgttgcatttatataggattgttcatatatgtctatataggattgttcatatatgtctatagtttcatttttatatagcttaccttgtatggatgcattccatttgttgtatattttaattattgtttagaataatatatataataaaaaaataatatttaaatattttacttcatatgcatataaaataaaataagtttgttttcgacaaaattattttaaatttttaaaatttttgttgaatgttttaaataattaagatgtacactattatataaaaaaaataagatcaaaattatttagagcatgtttggtatt

SEQ ID NO: 30938 - DNA, 1284 bp, Cannabis sativa
tttatattaatgttataatgttagacaatacttaataacaattctcccatattattaaccatcattctttctcatctatacatatattatgatatttatcctaaagagaattgctaaagtgtaattatagtgtaatttaatatatatatatatatttttaatttaataattattttaaaaaaaatcaataacctatatgtctaatacactcaatattttgtccaaaaactaattcacaaaagtgacacacaaaagtatctaatgtcacataataacattagaaaaatatctattattttcattctttattattttaaaagaaattattaatttaatattgtagcaatataataataaaaactagggcagagtaaacatgggagtcccacaaagtataagatatgtaaataattcacatggaaaaacgacaaacggattaaaacatcattggagtttggatatggaatcctagggctcaatacacctaatatatcatactaaatcaagaataatcaactctctctctcaaaaaaaaaaaaaaaaaaacaaaaagaataatcaacatctcatattattttattattagaaaattactaaaaaaatattattggtatctagcaactactcagtattatactgcaattaaatatcgagtcttatataacttaagaaaataattttaaaaaatattattaattaatcacgaaacgttacctataaaatatcttgaatatcattggtgcttaataacaatactaacaatacttaccattatatcactacttgagtatttgcaaaaacaacatacccaaatgaatcaattaatgaaatctcatgttatgggaatttattattgttttgcaacaatgcacttgaatttcaataaattagaaacttgttccaaattataatttaaaatagtgtagtgcaaatttttttttaactgaagaaggggatcgggtggtgcagatcccttcctcatcctttcagtcattttggcaatctcgaggaccacgtgttagcaatagaggtcttatacctcaatctttcttaattgggtaatcgataatcacctcaaaaattcccatcacacaaatgacatcaccgctaacaaggaccaagcctttcttaaattcctttcaagaagggttatggtagatttcgaacccttaacctaagtaagagaggatgccagtaaagacaatcccttccactacaccacacacctcgcacttagtgtagtgcaaacttgtgatctcttttttgtcatataataatataatc

SEQ ID NO: 30939 - DNA, 3193 bp, Cannabis sativa
  modified_base (103)..(109): a, c, t, g, unknown or other
cgtacggtcggttttatacggttataatttctaaacggtcggttacggttttcgtaaaataaaaaccgtaaccgaccggtcggttataaaattttaaaaaccnnnnnnnaccgaccgattttcacccctagctgtgagagagagcggatgaagattgtacatgtcgggacaggtagacctggagcgtacgatctttgggacagctgattgtattttgtttagttactgagggacaacatttgtattacatattttgtaacagttgcaaatattttatactagggatttcagttatatatgtgttattattttgatatttaccagcatttaaccaaaagttttaattactcataattttcaataaactctttgattagtagcgagctacacaattaatacaaaatcacgataacacgcctaaactagtagggtgttacagtcttactgagcacatccatggatcctatcatcatgagattattaaggctcatctcctttgtttggcattgtaaggattcattcacatggctaattttgggattcagcactaatattacatgttagaaatttatatgaatcatataaaatatatgaacgattatagaaaatacagaataaatcgaacatatatgcaatacgaagaaggaatcgaaatacctccagtcattgattttttgagatttgatcccatgcaagctttgaatctataaaagaaagaaaatttagttagtgtgggtattcgagctttcaagctctctctaactctcttagatgaatttattatttttacaaaatgagtagtgagcttgtggaccggtaccctatatacaggtgagatactctatctgaatctgtaccacaattaattgtcagaatattttgacaattaattaaaaaaaattaaattaagtaattgaatgtttagtaaatcaaaatttgatcataactaaaatatttcaaattaattaccaaataattggttatatatattataatgtgaatcaaatcaaatatttgaaaactaattcaaatatttgacttaccaattataaaatattctaatagcaaacacatattctatcactatcgccgaccaatgtcgatcctctagccacttccttcaacttatttgtcatttcgcgactaccaaacaattcacaccaccaaacgacgacataacgaccaaactaaggcatttcaccacaccaccaccaaaccaaaacaacaccaaggtaaaggagtgtgtacaagctaggaggtcaatgaagaaagaagaaaatataatgattcttgagtgaatagaataccaaattataaatattagaacacttgtttacaattattaaaaaaaatgcaaaatatgaatacttattgaagtaaattgttcatatacgtaaatgaaattattataattacaaaataacctaccttttatgattttactaagttagtttaatagattttattttaaatttcatacctacaaaatgtattgaataagaatattacctaacattctaagatttatttctaatataggcctctaacaaatgagataaattttacaattcttaaaaaacaaacctaataaaaaaaacactatatttgattacatttttgcataattgcttaactcattatcacaatcacaatattgctatgttgacaagctagtgtggtgacaattgtaataaatgaagtttataggggtttaagttagattaagatgaagacaaagtcaaagagtcaaacacacacacacaaaaagtataaggtgtggaataagaagaggaaattttgcttgttgtctcttatagttgcacccaaataagaccaaagggggtcctctattgtctctctttctaattgttcattagttataaagactaagtgggtctgagtttggcattctaacaaccacctttgtttcctgattttttttttttttactttatggagtttgcttttttttttttccctaacaaaaacatcattgcatatttgaaccttgacatatagatataaacacattaagtttagtgcatgtatgcagtatttgaagtttagtgaaattttggaactttataaacatttattaataatatgatctatgtgtccaaaaatctattccaattatgtatctgtcatatatgagatatagcatagcatatatatgtgcataaatgttataatttcttcaaattgtaatggagaaatacactttttttagttaatgatttggggaaatgggttttgttttgtattgtagtgggtccaataaattaatgtgtagcttacttttttattacatattcttctcttgttttttttaataagagaaatagagatcattgctagaggtatcttaaaagtatgaacaatgctttttaggttaactagggaagagggacaatgaaacactatccttattcatcaatagagtttttcaggtttcaatgatttgagattttcatcttttacatacttttttaataaacatgggccaatatatgcaaatatgtttctcaacacaatgatttcacctttgaaatatgcttataatgctactaaaatctttgccacaatattacattatttcttgtcaaatgacaagaaacctatgtttctctccactcaacaccatactaaattattaacaaattcatgtttatggctcttctataaattttggattcgatcaacttttcaatttttttttttcttttagatctctttgtttggtaacacttcaatttctttatctttttttttcttaataaagttagaatgttgtctagtttttgtttttcaattgaaattatagaatcttttccatacaaagaaaaaggtcttatttaagtataggtccccatgggattacatatatggagcaactaaaattgtagttttcacttttgagtattgtgaatttcatataagactaaccaaaaaaaaaaaaaaaaccataatggttattgttattttttgtccattttctaatattaatacttattaaaagttcacccattttaaaatatagtgtgttgcatattaatttctattgtttgtttgacaaacaagttacaataataacataaccttgccctccccctaaaaaaataattatataaaaataatattatttggtaattaatattttacatccaatattttttagtaattatacaatata

SEQ ID NO: 30940 - DNA, 1321 bp, Cannabis sativa
ccttgtttggtgtagagtaaacaaggcttgtctggtgcctccggttgtctcattgatttcctagcacgttcttcagacgcgtgggctgcatttatgacaatcatcattaatatttattgctttttgcaggcaacgattcgcttcccgtccattaatgatccgacacatttaatcggtgtcagacaaatactcaagcatttttagcagccctgatgagcatctatcctaaccgttggatctacagaatgcgaatcgattgagattcccactgtacgatggcacctgatcacagctgctttgcaccctttttggcctataaaagccagcttttctcattcattttgttactttcgccactttgccatttttccacaagaacacctttgagaaagaatatcagaaaccatagatttcttgctgctattcctccgtcgctgccaatccaccttcaaccgtcgatcaacaccaacccccagttcttaactttcatgtaagtttcttgggaactctatgtcgttactgtttatttgcatgctggggtagaactttgtggttaagtgttggatttctggggaataactttgattgagtctgttatgtgatgtatagaatgtcttttatttatgtttcgttattatcctccattcttctttgaaatcgacccctttgtcgaaagattatttaaggtatggggcgatttttgttcccacattctgcgtttttcacttttcttctgctttcgctacctttggaatttttgcacccgatgtttgctaacgaaaatcctttgggtttcaatttttggcaaacattcggaaggggcttctttccagcggttaggggatccccattccctcttttaacattagggtttggtttgggggctaactgttgaattctttcttttttcagaacaaaaatgtctacccctgcgtctggaaccatatcttctcggaagggggcggttactttggccaccctgaaggaagttgtgaagggcccagttgcccaggagaattacacgtgccgttctaacggttgggaggcggacgagcttcgctccaccctgacttgcgcccaccaattggagaaaattgtgaccgtagctggcattaagcagtccgtgtttggggtctatcatcgcttgcatcgggacgaagagacgcccaatcacaactacgggggttttggagcctagagccagacgcatctcatctctgaggccatgctcccccttcaagattattttataaatttccttgtttttgtcggccttgcaccttaccaacttattcctcaagcttactgcctgctctcaggc

SEQ ID NO: 30941 - DNA, 4343 bp, Cannabis sativa
ctctcagtgattctcgccaatttacggcgaagggagcaaagtttacaggaaaaaagaagactaaggctaagtctaagaaaactggtcattcctctttggatcagatcatcaaaacacgttcaatggatgctattcaggaaaaggacagagatgaacttgaaaatttgggaaaaatctgctctctagaggaaactgcggcaattttttagtgacaaagtgaaattagacaagatttctcagattggctaagcattgggaattgagctgcgcaggaagtaaatctaggtaagaaaatttctcttattctgtgatctgatattttgatgaattcaaaaaatagttttgtgagtatgtaaagtagaaacataaattagtttgaagtagggaatggtctctggtatgaaaattgaaccagaggatatattgttgaagaagttaattactgacaaccctaatagcgtgttatgtggttggagtgaatccctctattaatggatgtatttgtgagaagaatatggaagtaaatatttattatgccttcttatggaatttttgttatcatattttaaagcttggagcaatgagttaatgtacttgtaggaggattcatattctttgatagaaaacctcttattatgaaacaataaaaagggatgacttcactaaagaagatgttactttagttcctacctggattaaattgaagggtttagatattaaattttgcacaataatcactctttaagatagttggacagcttgggtcaccaacccaagtggaaaacatcaccaagcataggaatatattgacttactcttgattttgatcatgagatagagttagagttatagtatgaatagctatcacttgtttgtcataattcttctggttttgaacatgagactaatatatgctggaagaagaaacatattaagtagacttggctgcctaagaagagtaccacaaagagaacatgttttatatgccaatggtagtgatggcttttagaaagttattagagtgaaaaaggtggctgagaatgtttcaatagagactacagttactaatccatttgttgttcttgattcagagcaagtgctggaaaagtttctgggttcaatattggaggggagggggggatcagatccctcaacttccaatggatagaatcatttggtggaatgttagagggattaacaagcattataagcatcgtgaaatcaagcaattgattaattctaagaaagttagactggttagtctcttaaaaactaaggtaaagaataaaaatacagatactttgtattgagtttatttgggagttggtcctttataaataacaaacccttggatgcataaggaaataataattgtggcttgaaatcctaatatgtactctgatatgaatgtgtaaactagtcaaatggttaattatattgctcaattgactcatcacaaaagttgatttcatcattactagaaaaaagacatttctttggttgttatcccactttgtcttcactttttaaaaatactcgctccgacgtcgtttgaggagaagacttagattaccaaaacactgaagacataaagggagcatgtgtcttcggttattacaaaataaccaaagacataagtgaagccaaatttgactttcaggtggaggaaagacctacatcttcagttacaatgtaatagttgaaggcattgcttggtttcttctcacgttatttcgaagacataagtcttccagtagtgtgagaggaagaacattataattgaagacgtaaatctttccttttctatatttattttttaataatatttttaattttaattattatacatcaattttttaaaaataactacaaattaattattataataaagattatttttggaataaaaattatttaaatgatattataacaaagttaaaatactttacaacatgctaaatccttacaagtgcaagcattaaagaaaattattatatagaatacaaaataagtgttgtgccaatttcactaaccactaatgtttcaatgcttgcaagtccgtctccatatcattagcgctcttttgaaactgtaaaattaaaatgtacgttattacttaattataagttaatataatagatatgcatatataaatacattaattatatatcttaccttttcattcataataatgaatggatttagagctttcaacatgtacattatgtaccttaatacataaaaaccaaattttatcttaagcacttgaaaacatttgaagtaacacattgaaacctacgacttttcaatatgtcctataaattaaataatttatataacattcaactattcgaattttatgccctaaaaaaacttttttcaatataatcagattatttttttgaacaagaaaataatctttattcaaaacatgctgaaaaaaacagtaataagctgtacaaggacaacatccacaaaaacccacactacgagccagtaattacatttataatatacctctccagatttttttgctcgagtacaacagtttaacactctaattttaacagcccttttgacttccctactaatataacttgcagtattacatttcaaatcaaagatacaacaattcctatcgatccacacaaagtacaaagtagccgtgaccacatcattcataattatatcacgaaagctatgggaaggtctcgatagccactctctaatgttggtttaccaagcaaaacttccacaccatttgatgatctcgctgatcactttgaaagtgaagcagcagttaacgaaaagatgggagtgagactctgtaacaatagagcaaacagagcataaatctgaagataaaggcaaaaacgtactaagatggtctctcgtcagtagctaatcattcacaatatgccaccctataaacatgtgctttggaattatcatcttgttccaaatgtttgccacatatccatctttttgagattggatgaatgaaaagaagaacattttggcgttgaatttacctcttttcatagcttccatgagatcacttacccccaaagtcgatcagagtctaaagattttcttgaagtatcagcttgagtcttgtttgaactcaacctcccaaaagcttggacctttaaaatagatggcatcaatccaacgaacctagagattgtcttgtttgctcaaaatgacccaaatatacttggatattagagtgatgttccatttcttaccctctcgaaacccaaggccaccaaatttcttcggaagacacagtttctccaacgatgtgatgtgaaacttgcttcgattaccattagtaccccaaagaaagtccctacaacttttgtcaatagccgctgtaattttttaagggagcatgaaaaaactcatccaatattttctaacccccaaaagaactgagtgagtcagttgcgcccttcctccaaaagaaaattttcttcaagcccagttatgtaagttcttatgaacttttccaattataatcccacaatcaaaggctcgccattttgttggtctaatttgaacaccaaggtatttaagggggaatcttccctcatccatttgcagcacattcaaaagtaattggttacagtcatcatggacccctccaaagtacacagtggacttggatttgttggctacaagacctgttgattcactaaagacaataaaagccttatgaacaagcttaacagattttttattaactctacaaaagatgatgagatcatccacaaaatagaggttcaccagccccaaggtcttgcaaagagggtgaaacccgaagtctatcaccttagatttttggataagtaatctagtcagatactccatgataagcacataaagtaggagggacattagatccccttgacaaagacccttctcacctttggatgacccttgtagctgccgattcaacaaaagagaataagaggctctatgaagacattttatgatccaagaaatgaatttggaagggaaacaaaggccttttcaagatcagggacaaaccaccaatcaacagtatcatacgccttgcccaaataaattttcattatgcatttaggaggcatatttttctgagtgtacccttaaataaaatcctgtaagatcagaatattatgggctaggtacctgttcttgacaaaagcacctttattatcatgtataagacaaggaagaacttctgatagtcttgtacaaatcatcttgtgtaatatccaaataagtttaatggtaaatatttagagtttatatttatattttgagttaatcatgtaataagtgggattatgatccta

SEQ ID NO: 30942 - DNA, 2758 bp, Cannabis sativa
  modified_base (540)..(545): a, c, t, g, unknown or other
  modified_base (2140)..(2140): a, c, t, g, unknown or other
agttgttttgagtgtttgataataaacaatagggaatttatatagatttgaggaaacgaatattatgacaaagtcaacaaggccaattaaaaataatatcatgcaattgtggtcagatttgacgaattaacaaaactaaatatcatatacaggatgtacgattcagaatatgctggattttttttttttttttgatcaattcagaatatgctagattgatgcgcattaataactatttttttttgtataaatatatatttgagggaaacatcacttatgctcctaatgagaattttttatttctccttttggaagagataatttttaataattttgaaagttatttttttaattttttgataggacggtttatgttttaattattttagatattttttctatttttaaaattttttaaataacttataatagtaaaaataaaatttgaaataacaagttagacgtgtataaaataaatatgcatgtaagttacctgtgttaccaatattggcacggtattgcagcaggagttctcttttnnnnnntggtgcatgtatcattttgaaatacttgatttggataatgcaaacttgctggtggctttgtgctgggcaatctggaatgctaggaatgataaagtttggcaagataaggttaattatggggatcgaaggcatcgttgcatctgcaacaaactaccttaatcaatggcgtgttgctcagaattcaaacaatgagctactgttcaccgggttcattctgggagatggggctgagcaatggagtgctccaagtgttcatagcattaatgtgaatgttgatgcggctgtgtttaatgattcttctgcctatggagttggttttgtggcgagggattccagtggtttctttgttgaaggcggtacagagttgtttcatcacacgatttctccggttgtggccaatgaaattggagtctgggaggcattgagttggatcaaggatcattcatggcttcatgtgactttagaaatggattgcctttcagttgtgcaagttgtccgtagctttatggttatttctttattggcaaagttgttagtgattgtaggattttgttaagtactttgcgtaatgtttcttttcattttgtaaaacgatcagtaaatgtagcggctcattcctttgcgagggcctctatatctcaccttgatcgcctgttcaacttaaacactgttccagttgagttgttgcctaatttggtaacgaaaaattttcgtttaataaaatgactttcatttcaaaaaaaaaattataaatacacccacatttttttttaaaaaaaaaaattgagaaaactttattcacaaaccagcaaataaaaaaacaaacaaccaaggcacaagctacaaacaacccacgacagctgctgcaaaaaccagcagccccaaccacacccactaccaatctttaattacatttagtaaatataaatttttaggacaaactttgaagggacctttgctctgcttctaggaacaagtaatctcaaaaatacacttagttctattcttccaaagctcgtacaaggttgctgccataacagcgttgacaactctattttggagatcaccattccaaccgcaacagtgctaaccacctcagccatagaagcaggccaacgataagtccccagccatttgctgatttcttcacccacttttttagtgtaaatatagttgcagaataaatggtcatgagtttcaatctcgaaatcacaaatcgaacagtgatcaacctgaatatttataattctgctcaagtagtctctagttaggagatgtttatttataacttaccagtatataaatatacccatttgtaagagtgaaaagcttacaatttccttcccatttttaatacttttgtacataaaaaaattgtctttttttttcttcgtattgcacctttgtaaatctcaataacatgcagtaaaaggaatattttagggcacttcattccttagcctaaaaaataaccccttctacatattggcctgaaatataaaataaccttaaaattaaaaattaaattagtaaatatcttttttttttaaaaaaataataattaacaaaatggtcaaatataataaattagctantaaaaattataaaaatacatttaatatatattaattttttaaaaaattatataataattaaattaagttatataaattttttagtattccatattaatatattataagaaaaatgaataaatatattaaattattaaatatatacaacaatatttgatattaaattaatatactgtagtaaataaattatataccacaaagaaattataataatactaaacttattatattaatactcaatatatatcatgctaacaaaattatatatagtattattaaaatatagagaaaaacaggaaactacaaaaaatgaaaaaaaaaattacaaaaatactatgggtcggtccattaaatatttatacagcccacaccaaaatatttacaaaaataccacatgctctaaaccttaagctgcacagaacgaatgatgaagatgaacatacctccatcgctcaaatcagcaatataaccagaatgaaaccaaaacgagggtaatggaacctttaatttcgacaaaaatcaactggaaaagaagatctgcaatgatctaaacaaaaaattaggaaaaaaaacagaaaaactaggaagaaactgaaataacacatttgttttcgattt

SEQ ID NO: 30943 - DNA, 4353 bp, Cannabis sativa
tccaaatgaaagccatagcttggagctgtcgcggtctcgggaatgcagcggcagttcaacaactgaaggatttaatccggaagtcgaatcccaaagtattagttctctcggaagtaaggttatcaaaagataagttctctggtttgatgaaaaaaattcattatcatggtatctgctatgttcctccagtaggatctgctggggggcttgctttgtgttggaagataggtgtagattgtaaaattcaaagggcagacaagtttcaaattcaggcttgtatctcttcggaccctcctgataagccttggattctaatgggagtgtatggaccaccgatatatgcggaaaaagaaggcttttggaaagagattagtgagtttgtctgtaactgcactctgcctgttctgataatagaggatctaaatggcacactattagacagtgattgcttaaattactcaagggcgagtaatatcagccgatactcttttgactttcgaagagctatgcaacgatcgggtctaattgatctaggctttaatggggtaaaattcacttggttcaggaagggatcaagctcttcatcaactcccagtctcaagagagccagactggacagggcgcttgcgttggtagattggagattggcttggcccaatgcaattgttagtcatctcacggttgcatcatcagatcacaacccaattattcttgatacttgtgggggacgacattgttcgaagcctcaattcaaatatgaactaatgtgggaaagggacccccgagttttctgggttgtgaaaacggcgtggatgactcaaagccatagggacccaatggttaatatgtaccgtaaaatcaaagccactaaagagcatttgcggagatggaataaaactcatttccgtaaactggccacacaaatctctgaagctcaaacaaggctcaaagacatcgaaggcaatcagtcaatggatcaggtttctcatgataaggctagattggctctgaatgaggcattggcgagagaagagatttttcggcgacagaaatcaagagttgcgtggctgaaggaaggtgaccgtgccacgaaattctttatggctagtactgttactagaagaaggcgcaattatatacaagctattaaggatgaggaagggaaccactatgaagaaatgaaggataccactaaggcttttatcgacaaattcagcaacattttttctaaagtgaactaccggggaagtatagcggacttcaattggcatcatgatatgttaagcttgccccagtctgaggaactttatctcatcccttccatagacgaggtcctttgtgcccttatgtctatgggtggggacaaggcccctgggccagatggaattcctgctgcattctttagatcacattgggataccattagagatgacttaatgggtatgattcaccatttcttcactacggaaaagctaccagcgtttattaatgatacgaacatagttctcatccccaaaaaagagaatccaatgttagtgaatgactaccgcccgatatctctatgcaacgttgtgtataagtatatctccaagatcttggcgctcagactttgccccatcctaccaaacttaatttctcctactcagaccgcgttcatcaaagggagatccattgctgaaaatacggcaatggctcaggaaatagttcactctatggcaaagaaaagagggtctagaggatttatgctggttaaactcgatatggagaaggcatatgataaaatggattggaacttcgtatgtgaggcgctgcttttccatggattcaaagaacctcttattgggtggattaaaagctgcatgtgtatcaagaaattgaatctaatgataaatggagtcaaacaaggttcagtcaccccgtcgtgtggccttagacaaggggaccccctgtcccatgctctcttcattctggcggcagatcttttatcgcgtttaatcatggatttcaatgctacgggcttgatcaagggaataaaagtatcaggatcggcccctcatgttacgcatcttatgtttgcagacgacgttatgctttttggccaagcctcggtcaaagaggcggatgccttcctccaatgcctggaaatttattgtgattggtctggacaagctgtgaatttccaaaagtctacaatctctttctcaaaaggagtccccatcaatcgggcaaacctcattgctagtaaactaggcatgaaaaggatgcctgcggacactgtgtatttgggtttgccgcttctacggtccatgaaaagaacccgtgatttcagatttctggtcaagaaggttcaaactcgagttgaaggttggaaagcgaaattactctcgaaggcgggaagagcttgcttggttcagtcgattggtaattcactctcactgtatgcggctgcaactgaggtgatcccctcctccatagctacttctattgatcgatgcttgcgaagcttttggtggggagatcatgattccaagagaactcttcacactattgattggagttctctctgcaagtccaaattccatgggggcttggggtttaggcaaacaaaagatatcaataaggccttcttgttaaagtggggatggaaattgattatggatccatcgagtctctggtgtagtactatgaaggagaagtacttaaaagaaagtagcttttgggatgttcaactcaagtcatcagactctagactttggaaggcaattgtgaaggctagacctctactcagtgagggaatgtgtcgtcggataggggatgggagatccacctccatttggtttgattcctgggttccgttaggaaaccatcagcctagtccgaagttgaatgctactcagggagcgaatctggtaagctacttcattaatgatgatcagacatggaatgtagccaggatccgcgcttggtttgactcaacggatgcaactaacatcctcaatattgggctgccggcatcgaagcaagaagactcgtggcaatggctcggagagaaaagaggtacattctctattaaatcggcctattatctcatcataaagcatcggtgtgctgaggttccacattggcattggaaatttatttggaattatcccatccatgcgcggttgaaactgctatggtggcaaatcatgaacaactctctcccaacccatgagaggattggtatggtgttcaacataccttgcactttgtgtcccctctgtgatgaggaaatggaatcgtctttccacgtgctatggcaatgcaatttcgctaaagctgtctggtttggaagcttatggggaataaggacaaacttgagccaatgtggaaattggagtgaatggctggattgggtcaaggacagtagtaataggcctgacactctaagcttcgaagacttcattactggggctttgtgcatttttgagagtatatggaaggtgcggaatgatgtctgtcatggcgcgcaccaaattcaaatctctgaggcaatccgggcaatttgtgtgcgatacaaagatcatcactcttgcatccggccccttagggtcaaatctgaaattgacctcactccacttctgggatggatgacgtgctgtactgatgtgtccatcgatttaaacctctcggtaggggctgctgtcttccgggatgatagaaatcgaatctgtggtgtttttgctgcttgttttacggctactgagccgactctggctgaggctcataccctggcaatggcaggccactatgttgtgcaaaaccagtttatgagggttggttttctctgtgataatgcagcagtggtatccaatttcttggaaaccaatactcaaaatttgcatctcaacctggcgggagctgcgtccaagtttagatcttctacgctccatctgcagagttttcagctgtcaaagatcggcagagagcagaatttcatggctcataatgctgcaaaatgggcgaggattaacaatgtggtgggagaaattgacatttcttcaatgcctcctgaagtgttcgtggatcagaaggaatggttcccggatccaggataattctccttttatctttcgggccctgaagtgttcttcgggaactgccattttatgtttttgctttactatttgctctgtagtttccttttttgactgtgtttttttctgttaaagtttgtctcgttagtttccttttttctgttgtattatgtcatagattttggctatgttgttcctgttgtttttttcaaggaattggtgctttgcacctcactttcaccaaaaaaaaaaaaattttaaaaaccatattttatta

SEQ ID NO: 30944 - DNA, 2578 bp, Cannabis sativa
  modified_base (44)..(78): a, c, t, g, unknown or other
tcatgtgaaccatgcaacagaaaatgttatttctgatctttatnnnnnnnnnnnnnnnnnnnnnnnnnnnnnnnnnnnatttagagcacaaaacccaacattcttcacatcccaacctttgtgacaaacaagtgaagtgcttaatgactatggatggagaagattgggatgtagaaatcgtttctgacttgttcaatattagagacaaggatttgatcctttcgatccctttttcttcgtcaaattcggtggacacttggtattagagtagggagacttcaggtaactattgtgtaaaatcagcataccacttgcttcaacatttgaagaatccccatgtttccacttctatttcttgtttttggacagatttttggagtttgaaggtgcccccaaaagtaaaggaaatgttatggagatctatctttgtctaattaattgtcttccttcctacctactcgggtgcaactcattcaaaggcatgttcaaattgcctcttcttgtcccaggtgtgatcgtatgtcgaagactacttctcactgtattgtgggctgttcgtttgcggctgcctgctggaagtttgctgctctttacaatggcagcatcggtgaaagtacttttagggactggtttcatcactagcttcaaaagatggagcagcaatgagaaacaactgagcgctatgctctgctgggcaatttggcaagacagaaataagcaggtttggaacggtaaatctggttctgtcaagaatgttgtggcgttagcaagaaacgatcttgaacaatgggtatgtgctcaagaaaaaacttcttcacccttatcttccttgattgaaattggagaaggtgatgagcattagtgtgcccctcatgttgattatttcaagattaatgtggacgctgctacgtttgaggataagaacaaatttgggttcggttgggtgtttcgggacactagaggttgtgtcatccatgcatggaccggttcttggcaagggaaggtcgaccctggttatgttgaggcgttaggagtgaaggaagttctaagttggataaaaaattcaaatgtctccaatgtcactgtggagacggattgttaccatccaagctcttcgtagttcaataacaatggcctctccgttcggtagatgcattgaggagtgcaaatctcttctttctaacgtgaataatgttaattttcgttttgttaaacaatctgccaatcgtgttgctcatgcttttgctcgagtctcatggttatatgttgatcgtagttattcggattcctctattccgagtaacatgtttgatgtaattgtgcaagaaatactttaataaagtttcatcttttattcaaaaaaaaaaaaatctggaggtacaatttaatatatataaataattattgtatgagtaaaattaaaaaaagaaatatacagaaatttttgaataaaaaaggagaaagatttaattaatagtattatactattaaattacagtaattactatagatcaataaagtacacatacataattattatttattattaatattataatattctttaatttttctaatatcctcatcttaaggttttcacacataggataatatttcttatctcgaattccatagaagctagtagtggaatattttagacaatgatctgaaaaaaagggtaagtattaatcattatttgtctcatttttttaaacactttcctataatatactaaaatattactaggttctatagggccttgagaaagtcaaagatggactctctcactttcttcatcttaagtaaaccacccatgtgcataggtttcttaaatcaaaagctttgtcgttgtgaatcttaatgaatttggatcttattttaatgttctcctatgtttaattattagattaatattttctatcgtcttgtttatgcctgtatctagggttttggtaaatagaatagaataatttggggagtgggaatatttagacttgtgcagttgtgacagtatctttgaccaagagctaagtttcttcctctgagctcttttgtttaaagttgttagtttggctcttgtatttgtgcttgaacaatacgtggctataatacaaaggagagtactaaagattaccttcctccatccatatagttctcatgtttattaataagcaacaaaattaaatcattaatttatattcatttacttagcaaagagaacacttttttaaatatgagataaaagaaaaaaaaatacttcctccactaaatttttaaagaatgtttttaaggtgaataaattttatttatttttattttatcttttaatattaaatatatagggaccggatttcgttacggacacggatttcaatccgtgatgtactgtaaccgtttgatgggtagttaatttgatccaacggttagggtacatgtaggggttcatgtagggataattaggtatgaaaaaattgctaccggttacttttttttgaaatttaaatttattaaaaatggaaaagtgaaaagtgacatccatccatcaatcaagtctaatcaaccgtcgtactcctccact

SEQ ID NO: 30945 - DNA, 1756 bp, Cannabis sativa
  modified_base (876)..(898): a, c, t, g, unknown or other
attttaattataattggtttaagttattttgtgttatttatttttaattattatgttacagaacctattatatttcaattataaccagtttaagttattagtatatattcatagaactggttctatttttagttatatatgaaatatttatttctgatgacttttccagtgacagtgacttttttggcaacgatgactattctactaactttttcgacgattttccagcgccgttgacttttttggcaaatcttattattgttttataaatatgagatttctacccttttttttaacaaatatatggcataaaaagcttatataaatgtaaaataataataataaaaaaaaaatccttaaccccatgatattatttatttatgctaaaaaagagtaaactatacactcaattcccatatacatgaaaatcccctttaaatttatgtttcactaatagaatattttcttgtgttacccgacattatcttttatgggttactttaagtttgagattttattttttttctcctaaaaatatctttttaatttacttttaaaaattacatttgctctttttttttttttttttttaaatgtgccacaaaattatttttcttacaaaaatattttagagaaaaatctatcacattaattttattaaaaatttaaataataattttacatatataaatacacatttttgagcacttaacacgacttttaactaccatattactaatccctaaaaattcaagtgaataaaaaatattaccaatataaaatatcaaattaaattataataaaaaatatatatacttaggtggcgtttggtattactttttttaaaaaaatttaatcacaaaaataaaagtaaannnnnnnnnnnnnnnnnnnnnnntttgaaaaacaaaaatgtgttctatatccatttttgtttttcaattttttttaaaaaaaacaaaagcgtgttctgtaaatttcattttcattttcatttgctgattttatttaagtgaggtccgagattgggatcgaaggcgggtacaagtctggggcatggtccaagttcagtttctaaggtctaagttgaggttgaaatctaaaatattaattaaaaaactgtttaaaaaaactttcaaagtgatttttttttatttttaattaaaaaaataaaaagtaaaagcagatttatagaacatggtcttagaaaatatttttacttttctaattttaaaaacaaaaaactaattaaaatgtattatcaaacgcacccttaatttttcttaggtacatatatttttgagttgaacttttccatatttgctccccattcccaaactttttcagatttgctccctcattgtttaacgcccaaaatgtgacttccactaccggaagttgtagtataaatcgggtggtcgattccacagggaggtaattatagacaaaagtgtatgtagaaaaataaacacaaaaggttaataaaaagtaacaatagtaacaaatgagtttgataattttttgtgttttggtaataaatattaaaagaaagcaaataaaagtgtaatcaatagtaaaagagagaaagacttcaagaatcctccatatgcttgtttagctattttgtatctttgattcacaaagttggcacaaataatataaagttcattatattttgagtatacaagttcttgaaaataaaaaaaaaaaaaaatttaatcttatgtaaaacctagaaatgacattatacatcaag

SEQ ID NO: 30946 - DNA, 3201 bp, Cannabis sativa
taaggtagttagggtgttacagacgtcatcaacaaagcaaaggtggttgagctttaattctttgcatctttcatggaagccaaaatctgctttattccccactttcttcatgatcctactcagatattccatgccaagaacaaagagaaggggagacataggatctcctttcctcactcctcttttagcaccaaaaaaaccatgtaggacaccattgaagtacaatgagaatctagctgtaaagacacattgcatgatcaaagagatgaccttaggaggaaactgaatttcctctaagaagtcccagtctaaggtatcataagctttttgaagatcaagtttaatcatgcaattcggctttacagatttccttccatagtgcctaataaggtcctgacagatcataatgttgtgagcgataaatctcccttttacaaaacccccttgattttgagcaatcagatccggtagtataatcttcaatctgttacagagaagtttggtaatgactttataaagaacattacaacaagcaatgggcctgaagtcacttacagtgttcgggcatttagtctttgggattaatgtaagcaccgttgagttcagctcttttagtaaatgacccgtttggagaatttctttaacagctaggcacatatcctcttccatcatttcccattttcctgtaaaaaagagctgctgtatccatcaagacccgaggctttattctccggaatattgaaaacaatttgcttgatttcctcctttgtgcaatctgaattgagaatgtcttcatgtagtttagtgatcactgccccttgctccatcacttttttattaattggcagtcttccctgcatctttgttccaagcagcccttgataatacttcaagaaagcttcagtaatggctgttgggttctcaacgcgatttccatctctatcttctattgatagtatcttgttttgtcttcttctttcttttaggcaactatggaataatgctgagttttgatctccttcttttatccaagagattttggctttctgctgcataaaagaaatgtatgctttatgaactacagcataatgttcccttgcttctttttcctcttgctggagtgtgctgtttagagggtctgcttgtagtttttcttgcctggagttgagttcttctcgagctttaatatcatcggcttgtatttctgaaaagcctcttttgtttatttctttgaacactcctttcagcatttttagtttggagacaatttgaaacatcttggagcctttaacttcttgttgccacactttctttacttcttgtttgtattccggatgcattgcccacattttgaagtatttaaaaggcttcttcccactttgaatttcagggtacactttgataattgttggtgtacgatcaaagagaccttcattcaagaataaggcctcggcttgttgaaataaatccacccacttttcatttgcaagaactctatccagctttgcatagatcttatcatgaccttgttgtttgttgctccatgtgtataagtttccactatactgaatatcttctagatgacatgtatgaacacaatctagaaactcattgcaaacatgactccttactctgtctcctattctttcatccatttgtaaagttgcattaaagtcaccaaacacaacccatggttcttttgtgtttagttcttttagctcaagccacaaagctttccttcccaactcatcattgaagccgtagacaaatgttaattgaaattgtaagttatttccaactgtacaaattcctaaatgtattacttgacttgaacatttcaagatacttacttggaattgaagaggattccaagcaacaattattcttcctgctttgtgccatgcaatatttattgtgaagcaccacccttgaaacatttgttggtataaggcccccaatttggaagctttaacccttgtctcgaggagaccaactaaccaaacattatgatgagcaataaattgctttacttctctttgtttttgttgagagttgatccctcggacattccaacttaaaatcctatccattaggagtaggaggtcctcccccctcccctcctatgatattcagcatctctgctacattagttgtctcttctccactttgttcttgagtcatcagaacctgatactaattagtgactatggtggtacttgcttgagttttctctttagttttgacccccctcacaaccggttgaaagtcttcctctgcatcaacagtttgtttcgcctggtcattcagctttctattgtctttttttacaatccactcgttgtttgccttctttccttctacaatcggatgtttcatgccccatacctttacaatgcttacaaacaattggttttccattcataatcaatggatactgaaacagtagacccgaactcatcctcaaattctataaggtttggaaattcctgatggattgaaacctctaatagaactctaggaaaattcagtttgtctctttcctttgtaacatcatcaaccattaatggatttccaacttgccggattatcttgtataacaatttctgtccccaatacatcaattccagatctgtgaggtgaacccatacaggaaccgaacgtatatcttcctttttgaagtttatgttagggtcccaaggcttcataatcacaggccttttattgaaaaaggtatatcccccattcagcacttcattcctttcctcaatactatgaaatctaattaagaaaattccataggataacatacctactttgtcaatcttatccttccatatgcgtcgagcaaatccatcaagcacagccaatggggggttggctccgagaacatagcatactaaagatgatttccaaaatgaaacctcatcttcaatatcctcatgtgtgattttgaccttggatttgccctttgatccatcgaaagcaggtcctaagttcttaatgatgcctcctgttcgaagaacaggtacgtgagtcgaattcccagctgcaacttccttcgaacacctttggttcgcctcattgaaagatgaaaaatcatcacgaatatcatcttgccacagaatttcagacagtgaggatttgggagagagtggtgctttgaacatatcttgtaattgaggttcaattacagggctcgaa

SEQ ID NO: 30947 - DNA, 2064 bp, Cannabis sativa
catacaagattaaagcataaattttgagggatgggacctaaactctcttagtgttttactcattgatggtaacctaacttaacactagtgaaaatttagtcttaagttcaataagtgataacaagtcaatagaatgaatatgatacttaaattgtttcatctatggatgagtacatgtggtaaaaattagaaggttaaaactgaaaggttttttaatggagcttaagcttaagaaagtgtctaaagagttgtgagacactaaaactccacctatatgaattaaggacggtgccgcctctcatgaaaattgagagttattctctagaaaatccataaattggagtattgttagttaaatctaattattaatatttaaaattaattataaataaacaattattaattatgttataattttcaagaattaatttaaatttaattaaatcaacggttataaatcattttacctaaaatacaataactattgtattagctccctaattttatattaaaactcttatttgtaataaaaagaagataaattgttaacaatgttagtccaattctcaaccaatattttcctttcttataatttgcaaatgcttttcatatagttgggaaaagttgccaagaaaaaggcattgagcacaccagggaatgagggaaagaagaagccaattttgatgatttatttcttctctctccaaagtaatttcggtaagaaagaagtttgggaatgatttcctatttttattttttttttatatatttgaaactaattattttcttaatcatataattcaaatgaagattttttttttagtattgtgattgtcttaatgaccttcataaaactcccaattttcatggttttggttatggatgaggaggtaggaaaacgcattggtcgtgtcatatagtcaaactttggattggagcaaaaaagctctctctaagactaagtaatcatgtacacgtactacgctacatggcaacatatttgttcccatcctcaatcatgggaacattcagcacagctcaactataaatatataaatatatatatgtaatatatatatatatattgatactatctaaagaaccagtttagagttgtttgttaaataatctaggttggaatttatgctatttatactacatggtaaaattctggttttgctggacatcatcaccctgaattctcccttttctacaccaccactactcatttttttcatctcttgttcttttcaccttgctggctgggaagtgaagtctggctaatagaggccgtggtgctcgtgttgttcggtcaaatcctcgcacacaaacatatcctgcagtcgaggttagtagcgtttagagtaaaccaaaatgtatgccatgaaccatgaatcatgattctttttttcttaagcagaaaacagaacaacaatgacatgaagaaataataggtctagctacaagagactgttgactttgacttaggcaaaaagtggggaagtatgatgtatgtgcttctataattttgattaagctaactgagatgtggtatttaagtgtgatttataaacaattgtcatcaggttctatatttttcaatatgttagtgagaataaacttttgaatatgtcaaacagtatgacactaactggtgtcttttattttagatatttttccaacgaattttctaagaaaaactaaactaaatttagtgaattattcacacttattagaagaaatttaatttttatttaaggaaaaaaaacacttctctgggcttaaaaaatacattgaaaagctaacaggcagtattttttccaatcgccgtgggaaaaaatgtttgagaatgtttatatgcatacgagtaataaagatagccaatggttctatgttttgtttgttcatagatgctgaaaagtaatatgtaatatcaattaaaacgtctaggatgtcatgcaattaggaaaagagattaaaaggtttacctctccaaaagcactgttgaatgccttgagttgtcaaccctggtggtataaatatttatgttagcaccattagttt

SEQ ID NO: 30948 - DNA, 1796 bp, Cannabis sativa
cgaggatatgggtaacagtgctcatccactgttctgctttaatgatgtcagtacctcccgaaaaatgtcagaggttgtagcttgacaaaacgcttaaaaaccgagtctcgatgtggcaatacaaacccagggttacccaccactagcacaggagctggtggtaacacttgttcaacgggagccgcctgggtcggttgcctaaaccggcgcaactcatctttctgacgaagtataatgcttcatattttgaggaacatctgctgccaatcagtaggtggattaacattgttaaccttcgcattatccccaggattctacgaaggcacaggcggtgtcgatggattgatttggtcattaccaggctctacaagctcacactgtgatctagttgattgattaaggtccattttctcttaaatagccctaaaatcaacaacccctgtgagtcagacaccaaatccacacttacacacttattaccttaaccctaactcatactatttttcttttaaaataaacatttattaatatcattaataatcatgcttttcttataacatgttatcttctagatgctcatatgctgcttaaaacagagagcagtaaacatttaatcacaaaagtagttaagcatttactctcaatacttactgcactacgagtctagcttgtctttgacaatgattgtacatgttcagtcgctctacaagaagtttaaaaactttagcgctctgataccaaaatgtaatgcgctaataattgaaacgtcacgtacatcgactaaacatatactaatcccgttaaaccagaatctactagagccaagagcaaaaattaaacttttaaaaaataaaaattaaaaaataataatttgtaattaataaactttacaaacatccaaaagtacacattttaattcaggatcccataaattttttttcaaaatactacaagttattagtacacaccgacctaagcggtaaaagtggagattatacaaatatcccctggtaaaccgaaccctcgtgatctagcttgacttggacatgtacaatgtaccataaaaagccctcgacctcatggttgatcaataactgctttaccctttcctgcacaatatagcacccatgagctaagatccaccaagacagtatcaacaataatattaatactaattaatatcacttaattattgatgccactgcatctattatttatttgacataaacctacattttacgctcacacgtctatttataataaggtcgtagattggtttatcttggttctgattaccgagtctaatctgattatgctttaactgcataattctttatattaacatatacaatacattattgcattcatattcacttaaactttagaataataatcctagatcacataactgctaattttagggtaataatcctaatctcattttctcgcatagcatgtataaatataacatacatgagtgccactgtgctatactcttttttctaggttactatcttacatggtagtctaaatatgtggagattctaaacccccgggtgttcttgaataagcgtcggtaatcttagtcacacattcctaaattcattttcacacataaacataatttgaactctaattataaattaacatataaagcccaaaatgagctttccaacaataccaagaacgtccaaaacagagttctgagtcaaaagttatggcaaaaatgagaaaaacacaaaaattgagaaaacaagggtcctcactgtggtgaccctaggccctcgccgcgacgg

SEQ ID NO: 30949 - DNA, 4230 bp, Cannabis sativa
gcgatctagttagacattggaaatgtcaggattagacgggattatagtttttgaccattttcccctaaagttattttaccctttagttttgtgtatgggggcattttagtcattttggaccttgtaattaggtggcatcttctagtgttagcagctagctaatatttggattaattaagttaagtttattatgaatttacttagaagattaagtttgaaaaatgacaaaataagacattcaatctctttcctttctcttcccacttttggccctagaagaaccatcaagaaccaggaattttcttaaccaattttagtagcttccaactgtaattcaaggggtattgggagctaagatccaaggtaaaaacctagaactcttttcctttgttttagtggtggaatgtaggttcaacatgcaaaattttattgtagttgttgtagggcttggatgaactttagtataggtttctgatgttattttaaggttgtttatgcatgttgattgtgaatttgaggcttggttgtggtgttgaccaagtttgagttgaagaactcaaacttggttcaaccatgatgttttttgtattactgtgttttttggagttgtattgcttggatatggttcactatagcatgtttaggtgttctggagcttattggatgatttggggtggttttaagtcgatttggcggcttgttatttttctatagtgaaaaacggcaggccatttctgaagaaatagcttaccatttttcctagtgcaagacctagaaaaacagcctgccgtttttcagtcaggttccccatttcgatgaatttctcgtgttttcttgactcttagtgctttgtcttgtagatattgatagggaaacctttagtttccaattttaagtccctgaaaaattagtttagcgtatattgtgacttaggggcttataaactgtcaagcagtagctctactcaggttgaccggcacacctgaatttggaatcgagctaagattcgtataataatatgaatatgtgtttacatgtcaagaatacatgttttttaagcctgttagattacatcgatagcaatatcaatatacgtagagttgtattggataccgatagatgtatgtttggctagggaaagttaaagtagacatgaggtgacggtcttctccagcaatgtacatattgaccctactggcctgtgtgtcaagtttttaggagtttttttgggttgtatctactctgtattttcattttgtattttgacttgttattgaatattgtctttttgtaaaacttttataacatggatcctcggatgaaggttttagtgttgctataatatccgtttctagggttttactttggtgaagtttttaatattttcataaattttaataattaattaatctattagtactaaactattttataaaaattacacatgtggcgtccctgtagaatagggtgttacatcatgtcttaattaaccttagtccatgagtcattctattagcctcaaagggtaatatggatgaatttacatgatttcccgggaagccctaagtctttttccttaatttcttttctgagaagaagaagaagatcacggatgattttaagtagtgttttagcttgccccatttgcatggaaataaaggggtagttataggctaagtgatagatatggatttccccatgacacaccaaggagttctgctcaaattccactataggggtaaaatatatgcaatgtagagctaactatttggccttgtgggtagcgttatgctcgtgcatgctacagttagataatggcgactattttgtaccacttggacacatgtcacacaaaggttgaacctttaaaagcaacagacacatgtcattaaaagcttgctcctttccaggtagtatttcataagatctgtctggcatgaggatggtggtggtgcgtgcactgtcatctttggatgtaggagacaagattggattttatcaggaaaagcataatcgtcacgttgattacctggtgcatgagaaaattcgacatgaacaaacacccgtgaggtttagtatctgccttaggtttctctagtatgcatttggggagccatccaaaatgagcctttctactagatccttccgggtctgggagagacattttcttgtcccgctcttgcaaagaaaatggtgctgcaagtaagctttcacatatttctctaccctgtatgattcttcaacacggggagacctttcttcgactatgtatctttttaaggtctctaattcacggaggataaattgagactttttcaattaaattcaatgtgtcctgtcttgcataaaacacgaataacacttgtatatgtcgggatcggcttcgttgtgtgtatggcatcatgaaacaaatcaatatatattgcatcatgaaacaaatcaatatatatgtggagcacttggtgcataagagcattgttgatttatctcatttagctacatcttatgttttaggccatggcttgctcattattgacttatgtcaaaggaatagggtccctgaagataaatttgatgcacccaggaaaatccaaggccccattacactgatttatatgagtaagtttcctaatcccactcctcatcctttgcctgctgccacccgtcctgaaatgtccaaacgcactaaaagtgatgtgcatgtagaagacaaagtagttgctatagaattgggttctcatcaagaagctggaggtagagggaaggtagcccctatgcctagtgggagtaatggcgtagatccttacatacagtaccttattgtccaaaattaatacatgatttaagctcagcaaggaatgaatgccaattttaaaaattatatggagtttagacatgaggattagcttattcaagtggattagttgaatgaattagttcaacagtttttcccatattctttgtagtacactctgtactagtggccccaccgccacctcctctgcgatactaaagtggcatccgtaagttctcttcctttgtactttcatatcacattggggataatgtgcaactaaagttttggacagggcttttaatgtttttatttcttttgttattttgtgttgtttgtagtgtttgtttttagtaaattgttaagctattaattttgtctattgctggttcattgtcacttgtgaaaatgaatttgttaaaaatatatgcttagtctaactgttttggagtttaattgcgatgtttgtggaaaattaagaatatatttttgcaaatgtaaaatttttggattttattttatatgcttgactagggttagaagtatgttaaattggaattggatagaacttgcactatttggcctttgaggaaaaatccttaaggacacatgctttgaaaaataatttaggcaatttcattagaatattttgtacctttcaagcctacctttgtatgtttatcccttgttttcccgtcttgtactataaactattattttttgtttgtatacatatttttgaaccaagaaataacctagatactatctttctttgtcattaactataacataagtgtgaattattttgggtattttaatttttctatgtggaaaataaaagtaaaacacaagttaagaaaatttaaataatgtgttgaattagttgagttataatatctctaaatatatatataaaaataaaaaaagaaagagatagaaaaaagtgtgtttagagatgttgcatttttaataattagttctctcatcttgttttaaaaagaggggcttgagataattttgaaatggaaaattgggtagcttgaagtgtaaatacttatgctatggtcgagcctaaatgacattctcaactacttttacctaagctcaaagttatagcccaataaaatccttttgataaagcatgtgttattgacattagtagagaaggttgaatgatgcaagtatattaaaaattagtttgtggagctatttggttgagttgagcatataagatggagtccaattattaagatcatttgtgaactatattgtaaatttctctaatttgagaattaaggttaattttaaaatagttacactaaaattctagttaatgatccaattgagatttcatgaattttggcaaagcagtgtagattgtaatggtggcttaacttgttcatgttatgttatttttgtcagtttgatttgatctt

SEQ ID NO: 30950 - DNA, 1514 bp, Cannabis sativa
catttgagtgatgacccatgacataaaatgacgatcgagtttgtgtcttttatttcctttgtctaattttcgagttaatttccaagctctttatctatgttgctggtttggggttaacacaattatattcaaagttcagctacattactatttcatgttactacacatgtgaatcaagtttcttctaagctgctggccaaaagagattgataagctcaagccagtaaattgatgttatccaaatcaaacatttttcactagattaattttcgaacagaatccagagagagagagctaaaccactaaatcttttttaaaacattgtcgaccgaagataaaatttgaccaacctcaattttgaaaagcttctttccgtgtagacaacaatcactagaatcgttagcatattcttataagcaatccaaatattcgggtaactaccatcaacttctcttaaataattcaatacataaattgtttttctttttcttttggcaaattatgttgtatcatttgtaactcttcatataggcaatcattgttaagatttgaaatcttaccatggttcattaaatttgtaaaattatcacaaaaactcttcaaactattttcatcagcaaacttcaacttctccaaattaagcaaaagtccaaaattttcttcaaactttttaaattgttcaaacctaattttagaagaaaatatattattatcaattatatacattattcatataataaattaaccaaagagctaggctcatgtcatgtcatgggcacccaaatgatcagaaataacaacccaaaccagtcaatagtcacatacttacagaacatcacaaatttgagagggaaccaaaccaagtagaggagcatgtaacagtccactttccaaaactatatgaacaggactaaggaaagatgctccatccatgaaccacagatccatttatgaaatttttctctgtcaatatagatttctcaaccttttaacttaaaagcactcccaacatatgtagtggagtcaacacaccaattattagagtcatcgcaaaaaattaaaaatttcccattgctaaaaatttaatttggatagcagctagaagaatatggatcaaaatcaagcctatttggaagaagactgtaaattgagtgtcaaatacttgaaccaagaatctgagtcaccataattcttcataacccaaatttcaactgatctttggtatacatcattaatggaaaaacaaagacacccagaaagcatagttagcttcccgagataacatccttctttaatttgaggagcatttataaattataagtttaaatttctcctacttatatcaaaatctactgcccctaaacagaattggaaataatcatttgtatttccaaagcataccatccaattaatccccactttaaaaacaacagagcaatccacaagattattgaccagaaacaaaacgcaccaaaaggaccagaaacagtcgtccaaagatgcaccagcaacca

SEQ ID NO: 30951 - DNA, 2773 bp, Cannabis sativa
  modified_base (175)..(185): a, c, t, g, unknown or other
  modified_base (330)..(361): a, c, t, g, unknown or other
atcaggtacacatactcaattatcatatactattattgtgttctatgttatatacaaatagatcttgggttaattgttaatttatgtaacacaaataatatggtaatagctaatatatgtataagatagatagtaaatattaaatatgaagaaaatgtaataataataataatannnnnnnnnnnaataataataataataatatatgcttctaaatatggttaaaaatatttgttgatgctcaaataatatggtaataatatatgtataagatagatagtaaataaaaaatatgagaatatgaagaaaatgtaataataataataatannnnnnnnnnnnnnnnnnnnnnnnnnnnnnnnaataataataataatagatatttgatttgatattataaaatgaaaagacatattataaaaataaatattaattatatgattattataaaaattagagaagatataaaataaaaaagttaggctgccaaataacctttgttttttgtttgggcatttctttattaatatatattgattgtgtgtctcttagaataaaaaaatgttaatgttgtgtttgtatagtatacacactatacaagccacatacaactgatctttggaataaacaagtccatcgaaaccttgttgcaaaggacacactagtaaaatgctaaaaccttgcgagttctaaagctcgcaggcaatatgaatttttgaattcttaaaagcttcatgtggtgaactgattactcaaaatttgtataattaaaaagtaattttctatcatagagagaggatgaagattttattgtcaaagtagagtttgatatcatatttgtgaattaggtcaatttccaacccgaccacattgaagaaaaaagaaaattgtaatgctgcattgatatttatatttttaattaattaatctagtattattttgtcggttgaaaaaaatctccatcaatccttcataattataaattcatctctacaatatatgataatatatgatttttctaagttttcatatccgtgaaaattaatgttggtataatgtagcaattttaggcattaattcacaaatcacaactcaaattagcaatcttattagatgtgttgtctggccttaattttctaatgatgatcatgcatatgtagttggcttaagcccatgtgttaattaaagcaactagctagtagaatattttcagggcaatttgctacaattaattgattaaatcatagcataactgtttgtcgatcattaaatttctcaatattacattggattcctcaaatgaatagatttgtgtctcaaatgagacaggctgcagattcagattgacattatatatatatatatgtgcatgtctatatatttataatatttattatttggtagatcccttaaacaatgaataacataaatgatctcactcactatatgatggatctaaatagattattagccaatatataaaaatatcatagatatatcaactagtttttttggatgaatgattagaattagatttgtttgtttctcggtgtatataattcacaagtacaaaattcacattcacaacgacatcttataattattttgtacgtagaaaaaaaaacagcagggcatggaacaaaactaccattactaataaaagtagactagctagattcgaaaaaaaaaaaaaaaaagattaataattgtatagtacagaactactactataatgtattttgaaaagaaagatattattatgtttttatgtggtataggcggcttcaaaaattggctaactaattaggtgagtggctttgatgatattattatttgatataatgtgcctgaattggttatattcttaaacttaaaccacctgagcccgacactcgacagggttgggaagtgggtcaaagattcaaaggctcagactcaggctaaggcctcatcctggcccttcttggccaccacgtttagattaaaatctcctcttaattaatgcatatatttactaaccccagcactgctctatagtgaggcccttttggattgtgtgaaccctacaaattgaaaagaaaaaaaaaatcagtataatatcaagatgcgtggctcaaagtttttgagtactacagtttttattccccctaataaatagagaaaagataattagtatataaaaattactatttactggaaccaaatgaaccgtatattagtataatattggaatcattttgtcgtgtatatttttgggtactactgtctctggtgattaattaaggtatggtattaataaattcaaaagtcagcctctagtgctttatagggtcaccaccagtactgatccaaattccaataaaatgtatgcacccttcttaatttttcttatatcaaataaaggtaagggtgcttctacggggttagctagaaagacgacaccttttatttgttttagcatttattttatattttttttatattggtattcgttataattatttatgatattttataattttaaaaaatttaaaacaatttacaatataaaaaataatgttcaaataatttatttctacaaatattaagataaaagagtcacgagtgtaatatactgtttgaattctattattttctacgtgttaaattttttaaatttcttaaaatttaacagaatgtcttaagtaactacagtgtatacgactatataggcccgaccctagatataagcaggtcgtgcctagagctcacctagcttaggaacccaaaaaaaa

SEQ ID NO: 30952 - DNA, 3765 bp, Cannabis sativa
  modified_base (746)..(750): a, c, t, g, unknown or other
ttttctgggatattacaactatcccctcattataaaaatttcgtcctcgaaatttattcaaataactcgggatacaacttctacaactgcgactttaactcttaaatcgcctttccaatcttccagttcattcacagtgctataactagtgatatagtctgtttgaaatttaatattctcgtaactttgtatatggatcgcttctacctcgtaaatctgaaactttgaagtataggttgtaaactccaaataaaacagggagtatggctagctgataagctacccgacctaccctttccaaaaactcaaatggacagattaacctgggatttaactcctctttctaatcaatttctgatttttcctttcatttgaaccgcctgaagaaagataaaattcccaacttggaatttaatatatctacgcttggatcagcgtagctcttccatccattatataagcaatatacaaacttgaatctttaaactgcatcagtatcactttaacagtactctaataactgttattacataataactcatgtagaaccttccattcagtatccttatcggactgatacaccaatatggtttatatcataaaatttcattcaaacaaaatcaaaagtcatttgtcaatccggttccaaacctttcctcgtacttctaaagttcggagtcactctaccgggccattttatttcttcccaataaattgaactacaatgtaatattaacaagttctcnnnnnacgatctcaatccttgttctggttacatttccagtaacctttggtaagatcttttcattttacaaacttgtcctagaactctttggtttaaagtattcactactaatttacttgccaaagtggtagaaagtcacaccattaaaatttcaatcaactctaactgtcaccactaccttctatctaaattcttccaaaagaaatagtatttgaggcttttccgttccgtatagacttcacattttcaccatacaaataatgtgcccaactttcagtgcaaaacaatcactgccaattcaatatcatcactgaaataccattactcacacttcttcaatcgtttaatagcacatgcaataactctcctagactaaatcaaaatataatcgaatcttttttttttaaaagtgtcagcctaaatcacaaatttctcctcattgaccgataatgttaacattggtacaatagttaacctttgcttcaattctttcgtcttaactccactaagagtgtaaacatccctcaacatatatgttttgtagcattctatcaattccagaaaacctctaatctcagttgtagacttaagttaaagtcaactctaaactgctttattcattatcgaatttatcaagatactgtctatatccatttcatgctccaagaaacctacttaaagtcggtaaatttgcattcctgcaattagcataaagtttaagctcctaaaatattacaataccatctaaaatacctctcaaattccttctttgaattggaagaaattaaaatatcaataatgataacattcgcaaagtcatcgagtatgaaaaactgctttgaaaatacccttctctcgaatcttcaactggtaataaccagatcgaacaccgatctcagagaagacaatccttccctaaaattaatcatcatgacttctatccttgacaacagtatacttactcttcaccatgaatttattcaatttccaacgatcaatacatacttgtaaaatttcattcttcttcttcacaaataaaattggcgtactctaggatgggatacatgggatacccagtccaacaatttcaagtccaacagccaccatcccctgtaactgaaccttcaaccatctcaaataccattcgatacggagtttacgatataaactctaactaagcaccagatccatttcaaagtcaatctcccattttaatataaccccaataactcccctagaagacattcaaaaattctcagaccactgaaacgtattctggtcccataggtattctttataatatatacctcactagttaagaaactgatacatccatctcacagtagatctcttgccttaaacgctgaaattaataaaattcaggactcttgaaccttgcccacgaacacgaatgggtcctcaccttctggtataagagttaccatctttctttcacaatcgataattgcattaaactttataaatcagtccattcctaatgtatcctcagaatcctctaattttaactcaactaatataaccaagcattccctttcccctacaacccaagaaaggattttaactacctactagagaataactagttctccagtaaacagtaaagtatcagaaccacttgactactcatcattaactttatataaactttcgaatcacctttctcgaaatataagaatacgttgcactggaattaattaaagctatcaacaaagtatggtcaatagaagttcaacttactacgatagaaagaccagcaccaatctcggtctaggttaaacaaacacctaaacaagaacttaaatgtcatcacccctctatttcggtctccacaacggtaggcagcttcttctaaatggcctactacccctcactagaagcatgctctcatgtagcattcactttactagtgtctcttgcatctcgaccttctagatgggtttgtaaacctttgtttccaccacataggaaattttggttaccttagattttctttccaagacccataactagtgggttgttaatccttttccttgggttcattagggtctgtacccttattaaatccaacattggatgttcacttccatgcatctttcctcatactatattcctttttgacctagtccttactccctcagcagtaagagttagctcaaccacctgagcataaaactagaccactcctagttgtttaaccactatatccacctttgattgaatttagcttcctagcagttttagcagctgcttcattaaaaaaaaaattaccaattggtcccgcttaatatcatcctccatcaccacagtgctcgggatcaactatgcaagttctactaccttgccactcggataatttcttactttatagcatgcatttactccaagtcttgtgatagttgacgattcatactcacactaccaactccgagcttggtaagctcgcaattattcttactagatcacctcatatacaccttctagtatacttgtgacctctccttttctaaccaaaataaatgctaataagcattaccatacatgcatcaacatgcttaacaatttttctttttatcaaattatcatgcttttctaatagcttactagcttacacatttcagataagcaaacaatttaaataatcaatgaatgatctactaatcaactaacaaatagcacttactaagccatgagtcaaacgagtctttgtagtcaatgtacatatcaagctagtcttcaagatccttaaaccttggtcgctctgataccatgtgtaacgccctgactctcagggacgccacttgtctgcttttgcaaacttattattactaatcatttagtttataaaaagtgtggtttaattaaaacttttgattaaatttaaagtaaaaattctttatgaaacaccactaaaatatagggatcccctatttataaaatttctttataacaagttgcaaaaccactattacaaaaataaagttacactttcacacataaaa

SEQ ID NO: 30953 - DNA, 1589 bp, Cannabis sativa
atcaaacaattaaaaataatttttaaaaaaaaaaaaacggggcaaaaccctatcgtgacaagtgggaagcatcagcccattaaataataaagtttgaaaggcagtatactgccaaaaaaaaaaacagtataaaagttaagttgagcgtgtaacagtataaatgaaagaaattggaaaaaaacagtaatgggtgtaaatgtcccttaataaatcaatgagaaattaaaacatttacattgtataattttttaatcttcaacttcatcttttagtccaacaataaagtataagtagataataattttggggtacaaattaataacaaatagctttaatattttttttttatttatttaagcgtttatatattacaaccatgcataacttgggactcgaacccaggagctccaacacacacgcacactcctatggtcacttgagctagcctcaagtggttcaaatagctttaatattaataaatgaaaaacaaatcttaatatttttttttttggcatttagaatgaaaagaaaaattataaagaaaaacactcaatttaataaaattttctacatcaaactttaaaaattaattaattttaaataaaaaaaaattaattaatttatttttttctctaattttttttttacatttttcatatctttttctttcctcacaaaaattcaacttctaaattatagccttaaaaaactttaaatatatgaatatattaattaataataaccacctatatttggggctttaagcaattaccaaactttatttaaaattaggcagctcttatatatatatttatacatatatagcattgactaaatacagttatgaagattaaatgactaaatccctataaatacttgtgaaagcctttatcaataatataagaaaaattgaaagcctttcaagcaacaatcatgggcatcatcaatatcatgattgcctttctttttctttccttttccatacatatagttataccgcaatctacacttaataactttcaaaggttgtatttaccatcaacttcagtaggccctgaagcaattatctttgactcccttggtagaggaccatatactggcatatcagatggcagaattatcaaatataatggatctagtttcacagaagtgtatattacttcaccaaataggtatcatatatgtatatatatatatatatatttctacatttatacattgaaatgaagttaccataaaaatttatgcttaacttttgttttaattaatattgtttgatataaatttatccattttcaaatttgattatatttcaggtctagattagtgtgtgatggaagaaatgccctaggtcttttgggaccaatttgtggaagaccattaggaatcgatttctattacaaagaaaaccttttatatattgcagatgcttataaaggacttcttgtgggagctaatgaaacactcgcagtacaactagccactgaagcagaaggggtgccttttaaatcgcctgacggcttaaatgttgaccaacttactggagaggtttatttcacagatgccagttctgtataccaaataaggta

SEQ ID NO: 30954 - DNA, 1877 bp, Cannabis sativa
atcaaaattttgccattgtcggaaatttgatcttttattttctctgttatcctcttctactctgtatttcttttcaaaaaaaatttaccaaccacattatgaagtttaactttttagagatatcatttatttcattgtacatagtgataattgtagagaattgaaaacagagcaagacaattttgagagaaaactaatatgttttagctcaaagaaagcttaactcgatattatagacaaaatgaattcaaaattacaagtgtaacggttcataacacaataatttacctctaaaacaaagtaattaactaaaccaactaactctagttagtagtactaatagtgctaacattctctcaaaggaaaaggagtttgagtcattttcaatttggacttgaggtttagtaagaatatcggccacctaatcaagagaaggaacatatcgaagagatagtcttttctctaggatgtgatcacttacaaagtataagtcaatctcaatatgctttgattaaacatagaaaacatgattttccgactttgattgtcaacccaaataataggacaataagacaatgtgatctaaagttcactaagcaaggaaataatccacttgagttaagcaactatattggccaaaactcttaactaactttcagtactagaaagccacaacttgttgtttctttactaaccgagagatgagattatcacctaagaagatcacatagcctcttattgatcgtctgtcatcaacacaacttgcccaattcgcattaaagtagctttctaaagtcatcacagcagcaagttataaaattaggtcatctgaaatagttcctttgagatacctcaataatctcttacatgcctcccagtgcacaacagttggagctttaatgaattgacttagtttgttaataacaaaagcaatatctggtcttgcgagagtaaggtattggagttctccaattgtactcttgcatagtgtaggatcaccaaatggtttttcatcttgtaaggacaattttgtagcagcactggtaggatttggacaacttttagcaccctccgtataaagtttaaccaaaatatttgtgagatattttgtctgagacaaacacatgcaagtggaatctctgaaaatttcaaactttagaaagtagtgagcatctcctaagtccttgagagaaaaacttcttcctagttttcagtcatcaaatcttaatatggtatgtcagcttcgaaaatttttatacgatttaaagtaggcaccttgatgttggtttgccaagcttgtcgttactctgaaagagtatggtttcttaccgtcatatgctgattattcactctttacttttactaagggtgcaattcaaataaatattttggtatatgtcaacaatctaattatttttaggaataattctattgctttaacattgtttaaggcttatttgagcacttgtttccatatgaaagatcttgggttctttagtactttccggtctcgaggtggcgcatagttcagagggtatcattctttgttaatgaaagtattctcctggcattatctctgagagtggtttattgggtaccaagcctgtctcttgtccaattgaacaaaatcattagctagtagcactaggggtgagcaaaaaacaaataaaccaaccaaaccgagtacaccgactttccgaacattgaaaaaatcaacaccgaaaaaactgaaaaaattgccttcgattaaaatcgcctttgcatggtcagttttggtgtcaatggtaaaccgactgaacatatatattatacactatacatatataatataattatttttgtacatatttaatatacaattttattaaactagtttt

SEQ ID NO: 30955 - DNA, 1482 bp, Cannabis sativa
aatgttgctgtgtatttaatgaactacacaccatctgttttacttcaatttaaatcttcctttgagttgttgtacaacatgtcaccttcttctgatcatctctgtatctttggttatctagcatatgtttccacattggacaactcaaggcacaaattttttccgagatctcgggcttgtgtgttcattgaatacccgactagtatgaaaacttatactttacttgatcttgaaactcaccaaatatttcactcaagagatgtcattttttatgaacatatttttcctcttaaaaatacatgttttaatgattttttttctcacgctaatgtctcaactagtggtacatcacaagtcccttcccaagcggtggcactggtgcccacaatagtgcttattccaaccactgtccacccttcactgctgcccaaacaagtggtcattctagccatttcaaatacaatagtactgtcaccactagtggttgcttcagcccctccgagtggccccaatgtcacaaaatatctatttatttgtccacctcatctccaagactgtctttatgaattttctacttcacatcacatctcaaattccatctcttatgacaagttttctcctaatttttgtgctgccatttatttaagtgcttatttggtttcaaaaccaaccagttatttctaagcttctaaatttctcgtgtggataaaagctatggatactgaaactattgcacttacagttacaaccaataaaacatggactgttgtctctcttctcggtggccaccatttcattggttgcaaatggatatataaaataaaatataatgcccaaggtaaaattaaaagttataaagtttgcttggtaactaaagggtactcccaacagtttatgataggtcacttaaaaagttttgccccggtagcaaagcttaacactctaaaaattcttcttgcacttgttgccattaacaattggccattatatcaaatggacattaacaatgctttcttccatggagatctcactgagaaaatttacatggcgcttcccccaggctacaaacatcaaggagaactccctcctaatgttgtatgtaaactacataagaacatctatggccttaaacaagcatcccgatagtggtatgctaaactaagttccaccttggtaactgaagggttcaaacaatcctcttcggatcactccttgtttattcgatcttctaacagcattttccttcctattttagtttatgttttgaaattttaattgctagcaataactctaatgatgctgaattgttcaaaagacaacttgcctccaaatttaaactcaaagatcttggtcctttgagtctcttccttggactagaaattggcaggtccaccgatggtatttcagtctctcaaagaccctttatttaataacttttaactgacacatgttatattggtgacaaacctgcttccactctaa

SEQ ID NO: 30956 - DNA, 2321 bp, Cannabis sativa
  modified_base (284)..(286): a, c, t, g, unknown or other
  modified_base (446)..(455): a, c, t, g, unknown or other
  modified_base (2038)..(2042): a, c, t, g, unknown or other
atactttcaaaaagggtagttcattaaactgttaaattgcgatttaagtttggactgcgacattctgaactgctgtagaccataactggcgggaccgttttggatggtctaattaatccagattgtttctcacttaatgattcggttatggttcgtaatagatagcttgcggttaaaccgaatcggactgtttaaaataaataattgatttatatatagggtaaataccattttggaccctgtattttacaaaagttaccaattagaccatctgttttgttaannnacaaaatagaccctatattttccaaaatagtataaataggaccatgagctcaatttttaaaacttttatcttttaatataaccaactttaagataatttttaacacgaacatatacaaaaaatgtaaccagttttgtcataacatctctagatcaaattnnnnnnnnnntttattttgataaaaaaatcagttcagggtcctatctgtataattttagaaaatacagagtcaattttgtcatttaacaaaacagagagtccaattggtaacttttacaaaacacagagtccaaaatagtatttacctttatatatatgactatatgtatgtaataaaaaaatgtaattaattacccaattttaccattaattacccaattagattaaatgagtttagaggattaaagattgaacttttatatgtgtcaaaatttttattacatgaattatagatttttatgtaacgttttatttttatattgttattaatatagatttattacttattatgtcaaatatatactttaaaaaataaaagtaaaatcttggtaaaaattatataattacttaaaaaatgaataattataaactctgttcaaatcgtggtttcgaaccaaatcaaactatttttaaggtttggttttagaaatttattaatctggtttagtttccaatattccaaaaattgttatagtggtttggttaaaaaaaatatgaaatattagacaaaaacaatacgtgaacaccaattttcttttttttttttttttaaaaaaaaaacatattcttaatttgaagacaaagagaaagtggttgtgggtgaaaaagtggttaaccagcatcaaaaggattttaaatatggtttggggactgtctgattcacaagctctgatcaaaagagacgtaccttcaaattgtcattttccaaaattattgttggctttacaaaacttgtcacatatcttgatattggtggttttctaaaatgtttagtattgcctcaaaatgtatcctttttataaaaatagtgtcgttttttgtttaatttttattatttcaggcaaaaaatatcgtttttctccgttattattacaatgtgtgtcgattttgtcattgtcatttctaaaccatggtcatacgcttattgttgtttaacaccgtaatggaatgtgatgtttaagggagctcataaaatcaaaaatataaatggatggagtagtagattaggggctcgtttgatatgttgactgtattgtattatgttggattgcgttgtattgtattgtattagtattatttaatacaacacaatgtttggtattgacttgtattaattaatcatgtaaagttataatattattttcaatacactcgaccctaacaccaacaacgggcccgagtcccgggttcgggtcggggtcccgagtcggggtcggggtccgagttcgggtctaagttggggttcaggtttaggttggggtcctgggtcagggatcgagttcgggtctgggtccaggccccgggtccgggtctgggtttgggtcctgggtcccggtgctgggtccgggtatgggtcccaagtcccgggtcgaggtccagactcgggtctgggtccgagtccaggtacgagtctgggtcgggtccgagtctgggttcgggtccaggtttgggtaagagattagtgtttactccaaatcctttgtaaatataataatacaagctaatatggactatttgttatgtattaaatannnnnacatacattgtattaaaaattttgatcgtaataattaatacactacgttgctttatccaaaaatagtattatttattatttaatacaatacgatccttagtagtcataaactaccatattactacaaacagagggggtgttcactcctctctaaagctacaattgtatttttttaaaagaatattgtcggtaaaattatttgaattatatgatttgtgatacttaattttacaaattgatttttttttaaggtaaaacttctaaatcctacttcttttg

SEQ ID NO: 30957 - DNA, 3973 bp, Cannabis sativa
ataataaagaaagagaaaaggagatttgtgtgacattaaaaacttaggttaatctcttctcatcactttctttatataagctttacttagggctaggttagatgagattgtgcttaaaatagagacttgggttgaagtctaactctaggaccaaattcttcatgggctttagagttagatttatgccactttatttcatttaaatgaaataatgtgtatttcaagtacctcctgtcggacgaagctttcatcgaatcctctgcctggcctagcaaacttaggattcccctaggtatccccactccttatccttcttattttatttggcctgatttcataaaatgtgccttgaagcatttaaaacaaacgaccgaaccaattttgatagaattttctaaggtacattcccaccttgcagagacctacccccgtcatctgcctaagatgaagttgtctgagttaactattgaagaaattgaggcccaaactgccgcccgatgaaagagacttatggcgaaatcgcctaaatgcaaaggtaaaggtaagagaagcaagatggtggggcccgataaaactaattagtcggacgccggccaatcatcccaacatgactcagctacggatgatactatcggggcgctgcttaatgtccctctagagactacattggccgtcagaaatgctagaaaaaattctcttagtgtggtgccaacagagctctccaatcccgaggaagtctctcagcttggggatcttcctgtagtcgacttgggcctgaacttaggttctttactatcttctcctactcatactccctctcttcctttaggggcttcgttgacctctcagcttgctctttctccctttatggtctgtccttcatctttccctagtagtcgaggttccccgtctttggtcgtccattctccttaggtttcagctgagtgggacgaaattcctactttttgaatccaaaaagatgttccttttgaggagtcagctgagaactattttaaatccttgttggaggccgttagaaagccagatgatgacttctatatttctaaagggcgagattcaattctgatggacactgctatttctggaatcaaggtaattatctaagtctgtttattattttgcatggttcttattgttgaagtattccacctatttaatcttaactgtttagtatattgcatcagacgacttagaggtgtgctcatgccatgaaatttgtagacaaataagcagaaggagagtctagtgaagggttattctcgctataagaagagttacgagacagctaatgctgcagagaaggccaccatctccaaagtcaatgccttagaagtcgataataagttgttgaagagcaaggtcgatagctttgactcggagaagaagagctaggatctcactcagttagttctgaagtctgagaaataaaccctgactgataaggttacttctctcgaggcaaatttatccgagatgagactagatcatgagaaattggagtcagagaaagacgctttgattttagagcgtaatgcccttctttctgctgatgaggcggcaaagttcgagattttctccttaaaggaaaaaatatatgaggcagagaagacagcgggccaggcaaagaaagctttggttgatgaaaaaagttctttgtttaaagagatcaaggctctgaccaagcaagttaagaaagcattcctcaatggaagttatcagtccgcttttaaactctattatgagtttaaggagggtaagtctgctttgtgggatttggaggaattcttccaaagatatgtcaagtttaagaaggatgaagatctcgtggacaattcttctaactcggatggggccaataatgacaatggcatcgacggtgcttgaggattaccttctctttccaaagagaaaattttattttgtcctgttatcattttctttttctctttttcttctttttttttttatttcgacaaggggcgcactatttaagacaattatatttttatggtttgtaaggatttttatttaggctaatgccttaatttactttgcttatgttattattatctcaaggtcacttgacactcagtagagtttatttaatgacatttaatgccttggtgactggtggcttcacctttccaccttcccttccatttcttaagcttatttaagcatgcatttcttcatagctcttattagaattttctcctttctaattacttgtttaatatttttttttcttttttctttgagatgtcaaaccatccaaagtctcctcttcctcaatcttcaagtggggatgaattctattctgatgttggggattagtctcctacttgccctgaaactttttcatactgcaaccggcctagtggcgaggccattgttgggaggatgatgcgggcttatcgagcaaggtgtaatgacgcatcctcatcctttgatgaggaatggcttcaaaacttcttcgagaattaagggggaaatgttccttttactactcgtgttcctgctgagtttcacgctctttgactacgtgctgagcgtcgtcatgatctctgctggctgcgggctagaagtcattgtgcttgggacgaagatttagaatgtgatcgcttggctaacgaaagatggatggaagagtgccttagggatggatttccttttaccatcctggttttcctacgggctatcgtcggtgcatgaagagggtagtgagaggttccatcgtgatcacaggctctctatgtattttatgttggcatcatcctgagcgtgagcatttttattgttgtccttgatgtaatagttctatgtatttttgaagtagttttatccttagctaatttaagtatcacttcttttttatccaattttttctttattgtatacattttattttggctttgaatcccagatgatgctatgtaatttgttaccattacttgttctttgccacataattctctctctactttgtataatggaacctttgatcttcccttataaatgccatttatattttccgtttatttcacttatccttattaaaaacggaaaaggcacctcaaaaactggaaaaacaatatactattggagttttttgagattgggggagtgtttagttggttaacacgtgtcattgtctgaattattctggggctttttgtgttcggactcgtggcatccttccttaatgcatgttggctcttatttttggctataaataagcagtgaagacaaaaccttaccattcttaaaaattctttaaagactttctttagacttttacttaggtgtttactcttttaaggtattttcttctacaaacatggcctttctgctaaaagactaggtacgtcattcttcaagcgctaagtcttccttttccacaatattttcaaacctacagcctttggaccctgcatttttatctttaaaccttttttttgagttttcaagacttcgaaccagtctccattcccccgttacctttctcggaggtttgcagttgtcccaattttgaacacatttcttttggcttgggaacttatgcttcctcacgcattgaaccagtgccacctttggcattgtgtccatttgcggtttttccttcaattttggcccatattgaagaggcaaaagaaagccccgaggtatcagaggggagttctactcaaacgacagtagcctactacccaaagcttgatgccactactcactctgagaatgtcgaccagcttaatgacttagctgatgattcctcgtcggcattctgcattttttcttcctccattcctcaagagtcacctcgggtggtttatgaaattatatgacctcctacatctttcaaccgtcggggatggactactatgtgaaagcttttcaccaacgggaacatttttctgtgtaggggttctttgggtggtactttgggtgttgtctt

SEQ ID NO: 30958 - DNA, 2664 bp, Cannabis sativa
ttgaagcaacaaaaagtgcataattataggctttccaaatgaagtgcggaccaccacctcctaatgaagtgttgatctaaatttgttggagagatataagcagtcttatccaaataatatgcttaaactaattggttttaagataaaatctcatgcaccttataccatgcactcacctattcctacttcttcaaccatacaagactatgggactttgttaaatttgtaagaaacatacctatcaaatgggatcatgtagtccttgagagttttgatggaagcacccttgccaaattttcatattaaacctttcttgagtaattctctacccaaaagtaaggcttataccatacactcatctattcctacttcttcagccatacactttcatattctaacaaggtatcagagtcaaaactaaaactctaataagtaaccgatccaaatccaaaaactaattcaaaaatatgagccaaaaagagtcgcttgagattcggggatagtgagccaaaaagagctgagtcatgtaagattggtgagcaaaaaaatagtcaccatcttgagggaggatgttagagagtcccacattgataatatgtggaaactaaatatcatacataaaatgtatgggctactcctctcatcgcctattagttttaagatgaaatctcatgcaccttataccatacactcatctaatcctacttcttcaaccatacactttcgtattctaataaaataaaaaaataaaaaaaaaataaaaaagaaacataatcagactatgggactttgttaaatttgtaagaaacatacctatcaaatgggatcatgtagtccttaagagttttaatggaagcaccttttgcaaattttcatattaaacgtttcttgcgtaattctctacccaaaagtaaggctaatctaggtataagatggaacgtgatccttactaccttcaagaaaagtaatttgttaaaatatttagccttaagaagttgatcaagaactgaattagggttttttaagaattcaccatgctttcttagcaagcatattctagttgaattgaacgagtgatctgaaacctaaacttccataaaacataaaattacataaatcagcacacttgctccaatgaattttatgagctagccttatttacccccacaaaaacctagtcattgaagtttttatggcatgacaagtagcaacaagaaccttaaaatatgccatatcataaggagaaataactttaatcgcaacctttaataaaatttctttccacgcctttgaaaaagcttttctattccataaaaaaaagaatagagctacctttattaggtaagagattgaaagaagattttttagacctttcaagagattgagggagacctaaatacttgctaattaaaaatttactatctaaccccaaatttttaggaaaagagcaaaaaattcaaaagaagtgtttgtagaaaataagtttgaagatttagcaaagttaaattaactagtagccttattataaatgcttagagtgtccttaatagttgaacatgagtgttgctttactgcagtgaataaaaaactaatatcaataaaagtttgaaaaattttattccgaatttagtcttaattaatttacgagaattaaataatagcggaagcataccatagtctatagaatcgactttagaatagtataatcttctaattttggatcaaaactttctctgaaactttagtctcttggtgatgggcatacaagagtgaaaaatacgatacaatgcgaattggggaccattacctgttattaataactaataaaatagtaactaatcttcgtttactatttttaatttagcccctcatcaaattaaaaattatctttatggtatccacatgacaatcatgcccttaagtcataaattttattctaaaatagaccacataaatttgattcatttatatgatgaccctacacacatttatatgtacaattatggtcccaaataaataaattcctaacaatctctcactgggccacatatgtatcaatataaatatgttaaccttattgagctcataactttgtcatcataactgtaggcatgtgcagtattgtccattaactatatcaatataggattaaaatagttttcattgtatcaatcacaactaaacctatcaatggtcacatagatcaatataaccaaattacatagatcaataatgataatgtggtataaaaattacaggcgtagtgatctattcgggtcaattttttactgggcctgctttactttatagaaatcaaaactttaacttaatgtacaaagtaaaataaattgaataacataatttttaatcagaaagttatttgaatacacaatttcatgaaacaaataaaaaatacaaataataagaaagataaactcccactaaatctagatttcctccctcatactctaaaatactcatacatacgactagtgtgctcatgaaagagcttgggtgaaaaacccttagtaaggaggtttgcaatcatggagtttgtacccaagcgatctttttgggtatatagttttgggtataaaaatagaagattttttttttaaaaaaaaaagagttaaaatggtaaaaaaaaaaatagtgaaatggggg

SEQ ID NO: 30959 - DNA, 1117 bp, Cannabis sativa
ctaagtaggaagggtcccggacaagtatctaatctagttatgatttcacctcaattggcagatgatatggtcaaattaggtattgagtttgtcgtgggtaaatataataatttgacattgcaaactcgacctattagacagaattaaagctactcaaataactgattcagaattattgaaagcccaagaagaggttctagctggtcaagctaagagctttacaatatcagatagtggattattactttataaaacttgagtctgttttctgagtagtctagaattgaagaaagaaattctcgatgaagctcagaccactccctattctttacatcttggcactaccaaaatgtataaagacttaaaacctttctattagtggtgcgggatgaagaaggacgtggtggaatatgtatcttcatgtttaacttgacagtagattaaggctgagcaccaaagacctacagggttgttgcagactttaactcgtcccaagtggaagagggaggatatcaccatggattttgtggttgggttacctagaaccatcggaatatttgattccatatgggttattatggatcgatttatcaagtccgcacattttctaccagtgaaaacaacctttacaatggatcagtatgcagacttatatgttaaagaaatagtaagattacatggggctccgaagtccattatattagatagagatccaaagttcacttctatgttctgggaaagtcttcaacgagctatgggtaccaagttgaagtttagtacagcttttcatcctcatacagatggtcaatctaaggggataatttagatactgaatgatatgttgtgagcctgtgtgttagattttcaaggctcatggagtatgtatttagaactaatagaattttcatacaacaatagctatcagagtactatagagatggctccatacgagatgttgtatgcaagaaagtgcagatctccaattcacttgggataaaactggggagaggaaatacttagttctggaatcagtacagcggactaatgaggcaatagagaagatcaaggctagaatgcttgcctctcagagtaggcaaaagagttatgcagatccaaa

SEQ ID NO: 30960 - DNA, 1350 bp, Cannabis sativa
  modified_base (795)..(797): a, c, t, g, unknown or other
ttcatcttctttttaaattaattatttacatatgatttaggaatttaatattaactaaagaattggttaggttattatgagattatgtatattgcttaagaatattataaatatccttgtcaagtcacatatattttaattaattaatttaataattattattataaaaatttgttaataagtactattgttaaagaatcttatttatattattaatgtatgaaaaaataatatcatatatgtaggattactacatactcatcatcatcctaaactctatcaattggtaaaaccaggttggatatactgcctaaaggggaaaaaaactataataaataggaagtagagttgttatgatgatgagttggaagaacatgcataatgatgagataagatacaaaaacttacgtacatatacaaaataaaattaaatgcaccgtccaaaaacaacacatcattccttaccaccagggcaatcctcctcatatatatatcccctcactaccacttatatatatacttatataagttatattattatacaagctattatgactagggtttattcgatcacatttaatgtttttaggtctatttacatttgatccaattatatattggatgttaattttaccattcgtttcaatctaattaatttcagtcatccaatcgatcggttctatctgttggatatatattcatatatatttattgatttaatttgagtttattcaatattttatacttagtattttttggatcgaattggatccatctaatattttaagtccaatnnntattggattggattagattcatccaattcaagaaaaaagagtaaaattttaatgttaatttttatatatttcaaactaaatgaaaatactacttaattcgattggatgttggatgtgtacgtattggatttttgcatacctatctaacatctaatctgatccaattggatattcaaaaataatatcgaatctgatccaatcactattagatatccaatatttaaccgtcggttgtaattagatcagtcgattgttactgaattggataatttatgcacacccatttcatcattattttcacactataaagtcatatatatctatatgtttttaataccaattcacatatatagtttggagttttattttattattattgaaatatatatatataccaaataagttcataaatagaattattagttaacattaataattaaacggtaaagtgtacgtagcaaactaagaaaacatatatatatattagcaaaaaactacgtgcgagacacgtatattaaattttatgctaagtttttttttatgttatttgaaa

SEQ ID NO: 30961 - DNA, 5775 bp, Cannabis sativa
  modified_base (5742)..(5745): a, c, t, g, unknown or other
ttagttatccagacttctaacatgtccaaacactggattggacaaattagcctgtctaatccaatccagtcctgcgtaccaaacgggcccttaaggatttatagtttttttttgtattttttgtttatttttttttagtaaaatttgcattttttgtaatttttttttgtatatagtacaatgagatacaatagtagtggaatctaaaagttaatgataaaggtccaataatgattcaatagtggtacaatagttgataaagacataatataatccgataataatttgataaatacttcaaatttatgccatagaagaaaaagggtaagatttttgatttaaagggtaatttgaggagatgaaaaataaatctacattgttattttttgcttgatgtaagcataatttatcaaatttccttgtcaaaaagcaggcacaacatgagcatgaaaaacaatctctgctagaaattcaattttacaaatgaaaaagatagtgttcccaaatattatcaacttaattagcaaaattataggttgagcacataaataatagcacaaattactctctggtaaggtttgcctttaactaaaggcccaactaacaataaaaagaaaaactaataaaccaacaacacaacaccatcatcatcatcaaaatcaaaacccgacaaaatggaacctttcaattgtctcattccagctttaccctgtccatatcattgatcaccccttcaagctgtaaacacaaagttaaaataaataagcaaagaaagaaatagtcctttttgcactgaaagtacacagcacagtcgtatgatcgaagtatgaacaagaagttgtggatggataccttgacaatctgacgcaagaagtaatccccgtatctctttgctggctttgattctaccacacatactatgtcctgtagaaaaaagagaaaccaaacattagtaactactgccttcttatgattttctatgccaattaatggaagccatagatatagtgaaatttgtcaaactaacaatgtgaaatattaaaatttgtaaaataacctcacttaatttattctatgcgatcataatagtcgcacagaataaatttatggttgttttacgactataatagtcgtttatagtcgcacgatgtaattaatagtcgtttctgcaaccatacaaagttattttgctaataaatttttttataaagttattttactaataaaatatttcataaaggctatttttacaaaacattcatagatatatcaatctaccaaattaccagtgtaaatcttagcgaggtctgatcgcttcgagccagaacatatagaacctttttttttcaacacactaccaataatgatagcaacactttgatcgacactgcataacagagctctttgtacggaaacttaggatactagttttagctatttagaaacaaggtttcctaatcctaccaaacccaagaaactatgtaggtaccaatagggactcaacactcaggctttgagattttattcttaatttctaacattttaattttatgttatgttttattatttttaattgttagccattaacatctttaggaatttgtaaatgctttttacttgaatttgaatgtgtatactaatgctggctttaaaagtgttttactaaaaattagaaatgacgatgactgacagcaaccagggctttaagattgaattctcaacacagagggatagaggttagctaaagaaaatggagaacatacatcatcaatgtagaaatctacatcagcattagagatgactcttccatcactgtcaacggcatgtgtcttgtgcttgtatgtcatcaagatagtcctgccaagagtggcaaaaaggtatcagcatatttttgatatatcaatataaaaaagtatcttgtgtttttatcaaaatgtagagttggtacctgtgtttttaataatactcatatagcctactaagcttaaccccatgataaaatttagccattggataaatataaaatttggtgattttatcaaaaaaaaaaaaaaaaactcatatggtatttggtaccataaactctacttgatcaataaaattttattagtttgaccagtatgttttcattgatatataattaaataaataaatttgaatttatcactcattaagtcaaaacattttgatcatattgaaaaaagaaattatcgatcaaattttaatacaaggtacaaaaaaatgtatgatttcaaaatataaggtattagtaagcattattgaaaatacaagatacctatgcacccatatatataagataataataataaaaaaaactatgtgataatgataatgacatgaattacctcaaagtgggttcatccacttccatgtagttcgcaagttttcctagagagatggttgaataaacatttaggaatgtacggacacctgataacaactgttgttgcttcacctcatatagaaacaattttaactgaagtctataggcatcctgcacaaacagattaaatgtgttataccacataaaatcctaaatgataaaaaaactacaaaagtaagaacaagccataatctaaatcaatcgctgactaatgtaattaacgacttttattaatgagagctaacacgagaggtatttaaagatttttatcaatgagaattggtcttttctcaaaaagataagactgaatcaactacagaaaatatcaagccctgttggttatacaagttcaagtagtgataattcatgaacaaatcaactttgaagctcaagttatcaatgataggcagaagaagattgactacagatgaatagtaaattccctaggcaattaggtacctggttgtaatttacaagcggctcctcaaaacttggggctgatggagtaataaactttgggcatgcatacgaaaaaagctcatcatagatagcaaaagcctcatcatcgtatctttgcattctaatcatcttttcaccatacttctcccttaactgagcgttaacggtttcctcaacaagctttacctggggacaaagtgagagagcaattgccaacaaggcatacatctgttcgttctttttcagtatctgctcatactgtggagatttctgatggaactgcttggttttgtaaatgtacaaaagaattttgttgaattcacgaattgcatctgtgtacctaaagaacaattattcacacataaaaacataaggacaagatttgaaaagaaaaaaatcacttccaccaaatccaaaatacatacccgtaaagggctgtttggtatgatgtaatatttttatgagaatgataatcttcaacattctcatgtttggttatgtggttttctatttaagtctggaaaaattattactgtgaaaataagtttccgtatgggtaatcttaaattcgttcaaaaaagtggattccgaacattctcttcaatcttaataacttttcacaataatttatcaagaattcttgtgttcaaccaaacaaggtaattcaattaactgtaatcaaaacaaaatattctcatgcataactaaatgcaattataagtttgcagacaatcatatcttctgctttaatattaaaattaatcatattattttgaactcctcgtactaaacgcaccctaaaagaagaaaaaaatattggactgacatacctcctcaacataagattggcaaaaccataatgataaatggtggttatgtggcttccaattacaacggtgtaaatcccatgctgagttatgtcaataggaagtaagcgtttcagaccagtatgataatcaccgagtaaacagtgaactcgaagtagtccgaccatgctaaaatatcccaacaccttcaatacattactcccaccattgtaatcgtatccatcagtagaagtaaattgttcaagtccttctttctctcgctcgagaatctgagtaatattagatttctccactagtgcttgcaagaagttgagcacaccatacacattccatgcctacacaataccataatcaacatattattagcttgccccccatcatagcatagcaaaacgataaaatttactagcatcaagaatttctagcgtggttcagttgcaattttccccaaaatcatggttctgtctttcctaagaactaaacccagtaacgaattctcctccagttctctaaagtcgtcaatcacaagcccaaattttttttctaaaagtgctcaaaactctattattgggaaaatttaataaaataacatgaaaatgttaagtaaataaagttgcaaaatgatcgttttatggtagcatagtgtaactctgagaccaagcatggttattttgctaataaaaattttcctaatgactatttttacaaaacagttctatacttgcctctcgattaagaaaaaattagtacctgatcgaactgtctcagaagctcaatctcctgttctgtcttgttcttcatcttggccctgtactggcagaagctctgaaactggtacacgaactcatccaccatatcccacagccactgattgggaagctgcatattaacgacgccatgtaacaccacttgaaacaagctaatataattgtcccaagagtcgatccgctgctttagcgtcggggtaagcctcgcgtacaaatgacggaaccacatctcgcggtagaggaggcagaagacgtggtcgttgtcgacgtaagtggatacggcgtccaccgaaggccatggagtgtccttaaagagcctctctgacaaggtttggaatgaagtctcgtacatctggtgaatctcgtatacatttttctcgcggatgtggcgataaaggtggaccacgaaggactttacagagtcaggtacgaaattagggtcataaccaaggtcctgcccagctgcagcggagtggcggtgagaaccagttgagtcttcgtagtcggcggaagcgtcctcgtagtcgtagggcgccatggctgaagctaaaggagtgggatagtactgtaacgaaaatagatagaagaagcggaaaagggaaaatcgttagggtttactcaccattatatttgaatgattcgatatgagtttgggccgctgctttgactggctagcccgattcaagcccagcccatatgttgggaaatcaagtacaaaattatctctttcagaagaaaaaaaagtacaaaattatctatttatcaaaaaataaaagtacaagaagtttttattttatttttacggtagtaaagtaaagtgtttgatgaatgagtgtacttttgactgacattgtgaaattaccatacctttttccttttttttttaggaagacacgtcacatgcatagtacgttttctttttttttttttttgcttaaaggcaaaatctatatttgtgttggttaatttttttctattacaatcctaatactaaaaattatattatagagaaggtggccacgaggctcgctgacgggctcactaaaaggcttgtctttgtgtttaactatagtcccattttgtcaaatttcagatccggaaatcttatattgtggtatgggtatattaaaaaaaagggtggagaatcaaaatggcctaaatttgataattaagttagtaaatctctactttttaaaaaagttaagaaaatagtcaaatgtaataaattaactaataaaaattataaaaatacatttatcacatatttttttaaaaatatatatannnnaataaaattaagttacataattttttttag

SEQ ID NO: 30962 - DNA, 1835 bp, Cannabis sativa
  modified_base (1665)..(1667): a, c, t, g, unknown or other
ctaacttgaaatttattggttttcaaatttttttgttagtttttaggggctatttatagtagaacatgttgaacaattttatgaaggttatgaaatgattattaaggttatttaggactgtttagaagttgtttgaattgttttgggtggttgtagcaaatgttttgcaagtttgagttcaaagaacttaaacttaacttggttgtgataacttgaattctcttgcaaaatgggttcgtttttcttcatgaaatatgttcactatgatgtgtttagattctctgcaaaatttggtaatgtttggatcaggattggatgagttatgggatttccaaactcggacagggagtttcaggccatccaatttaggcagttttaggatggccattttgtttgatttttgttgataatttgattgagttttcttcataaaatatttaattatgatatttttagtttcttgacaaaatttggtaatgttttaattagttttcgatgagttataggatttctaaactcggacaggtatggttcaggccatccgatttagggagttttagaacggccatttagtttgatttctattgagaattggattaagatttctgtataaaaaatgtgcatcgtgatgtttttagatacactacaaaaaattttaagtttttagaattgcatgagttatgaaagttttaaaatgagatagtggagtttcgggccatctgattaaggcagaatttgggggtccattttatgatttttcccaggatcccaactgcgtgttttctcaatacatatatatcaatagggaaagttttagttgtcaatttaagtccccataagtgttagggcaacacttattggtttttttggaaatgtgacttagggactttgattttcagcagctatttccactaaagttgaccggcacacctaaaataaaaattgaggtaagactagtatacacatacatatgtacatgtttagtttttatgtttgccacatgtatgacatatccgttacaatgatagttggtgtatatatacttgcatcttgatatcgtgaatgtatgtgtttggcaattcaggaagtatgaactaattctacaaacactagtacacaagattaatgagtgcatgtggtattatggctggttatacttttgaaagcatgaactagtgctaccaacactagaacaacagagtacttagtacacgtggtattatggctaattgtacttatagtatggattgatgttaccaacactagtactactagagtactgattgcatgttgtattatggtcaattatactatggccaagaatattcgagactcaattatacttgtttgaattgtttatgacttattcataggtgtatgggcacttagtcgtaggtcggttatatatttatgttttatgcttttcttactgagtctgtcgactcacatatgctatgttatgtgcaggtaaaggcaaagctattgttgaacgtcagtgagttttaagatggatgaagattgtatatatcgagacagttcgacctggagtgtgggatcttcgggataactagagctcacaattttgtagtcgctgtctgacatcttttgattatgtaaatttgaaaaatgtagatatgggctcccagattttataaatgtaatacnnntatgtttatttattaaagtttaaattttatcacttttgataaaccctttgcttagcaaaggttgcacagtaattttaaattgtattgtagcacgcctaaactagtagggtgttacaacctgacaccagacaaaaattcgaggtgcaaggccacctccagtacttgcgg

SEQ ID NO: 30963 - DNA, 2196 bp, Cannabis sativa
agaatattattaaaccattgtcatctaattaatttaattgttatgtgcaaataataaattcatatgtaataaacaattctattaatgcttctatatatataatatatactcatatatgcaaagatcctcaaacattattaatcttaattaattctttcttaaaagattgtttataaacattctctctaatagatccattcataatttacattaattttttttaaaataatgtatcaggttcttgtttttaccaaacgtaatccaattaataaaatataactaaatattcttatggcttactaattaagtacatatatatatatagtagtacaattaagtttttccaaacaatcaaattattattttatacttcttgtacaaaaatgtgccccctaattaaacaagcaatcatttaaaatatataatgatgtattttatatttgttttttatggtgggctaacaaatttttttgagagcattgttatataattaattaattaatacttttttatttaaattgatgtaatttagtaaggggtctcaataattcaattttctcttttctttctttttcttttctcctttttttgaaaaggcaatattctcttttcaatatacatatatatatatatatattctaatttcatgaactgttaataataacatatacatatatatatatatacgtacctcaagcatatcagatggttggctcaatttattgtgaagacgattttgatctgagtgagatttatgcctttcaatcacttgcggcatactaattttatacacacaaaataaattaaagctataaaaacaaatcataatcaactaattaaatcaactactatatataaatatatcataacattaaacatatatacatataaaaacaacaaattcatacaggcttaattagctaaaaaaaatcaaaacaataaaaaaaaggtaaattgtacaatacgtactgagaatatatatatatatacctgtatatgcatagtacaatatttcaaataagtactataattctattataatatatatatattagaacttttatttacactatttaagaataatttctaatttgttataaaaaaatgaagtcttaatttaagccagttataaataagaataacctctatattgtaattagttatacattttttaagtctattaataaaatatatctctatataagaataattacatcttaaaaaaaatatatacatatattttataaatttatttacgaagaattaataatgttatttcaaattatagtacatgtataaactcgaaaataattttaatataatatagtattaagaattgtttattggtatttttgttacattgatatttttttatattttgattttttttcaagtgcaactctatttagttataacctctcaattaaaatattattttcttagtcccaaatatattcttggatagaaattctactgtatatatactttatcttgtaataagtacaatgagacaagacaagaatccaaattttattattaattaataaaaaaaatgaatagaagaattagaataaggaaataaataaataaatgaatgaattatataaccttgaagttgcataatgatagagttttccagtggttgaaaagacaatgagagcaatttcagcatcacaaagagttgaaagctctaaagccttcttaaaaagccctcttcttctcttcgaaaatgtcacttgtcttgccgttatattttctatcttcttaatctctattttttgtctcgtcattctataaaataaaattaattaaacaaaactaattataatttttatatatatatatagtatagatcaagccataaaaaaatttacccagataataagaacaaatttcaaccccattaaaacacttttctcaaccaaatctaaacaaattatactatatatataattatatttatatatatttttataaagtattactagtcaaccctagctagttagtgatagtagaaaatatcataatatatatacagcaatgggttcactttaatttgtaaactgataaaaaaaaaaaagatctgaaaattgcaggataaaaaataagagtacatttttgaatgaaaaaaaaactcatttccagattttgtatgtaagtttagaaaattaataataataatatacagattataat

SEQ ID NO: 30964 - DNA, 1627 bp, Cannabis sativa
caaacatgtctttattgacactgaattttacaagtcaacttatatatataatataaatatatatattaatttatttttctttgtttcttttgtttttctcttgtgggtggaaaaatgtcatatctctctatatacaaatattatatatataatatatttagaaaagtctcttgaacttatcttcaagacttttttaaggcttcaaattgtttgtttattagtcacttggtgcaaaaaaaaaaaaaaaaaaaaacaaaaaacaggaagtttgctggaactagaacgaagacttaaaaaaaattaataatattaaaagtcattatagtttacaattgtacaatttaagtacaaatatatatagtttcatatattattattattattttttttaatttataatttgagttgctctggtaattttttataaaatttctatgtaaattttaattagaatttaagttgatccgttaatttttacgagagttttttgtgaaattttataaaaatatataaaaaaaaaaaatactgtttgaaagtataaaaatattgttttaataccattaagtgtgttgtgtaattatttagatacatggctttatactaagtttttcttttgattgtcctttggagttcgagtcatgacacttacattgtatttggtaagatgaaaaaaaaaaagtgaaaaaaagaaattgtgaaataagtgaaattatttatttggcaaaagagaaagaatgaaaaggaaaagacaaaaaaatatatatacaatactttatttgtccttaaaaaaataaataattatattaagaggataatgttgtaattttagtaattaatttatattctatatccttccaatttcatttttaataccaaacaatatatatagatgagacctacttttctcttcattctttatattctctatctttcctatcttttcttttcatcatattttttgtcattccgaccaaatataaccttatcgtgagccttatagcaacactattactaattaaaaggtcatcaaatagccagattcgttttcataatcataataatattatagtaataaatgattgccccctatttagggtgttaggtacaaacaataaatattaatttcaacttgcatggagatgactatatgactatgactcatatcatatataacattactcttgtctttcactctttaaatttaattatattttttctgttatattatataatatatattaagtgtttaaaatatggtaaaatatattattatatgaataatatatattaagtgtttggtaaataaattgcgtgatatgatttatttaatttaaaattttaacctatactttgtaagatggagaggagttagaggagttacaaagttgattacttttgtaacttcttttagttgatcatatttttgtgtaataaaagaaatgttaaacaaaattgatgataggattcaaatattatgaaatatagttgttacaattatattaatgcttattatatgagatgatctatttgaattctaagtgtgatcacttaaacactatataaatgagtctaatatgctcatttggattaagttttctatcaagaaagcactttgctagaaaaccct

SEQ ID NO: 30965 - DNA, 850 bp, Cannabis sativa
aaaatataaaaaatttactaaaattgtagaagaaggtagtcatccatctataatatggaaggatattttgtggggcagagagttgcttgttctaggtctaagacgaagaataggtaacggtcgagaaactaaagctttcaagaatccatagataccaagaatactaaccttttttccaattacaagaggaacatttgattcaatgataatttctgattttatactttctcctagacaatggaatgaagaacgtattacaaaattttttatggctattgattctaagcttgtaatgactattcctcttagtccgtataatcaagaggattcgtggcaatgacacaacacgaaccatgagacctattctgttggaagtggatataatttgacaaaaactactaacagattcctcccatcctgatcgattgacgctttatcataatgttgaaaatctttttaggcaataaggataccacctaaaatattgctttttgcatggagagactttcatgaaatcctacctacattaaaggggttacttaaaaggaaggtatcgacaaatagcaatagtcctttatgtggttatgttgttgattcaaatgcacatttcgtattctggtgttcatttgcacaacgtatatgaaagcttctcgactatccttttttattaagccacaaggaggacattttctttaaaggtgttttatttcatggttctgagatcctaaaagaagatgcttttggaaaaataattgttgtggcttggataatatgatttgagagaaataaacaaacttataatcaacaaggtaggactttgcaacaagttttaatttgggtattatttttc

SEQ ID NO: 30966 - DNA, 2616 bp, Cannabis sativa
ttttgccaccaaaataattacacatgtactattgaaaatacaacttattaacttgcgtgttgtgattcactttaataaatatttattatttattattcaacaacaatatataaatgcagagaaatactaacactacaaagaaatgttacttttgccaacacatttttgtattggtaaaagttggtattgcgctggtaaaatagaatttacttgtgatgtgttggcaaaagggggttggcatatcaatgttggtattagaacttttgccagcataaaataaaaagcgctggcaaaaatgacttttcccagcgcataaatgcgctagtaaaagttagattttagccactgcaaatgtacgcttgtaaaactttgacctctttgccagcgcagtttgcgaaatgcgctggttaaagttttaccagcgcagtagtaaactgtgctggtaaaagtgacatatcttgtagtgtaaaagatattacacctttctatgtgttattatcgctattagtccacttaagtatccgatctcatatagtttaatgtaataacttttaaggagtatcgttaaccaatcgcaagacgacatatctagaggtagtaaacactactagtacccattaataatactcataaatacacatagttttaaaatatatacataaacggatgtactcttaatgggtattacccattcatgagtaatattatgaaaatttaaatttttatgctttgtttttctatctaattaaaaaatctttcatttttatattatatgagtcagaattattttatcggttgaaaaaattaagaaaaaaagtttttggaggaaaaaaaaaagaatttggcttaagtattttgtatataagcatatttttcatatagtgtaaaaagtgatattttttgatatttattttaattaagtagttaaattaagtataaaaatttaaatttctcttctattattcgttattagatcaaaatctaataatttaatatttttaaaattaatatttatagttaaattgtttagtaaccatgaattgagaaatacccattaagaagttccatatatatatatatatatatatatagtttctcccaaaaaggatacacgtaataatcttaattctgccatgcccattaaaaaagttgtatttatttataaaattttaaaaaaaaaatatcagtatcaaatattttttttacaataatattaacctctatatttaaataaattattgaaaagaccaagtgaaagaaatttaacataaaatacattaaatactatttaacatcaactaaattaaaaaaaaactagagttctcattcttaaatttatagttacatgaggtttttttttctccggccaggcctgttgaccttttctcagcataagtaaggtttggtcgagattatgttttgctattgcaatttaattttcgctattgcgattagtattatctttgtgacataattttaagtattttagtcttgtctttgtaatataattttaagtgttttagtcttttctatgtgttattattttattttatttcattgttagttcttctttattctgtgatttgacaacaaatcgctgttagtggttaaaaataacaagttctctgcaactgaaagggttgtaagtagtgtaggtgtgtaccttgtacaatagcacgagtgcttaagctacgaagttgaatgaacatactataatagtttctattattgtgttttttgagtggtacataaaactgaatagaagtattcttaagattattaactgtgatgctgtaattttgtttcatttgattttttattttaatttttttgtcaaacaatgtgggaaaatggttgattatttggttagcttgtttttctaattttaattttagatgcatctccaaggagaaaatatccctaatagcttgttatctataactatatataaaagagtcaataatttttgggcttttataatgttaaattacttttttaacctttattttatttttccattaaaaatttttgtagttcaatataaatgacattattttgatgcgatatttttagtttttaatcacttcctattaataattatattagctaataatcatgtaacaacttaatcatcaataattataataaaaatgtcaataattttaatcttttcatattaatttacaaaaatttcttttgataaatagtaattattaacttgttaatcttaaattttgcatgtataaatttaattttactttaacaaccttgtgtaataataattttatgaaattaattttatattttatgcattgattatttctaaacttcgatattttgaataaaattttattttgtttttttttattaaaaaaaataacaaaatttaggattttagtaataatagtttaataatttagggtttatattttacttcttttctacttctaattttgtttgttgtacttatactaacttgctggtattttatattgatcgagagtatttttgtcgactcatattcactctttcaaacatactaatgtgtaatgtttcttttgtttagaataaataaaaatagaacaaaacagttcttcttaaagaaaacttagctaa

SEQ ID NO: 30967 - DNA, 2930 bp, Cannabis sativa
ttggcttcttcttgaacgtgttgaacgtgttgttcttgaagtgggtggtctctgtgaaccaattagttcttttccaggacggagattagtctcttcagtacgactatcatagttttgattatcatcagccatggataaacttatggttggttaggagggatttttctgagctattatcacgtaggctctcagtgaaagtaccaaactgttaacgtagatttttcgttaattaattattaagcctttatcgtaataatttaaacatagaagctataagaaatttgagaagaataataattgcaatactgacaccgggttttttacgtggttttgcagttaactctgcatagtccatgagtgtatcttattaagatatttctggatacagaattatagttttttcaatcactgatctctctcaaagattttttgtccccttttttttatataatctgcccctgtttataagaatataggttggcagttatttacatttgaatttaaaatacataattgttttcacaaatcgtgggctttgaccacgttccatcttaacacgtgtagagctaaaaatttgtataactgtttgttattcctatctttaaggtagtggacactgacgtagatagtagcatctcgctttgtacatagatgaatgacttggtttattcatatggcttccagtaatagcattagcaccagtgtactgagcaaacttaagaactgctctttgaccataagaccttgcagactacacaatcatgtcctccatgtttcctagttgttacacttagttattataacgtaaattatacgctaagtgtttcaacagccgattcacctcgtcataccttcttacatgtagcgaggtagatgtctcgttatgcagtgtctatagctccctctggattatgccttccgaggcaagatggtttctcgtcaatacacaaattgatagtttatgtatccttgtctcgcctaagactatacagtcagcgagttatgaatatactctattaattcaatatttaataagttattctattttgcatttaatgatataatcattattatacctgttggtacacattccacgagattaacacatgtcactttctaaagtactgccaaattttgggtataacaagatgtttcacagtacgacacgagtgagaattggttctgtcattgaggacaatagtcaacaatacagtagttggtcttgttgatcccaatccatgaagtcaggattgatgatttcagagatgcgatcttgttctgaaaggaactgaggaggaggaggagtgaacgagttggagatgtattgttggagcttgtgacctctaatggcagaaaaaacctgaggtttccacaaaaggtagtagtcatgatcgagctttgtggccaatttgtaaggaaacacaataggagtgaacgaagaaccacttgaaccagtagctctattttggctatttgtagaggaaagagctagtgaataatccatggcaaatcaacgaagaagaagacaacaattattcaacaacaagattcgaatgatgaatgagaaccatgctgcgctctaataccatgttaaacaaaatgaattaacaaagattgattctcatgaattatgaaagtgttggatatagtttatatagttacaagattaggaagaaaaaaggaaaagacaaaactaaccccctaatcgactttaactaacaaaacaaaattaactgacttaattacaaacagcaagactaactatcctatactcttaacaactgtgtgggttgcaatgtgaatttagattacaatttaggttgatctattagttgctctgtgtatttctgtataaatgcaaaaaaaagctttttaaatataaaaataaaaaactccttatcttttttgaaaatgtattaaggaaaagtttgattgtatgaattattataataacatttatatagaaaattttcttattggatttgatttgtttcgatacgttaattaatgtgttgatttgattagagtatgataccgttttaggtaatattattcctattcctacgtgcttaagatttaaagatttatataattttagaatgaattttttaatttataaattaaaaatatttaaaataatctacttaatttttgtacatatttatttaccttatttttttttttttttttaataattgttgatgaaggaaattagttaataacaataagttttcttgaatctcaatttagtactttagttattgttttcgttgatgaagagatggttgcaaactcaaatttctagcggcaaccatggcaattgaaggttcccccaaaagtaaaaaaacgttttgtggagagccataacaggtacattaccaacttgtgtccaactaatgattaagcatgtcaatatttcagtcacttgccctgtttgtaatctacaacctgaaaccatccgccatgtcctcatctcttgcccgtttgcatttgattgctggagtcaatgtgctactctaatagtttttgatcttggcggttctttcggtaattgattggaaaccatctttaagcaagctaaagttgatatgatttgtcttattgccatgtatggctgggcaatctggaaggctaggaacaaggttatttggaaaaagaaacacttatttgttaatgacgtgcttacttctacacaagtagctcttgatcactggaataaagcttaggataaaattttgttgtcatcaatctgtctagaaaacatcagtgatggcgctgagtcatggactaaacccgcagaaaacacaatcaagattaatgtagatgcagcactctttggtaacgacaataagtatggtttcagaattgttgcccgaaactattttggtcaccttgttgcagcacgggccggttgccatggtggaagatat

SEQ ID NO: 30968 - DNA, 1489 bp, Cannabis sativa
gagatgctttgttgccatcctgctctccgggagcatatgagacttacatgcattctccgggagacaggcctaaagtaatcctttgctttaagatcaattctgaacacgtgcgatagactggaatatcaaaaaatctgttttcagtaatgtaactatttagaattaaaaaatatatatatataaggatgatattataactataacgaatatcaaaaagaaattgaaaaaaatattctgacatgtaatttcgaacgtgaagattgactaaaaggttttaataagaggttgtaattaattttctcttacaaatatacacgaaaattgataattaattttctttgagtaatttgcaaagtttaactttcaattatagataaatttttaagtttattttttaacgataataatacttaagttatatttatataactcttgagcaatgttttacagataatcatataaaaaatcaagagccaaccctagagacacccatactattagtcactcgataaaacaccctcatctcacctcagacatgacacctcagagtagggagcacccaccaccacgacttgagtcaccggaacactccaagaaccctaaagccatcagccacaccctaaaatgactatgagaaaactccaagaccaaaatattcatcacattaaagaaaggtgatgaagaagccaaaaaggaccttacgataaacaaggtcaatgagaataatatcactctcattattgtaatttcgatgttggattctctaacaattggtaattttataaccccacaaaaaattactttattattgcatatatcgataaaaaacggcttagatcttagataattctatgttttaacaacttaaaaatagaacgaatgacttagtaattcttcaagaaaaatagtattacatttacaatattccaacaacagataaattagacaaatatttcaatcacgacataaggtatatgggatctaaaaaaaattaaatattggaatctctatatatattgtttaattattatcaaattaacatttctagtgccttggtataattgtgaagtttttaaaaattcttgaagagctcccaggtttaattatttagctacacattaaatatttattgaaaaaatagaaaagtaaagattgaaaattgatccattgacctattagcttaagataatactctttcttactacaccagataatattggttatattttcttactatttaaaattttatctatatattaatattttttcacaattttggagcctgagcattcggagacccgaggcgtgcacttgactcacctaccctcaaggccggtcttaagagggtgtttgttttaagtgttacatgtgagtagagtgcataccaaagtttaatattttcctccatttaaaacttaagtgatgtttattttggtgtaatggtaattgtaatagtaatgtaatagaataggaatcgtaatggtaatta

SEQ ID NO: 30969 - DNA, 2389 bp, Cannabis sativa
  modified_base (64)..(77): a, c, t, g, unknown or other
tatgttattaaaaaataattttttgattaaaaaatatgttacaaataataaaaatatatatatnnnnnnnnnnnnnnatatatagaataattttatggtatgcacttcctatagcatagagaccttttcttaacccttccttcacatgacttttgagtgtacacaatatttaaggtgtactagtgtgtatcaaattaaatgttaatttttaaatatatagacatccaaaataattaaaaaaaaaggttagattatattatataaaatattgaaaagacaaatatcagttctctctctccttctttcttcagcgattaacctaatctccaatttccatctctttctctctaattttcatttctctgtgattttcgaaaagcaagatgagtgagccaatgacagacggcagagctcgcagctgagggagttgacggtaagggcggaggtcactgctaagcaaagcttttgggcgagtcgacaatgggggcaaagcttcacacattattctgggtttcatatatgctcaacaccatcagagaagtaagggacagagacctatgaggttttagggagcctcctcttctatgacaatgatttattgataatgccaaatcatactctcccaccctttctatcaattacctatctctattataaaatttcataaccactcatgaaccaagtgatttagcatgggtatgagacaactaaaacctcatctgtcttatttttttttccaaaaaagttctcggtatttttgggcaaaagaattactttcacttgagcaaaaatggtgattgtgaaataatgtttagtttcctttgcatttatgtattaatgtatttggattttgattgtaaattttatctgaatttgagtatgaattgtactctgtacagtaaatgttagggtaatgatattcttttaagaaaacaatgaaagcaagataagagatctcaactttgttgttgtcatacgttatatacatcttatatgtgtagacatttttttttcattattgtgaagtcaataattaaaaaaaagttctttatttaagaaaaaatatatttccattagaagttttatgaaggaagagttaaaatttaaatttggacttaaaacataaataaagatctcatgtctttattaaaatttttagtcgaaaaatacaaaaatgaagagaaaaaaatacatcattatcttcttcttcttctatttttttatttaaaaaaaaaaagacgtcttccctatcttttaaaactttaagatttattgttaatttgtgttcttattctcatataggagtattttcagaaagaaaggaaaatgggagaggtggaagaaacgatttcatttatgtgagaagaggagggagagagagagagagagaaagatactaaacaaacaatgtattaattaattgaggagtcaaaatatattaattaattgatttaataaattattatttaattttagaatattattaaaaaataaatttacaaataatctactacactctaaatattggctattattatacacttgtcaatttatcaccattagatctattatctatggttgtaaaaacttctccaccatagagacaaaaccaatatacctaccatagatatgtcctatatatatatatatatatatatataaattttacataaattttaagatttggtcatcaacccactactataattaagactcacacaagactaaaattaaaatgagttacaaatttataaaaatgtttcaagactcgactatcaacccaccacacaaagcaatcactatgcactaaaacaaaatattagtcgcaataaaaaatagaaaatagaatgataatagttgacaaaattattatcatcgtcagaaaagtcttcgctactgaaagtcaccgtagttaaacatcgaagttatcaccgaagttagacattggagttgtcaccggagttgggccttagaatttgacaaagagaaatcaataatatttatcaactagttaaaaatatgacaccgaaaaaccagttatgtagattagccaaattaaaaattaaatcttaagatgagttacatataataacaaaagcaataatttaataaagaaaacggtttcatatcacaatcaactaaaaagtgaactaacatatgatgcataagtaatgaaaagatatatcaattacaaaaatcagttacttaaaaaagaaaaaaaaatacatgttgttgatctagatttggccaaccgaaagtggagtcgtatttattactgatgctaccacgtgtacacaataagaacaaaaatgtaaaagagacacaagattttatagaggttcgaccctcttagttagcgggtaaggacctactcccctttcagttgtat

SEQ ID NO: 30970 - DNA, 1737 bp, Cannabis sativa
acaatgctcacaaaatggaagttcaatctgtgccttgcctatttcttggttactcctcacaccacaaaggatatttgtgtgaacatcctgatggccgaatcataatctcaaggcatgtttcattcaatgaaacacaattccctgcgaaatcaacaactgttgatcccatacaggtacatcatcgtacttctactccctcatttacatttgatacttcccataataatagcaattccactaacactccttttatgatgccctctactataaatggtccacctgcatcatctattggagtgcctgagaattacacacctgttcccagccatgcaaatgccactgttgacacctatccaacacatgtcactgaaaatcccacccttactcctcccaccaatcccacaaacacaaatataccagaactcgtagccactaccatgagtcagactttaccacctgtcaccactcactctcagcagcctctccctacagatactcaccaaacaatcaacccttctagaacacacaacatggtcactcgtagccaaaatggaataaccaaaccaaaagccttctctgcaaccaaatttcctctccctgaagcatgtattccatcagaacctaaatcaacgactgctgctattaaaaatcctcagtggttcaaaactatgcaaactgagcttgctgctctaaagaaggctgcaacatggtctcttgtcccatactcccctggcatgactgttattggcaacaagtggcttcacaaagttaaattgaatgcagatggtagtctagatcgtctcaaatctagattggtggctaaacgatatctgcagacaccgggaatagactatgaagaaacattttctcctgtggttaaaccagcaaccatacgaattatactcactcttgctgtatctttggcctggacagtcaaataattggatatcagcaatgcttttctcaatgggacattacaggaaaaagtgtatatggtgcaaccggaaggattcattgactccaccaaacccaatcatgtgtgtcttctacacaaagccctttatggtctcaagcaagcccctagggcctcgaatcaaactctaaaggatactcttactcagtggggcttctctgcatctaaatctgacaattctctattcatctatggctcgggtgatcatcaaataattctccttgtatatgttgatgacttccttgttacatgccctaatgaagctctcatcaacaagttcattgctcagctcaatcagtccttctcattaaaagacctgggtaatgttcattacttccttaggattgagattttcagggatcatactggcatgtacctatctcaatccaagtatatcactgatttgttggtaaaactcaaaatggagggagctaagccctgcccgaaccccacaagtgcaagtgttaaactatctctcactgatggtgaccctctagaagacaaaactctctacagaagcacacttggtgccctacaatatctcactctcactcgtcctgatgttgcttatattatcaataaactcagtcaattcattcatgctcccacttcattacactgggaagcatgtaagagactgatgagatatctaaaagggactcttttacacgggttacacttcacacctgctacttccttaactcttcaaggatattcagatgcggattgggcctcatgtgttgatgataggagaagtactggtg

SEQ ID NO: 30971 - DNA, 1157 bp, Cannabis sativa
ttacaattcccatgttagattgtaatccttttagtattttgattctcatggtagtcttaggatgtataatgtgtgatttctagatagaaaagatctaattctaaccttcgttgtgattcttggctctttgagtcacgaagaacgcgaagaacacaaagaacgtattcgagttcttgaaaaatacatgtttagatttgacatataccttggccggccatggcagtcttgtttaagacctggctagccttagggggttaccccaaaagctggtcgacgtatgcctagaaataagattcctagctggcccttggctgggtcatgggacctgactggccctcttgagcttgggaaccctggtcggccaaggccaagattccaagtgggcaaccaacttttcatccttttttgaccttgctaagggtctcgtgacgaccatataggcatatacaactgtgatcttatgcaaggttcccttgggaactctgtataagacttggtagtgagtccattatagtcaagtgcacaacttaagactcaccatttgtctagtaaatatacttgagtcggtgctttgctgatacccagccttgtacaatgcaattcacctggaaggtatccttgggtacaattgactagaactttgtctgtagctttgtcaggttgctcacctccccttgtctcttctatgcatgtgatttcgagtgttggtctagggaggtgacaaccactgtgttgtaggtcccgtcagctttacttttgagagatagcattcagtttgtcccttgatcctttttgagtgattctggactgatagtaatatactatgaccagaacgaaacggtcatgtcgtagtgtgctaccgtatgaccctcatgttgccatggtggcaatgatgggtagagttggtattgtagaggaggccacacaaccccatgaagatggacattcaaaggtcgactgggtagaggtgcctgaggttgaccaaggggctgagagttctgacaccgagtctaaggtggaggaagttacgcttgttaggaggaggatgtacatgatttgggctatcctctccaactgccctctgggttcatatgatgtcaatgagcagtgtaaagaccgcttagtttaatttgaaaattagcagatatttagggttt

SEQ ID NO: 30972 - DNA, 1009 bp, Cannabis sativa
cttaaagataagagggagagtctttagaatcttctttccaatatggagggggttatcatgaataatcaactggggaggaggagcttgcgagggaggtggagagcctagagacaggtgctcttgaggttttctacgatttttggaaggccaatcctgaaggaaactttgattaccttggtgattccaagagcatgtatattgatttttgtgcggctcagatggccaaaaaaaaccacgaggcaactacctccacagctccagctgaccagagcaccgaagtccctatcgctcagaatgttgaacctccaaccccttcagaaaaaaatgatctgtaccaacagccaaggactcctgctgtctgaatgttttttctgttttctatatatgtctgttcaacccataggccttttttttttttgggacaaagtcatcggccaagcaatttttaaacttggaataagtgtttcatttttaagacaactagctgatcgagcagcctttattctcggtttaaccgtgcatcgttatctcttttcaatgaatacaactccttgttatgataattgtttgtgcaactgtgtctattttttttttagcttgttatttacttctaccaacgctttgtacgggtatagttgcccccaagttatcgagtagacttttgactattggtcacttgcatttcacaagtattgtttttgtttcttcggttccttggatttgagcagacctttgtatgcatttaatggtaaatttataacttgctaatagaattgacacaatatgaatttaaatagacatctttattcattcattggtcggaacctttttgataccatagtaacttacataatagctattatattcatctaatccgatcattagctaaatttaaataaaacaaattgcatttaaaagaaattgtacttttagaggtggtcatccgacctgagtactttgttatttcacccgaaccttagggtacggtacgccaagaaggccatttact

SEQ ID NO: 30973 - DNA, 1295 bp, Cannabis sativa
tccttggctgctaggtctagaattaggagaattagttttaagaactcaattttcactcaattatggtgattttgatattttgaggagatactgagttttgaaagcttgagtacgttgtatttatgttatagaattgttctagaaagtttgagcaggattgatgaaattttggtttggttttgaagtgaaaaaccaggatgttttcattgttgccagaaccggttgaccgattagtgaacttgtcaaccggttggccagcagggaaaaatcctagttttcttcgaggctagtttttgctcatagtgttttccagaacttagtttggggtattttattgatgcttgattacatattgatagtatttataccagatgatgaatttgtatgttattcattgttataatttctcgtgttatgcgatgtttgtgtttcactttcttttcttgttgagtctttgtgattcatgagtacttcgtggtgcaggtaaatgaaagagaaagctagactagccatgagtcagagatctctcgacaatgtacatatcagcaaccgcgtcttggctcttagtggacaggatccaccttttaatcatattttgaaaatgtaaccctattatgtaatagttgttttgaatgttgtaaaagtttataaacaagtagatccctgaatctggtagtattttcaataaaaagttaagttttaatttaaatagattttactaaaaagttttaattaaaccacacttgtcttaaactgttagtttattattataacttaatttataaaagtacacacgtggcgtccctgcggaacatagcgttacaacaaatcataccgcctttgaaagatcttacacatgcgacaatgctccaaacctcctaggcaaaactaccttagtaaaactgaaccaagaggcaaagcccacaaaaatgactcaaagtcaaagtcacaaaggataaagtggtagaacaccattattgcaacaacaaaaacaaaaaaaacaaaataaaacaaaacaaaagagaacaaacaacaaaacaacaacccatgattgaaaaaagccattaactagagcaacaaacaacaccacaaagagaagagccacctgagaaaaaagatgagaaactccaacgagtcttaccatcgccaagcaacatcaactatcaaaccaaagccatccaaacttccctcccacaaaccaaggacccagaataccaaagatagaccactggagcactcaaaatagaggcccaactctgtcatcaacagaacctaaccaccctaggaccctcatc

SEQ ID NO: 30974 - DNA, 1463 bp, Cannabis sativa
gtttggtaacattgagaaacttctttccaaataaaatctaatttatggtgtttctaggcaatttgaattgtaattgttacctactcgttgtgacaaataacttaccttggaacaatgttgtgttgttgattggagagataattttgtagttgagaagcaaaataggcaatgcttcattagtaacctgtttagagaagttttggaccaaaatgatttgaatagctaccatctactaacttgtttagagaagttttatgaacaattatggtttattcatttgcttctctttagcattgttgttagtatttgacatgtttctgttaaaataatagacacaagaaattctattagacatgcatttcttatatagctaagaagatatgaatataatatgaagaacatattgtagttatacagttgatttgggaatggttgcttagattctgctattttttttccttttatacagttgatttgtctatttctaataacaaaagatatcatttttaatttattacttcttcttcaactgatttatatgtgtatatgtatatactcatttacaattcatatgctattttcttttcttttctttgcagatcatcatcagataacataaccttctttctgagtattgagtatataattgatttctttcttgattatgagttcagttatagaatattcataatttgtgattaactcaactagagattgttcataattggtgtttggatcataactccaataatgggttctctaccagcaacagttccggagttccatttcccggactcttcttccaaacaaaccccaatccataaccaatcctccattgatgaaactacactcctcaaccttttcaaatctcaacaagatcacctcaatttcttcttcaacaatctcgacatttcccaaacgctaactttcaccagaaccctcctagattcctctggcaccgtcttcttctccggcgtaggcaagtctggctttgtcgcccgaaagatttcccagactcttgtctcgcttggcgttccctctggatttctttctcctgttgatgcactccatggtgatattggcattatcaccaagagagatgttttggttctctttagtaagtctgggaacactgacgagcttctaagacttgttccttgtgccaaggccaaaggggcttatttgatctcagtgacatctgtggaggacaatgcccttgctagggtttgtaatatgaatgtgcatttgcctcttgagagggaactctgccctttcaatttggcccctgtgacgtcgactgcaattcagatgatttttggggacacggtggcaatcgcgctcatgggtgctaggaatttgacaagggaggagtacgcctgtaatcatcccgctggtcggattggaaaaagcctcatcttcaaggtgcaatgctcttctatcaatctttctcttcattcattcct

SEQ ID NO: 30975 - DNA, 2407 bp, Cannabis sativa
ctccatctttctttctagttttacagagcccattaaagctaggaatcgtacgattttaagcccatgccactttaattccttgccaaaataatgatatacaagtcattgtagtgcaatggcataaaacaatttttatttccctaataattcaaattcaaattttaattcagaaacaagaacaaaaacaaaaagttcaaaagttgccagaaataaaataaagcatcaagatatgaagatgaattatatagttaaaaataatagtaataatcgaaaaggaggagatgtgtgtgtgagagagagagagagagagtagtgtactacatgttatttctctttctcagagcgagggatttagatatggcgtgattaggtgggactgctcagaccaaactctacaagaaatctccaaaagtgagcatctccacacacacaaacacataaaaaaaaaaccacagctgtaatttcatgtcttttagaggccacctgtactagaaatggtgtaagttttattatatatatttattttatttgagtactccttgtcttaaatcctaactcgttgctgtttctggggtcagctgagttttggcttgtaataaaaatatttgtcaagttatattttgggctctataaacgaggaggtagagactagagactagagaaggtgaggagagggttattccttttgggaggcaccttattttacttaccccaccccccacaccaccccacccctgaattttcttatttgtccttcttcgttacatcacctcaaaaatctcactgaaaagaaaacgatttataataagagagagagaaactaaacaaaacaaaagaaattttgatttatattatgttgtcattccgttactgctgaaacctcaccacattactctctgctctttttctattatttacttacacaaaacacacttgtttttttttctccacttaaataggcaaacttctttctctgtctctacgttttcatttcttcaacttacttcttcactactttgcaatattctgtttttactctcactgaaaaaaatgggttatgaacaagtgagtagtagtgtcgtatgcagaagccaccgcagcagagttcgttatttggtcatttgttttctgtttctctcatttctgagctctaaccaattcagattcatggctcaaggtaagtgggtcagactcaaaaatccaaaatatttaatgttaattatttatttcatcataacaacaacactactactaaacaatatattctcttttgcatgtaattgcaggcagagtaattcccaaagagaaaaatctttcccaggtgagaattaaaccagcctcacttatctccattatttcatttgttcttatttattttgaaactgaaagaaaaatacatgttttggtttcatatgtatatatatggataggcagtaagtgaaagtgaaaatgaagagaaagtgatggtaagagcaagaattggttcgaggcctccgaggtgtgaaagaagatgtagttggtgtggacactgtgaagctattcaggttccaacaaatccacaagtgaaatctggtacttccaaaagatctttcaacacccaatacgctagaggaggagatgattacaactctaactacaagccaatgagttggaaatgcaaatgtggcaacttcattttcaacccttagtaataataatcataactcattttcataccaatttttcgaccatttttcttcactgtaaatagcaatattaatatatttttaattttcttactttgatttttaactggcaaggtacctctagttttgtgtatcacttaagttattgataattgtacttgaaggaaatgattaacttaatgtttttttttttgataaaatatagataaatatttcagcattatattgacgtaattttcttttatttttactatatctttcttctgagagtgaactgcagaggaaaaacgcttgcattcagtttccaagaagcagtatattgagattcatataacgtaaaaaaaaaaaaaagaaagtattggatcaagtggaagagatgagaaattgagaaaagaaagaaagaagaaaataaataaagttagtttttttaaaataagtataaaagtactgtttatccctcactgctgcatgatctggtgcctcgactgcctactctgaatttttccacatgtcgatgtctagaaacttgttcagagatttgtattatagactttgtataatgtatgagccccatatccattttgtatattttgtataatgtaatactagactatataactccattattatttctattatctaaagtccaaagtctttttctatttttatctatctttattaaaaaaaaagaataatttttaaaagaaagaagataaaacaaa

SEQ ID NO: 30976 - DNA, 1732 bp, Cannabis sativa
tactagtactatgatttgtatttatgagcttaattggatattatctttactctatttgaaatattattttgagagaaagaaaagctaaaatttgtttacttagattccaaggtacaaaaagcaggcattttttttttttttaaataaaattgaatctaacttggtgtttataatatgtggacacagcgtattaggtgggattctgatcattgctggtctttacatcgtcacttgggcagctttcaaagagaaacaggcagttctggggattacacatcatgtaagtcgaccttctgaacttctcatccacaaagatatgtcggttaacaggttaccgtaccagagaggacacattttctcaggattatccaacatattatcaaaaccctcagattaagcagagaatatagaacatcataatgtaaaaaagccactctttcttctgtcaatgctacagaaatttttgttgagatgccataccttttctttaatgggggtttttatcaaattcttttaatggttttttgagaattcaatttaggaaatactgttagacatactgtgaaattcaaaatgcaatgcacatgttatttttcttgtgcacacaggcacagccacataatgcaaaaaagttttcaatttcaggactatactcgggtttcttcttcatcgtcgattaactcaaaaaagtgagtggaattgggcaatggcatttttttttgttctgttgtcctatcctagagtaagttcgctcaagggtatatttgttgtgtttcgtctatattcctttgcccttgccctccataatgaatagcttggtccccatagtactaagcgttttggtggaataagttcaaaagtggatcttggatgattctaagctcttctgcatttttcctcgactagtctctctctgtgtctctagtgtagccttgtgtcaaggggtttggacctacaatatctgacctcattgtcgttttacacttgcttgcttaattttcatgttacacactgttgcaatgaaattgttgcaatatatgtaaagttgtataatatttaacacacaactatctctgtatagatcgcttgaaataaattggactcactattcatttcctcgcaagggatttgctattattaaaaatagaactttatggagaataatatatatcattacaagcattatatctaatcttaagaccatcaagcattatataattatgctctaatacattgggtgtaaattaatttaaaaaattcaactttattatttatttattattaatgcttcataaagaattagtaaatataagatatgaaagtaaaataatatatttttctaaaaaaaaaaagtaaaatgatatttacacaaatgtgacctcactataatccaaacccacccaaagtaacaagcaagatcaccacgtccaccactgtggctgtacgaatgttttgaaaagaaaaaagtttttcttataaaaaaaaaaataacagaaaaggcaaaaaaaaaaaaaagtcatccatcttctgtatcaaattatcaatttcttacgaaaacctaaccacgtccgtcctccacatagtgtattagtcagaagggaacaaaaatctctggtaaaagtctctcaaaataacttgaggttttcttgtttgactgctggctcatggaaggtaactaatttgttcttttttatctatgattcatttatgttttctacgatcatttaaactt

SEQ ID NO: 30977 - DNA, 1775 bp, Cannabis sativa
aacataaatgacttctaatcttttattgataataaatcagattagattaaaatgggttttatttagggcataaaatcccaacttatacgaccataccccctagtcacaaggccccacctggctcggtttgcaaattaaacaagagcatatatggccttaaacaagcctcccgacagtggtactcaaaactcagcaccactctcattcaatatggcttcaaacaaaccaaatctgataattcgttgttcatcaaacataactcaacatgtttcttagccattctcatttatgtggatgatatcattgttgcaagcaacaatgcatccgacataacaaccttcaccaactcctttgacaaaaaatttaaactgaaagacttgggaaaatttcgttttttccttggccttgagattggtcaatctaaggcgggaattttcctctcccaaagacctttaacattacaattcctcaccgacacacggtatcttggtacaaaaccagcttctacccctatggaaattattatacgcaaaacttggctaccatttcaatggaagacacgtgtcaaattgggaaaaatatggatcaatgcgtgtaacggtaatcatatttaatggaataactcattgaatgcgaaagtaacagagtatatttataaattgctgactataaggtcttatgcgagataacgatatacaaactgttgcctcgtatattgacgagaaaccatacgacattagatgcgcaaggcgagacgtcaacctcgttacgtatgagtatatgtaagcgagatataatgactgtgaaaatacttagtgtataatatacaatatacaaactgagtataacagttggatgaacccaagcaaccaatagtaaggcgtccatctctccataggaagacatgcgcatggtatcttcactaatcaacgccaaacatctttcaatgacatccacaactctgttgagtcagttctctcaaatagaagctgacattcaaatgatgtagactgttgaagttcacctcgtcgttgaagaactgcgattgtcagatggagcgttatgtcttcagcgcaggagcaacgagatttacattgtcaacctcgaaaagacatgggaaaagctctagctcgctatcaaggtcattggaactgggttcttatcgagacatcccagaacgttatgatttataacgtgtttaatacacgattatcttgacccagtaaaagcgaactaatcatagctgtgtgatattcgaatattaaccgcatttatcttacgttatatgtaattaaaccccacgatttcaagggataattgttgtaaatatttcagtcaactctataattaactgtctgactatgtacttataaatagaggcaagttagattgaaaaagagacgaaaaaatcataagagaaaagccctagaacaatattagaaatctaataagaatgactcgtggactatgcagaattttaattgcaaaaccacgtaaaaaatcctttgtgttcatacttttttatattgttttttatttttctgtgcaaatttatcaccgttaaggctcatatctggttaacaaaaatctgtgttaatagtttggtgctttcattaagagccttcgtgtaaaagctctagaaaaaaccctccttacatataaaaaaaaaatctccttcatggctgataacacggagaacgttaacacacaacatgaagaaactcatcaccgtcctggaaaagagcccatgggctccagaaggccttccaactcac

SEQ ID NO: 30978 - DNA, 1599 bp, Cannabis sativa
  modified_base (1310)..(1312): a, c, t, g, unknown or other
  modified_base (1532)..(1574): a, c, t, g, unknown or other
tttggtgctttcattgagagcaataatataaacttgctctttacttcaagtttaatcataaacactatggtggtacaaactcgcagaggcgtggtcaatctggtggatctcctggcagtagatcccacactgtaaactccagggaatgcaatggtcccaccagccactaatcctgaacaaccaatcatgcaaccacctaccacaggtcaaggtgtgacgtctcctttggctggagtcacacccagtgtgcaagagactggaaacacagtttagcagccgatatgagtactccaagcactaggatcccttcagcaacaaatgtccagacaaccattggagatgacaccgagatccagaacctccgtaatgctcttgggctcatgcaaggtcatactaatactttgcatcatgattaggaagatcttcgtgctgtagtgaaccctacgttcgaagagcaaaggcactagtttgctgaatgcagggatagagagatggaaacattgaaggctcaacaagcagccatctatgaccaaagatgacaggatatcgtactgatacaaagagcctaccaagttgctaattagcaacctgcgtccagcatcctattgggcagctcgaacgaaaatccagttgggcatactgcccaaactttgaactgtctgccgtccaatccccggtcacagactccacctattggccaagcgataggcggccataccttatctggtaattcgtcaagtggggttatacccaataactctgctcagactagcggttctagccaagtgctcagccaaaccaaccagtcactgaggtaacctggtgctttagtatttaatagagtcagaatagctcatgatctcagggaagatttaaatagaaggagagcgttagacgaacaatatgttcaaccagccactcagcccggggcccacgttcaagatccagcttaaaaagatcttgacgtgacactaaccggccaagaggctgaacaagctcatccctctgtgcaagcacagttggatgaactgaaaaatattttccaaggcctggccggtcaaaagctcaatgatctcgagtttgactgagaatgtggatccccgtttactctagagatcaatgttatagagctaccccacaagttcaagatgccgacctggaagatgtatacagggaaagaagatcccttatcacatatcaagtattttgaaatgcaaatggacttgcaaggggtacgaggagatgtgcattgtagagtttttcctaccacactctcagaagctgcccaacaatggtacttcaagttgacnnnaggaaggttcaactcttggaaggccttctcctcggaatttcatgcacaattctcttcttctcgccaactcccattacatttagaagacctagtcgaagtgaagcaaaggccaggagagcctctctgagcttacataaatagattcacgatggaggcgacaaaagtggcgcggttaactgaagaagggaaattagcgaccatactgttgggttttatgccnnnnnnnnnnnnnnnnnnnnnnnnnnnnnnnnnnnnnnnnnnnaaagatcagaaataatattttatgt

SEQ ID NO: 30979 - DNA, 2672 bp, Cannabis sativa
ttcttctatattatcatcaactgttagatggtttttgtgaagattaatttagtaattgaaacaaacaaaaaaattgttatgtattacctagcttggagattgtatgtgtgcgtactacttatgatactatttgcttattaattttgtagtaatcctgaacaatcaaaacatttggaaacagcaaggatgcgaatatgcgatgtatggattgattttgttaacttaaggtgtgaagagtatagcgataatagccgtattcctacaacggtatatatctatatgagtgtatcattcttttacagtttttattataatgtgcatttgtaattacgtatcactttaaagaaaattgaaatgattttttcatagcattttaagtgtttttaatttgtaatatatgcattgttaattatatatgtgtgtatcattttataggtttaggaaggaatttttcatggctttttaatctgtcaatttctcagtgttttcagtctaagactgtttggtaaggtaaacaatcattgaagtttacttttttgttgtagcaaaaatacggcacagctgaagaggatgcctacagaagggatctaaccattaataggtatcattctttgatctgatttggcgcaaataagaacgatagcttgtttttgtttagtcaaattgattttgtttttctttcttgccgttatctgcttctcatggacctttttcagtttgttctacaatatcaacaccaacttagttgaagattacaccaaaagaggtaggtatttcattttatagtttatgcaggagtacatatcaataacgtttgctttcattttttctattggaaattattgattccatattgttatttgttgcttttgctgcatctctctttcctatattttttacacaggccttgaggatctgaaatgtggaagaattgtgactcctttgccagcaaaggctacttttatggatgatcctttacgtgttcttcgagctatccgatttggtataatcattttttctcatgtttatttttttacactggtggttgctccagcattccatggtcgcccactctaacttctataggactatttgttttttcaacttccaccgtctcttttattttgtattcctgtttcattgttcactttttcataccacttcctgtcgcttcttgttatttaggtgcaaggtttgactttgtattagatgaagaactaaaggaagctgcatcctgtgatgatgtgaaagctgcactggctgctaaaattagcagagagcgcattggtactgaagtatgttggtatcttagcatgtctcaagtagtagttgctcttaataagttaatatttatattatgtatctggaatttgaatttgaaacttgcaatttatttcaaagtttccacttttgggaggcagagatgataactaacaagttattgttgtgttaatatgcataatgtaggttgatcttatgatgtctggcaaccgacctgttaaagcaatgacctatatttgggatttgaagttattttgggttgtcttcaatcttccccccaagtttgagcctgcattaccagaaggatgtgacaggtgggctttctaatcatatttataaattggctatgatactgtcatcaatcttgtatccaaagttagcttatgtgaagtaggggcaatgggcagttctttcactgtatcaactgtgacatgagttttggtagacctgaaacccttttcacacaaatttattttttcaagacacccttgcatattatatcatctaggaactggttttttcctttttgtttttagttgacacaagttgactggctgacctaaacaccaaatagttactggctgggaatgatggtgaaacaagttgacacatttcctgcgtatttttttgttcatttatttccttttacttcttttactacttttaatctatcgcatctgtaaatttgagtgatcccttttatgtaggctttgtattgctaatttggatgttacatggaaccttatacagttaattggacgttcttcctttaatgtgagtggcaacatgatccaagtttgacggaaaactaatttataattttttttttatattctatttattatgctgttttacttgttttttaaaattattgatttattttgcatgtaattttcaggatgatcaaagaaggctgtctctgtttgctgctatgtttctcccaattaagggagacaatatataaagaaaacaaatcaaaagaggtgtaaatttattctcttcaataaacaatagaaaaaagtaaagaagagattgtcgttctgttttaagcatctgctaagttatgacatttatggaattccacgggtgattatctcatatcaaatgtttaacatcatttgttaatgttgacatgcattcaattgtgacaccattgaatttctgtcatctgttactctgagctaaacttctgttctacagattcctgtaattaacttcattttccgggactctcttaagcgaaaaaccagtgatgcagaaacggtcagtttgactctcctttcaattttagaccttattggacttcttgaattgttggctatattaaatccagtcacaatttcttctctctctttttttttttttataaaaaaaaaaaaaacagatagtaa

SEQ ID NO: 30980 - DNA, 1550 bp, Cannabis sativa
  modified_base (1395)..(1404): a, c, t, g, unknown or other
tgttactacccttctcaacctctccctttacaagagtgatcaacccattaaagtcacctacttgctgaccccatatccaaatgaaatagtaaaagcagaaacaaagaaaatggttttttgggacagaagctctaagcagttgatcgttgacgaatcaggctacgagaatagaagaagtagcatagagtttgcgtcctgttttgctcaagaaatctcagaaggactgctgctagaaggaagagcatgtgcagtgtctagtcttagcagaattatacacatggggtttgtgtacgaattcaaggaagattcagtggactacttgttagtcagagagaatttgaagatgttgaatgaagacaacgagtttcttggttccgcattccttgctaccaaacagtatggtaaaagagcagcacgagtgaaatcagagaaaatgtctcccttcacaccttcatgcaagaagtcatgcaggaggttattgccttgagttgatcctccttctggtatgacaatgccgttttttaaatgtgcctcttgttatgtttatatattgtatctcactttttgatgtcacttatgggactttggcttttttatggcttgtaaatactccccaaaagttaagcttctttgactctcgttgtgtaatttgagtcaatgtgttttgtattattagatttgccttgtcctagttagacttttttcttggttgcaatggcataattgcacattgactatttttagtgagcaagtcttctattctattctccctctaatacatattttgcttattgttttttgattgatgattggtgatttgatttaggcttaggcttgggattaaaatctggtttgggttatgtgtatgtattctctacagatgcaataatgcatgatggggtgggaatatattgaatttggagggctaattatggtgactgactattgagtgtttgagaagggtagttgttagaaaattcaagcctaaagaaaagagtagtagagagagttccttttgtcatttttggttagttgaatcagtatatgtagaaaatgtagtcaagtcattttgtcaatttttgctatgtgttggagtgaaatagaaaggtaaaagagtacagtcttagctaccacgtgtctgtctagttgcctaaataatacaacgactcacctcacctggtttactgctctgccaatggctaaagctttttgaccatttttgagtaatttgaggctaaataggtaaatttaactttgggttgcagataagtacttaagtttaatttttcacgataataatactgaagttagatttttagaacttccgtaagtagctagctattaagtgttaaaattattattcacgtgtcattttttttattagtatatttaaannnnnnnnnnaataaaaaataaaaaattaatgaccttgactaatagagattgttacgtgatcattaacttgacacttaacgattagatactcaaacattaaacatgcggcaattttttttttttctctctaatagggattttagttaggttccaca

SEQ ID NO: 30981 - DNA, 2703 bp, Cannabis sativa
tttttttaaggtaggaacatgtttcttactgaaaataattgtgatgaataatcgttccaatataactgcttcaataaattgttagaatacataaggttattttcttcaaggaataatataacataattttaaagtttaattcatagcaaaaacaccttagctccaatttgaaagattgtggctcggttgagtttttaaaagttatttttagatttcggaaactctaaaagtatttctactgctatttagttggtaattaaccaatcatttttagtttagtagtttttttgtgaaaatatttcttagaagctaaaagctaaaactcaaaatggacctcaaagttgatgtacatagcacttttcattgattatatagccaattgttacatgcaacatgatattcttgttgttactcaacacataacgagaatgagatatatcaaaagaaatcctaaggtgcaccatacctagatatagattagcctgcaaaaaaagaatctctctatccctatcctttcgttttctttctttacttttcttttcttttcttctctccgactgaataatctaggcattgatgacattgacggtaataaccactttatttattattcctttgtgaattagcagacaacccactaaaacccaatcttgttactttcatcacactactctcaactacctttttcttctttcttctttcttctttcttttttacgtgtccatagctagtatttctaattatgagaaaaagtagatagagagagaggaaaatatggaagatgaagattacaatataccatcattatctgctaaggattactatgataatctaagaaagttgtctccagaaccagatatagtagcagtggaaaaaggagaagaagataataataataataaagatgatagtaaaattaacaagacccttgttgttgtaccaacaagtttgtgtttggagatagtggaattaaaagaagaagaagaagaagaagagaataggagtagtactactcttacagttacaaataaccatgtggccgagggaagaaacgacgacgtttatgttgccgtaggtaaggatgactgtgatgttgtgaaatggacactaaactacgtcgtttctcctgctgctcgcctttatctcctccatgtttatcctcctgtcacttacatccctacacctggtcagtatatatattacattatatatatatacatgtactgcctatcagtacttttgcttttaaggatataataaattaaaatgatttgatgagtattatttttatcatataattatcacatccttagattcttgtctgttgtttatactctgttgaaagtttcttctttttttttttttccttttctttatttggttttaaagaccagagtagtgagtgaactaatttaaggaacatgttgtcacctatgttagctttcaaagaaatttatattttataatagtaatgattagtggagcaagataatcagcagagtacagttaagaagttgagagataatatatttatgtgtgtatatgttgaatcagctttaaaaaagtatttgattatagaaatgttaaaaagtagagtggcaattagtatttattgtggtctgaggcttaaatattacacactcaaaatttaagagttgaaaattaaaatccaaaccccacccattaaaaataattttagagcattgtaatgagacactcatggtgactaataccacaataaagtgtggctttacacaataaatttttttactttcagttacaacaaaatttgtgacaaaaaataaaaaagttgtgactaattataaaatcatcattccgatgatgtcactataaagtttcgtggctaaaagtatttttcacaaaaatcacaatttattgtgactaaatgtgtcttttgttacaatacttgttattaaaccaatagaaatagtcgaccaacaaccaactgatcaacaagaaacgagtgccagctgtccaaattctgttataactaattctagtttgttaagtcagttatatgttagttgtatgatccctttgtgatgacatgtctataattaagattctgcctcaacaagattagttaagcagctttttcattccatctaattcttccttttctctctcgttatttcactctgttataatctgcacctagtttctttcatagtattagagctatggcttcaaattgaccataagctctagaaaatgttcaactagctgctctagtacaagtttaagaagttgccttaccaaacaataacttactcccactcaatatccgactcgatcaaacaaattatactgtggagatcacttgtgctttctgttgttcctgcctacaatctcgatggatatcttcttggcacaattccacaacctccacaaaattttgcaggtaacagtcctaatcctgcttttcaacaatgacttctacttgatcagttcatcatgcatggctaatgaattcgataactgaaccatgcttggttatgtgataaattgtcaaacctctgttgagacctagacgatcttcactcaaatattcgccaccagatcgagagcaagacttctcgaaattcgtggcctcctacaatccacaaagaaaggatcactttccattgatgaatactttctaaagatgaagtagtatgcagatgctcttgctacagcaggcgc

SEQ ID NO: 30982 - DNA, 4290 bp, Cannabis sativa
  modified_base (282)..(287): a, c, t, g, unknown or other
  modified_base (399)..(422): a, c, t, g, unknown or other
  modified_base (3474)..(3479): a, c, t, g, unknown or other
  modified_base (4237)..(4241): a, c, t, g, unknown or other
attggtatcaaggaagctctctcttggagtaaagcaaatggatggtcacagattgttgttgagtcagattgtttaagggtcattaatgatttgctaaagttcaaaaatatggtttctccttatggctatattctttatgattgtatgactttggttgctcattttgattttgtctcttttaattttgctaagcggtctgctaataaggttgcgcatgccttggcgcgatcttctctttttgaggctgaccgtatttttagtagggactccttaccttttgtnnnnnnatccttggttttggatgatttagtttaatgaaatttaatcattattcaaaaaaaattattcaattaacctagaacaaataatattagtatttatatatatttaaattaattnnnnnnnnnnnnnnnnnnnnnnnntatatatttataaaactaatcctactaacacgattaaatttaatgaaatatttttatattcttaaaatattttattaaactaacaaaaatcgatacatagccacattttatatataaaaatatttaaattaatctaaaataaataatattaatattttatatatatttataaaactaatcctagtaacacagttaaatttaacgaaatatttttatattcttaaaatattttgctaaactaacaaaaaaaatcgttacataactaattttatatataaagatatatatttttttagaatatatatttagagatttaaaaattgtaacttgtacatgtaaaattttagtttataacaaaatattgtatgtgtataaatgcattatattttcaattaaagtttttcttttaacaattttttttaaaataatttcagcctgtagcccacctttattttttaagattttaattttcttaataattagtattagaaattatttttgtaatttggtgaaatctaatacgaaaattttgtgtcaattttttctttttagtaaattagataaatatattaccactaaaaaaaattactatttataaaatataaactaagtaacaccgcttttaaaaaggcatgaagatctttattataattccttaaactaatctatgggcctatttggtgcagcttttagaaaagttaaaagttattttttgaagaaaaaaaaattgtgataaaaaggtatttggtaagtaattaaaaaacggtttattgaagaacttataaaaaaactaaaactaaaaactaaataaggtacaactcaacttttagaaaaaaaaaaactattttagttaaaagactctgtaatgatttttttttactaaaaatatatttaattatttattatatattacaaaaagataaaaatatttttttaaaggaaaaacatatttaacataaataatatttaattttttattttgcttacaaaatattttatatttaatttttttatattattaacaaacaacatcaacttaagtttcttataacttataattttttacaagtgataaaaaatataatttaaatattataaattattttaatcaaaaatacatataaatttataaaataggaataaaataattaaaaaatatatagaaaatataaaaatttgtataacataactttatatatatttgtgattataatgaactagattattattatcattgtataatagaatcttaactactcgcaacacttaaatttataatttatcaaacactcaactcagttttttttcatagttatgctacagcagttttttctcacagcacaactacagctatgtcaaactggcattatatctttttgagcaacgtttttaggcataaagcctctacttctacttcttacatcaactttgattgtctttacgatagagtttattgtataaatttttaattttcaaaacatatcattcctccttctctacatgtaattcacaagtcaatattattatgacgaggcttgaaaaatcttcagatttacaggagtgtttgaaccctaaaatttttcttagcaattgaggaatgagattacaaccctttgcatgggttgatgttcttatatttataatgctaggattcttatttgcttttcactttgccccttgatggggtaaatcgtaaatacaaataacatattgatttgggctcatatggtagagttcgacccataaagtaccgacgtatgctgatgtggatatcacatcatattgatatttgtccaattcgtgtcctataattgtggataataaagacacatttaatgcttgatacataattactatctttccatattggggaagatacaatccgcgaaatagatcttgagagtgaaatcctaatatcgtctgacaattaatgagcatgatacggagctagttttctagacgtctgctgactacttctcaggacactccaaataatctcttccagattctcattgtgttggagaattatctcgcctagacgagttgtctatccgtcatccagaaaatctaacttcgctgttagacgagttgtaatttccaaagccattcacattttgagggatctctaaatttttatataaaccccttcttttatggatcgatctttcattaggtttgtccattctatggttggttttgttattctcttttattctactctgaataatttgggtgtcgttactcaatttttattgaaagatctttggttgatagtcatcgatatatgtgtaatttattacgtgttcattcgagatgagaatctaacatttttcactctttttatgattcattatgaatcatttagttgaagatattgttaattttttttttcctaattattataaatggcttagttaatctatttttattgattctacttaattaacaatatttgcatgtattaataaattatatatgatttacttattgtttggacatttctatttacctttaccaaagaaaaatgtcacctaattactttaattttttttagtagagttagtgatgaaggactattgctgaaaaaataataaaaaaagggactatttcatttcaaaagtgttgtaattgtaatgaaaggtgattacaatcaaatagtaaatggacaatgattattacatgaattacaaatacataacaaaattaaacctaaagagtgagtactattatcccttcctctctctctctctatttctgaatatattataaatataaaatttaaaaataaaagtagaatagtcactataaaaattattatttttagtgacaattttttagtttcaataatttttttttgtaattaaatgtaatttttagtcaccacataataattacttgtgactaaatatattatttagacacaaattatcattaatttaattttagccacaacaagtattgtccctaaaaacacatttaatcacagcaaattgtgatttttatgactaatacttttagccacggactatttagtcacaacataggaataatnnnnnntaattaatcacaattttttcacttttaattataagttttgttgtaactaaaaataaaattttttgtagtgagttttgtataaatattaattccattctcatactattgtaaacaaaataattctttcttataatgtttatttcaataaaccaaacaccaatattcacataattcattacgtactattcttattacttataccaaatactaccttagagttaaaataagagtaaatactatttcacaatttttattttttaaaaaattattttgtcaaataataatttaaattttttatatttttaaaatggtccaaaataatactttaagagatcatttggtacgttgtattagatcgtattatattacattatattaaatttaattacatattatatttttatataatactatattaaattttaatttatactaaattattatatatttttttttaggaaaaattattatatatttaagtactcattttacataaaagtattacataaaatataatttaatataatactatacaatacaataatacgatgtagtacgacgtactaaacaaatcttaattaagctcaattttaattaaaataaaatagtaagaggaccttggcttgaaattggttagatttgtattattttgacaaaatagaaagtttaaaatataatttagcaaaacaaaaagtaaaattagtaaggagacaaataatagattacagggaagttaattgggtaaatactattttggnnnnngtgttttgtaaaagttaccgactggaccctgtgttttgttaaatgacaa

SEQ ID NO: 30983 - DNA, 2884 bp, Cannabis sativa
gttaactaattaataagccttttttttgtaataaatctgacacagaaattataagaaatttgagcagaataatagatacaaaaatgacaccaggtatttacgtggttttgcagttaactctgcatagtccacgagtctatcttattcagatatttctagatacagaattagggttatacaatccgtaaacatcttttttatctaagatctttcgtcccatttctttgtataatctgcccatatttatagtaagataggtaggcagttaattaaatttaaatttgaattccattacaatatttcccaaaattgtgggctttaattacgttccatttaaacacttatagataacattaaaaaatcacacaactatgacttaaactatttttaaggcagtcaacgctgacaggaataggaactcccttccataggtatctcactagaggtaactcgcattgtacatagatgacttggtttatatgcattccagcaattgcatgagctgcagtgtactaagcaaacttaagaactgctctttgagaataacgccttgcagactggacaatcatgtcctctaagttctcaagttattacacttaattattataacgtgtactacacgctaagtgttctaataactgattcgcctcgtcaatacttctttacatacaacgaggtagatgcctcacaatgtgttgtttatggccccctcggtattatgactttcgagacaagatagtttctcgtcaatacatgaattgatagtttgtatatccctgtctcgcttaatactatacatacagtcaacgagttacgaatatactctattaattccacatttaatgagttattctattttacatttaatgatataattatcattatatttgttaattcatatttcctgagattgacacgtgtcactttctgaagtacaactaaatttcgggtataacaaatttatgtttcagtgttttaggaactgatttcttctttattttttaattgtaattggtctgagttattgcgttttacttgtttgtattcattatgttatataaccagttctattttagttataaagagtttgagttatttcgtgatatttatttttattcattgtaacactattatagaacaaattctattttaattataattggtttgagttatttagtgttatttatttttattcattatgttgcagaaccatttatatttcagtttgagttttttatttttattaattatgttatagaaccggtactattttagttatatttgagaaatatacttctagtgacgttttcagcgataatgacttttccgatgacgacgacttttctagtgactttttcggcaacgacgactttttcggcaaaacttattattaaaagttttatcaaatttatttatagttttctccatattttaaaatttaatcatttttcatcctatatttttttacattatttatttacgccatataaaagtaaactatactacattttctcatatttatcaaaaaaaaaaaaaaaatccctatatataaacttttttaattattattacaataaactaattttattagaaatgtactaatttttgttagaactttaaattttaccttagttaaaaaataaaaaagagaatattctcatccaaatagtatattcttgttacattttaaggaactctcatctatttcatctgaaatatgaaatgtgttcatccttataagtaatctacatatttattgtgttaaacaaaaaaaaaactttaatatctataaaacattaaacacagtcaatttaatacgtaaaaaattattagatacatggtatgatgcaacattttctatttgaccaactaaactttcttgaaagagcaaaattttaccataaattaatttagaaggaaatatgtactcatttatatatgacagctattaatctgtagtattttgactaaatataataaaataacatttgcgtcttttgctaataacaaaaattaatagcaattttgttggtaaattatcttataaataggctaatacacacacccattttcaacaattgaactagtacaaaaggagattgagttacaaacctcagaagatggcaactaaggtgtctcaaattcattttgttcttctagttctcttagtgtcaacattcttgctttcatgtaagtactactaatgttgcatgaataaataattttattttattttatttttctggttatttagtgcatgattatcatcataatcaatttttttttttcagcacacattggaatgtgtcaagggaagacatgcactgccggtattggacgatgcagccagaactgcaatgaggaatgttgtgaagtaaaatgttggactaaatttggaaactctgggaaaggaatgtgttataatcctggtgaacttggcaacgtttgtctttgcagttatgattgttagaatacacatgcagacaacttgatgtgaaataaaatttgagagttaatcatttaaattattcatacagtaagaaatgcatgtcttcatttgagttggattttgttaccccatttttatattaatgttagccattttgtttttgaatgttactagttccctatcctttgttatatatcttaccatttctgtggaaacctttttctttttctccttcaaaaaatggtaaaactgaatatgatcaatatatatttcattatatatattgaaaacaatataaccatgtactaaaagaaattagtgatgtaaaatttatatattttaatgcaaggaatatactagtgataattttagttgaagaaaaattgcaaaatgttgtggtcaaaagtataatctagtggttttacactttttctc

SEQ ID NO: 30984 - DNA, 1472 bp, Cannabis sativa
cttctgtagccgtgttgaaggtgccgagccacaggcgcgcgccgcggtttggctttcggatttcggccacccattttccccatgtcctctgcctgacacctatgaaaatgcacttcgcgttatccgggcctccttttcctttcatcctcctcttcctcgaccgctctattgctggtttcttttcatcatcattactaatattaatattattagtattatcattattattattattatcatcactctctactttggagtgcttcattatacatataggctgaaaaaacaaaagcccttctcttccctttctctctctgttaagttaagccttcatcaatattatatatgttgatgtgtctctttcaaatttagcttagctagcccaccttttatatattatgttatagataaagaaatacaatcttgaggtaagaacaactattgctgtagaagcgagtagtgtcacaaatgtcagtgactgtgagtaacagaaagctttgttccaagacctaaaaatataaagtatttattgaggaaatatagcaaagcaaatccaattgaagcaacttgagcaagtggttctcttagtaggcatggtcaacgtgtacatatctaagcaggacacctggattcagatattttgtcaaacacctggccaactactgaacaaacacgtgtcattttccccaacccttattctgagactacacaagttttctcgtgttatatatattatttatatataattcaatacttttaattaaacactttgtgtttttgtgaggagatttttgttatcctttattaagtttcgggcagttgttgcatgcgttaactaccatgtgtgtgcactgtggagagggttagtgtcgcaacgagctaccataagctgacattgcatatgccaccttggctgaactcggtttctcaaaccgaaaatgaaggtttttgctttatatattttaaaggaaaaccaacaaggcaacaatgtaatatgtaggaataggataaaatttataatcaaagtatattatattcatagtattatatattttgatctacggtgtgattctgtttcacacatctaaatgagttaaagcctatctcttttatagtcacaaagtactttcttttgatagagtactgctattacgttcttaacatcatatagagatatgcacattgtgaatatttaacagtttattatgtaagatcgtgaatgggcagggctaattcgactagtatatttatctatactttttaaaaaatagatcatgtcgtgtcacagaaaaatatgagtcgtattgtgtcgtgtcaatattttgaaaggttaggtccgacactgctcgtaagcccacactacaaaaaactactacttttggtgacaactttttagtaacaacataactttttttgtgactaaatgtgacttttagtcacaacaaaaatacttgtgactaaaacatactatt

SEQ ID NO: 30985 - DNA, 1782 bp, Cannabis sativa
  modified_base (1372)..(1378): a, c, t, g, unknown or other
aaactaacatgaatcaaaaaattttcaaaagcttaaaaagcttgaaacttgttaatggcaggtacaaaaaagagacacccaagaagagaagatgagatgtatgtagatagagaagatcaaagattcaaaagcacaccaagaaaaaagccaacacttggctagataaggctgctcaacagagactactacagacaagacgataactagaaagtccctatccgaccagacgtttaaatagggacttagggggtaaatgttatcctaaattttatccaacacttggctagataaggcatgtccacgtaagcccaagatagagtacatgtggagtaaaaccccggcaatagcaaacaaagcctccgtgcaagatatagcaaaactgtcaaacagtaatcaaaggagtgaaggagccctcaaggagttgtaccaatatccttggctgaccaagaggagtctataggctggttagggtgagcctataggttggccagggtctttgcacaagctggccaaccaagaagtgacttttggaccaaaggagcctccgtttgaccaagggaacctaacctcttcaagaaaacaatgcatgaaattgtcctcaacttggaaaaggctagcctccaaactcaaaggatggcctcctcttggtggagctataatgacctaccagttccaataggccttgtcctgccaggtcttagtaggaccatggccggtaaagattgacttggcaggactctatgtacaagcccaaaatgtggacacaagacatgggcttcaaattgggccataaagtcccaaaaaattggctgaacaatatctagattcaagggcactttagtctattgtatctctctctctctctctctctcttgtatatgctcaatagggctctctttctctcttctcactttgtctctcacatgcctctaaggctgttcatctttctcattagagatctactaacttgattcatgttttgtatccttatagagagctatatcagatcccacctacagcgatctatgtagtattatctcttggtatcaatacaaccaaaaggggagtaggtcattcccgctatcacaagggggccaaacctccataacaaatctcagtgtttattacttttcgttcttgtttgtgtaacatgtggcaagcatcagatccatacaaccccgctgtcggttgatcactttttgaggtcaacagatgcatataagaagcccatttaattttaatatttaaatggactaagttgctataaataaaaatataatcatgatagttttatttaggcccaattagtgttgagcttattcaactaataacaattatttaattaaatgttaaattcttctcttttgggccnnnnnnnagagttagggggccatagtagtgggtatgacatactgaacccatccctccctcacatgaaccacccaaactgtgaaggcacatttaccttatttaaataattgtattaggctaattatattagtttaacctaattaaaatttattagcaatataattaatttttaaataaaagaaattaatttttcattagattattttaaaattaatttagaaaacacgcttagtttaatgaaataaattctagatagttatttctagtaactaaattatattttctaatatttaataaattagaaaaatatctttaagttaaaaattaatttattaagtaatttttgatcaacttaaatttgaatatttttcttagatattaaattagaattaataattaagttaattttat

SEQ ID NO: 30986 - DNA, 1530 bp, Cannabis sativa
tttgtatccttatagagagttatatctgatcccacctatagcgatctgaatagtattatctcttgatatcaatacaactaaaaggggagtaggtcatacccgttatcataagggggccaaacctctataacaaatctgtgtgttttatactttttcattctatttgtgtaacacatagcaagcaacagatttatacgaccccgctgtcggtagatcactttttgaggtcaacagatatatgtacttaataaagaaaatatcatcgtatccattttccatgatattgaaaagaaaaaaaaaagatcattcataaaattaaaaagaaaaaatcactaataaaaaaacaaaaaatattttacgagcaaaaataaaaaaacatagtacaaaagatcattttaaaaaataatagaaaaaaaaatatcattcataaaaaataaaaaataaaagaaaagaatagaaggaaaaagatcattgttattgatgacccaattaaggaaggttgaggtataagacccctataactaacacacggtctctaagattgtcaaaatgagcgaaggtgtaggaaggaatctggacaatgtaattctcttagttttgaataaaaataacaaaaaaataacaaaaaaataaaataaaaaaaattaaattaaataataaataacaaataaataaaaattaaattaaataaaaaataacaattaaaaaaataataattttaataactttttctattccaattaatttttattttatttctttacaaattatatccaattaattttagtaggctgattctgtaaaactgcaaccgtatacaaatttttaattaggttatttgtgtttaacattattagtggtgatttaaggggaagaacatgaattaattatcaacttttaaattctaaaaatccatgtaaaaaatctgtactcctcaagttatatgttagtagtattattataattagtgtacctttaataaaataaacagataaacgtacgtacgtatatatatatattctataatgttattctaaatttgtatgacaagttaacaactaattaagtttctatatgaatatatccatgttaaatgaaaccttgtttttgtagtatcccgggtgttgttcttattattagctagcaatacgtaatataatatgtattttctttatcagaagaatacgtgtgtattttttatcaaccttaataagctaagaaaaaaggctgttctatagctgcgtatatttatttatttattgatcttatcctaatctggtatattttttttagtcgtcattctaatctggtatataaaatataatattatattgattgcaagaaaaatgacaaatgtcagggtctataaacaaattttatgatctgggtatgttatggtttgacacgtcattgtcataaggccacttttgaaaacaaaaaagaataaaaaataaaaatcgtcccatataatctagtactacccaacttcgatttatgaaaatttacataataatttaaatttttatattc

SEQ ID NO: 30987 - DNA, 1230 bp, Cannabis sativa
gggagataggcccattacaatagcccaaacataagcccaatccaaaagcccaataacacaaattactgtatcatcaaattagggtttcatcttatttctcatacattacagagtggaaactgaagacgaacttctttccgtctcttcttctctttcggagctcaaggtatctatctcataatctctatggtagaatatgtatatatgggttttgtttttagaatgtttttgataaagttgaaaaccctacttattttctttcttgtctattttgttcttcttcttttgctgtcttgaatcgcagagttttttaccaagtaatcgaaaatggtgcagcgtctcacttatcgctcgcgacacagctacgccaccaaatcgaaccagcaccgaatcgtcaaaaccccaggtttgttttttcacacacacccactaatcttaaccttttcaagtttctaccatttcgttatcgaaatcattgttgaatttgtgggaagatgtcgtttttttgtttctgggttttgcttattttgtacattttccatcattaggtgggaagttggtctaccagaccaccaagaagagagctagtggcccaaaatgtcctattactggcaagagaattcaaggggtatgatgatttttctttataaagtacctgtgaaattgagctttaatatggatttgattttaggtcatgcataatgcgaatgtacatattaattatcaatcgttatattagatttcacgtctatacatatgattacaaccttaatatctagagtttacttgataaaagaacacattttcatagggtagcatttgtgttctaggaaccaagatgaagaacttggaatttggtttttgactcgtgtgtgccattgctcgcatttgaagtctgccattttagcttgtttatcgtattacttgttctagtgtttagtttatgtgccatcttttttgggttaaggcctttcccttccacaacttgttaatgtctaatttatgacttgttgcagatccctcacctgagaccaactgaatacaagcgctctagattgtcgaggaaccgtaggactgtgaaccgtgcctatggtggcgttctttctggaagtgctgttagggagaggtatgtaactgttaatgactagtcacggtcctcccatttgttatgtccaagttgaatgttctcttaagaaattcatgttgtgcaggatcattcgtgctttcttg

SEQ ID NO: 30988 - DNA, 1568 bp, Cannabis sativa
atatataattattacagtttgtttgccctgtgttgctgtttctgctgcttcgagacttgtgaatgttgttttgatgttctttgctgtggctgctgttgatcaaaatacacatacatatatatatgtatgaataaagggtgttcatcatttcatgattttctttgtgcatttattttttatctttttggatttttttttgtaacgttaaaagaaggaaaactagaaaagatagtactgttcaattcacagcagtgaatgatgattaattttatccaatcttctttcttccttttaattttaccctctttatgttaatgttattgtgtttgatgaataaaaagaaagtatatgatgcttttaatgatgatatgtcttcttttatcagcaatctcagaccacaatgatagtggcctacagtaaataagtcatgagtattttaatcttttactgtctttataatcaattttcaccttaatttgcgtttcatatttttatgatatgagacacactggcagagtctggcatcagtcatcatgtgcccttcattcaaaagttcatatatatccaaatgctcttgagcttcaaattcaggcttttttttaatgctcagaaagaaccacaacaatgtttttttttttaagattgcgttgggtcagctaggaaaaaaggaaaagagctgaaagtaatactgatgagtatctatatggggtgttggaataaacttaacaggaatagtaagtactatcatatatgatttttttggaataaagttaaccggactagttatgaactttcttttaatgtaatggaatatacttggtagtttgattaaaacatgtaggaatttggaaaatgtgattaagattaaaactacttttaatcttttaactaatgaaggtgaaaatgagtgttagagtattttttttcctgtccaaattaaccatcataaacaaaactggactggataaacaaaattagtattataatagttgtattttctctctcaatttaacacaatgtttggtaggagggagagagatgggagcaaatatctattcttcttgtttggccaaatagatttgagaaggaaaagaatagttagatggagaacaaatccttctaaattctcaatttagaatctttctatggaatcacactctcccttttaaattgttcgaaactacaattatattttcttaatatgtcattaaaacattatttataaggactacataataattttagaaacaaatactcttcattccccatcgttttattgttttctaccaaacaatttaaaatgattgctacttcactttattatttatccctcgtaataacagagtaatgagataattaacttgtaactaataattaccttgagtaaaaaattatatatcctgaaaagaaattattattctgctctgctgccacggccaaaacttcaggatatttttctaagaaaaataataaaaaaaaaaaattacgagaaatgttaaaaggcactaatagtgtctaataggggtgggcatccgatccaatctaactttttttttcctcatccgatc

SEQ ID NO: 30989 - DNA, 4028 bp, Cannabis sativa
accataacatagttccgccactgagcatgcgccacaacatgcgccactacttgaccaccacttggccaatttatgagtatcacttagcttacaacataccatcttagcacacacgtaacatctagcaaagctcgacgtaaaactttatacaaataaaactaaatgtaaaatggtataacttatgctactagagacttggtatagtatttagtttttttttattattatttttgttgttattgacgctataaagtggctaactactctgcattgtctaattgaaaataacaagattaatataagagaatagaaataaataagattaataaatttatttatactacatacgacaacatcaaaaatagttcaaaacaatatcaaattatttctaaaacatttatcgtaaatcttcagaaattaataaaaaaagaaaaaaagttacataaaataccactattttattttttatttttttccttttttatataaatagatatagttataatgatgtacatatcgtcaatattattgttattaagcattagtggtgtctagcactttctcgatatatcacgtagcgattagctagcgatacttcctaaaagctattatattaaactatgtacctagttgaaccaatagcgatactgacacataagagggtgttaagcaccactggtgcttttaagtatttctctttaataatcaccacatagcttgtccaatatatatttatgcatgctgtgtaatgctttaaatgatatttttgcattttcaacgtatacgacaacccttatataggagtgacaataattggatacgtatataaagctctagctagctagctataaatttctataaataatttaacaaatattatggcagaattaagcacatgaaagtccagagacgaagctcaaaaccatgcaaaaagtccatgcaaaatttaaagctgctggaataggtaggagtagtcattcatgaaattcattagaaaagcagcaatgggaacacttagctggccattaggcattggccagagcaagttgtgacatgtgggccagcagcaaatgtatcagggtccctttgcctctctttttcaaattacagttgggaattctggactgcatttattaactgattgtcgaaacacggttttgaacttttatagatgagaagatgcaaaatatttaatattgaagatctatcttctcaactgttctacggattagttctatgatctggtaatcttacatctattatatatatttatacttacacatatatttatatatatacaagtccatttctcattatactcactccacttaccaaattaaaaggaacatctttagctttaaatattatattctctaattgttcaaaagagatgacttgtaaggttcttcttcttgtggttgtcggtgcttttatttgcactagtacaactaatgcaaggaagcttgggaatgaaaaagtttcattccaggacgagaaaaactttcaccacggtggcctaggaggtggaggcggtttaggtggtggcggtggcggtgggttgggcggaggtggcggtgctggagcagggggtggatttggtggtggtgctggagctggagctggtggtggactaggtggtggtggcggattaggtggtggtggtggaggaggctttggtggtggaggtggtggtggagccggaggaggctttggaggtggagctgggtttggaggaggtgctggtgcaggtgggggccttggtggtggagctggaggaggtggtggaggaggtttcggagggggtggcggaggcggacttggtggtggtgctggtggagggtttggtggaggtgctggagctggaggtggtctcggaggtggactcccttaaagtgaggagcatgcatgtatgagtatattctcctaataataataattatttattattcagtgtgttacactttattattgtactctccaatatatttggtacatcaacaatatgttatatatagtcattaatgtttcaatatatcgacttcattctccttttcgatctgaattgtttgaagtgcaatactatcccttattatttttttttatataaataaagagatgatatattacttcagaacatttttacaaactaaacagtacttttttaaatccaaaaaagcctcaatctattacaatctttccatccaactcctatcctccttgctcacttcctttgacacaacaaaaatattaatccctattctttacatcatatttcactttctttacaattcaatccactgtaaaaaactttagtattccataaggcttcattcttatttattgtgcacattgtcccaaataaaataaatagtagataattgagtcatatataaaaacatgagctactccactcattaccaattgattttgaaatggaaccacatgattcccaacatgatattagagtcatatcttgcgagcaagtgattctattatacagatagtgactatgtctactctaatacagttcaagattaatgaagaaaaaatagcaccatcttaagcgaaaatattgtggacattgtcccacatagaataaaaagtagataatgccaattaggttttaagatgtaatctcataattctcaacactatttaatcatagtctgtactcaagtattgcacatgcagccatcaaaaccatgcacctgcccttgaaaactttacctccagaaagccatcttaccatagttttgatatatatttctctttgttctccatcacaactaaacttcaatttcaatcaaacatttcatactaaattgacaatcaaaatatgccatcatttagcacgtacccaatattttgtattagctactatattaaatttgcccaaccttgtctttgtatgcaatcttccctgattttttccatttgggttccacgagactttttagcgcaagtactttattttagtatttttgataaaattacgtcaataaaagcatttattttagtgtttatttgacccataaattattttttatttaagttaacataaaaggaaaaaaaaaattatatatatagtaggaaataaaaaaatatatatttaatttataatttaaaatttcaattcgatacaacattttacatttttatatttataaataaaacaaaaaaaaaacataaaatactataacaaatttttttttacaaatatttgatataataaatttatcaaaaacaaattatcatgtgaagaagtataatcatataactttaaatatttgaaaaacaattaattatttatataatgagctttgcatgtactttgttcatcttaaaaaaataaattaataaattacatatagatagaataaaattattaagtggcctgctaataataagggattatttcaaaaataaccaaaaaaattacagaattaaaattaaaagagatgatcacctttttaatggtagataaattttttagagaagaatatgtttttttagtattacataacgtaattattaaaagggaaatttataaaaatattaacttttggcccaatctttagaaaaataccgcaacacaacagaaataacttttatactatattagcccttttttttatactgtaaacactaaaaaaaataaaatgaggcctccattttccacacccacggacaaccactataggaacatcagaacaattagaaaacaattattaattccagtaagattgagaaaaaactatgaaatcgacgtcaaataaatagtcatggcaaaacaactgttaaacaacactaaaacaaatctagcaaaaaagaaaagaaaaaaggattaaaaaaaataacaatgttctgcacagcatcattaccagatgcaatatcagctatatttgcaagaccaatcttaaaaaatcagaataaaaaaactactaaataacacaaaaataaatgtataacaataaggagatataacaacttagaaaaatataaaagaaccacacacacctcaaaacttt

SEQ ID NO: 30990 - DNA, 3547 bp, Cannabis sativa
tgtatgcagtagtggtcgttgattattttactaagtggacagagggcgaaccactggcaaccattacttccaagaaaattttgaattttgtaggaaaaaatattatatgttagtatagacttcctaaaaaaaatcagacaatgaaaaataatttgacaactagatgttcattaatttctccacgacacatggggttataaagagtttctcagtagtcacacatccccaaacaaatggacaagtcgaagcagtcaatgagacactaaaagacactatgaagaaacaactcaaagaagtcaagggtaattggtcggaggaattgcccgaggtactttggtcgtacagaacaactgagaggacgacaattgggcaaactctttttactatggcttatgactatgaagcaatgatgccagttgaactagagcctctgtcccacagaagattgatgtataattaagagactaactattccctcctaggagagtcacttgatgagattgatgagaaaagagatttagcaaatctaaagctacaagctcattaatagaaagtagctcggtacttcaacaagcaagcaaaggcaagaaagtcttttgtgagggacaaggtgctcagaagagtaatcctaaacactaaggacaatgcatcaggtgtgctcaggcctaattaagaatggccatatcaagtaacggaagttacaaaatcaggagcatataagcttggtcggtatgatgaaaatatagagctagttctagtaccatgttattggaacaacgagcataagaaaatactatcaataaatacaacaagtccgaggaccatataattgcataatgatcgaacatcactcttaagtaatggccttctgagtggagctcgttcaaaggttcaaaaacaattgatgctaaggtctaatgaccaactatatgctaatttgggccttaggtaaaaataaaaattggggcccaagtgaaaaagtgaggttgttgggatatgaactctaaacctcttaattattattctaatcaaattaccactaagctactgtatatatatttagtattatgagtattattttttattatatgaataagagtgtacacataaactgtccatgttggcagtaagctagataatatggaacctcattcatcttatcccaaattctaacatagtattagagctacttgtgattcgttgtgagtctaaaatgccgccgatccaaaaagatgagctatagaaaagagatgtttgtgatctgttgtgagctcaaagtgccaccgctccgaaaagacgagtcaagtatctcccctttaatctctatttataacttttcggctaatgtgtaacctgtttcaaaatttacaaattttttgacgtatacatccacaaataacaccaaaatttaaatttagacaattaagtgaattgataattgagataatttattcgaaaagaactttatattaaataatacaatgcaaaatttatcctccttttattcatccagagtcacatcacgtgtatcttacgtgcaagcataattagttaaacatacaaaattaacaaatgatgaagcttctatgtctgtaaataacagaggaagaagagtaaagtcggtggtggtaatggtggagtggtggtgatataatccatacactgactcaagctgatatctttttcagatttggaaggacccatttgagaatttcacaaaaatgggtggtgggttcgctttacgctcggctttcgattccaaatctggccgactcattatgctcttactcttagtaatgcttgcttccttctacgccggtaccctcttcggaaatcaagctcccatttacgtttctcagctcgattcccacaattcttcagcttcttcatctcttggtgcgtttgttaaaacttaaagcctcgtctttttagtaaatatatgataaagattcgatctttgtgtcatgagatttagtttcagattatactttttggccatatttggatgtgggttttattgggtttgagctaatttttcttggttgtgtctcttcctatgttaattagtttgattttgggttgtcagattgaattgttttgagggtcttttagtagttacctaagtggggaagcatatggtttgtagatcttgttgataatcacattcaatgggatgggctatgctatataacaacttgatagtggacaatgtggattgttttgagctgaatgatgatactgttttgacttactttcccctcttgcttggttgataatcttagctttttatggggtccattgttatttgccagtacttttgatgtaaggttatcacttattacctaagaaggatcattagtgaaacttgaaatggctctttagttttgatcacagaaattcttgagtagtttccaaataatttttgtctaaatgacttttctctttagatctaaaagattatgaactcaagtaggtgtgtatgttttgaattaaaaattaagcaaaagcttgtctttacacatgtcctaaccagtttaccagtccatcatcatatatgctaatttataaaattctaaacaattgaaagtcatttagatttgagacgcatttagcttatgatatttaatttaatgcatattagatgaagtagtctgttatatgggattgtgcagataggtttgcttccttgggtcataaaaattacaatagggtgtggtggagcttgtctcctgattctttttcggttattagggattgcttaggtctcattttattcatgtaattagtaaattatttcctgttttcccttcctgaaatattattctctcctgtttctggagaatttttgtggtttgggtattttttggattgctacactcctaataatttgtgatcatttggtttttttgaaggagtcggtaattcatcgtctacaaaccattcgttgtttacaaatgaagttgctctttcataccgaagaacgccaactgagatacctgatagtggtttggatgtatgcccgttgacatttaacgagtatatcccctgtcataatgttacttatgttaagcagttgcaaaacttagatctctccagaagagaggaacttgaaagacactgtcccccacttgataagagactgttttgcttagtcccgccaccagaagattataagattccaattagatggccaaccagtagggattatgtgtggcgaagcaatgtgaatcatacacatttagctgaagtcaaagggggacaaaattgggtgcatgacaaaggtgaagtgtggtggtttcccggtggtggtacccatttcaaacatggtgcacctgaatacatccagaggtacctcttgctataatttttcgtttttaataattattcaaagaatgtacacaatagatttgctgttgtactagtttgtatgttattgcttatgagcacttagcatgagaattgaaaatatgatgtaacaactaggcctttttataggatttaatatagagggatcggcttagaatgtgaaatttctattattatcaaa

SEQ ID NO: 30991 - DNA, 5987 bp, Cannabis sativa
  modified_base (583)..(584): a, c, t, g, unknown or other
cctcgcctgagctagagtcagcgagatgatgcgaatatgatcaaagtctaaacgcattcgtgtgactcgcattatgtgggaccaaagaacggatctaacttgtatgtaccaggatatgtgcgggtatcctttctatactcctgcgaagacatagagatcgattctctataatgcgagctagtcccggtgacccaacaacctcgataaaccaatatagactcatgcgtctaggttctatcagctcaatacacgatctccgcaaatgcaactatttaagaacgcaggcatcttagacttaaccaaatgttaggtatatcctaagcccgcgagcttacaccagaatttgaacagccaactcaaacaatagaagtcgcatacgttgctatatttagtgaataaaaactgttattcatttattagtgtttacgttttcgtttaattattgtgaatcaatgtacaaacagatttacaatgaatacaatcctcgtgtaattaactgaaaacttgctttgtatataaaggagtgatctaccacgaaatgagacctacagaactcttacaacagtggactaagcagaccgtnntctgactgaaccactataatcctttgtcttcttgttatttcttctagttttttgctaagtacttattacattcccagctcgtaggtgttggaatatactcgcatttgttcttcatataatttcttcttattattagtattattatttatttttggtgttgcaaattttactcgacaagaatttgattaatttgtttacgtattctaaacttattgagaatgatagtgacaattgtcaatatgttacaatgataacattaactttgaatttagtggtgattagaagtaaaatgttatgatacatttatgaaatcataggttgacttttctatagattaatcaattgtatttttttattaggtgtatttttttaatttctattattaaaaattatataaaaatatcaagttagcataattttataacttagttattacaaaacaagatgcaacaacatgcaaagcttaaattatttcctagttattaaatgttgtatcttcttagagcatctccaatagtaaaattttaggaaatgcttactgaggtggatagataaagtgacaaaatattgagatgctatatcattagagagaaaagaatgtcattctagtaatctgagtgaatgctatatagtagcattgatgctatcattaattttttaataaaaaaattaaaactaaaaaaattattgttgctaaggattaggaaatttataaaattttcataataataaaaaagatttgtatatataatagcgtttacatatatagttacgcttttaaaaaaataataatagtaaaatattaaaaataagtatatatatatataatactttaattgtgtcatagtgtttattaattatattatttaatgagttatttttaaatttagtttattttaattttatagttgattgtttgattacaatttttttttattgaaaagttagtgtaacttatttatttttttttttttttttttttttttttgttaagaaatttaaattttatattatatttatttatatttatatataatttttataaatttagtgggataatgtatttataattaaaaaactaatatattaaataataattcgtgagataataattgttgtatttttaaagagtgctatatcatagagtgtttttaaaagtaagagtctcaaaattaatatggaagacaaataaaataaaatattaaatttttatagatgatgcaaatattattttagtaacttaaaggatgctactattggagatgctttagaggatctctaattataatattttggagaatgcttgatgaggtagaaaacttaggtgacaaaatatagtgatgctataccattagagataaataaaatgttattcttaaaatttacattgataccatgctatatttggtttttttaaaaaaaattaaaaattaaaagtgcattatatatataatagtttaatatagaaataaatttatatatatacaataatgtgtgaaattataattataacattcttgagatgtgctataccattcaaatgtttttaaaaataaaagtgtcaaaaataattaaaaaaaatcaaataaatattatatcttaaaacatatttagcactttaaaagaatactatcattaaaaatgattgtagatgctactagtggtgtacgtcggtcggtttggttacattttatttaaccgtaaagatcgggttacaaaaatctaagtgcaacctgcccaattaaaaaaaaaagtttcaacccacccaacgaattggtcggtttagtggggtaacccgtccaaaccaagcactaacatttaattgttatattttagttattgtgataatgagataaatataaacattaaatttaaagttcaaatcattggtcataaaaagaatatagtagtttcaattttctattttttataaatatgtatataaattatataatatatagattatacataataaaaacatatataaaaaaaaaactcttttaatcgagttggtcaggttagttcgggttgattgggcggtttgatattatttttaatccgctcattataaaaattgggcgggctatattttttttaggtttttcggtttgtattttttgtcaaattatctcaatttaatttaaacagattgttgggattgaacagtttacaaagatttacgaacaaccctagatgctacaaaagagatgtacaatattttacattattggtaattcgtctacccgacacctgtagagggtgcatataataataataataataataaaaaaaaatgcaataaacgtcagaaaccgtgtcatctgggagttgtgtagttttcacccaccaattcaatttaaaaatgtcatcatcgatgacatatatattaacatgcactgcattggttagaccaaaaaaatatattattatacaaatcttcatccattccaaagtttactatttggtcacatgtattcagatacaaccttccccatgtcaccatgtgcctaaataaatcatggatccatcatattatataaatttttcaatctcatttatgcatataaatttgtgattaaaatgcatgtgttaaaccctatataagtattccctaaaaccataagccaaaaccacctcttattatatgaattaatttttataataataattaccaattattgtggttttgctctaccaattatagtacttctatagtatacatgtattatcatattgtactacaatattatgtatgacattgaggcaacaatgctatccaattcaccatctccaaacctcgttatacccaattttcatagtggtttggagttgcatgatttcttcgatggcacccacaacattattagtgaagatcagtttgtgaacctattaattcgtggcgctgaaactgatcaatacccttttgttaattttgatcactgtgatcttatcaatagcttcgttgacgatcatcatgatgatccaataatggttccacaagaccatgtgtttgatttcaataaaggaattagtactgttactaaagggcccataattaatgataatccaaataaaattacacagttcatgaatagtagtcttgctatgccaacttttgatcgccatcctcaggaagtaaaatcaggagatggtgatgaaaatcgtggaaatcattatgaatgtaataatgataaagaggatgatgaagaagaagaggatgacgaagaagagagtgatcggcaagagtcttctgaaaccaatactggaagtacaagtgcaaattcagccaagaaaaccaatgcgaaagccggtgacaaatccaaaactttgatttcagagaggaggagaagaggaagaatgaaggagaagctctatgcattgcgttctttagtcccttttataactaaggtactgtactgtactctacatacatatatatatattttatgtatagttcattatttcttatataagcatataaacataaaataggccaccagattgagtggattaaattcgctgccagatatatggaactgtgtattaactatgaaaccattgtcaacaatataataagtactctcatatctaaaaaatatgatgatcattattgttgtgtcatgtacagatggataaggcttctattgtgggtgatgctgtagtttacctgagggacctgaaaaagcaggcaaataatttgaaagatgagattgcaagtcttgaaacttcttcacttggatcacatcaaatataccaacaaaaaacatccattaatagtaacccaactcagattcaaatttttcattctaaaaacaccactattaatcaactgattttcaaaaaaattgatcaggtaatacgatattaatttcatacataatattatgtatgtatatgtatttgtataaatttggatgtgggggtttttgtagatggacatttttcaagtggaggagagagggttttacatgagattagtgtgcaacaaaggagaaggtgttgctgcctcactttacaaggttgtcgaatcgcttactagctttaatgttcagacctctaacttggcttctaagctcgacggatttgaactaacacttactttacgggtatataatatttatcaaatgtcctcattttaaatttcttttaccaagcactactttttctctctttctatgcattattactaaggattattgatcaatcttttctctctcttttttttttttcatttttcttgatcaattttcaacaggtgaaagatactgtgcaggagatgaacttgccaaatatcaaagttttggtggttggagcccttctcaaccatggctttgaattaaaatcaccttttttaccataattgtcgtgtaactcagtcatagtattgcccaattatgatatgattgagaaccccttagaaaagagtcagttatgttagtttttcttacgttctcactaatcaaatgtatatatattcagctccttgtctatatcttggtggaacataagtgatcacatattcaaaactaagagaatcctagagagaaaaagagggttgtacagagtatcggtgtacctgatcctataactctcatgtgatcaagaatttgtacttgtaatcccttagctttgcttgtaatctgtttgtgtttgaacattaattattgaataaagatcctcagcattatggttgttctccattatcgatttgtatgcttcagttattaagtactgtttcatttattttttattttcatattagttatttgattattctttcttgttggttcttgttctagtctcatctagttcgatttgagtgataataaaatcacaagtggtatatatcagcacgggttagagtctatgatcaagaactatttgactcgaggccggaagaagtaagaaccagttcttgaaagatcaagagtttaacaatgtcctctgctcaatttgaggtggataaatttacatgctgaaatgatattggtctatgaaggatcaagatgagactcttctagctagtacaacagggaatttcacagtcattaaacacagaggaacttggtggaatcaaagacgaaaaattgaaaaaggacacaaaaagtaaggcacatagtgcaattctgctgagtttgggagatgaagtgctgacagaaagttttcatgaagaaacattagctgggctttgatctatcttaataaatccttggccaacaagctttatctgaaaaagaagttgtatacaatcaaaatggatgacactaaggaattaaaaaaatatttggactcgaacccaggacctccaacacacataccccctatggtcacttgagctaggctcaagtggttaaggtatacttctccttacactacaagaatattactctttaatgattctca

SEQ ID NO: 30992 - DNA, 2302 bp, Cannabis sativa
gatgaaagcgactcctcggagacgtaatcacactataggctcgcgttggttaagaagcggccctagttccaggtcctcaggtgaatcgtccaatggaacgtacgggtgcagtccggagcaagttcgaaggccatcgggaggggaaggagatgcggccgttgagtctgaacagaatccgatgagtgatggaggaaatcatgggtttcaaaatagccatcccattaatcaaggccatcaattgttgattgcgaaagcccctgcgcagtctacgggtgttatggctccaataatgtctaattttgatggaaaaggaaagaatcaagttggagggaattctacaataacggtttcatttcaaaaaaattatatccctactgaagagacaaagaggaaaagaatgacttttgattatactagtcggcctacaattactgaaaatgggccgaacctatcttccttggaagacttaggcccacagggtggtgtagtgatgtgttcacaagcaaggcttgaagatggtgatgatatcctcatgattccaaataatgaggtattttcaaaagacgagtttggggcgggttctggttctcaggcccgccaagcattatgaatgttttaagctggacttgtcgtgggcttgggaacccatggactattcaattccttaaagaggttatttctcaaaagaaacccaaaatggtatttttaagtgaaacaaagtgtgccaaggagagagttgaatgggtgggtagacatttgggctttgagggtgtgttcactgtggaggcccaagggagaagtgggggtctggcccttttgtggaaagttagtggggagggcaaggtagtgggcttttctcaacatcacattgacttagtggttacctttgatggaaaacccgaatggcgtttgactgggatttatggtgaacccagacgacaccttcgacaatcaacctgggatcttatacaaactttgcaacgttcctcaagcttgccgtggtgcatcatcggcgatcttaacaacgtcgtctcgcaacaagataaacggggtggacaaccttatccccgtgcgttaattcaaggattccagcaggtcatgtgtgactgcgatttgtcggatatggagctcaggggatccccgttcacctgggaaagaggccatggcacttccaactgggtagaagttcgtctggacagagcactcatctcttcgaactggtttcagctcttccctcaatccaagctaagtaatcttgaaacatcaccttctgatcactctcctatttttcttgaacctgaaattgcaatttctaatctcctgtaccgtaagtttcggtttgaaaatgcttggctcaaggagcctctttgtgttgaattgattaaaacttgctgggactctatgccgaatgtatctattgataagaaaatccaagtgtgtgcagaaaaattagccgtgtggggtaaagagattacaggctcgtttaaggagagaattaagaagtgtaaggcagagttgggtgtgttacggggcaagagagatgctgcttctgtgcaacgatttggtgagttaaaaaataaactctcgcaaattatggatcaacgggaaactttttggaaacaaagagccaaacaattttggctcaaggaaggggataaaaacagcaggtgtttccatatggctgctactacaagaaggggtaataatgttattggaagactgagagatggaagtggccaatgggttgattgggaaaatggtctttcaaacatgattgtgggctattactcttctttgttttcaacatcgggggcttcttgttctgaagtagttgaaaaagtcgattgctccattactgaattagtgaacaagatctactccttcctattacagaagaagaagtgtgtaaagctctcttttagatgcatccttcgaaaagtcctgggccagatggaatgacacccggattttatcagaaatgttggagtatagttcggtctgatgtggttcaggtggtgcaacaatttttccaaagtggttttcttgatttgaatacaagcaaggcaaatgttgtgcttattcctaagaagaaaagcccggagttggttactgaccttcgacctattgctttgtgcaacgttctttacaaaatcatcaccaaggtaatggcaaacagaatgaaacctttcgtggacaaaaagctgtgtcagttaatcagagtgcttttattcctggtcggttgatctcggaaaacatcatagtctcatttgaggtgcttcacttgttggaaatttattttacc

SEQ ID NO: 30993 - DNA, 1231 bp, Cannabis sativa
agttttaattaaatagaaaattttaattaattttaattaatcacattttaattaatcacatttttcttaatcacatttttcattaatcacatttttcattaacctcgttgattagcaacgagctgcacatcaagtttaaaaatcacgttaacaggcctaggctagttagggtgttacaatgaatgaacaagataatttgtggaaatagaggcagctgtcaaggtcatggtgatatgctcagattataccctgagtgccctaagtgtaagaagcatcaacatggtgaatgtcgggctaagccatgtttccaatgtggtgttgtaggccactttataagggattgtcctcaagcaaagaaggaggaacctaagaagaataataaccaaaatttagggtgcctgtttactgtaactcaggctgatgttgaagcaagtccgttagttgtgacatgtcactaatttattaatgactttccctattctatgttttttgattctagagctacacattcatatgtatcaagtaaagtgatagaaaatttacataaacctttaaatgtagatgcttcatggtttagaaccttgttaccatctagagagttgattatttctaataaatagattaagtcattacctatgtggattgatggttgtgagttaactgctaattacttgattgagttacaattgagtgactttgatataattttaggaatgaattttttttcaaagtatggagcaacaattgattctaaacgaaaaatagtagttttcgaacttgatagtgcaaacccaattgtgcttatgggtatgttacaaggatctcgtatactcaaaatttcagctttgaaagctagagacctaatccaagaaggttgaataggattcctagctacagttgtgaatattggaagacatacaataatcagaccagaagatacaaggcttgtgtgcgagtttctatatgtgtttctataggacctacctagattatctcgtcatagagaaaatgagtttgttattgaactagttttgggagcagaactggtatctatagcaccatatcgaatggctcttatgaagttgaaagaattcaagattcaattgcaagagttacttaatattggattcattagattgagtttttcaccgtggggtgctctggtattgtttgtaaagaagaaggaaggatctctccatatgtgtattgattacccgaaattgaacaagct

SEQ ID NO: 30994 - DNA, 2073 bp, Cannabis sativa
aaatatgaacattaacaatatcattctataataacaaaagacctcccctaacccttttctaggaatttcaaaaacatgatctaaggacaaacgacacttaaacttattacccaaaccactaaacaacttgttttccatatcaaaaataagacgaggtcgaagttgttttactaaaagggagaggttttagaatgctcgaggacttcccaactcacgagcattcctactttttatattataattttttttcgaatttcttaaaattttacagaatatcttatataatttcaatatacactatatataattaagattaaaaatgtttagataacgaaaagagtgttgctattggatactagtagtgtctaacactttctataagtaatactttatgattggttaataatatttcctaaaagttattattttaagttacatgtgatttaatacttaattatactaataacaatataataccatgaaatatgctaataatgttttttaacatttgtgattggtaaattacaaaagagtacatttatacacttatttgtaagagggtaccataaaagcaccctatacaaagtataaacataaaggtttaattaattaatattgaaatatgtggaatcattgatatgtgtaattaatgcatcatttatttaatttttatataagaaagttattggctcaaattaagggtgagataataagggagttaagtcgagttgttaataaatagtcctcaagccagaaagaaacggttgttgagcacttaaacagtgcgtatgtgcattaaattaataattaatgatatagaaaataatattaaatgcattttctttctctcattttattgtatttgttttttatttcatacaaaaaagtacagtaaaatatttatctaagaataatgtatttaacaataacttctaatttattataaaaaaattaagtcccaatttagattataaataataataacttctaaattgtaattggttatacatttcctaagtcccatactaataaaatatacttctatgtaaggataattatattttaataaaatataggaaaattcttaggtgagagcatcacttttgctctgactcactcatgagaacattttttaaacctttaacttttaatctaatggtaataatttgttgtagtttatttgattatcatgaggcatcacacataggatttttattatttattttttattctcctataatctaagcatgatctaatttttttttacctttctaaaaatgaataccttagttttttttttttttttttttaaaaaaaattctcctatattcaaggcatgatctgatttttttaaaaaattatttctacccgactccctatttaaattgtttccaacaaaattatttcaacttcactctctattcaaattatttccaacaaaaattattcaaataatattcaaattattcaaaaaaaaaaaaaaaagaaattagtatttctaaaaataaaaccaaaagcttcatctatttctgccgccaccacaactgacactaccgaaaccacagaagccaacgccgacactgggactaaacatgttctatatgttaggctctctctctcatttttttttcataaacaaagattattttaattttcgttgaacttattatatttgaattatttatggtatggaagttgtagctttggctaacatattgaaaactttacaaatgttgagaacatcctacgatgagttgaaagaaagtgtccgtacaatacgatatgatatgcgtaccctatctgaggagggtaaaaggcgagatgaggatcgaaaacaatttcaataaaaaattttaaaattttatcttgggagtttggatgagggttcaaatgagctagataagaagaagagcagataatttagagttaaaaatgaatctggtgtactcattaatgaaaatgtaaagaaacaagatcatttcaatcaacagtatgttggtgagaagtcaactactgaggctgttgaatcgaatttaccaacaccttcacttgcaattgatttttttttttttt

SEQ ID NO: 30995 - DNA, 1893 bp, Cannabis sativa
cgcattcctcaaatgagcctaattgcgcttctcttctaaaagattgagttgaagcaattgattttctatattttcactaaggctaaatacatctcttcgcagggatcctgccccaacctcgactggcaccatggcttcgcacccgtaagagagcgagaaggggttttcaccagtcgtggattggggagttgtattatacgaccataggacttgtggaagttcttctggccatacacccttacgctcttcaagcttacccttgatggtatgcttgattatcttatttactgcctctgtctgaccattgctctgtggatatgcgactgctgaaaatgctttcctaatatccaactcatcgcatagctagcgcatctccttacagtccaattgttttccattatttaagattaacttttatggtatgccaaacctacacatgatggcactgtacacaaactcgcgcaatttagcagcagtgataattgtgagaggcttggcttcaacccattttgtgaagtaatagacagcaactacgacgtatatcactcctcctttcccttttggtaattcaccaattaggtctatgccccagactacgaaaggcaagggacttgtgatagagtttagctaacttggtggtttgttgacatatgtagctattcgctgatatatgtcgcatttctttgcaaaactagatgcatctgcccgcaatgtcggccagtagtacccttgcctcattatttttaaagtaagggaattacccccaatatggttgccgtacatgccaccatgcacttcatacagtatatattcgtagtcagtcccatcaatacattttagaagtggctgggtgaaacttctgcgatagagcttatcgtcgtcaatgacatatcgagcaactcgatatcgtagttttctggcctccactttattttcaggaagaactcctatttttaagtagtctattattggggtcatccaggtgacctgtttgacgtcatcaacttccatcacctcgtctcgactgatttttggatgtgttaatacgtcaacatgaattacatcgagtaattctgcttctcttgtcgaggcattcgggccaaagcatctgaatgagagttgtgagcacgaggtattctagagacaattattttcttaaatttctacagtaactcacaagtgagggcgaggtatttagccaaacgacctcctctagctaggtattctccgtttacttgacagacaacggtttgggaatcgctgaaggcttgtaaatactcgattttcatctcaagagaaaattttaatcctacgcttagagcctcatactcagcgtcattgttaggcgtctaccttggatgctccatcaacatacaatttccacccttcattgtttagtatgtcaggataaatttgctcttctgcgatgatggccacttcgttgcttggaaattcgagtatgaaatctgcaagggcttgtcctttgattgctgatttgggtttatacccgatgtcaaactggattaactctactgaccatttcaataatctacttgaggcctcgggttttgctaaaacttgcctcaaatggtagtttgttaaaacttcaatgctatgtgcctggaagtaaggtcgcaattttcctgacgtaattaccaatgcaaacgccaatttctccatctacagatagcgggtttcagcatataaaagatgcttgctgacataatacaccgcgggtatggcctagcctgtgatctctttcgcggattagtaccgaactaatcgtgttttcggactgtaatatctcgataagcctaatggtaaataattaaggtttacatttatattatgggttaatcaggtaataaatgggattatgatcctactaattta

SEQ ID NO: 30996 - DNA, 1459 bp, Cannabis sativa
tcgggtgctgctattcagtggcttaattgaagaaggagaactcgtgtctaaggtcagagaggttttggaggccagtgaagactacattactgaagagtacaccaaggccatccccctgaggaggcaaggtgcactaggagattgatgggtctctccaccatacgtggtgaccatggcaaagatgaagaatttactcaactggggttacctagggaatgtggaatgcttccttccctcctcgatcagcttgcgactagcccaggggacgattattgcgcctggtcgggagtccatactaagcagagtgcaatgttgcccttgcttccacactttaagaggattgtggactattaccatataagtttgactaaattcacccccaagggcctcagtctttatccaccgtgtttgtcctctacaccacaaaaggattgggtgagccgtccccgcatgacaggaactggcttttttatctgaactcaagtcccaagcagaataggtcgggatacttctattttttccaaatctaaaagaagtggttgacgggcaccactgccaccaaggtaaccaagatagggagctttgtggacgaatactacttcgtcaaaggaatgggcaccatgccatcctactgtcaccctctgttcacactggagctcaggaatagggcacaaaagattcttcaaccgcctcgtacgtgttgcacagaacatctccctcttgacttttgacaccaattttgtcaagtacaaactttttctggctaattttgtaccaaaggctatgaataaagtgaaagaggttgcgcccgaataagagactgtacccgaagaggagactccaagcaaaagaggaagaaggcccctccaagcagccaagtacctattaagttgtctatcatgatcagggaagagcctgaaagacctggtcggtaatctgctctagtggcagaaaagggaaaagctatcctgacggagcaagagccaaaagactcttcagatgatgagcctccatctttgcttgtttgggagaatgaacctgcctaagtgcatggtattttaactcatatttaattttatctattttggcttatatcatacttgtttttaaccttcttgtttgttcatatgcagctatgtctcaaaaggtgttctaggctctgaagaagaggtcaggtgacagctctgaccagacccctccgcccaaataatcaaggggtgatgagataccgcccaaggagaagggctcagttgagtctcctatcgacgttcctgaggaggcagtgtccgatgtggagccaccaaccaagaaggcctccaaacccaaaggtgccaagggaagtagcacggatgggtctggttggaccaggccctcaaacacttctatcgtgctaaaccttgagaccaagaagggcaaggagatgctttaacactaccaagatcagctacttcctgaggtg

SEQ ID NO: 30997 - DNA, 1983 bp, Cannabis sativa
tctctaatgaaatgtagcttgatgtctatatgttttgatctttcatggtacatagggttcttcattaagtgtatggcactctgattatcacaatgcacttgtaagttcctctgagaaacctttcagttatagccatgaattctgcatttgtggtagacaaagccaccaccttttgtaaattgacttccaacttatgcatctaccaaatactgtgaatgcataccctattatggaccttttagtttctatacttccagcataatctaaattaacaaaccctgaaattttagtgtcaaacactgcattgtttttgtacaacaatcctactcttgctgtcccttttagatacctcaaaatcaactttattgcatctcactgcaccttccctggatcagaaataaatctactaaccatgcttaaagcataggccagatctagcctagtgcaaaccatacaatacattaaactccgaacacaggaagcataagggccaatgtccatgttgattctgtcctcttcattgtttggtgcttagtcttgagttattttgaaatgtgaggcaagtggtgtagaatatgtcttggcctcactcatgcagaatttgtttataatcttctgaatttacccttcttgtgatagaaaaatcaagcttggtctctgtcttttgatgtcaattcccagtattcttctagcttcacccaaattcttaatttcaaattctgatatgagttgatccattagcatgttgatggcttttctatcctttccaatgattagtatgtcatcaacatagaacagtgaccagataggtgtgccattaaagtatacacagggatcatactcactccttgtgtaccctgtttgtagcatgaattcatggaaccttaagttccattgtgttggtgcctacttaaggccatggagtgatttttgaagcaaacacacttgatcagttcccttgcttttatagccatcaggctcttccatatagatcttttcttcaagttttccatgcaagaatacattctttacatccatctggtccatttcaaggtcaaacattgctacctttgctatcacgattctaatagaagtctgttttacaaatagagagaaaaaatcattgtagtcaataccttatctctgattgaatcctttagctaccaatcttgctttgtacctcacttcttcacgtgtaagccctttttatgtttgaaaatccctttgcagcctatgatcctttgtccccttggtttaggtactcttatccaggttttgttttctcaagagatcccatttcatcatcaatggctctcagccatttctttttgtctttgtcagcaactgtttctgcaaaaggggtgggctcaccactttcgatttctttagctgcagcaagtgcaaatgcagtgcagttagcaaatcccaacctatcaagggatctcacatctcttctaactctgtctctgactagtttatagtcttgtacctctgatggcatctgttcttactcttcatctgaactgtgatcactgtgtgctgttggtgtatccacctcatctgtaatttctacttcttccttgtgagcttgtatctcaacactttgtttcccccgactactagagtattggtagttttcattgccatttcatgttctttgaacaccgcatcccttctaataatacatttcttgtatccatcttctaagcaccaaagtttataccccttaacaccatcaagatatcccaaaaataaacatttgatagctctaggttctagtttatcttgtctaataagagcataggatgtacatccaaaaactttaaaaaggtcatagcttggcacttctcctatccaaaattcttgaggagtcttaaatctgagaagctgttgagggagatctgttaatgagatagcttgcagtctacaaagcttctccctaaaacttcttgtccatggcagtaccccttagcatacatctca

SEQ ID NO: 30998 - DNA, 3782 bp, Cannabis sativa
tatgtctcaaaggatgctgtgtgcgctaaagaagaggtcaggtgatgccttcaaccaaaagtctccagtgaaatgtcccaaggtggacgatactctgccaaaaagcattgcttcaagcattaagactcctcaggtgacatgtgagaggtgtttggctgtccctgccttagaggttcttaaggtagtggtttctgacccaatcttgctagccaagaagaactcaaagtctcaatttgcggttgccccatctaacgactctaagggagcgagcactgaaaggcccagactgcccaaacctctagccactcctcccatgctaaatccaaaaacaaagaaagggaaggagatgctttcattctgccaagattgtgtgcttctcgaagtaaatgattagttggccaaaagggaggacatgtctgtagagcttcttatgggcgacttgctgaaataatccacccgagcttcctttggttttctttcacatgtttttaaccgtctaggctttaattttatctcattgtgcagctcaatctgaagatggcatacacatactctcctgccaagtctacggccttgaaagtcacgaccaccaccaacaacttgaaaaaggagatggaggaggctaaaaaggaggtcgagctgaagagcacccaactacacgaggttaataagcaactccttgctgctaacaagctcattgaagacttgaagacagagattagtgatatgtcgttcacttcttagcttgagacggatgatgaggccttggcaaaggatgtcaactcccttaaggatgagagggatagccttcatacgcttctttccagtctagagaccaaaggtcagtgatctgaccgaggagaagaaaagtttgcaggagacccttgactttgagcagacatcttttggtgctgaacgggaggtgcttcaaaaggaggtggaaagtttggagtcggttgctctggacgtcttttatgaattttggagggctaacccagaggctaactttgattgcctcaatgaacacaaagaggcttatcttagtttttgtgaagcccaaaaagccaaggaagatgctgaccaaccttccaaccaaccaagagaatgaaaccccagccgctaaggacacatctgattcgtacaaagaaccatggactccagctatttgaacttttaaccttttctttatcagtttggcctacaggcctattattaagtacaatatggccgaccaagcggcctttaaacttgagaaatatttcatttcgttttaagataattggttggccgggcagcttttaatcccgaagttatcatgctttgttatgttttaaaaataaatattttctcttaagtctaaatgattgcatatgtaaatatttttactttttgagcttgttgcttacctatgctttgtacgggtgtatgcatttgtgttggtaattacataacttgctaaataaaaagataaaatggacacaattagaatgatagttaatatttttatttatttattggtctacatgtgttgttatcgtagtaacgtaaatttattgaattataaaagctattacatgatctaactgatctttagctaattaaaacataaaatgattgaacggtacattctgcccaaaagacattgctcaagaacaatgatttctgaacatattgtactttaggggtggtcgtccgacctgagtaccagttgtttttccaaacctttaagcaaagtcggctcagaaggccacctacttaagagtaagtgttcgagcactgtgcacttttggggggtcatcagaccttgtacacttattggtagtattttcttagatgttcatcgttccaatacctcggtactagaaccagtttcatgttttcatcatatcgaccaagtttgtatgctccagagtttgtaacttctgttatttaatatggtcctttccaattaggtccgagcacgccagatgcattgtcttttatgtttaagaacactctcctgaggaccatatcttccacaaaaaaatttcttaccctcacttggttgttataccaattggaattggcatggtgaggaggaaataataccaataagagcgacatatctaatacaggaagatgagatgatggatattgttagtgatattatgcaacacgccaacaatgtagatgaagagaacgagcatgagaagatttctgagcaaggctttaagggtagagttgattatagtgatttatttgagaagataagagctctattattccctggatgttagaaatatacatcattaaaatttacggtgaagatgatgcatttcaaagtcttagggaagattcctaagaaaatatttaatagaatattagagttattacatgatgcatttccagccccgaacaagcttcctaaaatgcatcatgcaacaagaaagttgatgcgtaaattagggttggggtacgaaaatattcatatttgttcgagtaattgcacattattttggaaagaacatgttggaaaatcgaaatgtcctaattgtgaggaggatcgatgggtggacaacaacaccattggcaagaaagtgtcgcataaagtgatgtgttattttcctttaactcctcagttaatgttaatatatgcatcgaggcatattgctcaacacatgggatgacatcatgaggaatgtatcaaagaaaaaggtgtgttgcaccatcccacagatggggaggcttggaagaatttgattgaaataatccaatgtttgaaatggaaccaaggaatgtgtgtctaggtttggctgttgatggatttaatccttttagtaacatgagtcaatcttacagtatgtggtcggttatgttgacgacgtataatttatcgttgtggttgtgtatgaaagagactaatttcatgttgagtctattgattctcgatcctcattcgcctggaaaggactttaatattttcttaaggccattgattgatgaactgaaagaattttgggtgtctagtgtacgtactcgggatgctattgatggtagttccttcaatctttaggcgaccttgttgtggactataaacgaatatccaacaaggagtagtttttttgtttttttggatggagtggtcaaggctattatgcttgtcctacatgcaatgtggcaacagcttctatttgttcgcacaaaaaaattgcttattatggccatagacatttttaaccaattaaacatcgtttcagaagaaacaataaaacatatggcactgttgaaaagagaccacccttggaggaactaagtatggaagatatgttcacaaaattgagtttaataccaggatctctttctggtaaacatgaaatttatggcaggaaaaaaagaaagcgtacagaagaacaagttggttggtgaaaaaagaatacattcttcgagctcccatattaggccaacatgaagctacgtcacaatctagatgttatgcatgttgaaaaaaatgtgtgtgatagcttagtaggcacaataattaggttggagaataagaccacatatacaattaatgatagattaaacctcaaaaagatgaatataaagaccagggttgtaactgaaaagagtaaatgtcagtcacaaaagtctactgcaaaatacaccttcacacctgtcaattttttaaattagtcaagtttctagatagttttggatccaacctaaagaaaaatgtgattgataatgacaacaagatcaatggtttaaaaacacatgattgtcataccatcatgcaacacctt

SEQ ID NO: 30999 - DNA, 1851 bp, Cannabis sativa
aaaattagaattattaaaatttttagattttgtttaattttattaaagaaaatcaaacataaatgaaaattttaagaatacaatttaatacatgttaaagtttaaaaaatataatttaataaatttgaagtttaaaaaaataatttaatatataaacaatcgctataataataaaaataaatgaaataattaaataaaaattgttaaatttaataatttagtaggaaattttaataatttaaaaaatacaaaaaataaatataattaatatatatattaaagttgatggactaaaaatttatctaattagctaataataattaacaagtactacagaaaagaaaaaatatagtcaatgcccgacaatcaaattgtcacgtaataagtaacacatagttttgaaaaactcatacttttttggtccggttatcaagaaatgccattttcttaacaaaaaataaaaaaggaaaaggaaagaaagaaagaaaactaaataatgtaataataactacagagaggaaaggtccgtattttattttattttggagttgaaatgaattgatgagttgatagaggcgaagaagcatatataatggagagtccattggataccatttatgtggtgaccttttatgatagtttcaaggaagtttgatggctatagcttagctaatctatgcacatatacccttcctttagcttagctacttaaaagacacaaaagcaacatgcccccataaaaccacaaaaggagaaaaatactaaaaaagacctctccttgaaatagtaaaacatggtcgctttgtctgcctaactaaaacatattataaatggtcaaatctccatcctaatcccacgattgctactctctctctctacttctatgctttcctagcttcttctgttttttttttcttaatcttctgttcaaacatgcattaatatcattcttttcaatacttcccgaatataggactagtatttagctttcccctctccacccaattactagatgacacgtggattaggagttggtaaagttacatttttctagttggtgagtcagtggtctaactcttcatccatccatcttagtctcaaaatatgttatactataattataattataattatagagaattgttaccatgcttaagagccattccagagaattcttaccatgcttaagagccattccaatgcaagtattttaaaaaatagctaacaatttatacattatcttaaaatattatattttatattttttttcatttacattattttttaccactttactattaaaattactccactgttaagcaattttagaagtcaagagaatagactcacactctattatttaatatattattaaattacttttaatattttaaatattatattaatacatttttttgttagaaaaattataaaaaaataaaaaaataattcaactaccattgcttgacagtagcaattgcagtaacccacacaattttttcttagtggtcaagcaatcaagattgcttttcttagactgataaaggcttgatgaataactagcattggagctggtctaagtatcataatgaagggttatcttagttagtagttctttataatatttaaggtaaattacggtataaatatttaatgtttccaattttatacacttaaatacttaatgtttatttttggaggcaaaaatatctaatgttacaattctcttacaccgttactaccacttccattaactcataaatttggacacatggaaggcccaaaagcattatatttatttattttattttaaaatttaatattcttaatataaaaaactaaatgctactt

SEQ ID NO: 31000 - DNA, 3726 bp, Cannabis sativa
tattcttatttataactggcccaaatcgggacttgattttcttataataaattagaggttattcttggatagactattcttaaatagaggttttactatattttaaattagttaaataaatccttatagtgtaacttatctaaaaaaaattaatgaaatgcaactgaattaataattacaataatttagatagaatgctttacaaaataaatatgagggaaatttttagaaaaaaattcttatatgtttcattttaaattttatataaattgtttggtgggagaaatccctataatgtttattttgttgcactcaaactcttatgtaaattatttggtgaaaaaaaattcttatatatttcatctttagcggtaaaaatctcaactattacaaatttgatgcaacagtagtacttaagctggtaacaataaatgggctaacattgtaacaaaataataatatagtgattgtttttcgctaaagatgaactgcatagaaattcgtgtcgctaaaaaatttacataagtgactaagtcattttgccgaaaaagtgaaaatatgaagttgtgaatttgatttgtctgaattcatatctctcatttactatgaaaaagtggacgaacatttgagacaggctcataatcaaataagtaaaacccagtgcaccaggtcatacgtaaacctgggcgttgggtgctctttcaggagcttcaagtatgtcgttttgatactttcaaggttcttgaaatcgaacacaaggtctcctatcccatttttgaccattccatagagaattcttagagcgtaatttgcatttaaatgattgaaaccagcagaccacgttgattgtcaacctgtgcgctaggctcaactttcaagccctcgaaattcccgttttctcctcgagtttacttacttgtatctttgttatttctaatggcggaagaaatgcccagaatattttttggaaatatgattagaaacagcctaagttgaaaaaatgtcaacttgggagctgggtccagtttcaggccactagacaactatgtttgattcgcaaaaatacttgtatcttaatctttgacaaaaacaaagaatatgcccaaaagaaattgtgagaaaacactttggaaatgacccaatttgacaaaatttcaacctgagcgttgggcccagcaccaggtgtgaacctgggcgctagatcctcattctggcctccagattaatctgtttcttccttgaaagcacttgttttctcatttttgacgaagatgaagaaaatgatcaggattgttcttcagtttgatgcttggaagtgccccaggttaacaaaatatcaacttgggcgatgggtgcctagggaacttggtgctctgagtgctcaaaaacaaaagtgctctgaatctgattctaatacctcaaatatgctcatgatatgtctaattcatatcccaatacaaaaatttaaccatttgcactaagacgatcccaaaaaccaaaacactagttgggttgtcaacttgggtgctaggtgaaaccatatgcgcccgtgttgactttcaaagtgttgtttcatgtattttcagctcttgggccttggacttggatgcttcatgtcttcatggtatagaatactaatagatagtgagttaaaaataacttgacaggatccaaacacccatttcagagttcccaaagtcaacctaggggcatggctaggccttcccaggtcgactgctatgactcagaatatctcaatttcgggatgttttctttcttgccatgtgtaaaatattgatgtccatgtcaccaaggtcaatttccaggttaacatttacccccaagtcaactttacacttgtgagaggttgacttgataacgtgaactacgcctgtttctctcgaaactattagctgggcatcaattttggcaatcttgagcattttttttcctgtttcaaacattcataataggattaggatttcaaatcccattccccttaaggataaagaattcaaaatttttgagttaaggaatagaggaaaacaattattatttttcatgtatcttttatctttccctttaaaactcaaaatttttatgaatcctaatgatattaagattaagtaaatttccaagttttatattcctagttcctttagtataggcaattcaaaattctaagtgtaaaaggagaagagaagatatgataatcttttacttgtcatttatcttttctttttgaactttgaatttgcttgaatcctaattgcattaggagttgaagtgtcttttaaattttgaattcatattcctcttctaatgaggaattcaaaatttcaagtagaaaaggagaagagaaaagataattatcttttacttatttttgatcttttctttttaaattaaaaatttaaaagactccttattacttttggaataagggacttggaccaccataaataaagggagatcttcattcaattctccccacttcctttattgctccacacacatgtggcttcctgagagctttgagtgttttaacttcattagttctttgagtattcttgagatctttaggtaaaaaagttttttcaaaattttgttctcttttctcttgttgagtttggttacaggattctagaactaattggatatccttaaactccattgataagaccttcaaaaatcaaaaatataattttatgtgagccgtttgagctgaaatctccttttcctacaagttgcagtcaccttgactttgtcttaacaaggttgaaaggaattgatctgagttgcgattcagttgttcttagttgaaataagttgaacttcaaagctgccatgccttgtatgaagagaactcgaagaatgcctaatgaatgtgacccacacgtggctcagttcattagggctaagctgacaatgcccagtgccaaaaatttagacaaggcgcgtggtggaaaagtgatagcaaccaaactccttaaggctgccattgagagtgatgatctgggagatcgagctttcaagttaagacttctcgtctttagtactatctctgaacatcaaattgagttgatcaaaaatgactattttattcctcaaattgtcgttcaaaaacctcgaactggatgtcccaacagttccaagaatctgtgttgtagcgcttgtccctacccaataaatccaaatagctaagagttttgtcaaccttcttcatcttctatcgtgtaagaaattagtttgtccttactcctcacaagatcaactccctatatgatctgaagataagtcctattcgaaaagacagattttgtcacttccattagttcactctgtacattgagaatgtgaccaagagtaattgtggcctctaccatcaagaatacttttatacctcagttctcccttcaaggcacattccctttcagaaggatggccctttcaagagatatgttaattgacatgaagaggagagtaaatgcaatgtttattgacattaaagtagtagagaaagatgggaggactttgtttctttgtttaccactgacatccccataaagttggtttgttccaagcctccgcatggcattgcccaaagatgtttcactaatatctttgaggtaataatctataatgtcctcgcttcaagcctccattgggcccttacactcacggaatgatggctcttatacacgagtaagtcactttggctgcttc

SEQ ID NO: 31001 - DNA, 1810 bp, Cannabis sativa
ggcgtaattgaactgaaattctggattgtatacataagtgaaatttttcataatcatgttattgagtctacttgaaaattactcatgttcaggagattgacttgttttacttttgtactcgaggacgagtaaatgtttggtttgggggaatttgttaggttgtttttagtattatttttaggttaatttttagcatattttaaatttagttctactcttgtttggagaaattttacgcttattatcttttatttttgcagatttaaaatagaagaagattagagaatatctaaggaataagatgaaaaaaaaaaagataaaaagatctcaaaaaaaaaaaaaagaagataatctataaaatagagaaaattgtgcaaaaataaagttgaaacttcaagcttgaattaaactatgttctcattagattttggaaaaagtcaaaacataaaatttctagatctctctttcatctttgtggaacatcttgaatcgtctaattcgagcaatatggagagagttatgggcaaaatacaatcagtcgatacagtagaaaactcgttgcccaaataaaggggggcgcgcctaggcatggaaatcataggccatggcccgctccttctaatcctaagaaaaataagtttttttagcattttttttatcttttttttttctttctattttttggctatataagaattggacttcaatagtttttcacaagcaatcaaggaggacgaaattagagataaaaatcaatcgcgaaggctttttcaacgagattttcagcattcttttcttctctattctcttctcttttcttaaattaatatgtgtgaatttgctacaatgaacatgcatagctaaacatttaattaaagtttagatgaatattgttgatattgttttatggttttaatataatttattttccctcagtttttatgtattctatttcattcgtacttaattatttttaattgcctgatcaccaattaactatctataatttcgatgcgagatttgagaagtgtgtaattatgctatagtgagataaaactgaatttcgatatagtacgagagtatgtatagtttagatagcttataggatttttgtgtttaatgcatgttgcatgcatgtttactttatcacgagagtagaaaatttgcatataattgagatttatatatctaagaagactataaattaccttagtaaacctactattacataaatattggtaacaggaagtatatcatattaggccatacaattaaaatcgaagccctaactttattcagtattaatttcctttttgatttaattgcttcttaatttcattgtttctttaatgtttataaatttaattttgaattaaccaaatagaagtaatttttaaagtacttaactacaatccatgtgggatcgacctcactctttgtgagtctattacttgtttacgatacgtacacttgcttgttgaaaataccaaaatattagtatcatcagagcttgaacaattcaatcactcacctaaagaagatggctcactgagttttctggtgattggaaattggggaagaagtagagatttttacaaatcctaagtctcatttcatgtttaaattgttatttatatattttctgggttatgatttttgtgattatatatatatttgtttgggtgcactcttaatgtgtattacctatgaatgggtaaaattcgaaaattttgagtttttatacttaattgttctatctaattaaacaaatctttcatttttatatcacatgggctgagattgttccatc

SEQ ID NO: 31002 - DNA, 3023 bp, Cannabis sativa
atttctgtcttgttatatttttttttattttagttggggcaatatatgtgtaacatatatatcatgttaagaatgaataataatttgtagcatttatgtacaaatatgtgattatttcaattctcattttccattgtgctacttttaagtttccaaacagtctaatattccaaagtacaatgaattaaacaagaaacaacttggttcagaaaatcaacttgatttctacaagtctaaccaaaccagagatgtgtttggaaatgaacttcttcatctcctaatagaaatcagactcttttcgtatatcggaactgtatcatgaaatcttccatttttaactagatcataatcaacacttcttaactcttcagtacgaatgttgcaagaaaccaagtgttgttttccatcattgtcaaagacttgcattaaaatctcatcattcttccagaatggtagaaaatgtccggaatgcttttctagcggtccaatctccccagtccaaaaataatcacctgttacgtctttcttcaagatgaagatagaaagaattctctgaccaataggggtgaaacacatcacaaccgaatcattccacactgcaaggcgaagcgaataatcttcggggtcccagtctccatcacccaaagcatcaaaatctggcaattctatcatacgaaattctcattactcatatcaaaactgaggatcatttcagtttcatcttgggcaatacaccagtaacaaacacctccacaacatacatcatcagatacctgtttacctctaatatactgcattatgacttgagatatgttgatctctttccaagaatcagaacccactgtgtaaacctgaacacaacatttattatgatcgagccaaatagcaacacatttgtatttgttgtttctagaatcatgtccaaaatctataatgggaatagattcaatgctagcattctttggttttgggagaatcatgaattctttcaaagtaggattacataacaccatagtcttgagaccataatttgctagcaaaaggagtccatcacagtgaaacatgctatcccatcgattcatatccaaacgtggtaaagttagatcttctgtgacagttataaaatgatccttcttaccatcatcatcatcatggattatagtgagcaatgagtattcgattaagcgattatcgacaccgggggaaggcactttgaaacaaagtaaggacatagaagactggtttttggtcatgagaaggtgtttggccacaaatattggattgtcgatgaaagttgaaatacaagaataccaaaacttgttcatcaatttaaactctattaaacaatctgcaggtaccaacaacatgattttcgccacaacctcacttggcaaatcagaaaatctagccatttctgccacgaatgatcagactaagcttttaatcaaaacttgtttgttcataaagacagaatatactaaaaactcaagaccacaatatcaaaaaacctatctgaaagataaacgaaaataaaaatagtacagaagtgaagtgaagtgagtagctgaccttaatttgtgtatgattaagctcttcctcttttttcttttcaacctggtacttaaccttaacaaattaaaaacaaaaatgcatgtaatcaacaatggtgggtatgaaattaagttaaaaggtgttggtttgaaaatggagttgaatgaatcgattgctgcaaataaaattccaaaatcaattactcactcagtacttgtcttctatagcataagagttggatcagttgctcactcacaccatggaaggaagcttggttcgaaagtaatatatagtactttcttgaataattgttttacaaaagggaaagagctttatatagcccataataaaatcaagaatagctgtaacagaaatgtacagctggacaaaacaacccttaacaacctataactaacttaatacaaagcttaaataacagaattccaactaatcctaacaagtactgtttgaaaatgagtgacatgttattaactgtcgttttctaatgttttgtgtcgtttttgtatacgacgaaaatcattatggttgagaaaacgacattaatcgtcgaaaaacgacactaactgagaaaaaggataaaaatggcttaaaatgagtcgtgactaaatttgacacttttactcattcgatttatggtaagtaccatatttgcatgattagcttataaccccacgatgagtggtatttaattaaattgtaggaacctgatgcttaatacaaatagcaatataatattttagaaattgtaaggtgccataaattgttaggattttcacaaccttttctgtcttacaaacaactgaagaagaataagcttgtttgtcacactctcatgcattttatgatcaatgaattatcaacacaaacttcttactaactatatatatatatattatattgcagcagagcagtacatgaaaagtattctccataacacatttcaaaatcaattactcactcagtcagtacttgtcttctcttcctcagtagttggttagtgagttagtgaaaaagttgaacatcaaagatgataatgataagataaaaatctcaatttggatattcaagatttgtgcattgtgcctcttagtggaagctttgattaaataattactaataatggacaaagtttaactactaatgactgaaacataataagcagaagtactcctaccgaagggatgatgatgatcatgaggatccaaaatcaccttcttcacaaaaatctcctcaaattcgtgtttcatataaatcttgaacacatgcctggctgccatagttaaacttcttcatcctctcctaatagaaatcaaactcttctcatatagacaaactgaatcataaaatatgtgtatttttctatctagatcaaaagcaacatttcttaactcttcggtgtgaatgttgcaagaagccaagtgatttacgcgtatatcatcttcaaagacttc

SEQ ID NO: 31003 - DNA, 3580 bp, Cannabis sativa
aatcttttgatttggaacgcccaagggttgcggaacccttggacggtgcgttccttaacttccctggtgaatcaatacaatcctaaacttgtcttcatttctgaatctaaagttaataaagttcgtgcagaatccttgagagtcaagttcgggtttgttgggtgctttgcggttgaagctcgtgggaaaagcgggggtctcatattgtggtctatggaggtagaaacgcatgttctttcgttttctcctttccatatcgattctttcattagaattgaggatagtcaatggtggcggtttactggtttctatgggcgacccggatcctagtcgatttcattcttggaagctattgaaaagaattagtcgaatgtactctggaccatgggctgtaggaggggatttcaatgaagttgtgagccaaagagagaaaatgggaggcctccctaaaccgggttacctcattaacaacttcaggaaggctttggatggttgtcatttgcgagatgtgggttttgagggaagtgattatacctggtgcaatggtagaaaaaatgatctcatctttgaaagactcgatcgggtttgtggtaattcagaatggtttgacatgttctcttcagtgaaagttcgtcatttggatcatacaaactcggatcattgccctctgctcctaacgggctatgatccccacttcaagatgcataatacgactagatggtgaactagattccactttgagagcgcttgggcagatgatgaagagtgcacaaaaattgtgcacttggtttggcaaaaagacaagccgattatgcacacttgggagttaaaaactcggttgggaaattgtggggtggcacttcaacaatggaataacacaaaagaaacaagagatgacaaaggcagttaaaggaatatgaagataaaatcttcttgctatcccgaagtactaatttaaaggattggcaacaaatggagaaattggaaaggaaacaaaatgtttggcttgacaaagaggagaaattttggaagcaaaggagtagagctttatggctgaaagaaggggacaagaacacaaagtttttccatagaaaggcgagtaatagcaaagcaaagaataccattgaaggcttgctagatgatcggctacagtgggttacgggaaatagaaacatgggtagggtggcgtgtggctacttcatgaagttattcacttccaatccggctactaaagaggagttggaagatttccaaagaattatcccgaaccgcatatcccaagctactaatgcttacctgttggagactttaaccatggaggaggtcttcaaggcaatgtgtgacattcatccccaaaaagctccaggtagtgacgggttgcctggtctattttacaggaaatattggtcaactatcggtcttaaagtttcaaaagtgtgcttaggaattctcaatgaagggttgcaggtaaaggacattaatgatacactcatttgcctcattccacaggtcccaaagccaacccaaatgtcggaatttcgatctataagcctttgcaatgtggtatataaaattgtggcaaaatgctttgctggccaaatgaagcaaagtatgcatcaagtaatttcggaggaacgaagtgcctttgtggggggtaggctcattcaagataatgcaataattgggtttgaaagccttcattgtatgaagactaatggaaggaaaatggctctgaaattggatatgtccaaggcctatgatagagtggaatggaacttcttaagaacaatgatgaggggcttgggatatgaggaacaatggatagaaaaagtcatgagatgtgtggaaagtgtatcattctcggtcctcatcaatggtgagaaacttgggaatttccaacctacccggggtcttcgccaaggtgactcgctatccccatatctttttctactttgttctgaaggtctttcttgcattattcatgaagccaaaaagggctggaagcattattggggttcaattcgggagagatagaatcaaaatttcgcatttattctttgcagatgacaattttgtttttcttgatgcgaaggagaatgaatgtgataccatgaagcttatcttgcagcaatactcaatgctttcgggtcaacaagtaaatctagataaatctgaggtgtgcatgggtaagagaatctcatccactcaggggcaggcattggcaaatagattgggggttcgacttatctcacataatgctaagtacttgggtcttccgagctttgtggggagaaggaaacaagaggtctttgaagtaattaaagagaaagtatggagcaagcttaaagggtggaagtcttcgatgttctctcaagccgggaaggaaatcttaatcaaagcagttgtgcaagctattccgagttataccatgagttgcttccgtcttcctaagaagctcataaagaatcttcactccttggctgctaatttctggtggggagatagaaaagaacataagaaactccactggagtacgtgggataagttatgtaaacctaaggaggagggaggtcttggattccggagcctaactgagttcaaccaagctcttttggctaaacaagggtggaggcttctccataatcctcaatctcttcttacccgggttttgaagaatagctactatcctactacttcttttatggaggagggttgtcctaccggggcctcttgtgtatggaagggaattcgttggggtaggaaaattctaaaggaaggggctagatggagggttggaaatggaagagagattaaggtttgggaggataaatggctccctcgaccacatggggatacagttacacaatttcccagacttcaaccccaaaccaagcttcataagtttataacttgggatgggaattggaacatggaggaaatcactaagcactttcataaggacgacatgccttggatacaaggaatccccatagatttatacatggaagacacattaatttggcctttcactccaaatggtcaatatattgttaaaagtggttatagggttggaagggagatgaaccttaatcctactagatgttctaacatgacatatattcagaattggcggaaaatgatgtggagcttgcaactactttctcagatgaagctctttggatggagagtttgccataactggctgctagcaaagactattctgattcacagaggcatggatatcaacccccgatgtgatctgtgtggtatgatgaaactcttacccatgcattatggagttgtgataaagttaaaaacatttggaaacccctcccttggtacaaaaaatgttcaagcctgggagaagggtctatgtttgatttcttgatggttgttgagcagaaaattgacaggtatgagtttgaagatactattaaagttatgtgggccatctgggaaaatcgtaagaggcagtggaatcacctcccaagtatgaacggaaagcagctgataaattggctcttctctgcttatccgaatgctaccataattgagactactgctatacaacatgaggcag

SEQ ID NO: 31004 - DNA, 939 bp, Cannabis sativa
ttataagtttaaatcgaactagattgatattaacagtttaacgaataacataatcttattgttatatctattcttagttaacatcactgagtttctcataaatcaattggatctgaatcctgacatgattaaaccttaaactaattctgttaatcgacttctttgacttatttgttaccaacttactctaaagtgtagcccatacttacgtattgggaactcgatagcataattgagtgggaattttagttatagatatagatatcattatttagtgtatcctaatcagcccacgttaattcttgtgtgttgtgaaagatttagaaaatcaaggtgtgagtttttctgtaacaccctattagtttaggcatgttaacgtaatttttaactaactgtgcagctcgttgctaataaccgagtttattgaaaatggtgattaattaaaattttgcttcattaattataaatattaaaataatatacctatataaattcgggatctcgtttacaaaagtatttacaaaagtttcactacgcatatataaaagtttgtcgcctagcgactatacaaaataagccctgatgtcccaaagaccgtatgctccaggcctaaccgccacgacatgtacaatctccatttgctcgctctcacggctgctcagccttagccttgcccttacctacacatgtaaatagcaactgtgagtcaatagactaagtacgaaaagcttaaataataacataacaataacccagattatgatcagatgcccatacccccaatcataaccctattcccgtgtccaacacggtactgagtctagaacgttcgtacgatagtactattgaccataataccaacctactcggtatgctagtcatactctagccgtactgatgtgttactgtcaagtagtacagtactatcgaccataatat

SEQ ID NO: 31005 - DNA, 1086 bp, Cannabis sativa
ttataggagaaattaagctagtagcttactagccatatatatatatataaaaaaaatattattagatttaactattggatcacctcaattatttcattatataataatttatatatataaaaatgttaattaattagccatggatctagacacacctacctttgtactaatagcaataaattatctctcatttcctctcttaactgtcaaatctttattgaaggaattaagtattaaatttcatataatttaatttattaattatgaaatattgttaacaatcacaagacacccctcacaaataatattaggcatcactaatattcaataacaattctcatgtataataacaaaagttgcactgataaatatgaatctagtatacatagtgtcatctcaagctcgtacaaagccttaggtgaagcttgaacaaagccttatgcaagaattaaattataccattttgacaaaattatcaattttatcaaaatttatagaaattttattttttagaaaaattaattttttcattaatattaatattatttttatattaatttcatattattcttcacatgttttattaataatcatcacactatgactatgtttttttatactttaattcatttatgaataaattacaaaaactaaatcaatagtcataaaaataatcacaataaaataagtataattataaaataacattataacattatttagatttattttatatataaaactatagaactaagccatgctttgcgtggtattgctaaatttttgtaaattatatatatttatatatttagtacttattgagtggtataatctaaaatataatattttgatatgtgtattataaataaattaatagtattaaaattaaaaacataatttcaaatgcacagaaagataacgattttgtgataagtattaaatggtagattaataaagaaattgcatgtatttttataataaaatcaaaaaaagataacaatttctaaatttaataaattgggattgtgattaatgatgtaattatttttaatatattgtttggaccttattttttctttgatagaa

SEQ ID NO: 31006 - DNA, 1392 bp, Cannabis sativa
gtcagcttagtgttggcatcttgccacacatgctaccctggtcacgagtgactaggtgagcaatagtgttgggattcaccttattatagtgagaacttatggacaatgcaagtatcttggttagagtgcctcgatgcatggatgcactcatggatggtagcgagcatgactcgatgggagtttttcaagagacgaaagtgtgcatgaggcacacggtcatgcaaaaaatgagcccattgttactcaaataattgaaaggttgaccttggtgtatagaagtcaaggtgctgcacgtgtgtgccgcctgaaaaaggtgagcctgtgacaattagtatcagagctaggttcatcttaataggaggtgaacctggttggcctatcctagaggggatgtatgtcatggagcccaaaagtctcctaaagtggatcaatagaccaagatggagttgagattgggttgcttttctttatgggaatactggacatcctagagaggagacgatgatggttgcttcgaattaagttcagggatgctagaaagataactaccacgtgcaattatagagaggcgcaacaaaatatttgaaactcattggcgtagtacaaggttagattgggtagtccatattgtatgctttgtacactaagccaagttttcctgagtgacatcgtaagctccaagaggcgcctttgttgaaaaggaagcttgttcgcatgggagttgaagtattgcaagggccgtaagattcttgttagtcacgatagtggtcgagagttaatgaccaagatggttcaaatttagatagacatggagtgcttcagttgctacgtatgtctgtcaagagaaatgcatatggagaccaagtggcaaatgccgtaatcgctagagaatgattgtacttggaggcattgcatgtgacttttatttgatccagatggaaaatgtcaagacagtcgagtgggaggtgttggcttgtaaaagcgccagtgggcgtaagtcacacaaaggcattgatagagatgcagatttgtgaaatgaatgcattaaagaaaccagcatgtctaaaaagactgaacgcaaatgataagatgatgctagagtttgagtgcaggccaaatggctgtgctagtgggacttagtagtcatgtgagcctgcgaaggtcaagaggggtgctagagtttgcatgaaggtagggttgcattattggaacatagtgcatcaaaggagcccaaaagggcatgatgctagagcgaatcagttggatggttgagtggacaatgcatgcatatagaaattgacaggagtgatatatgagatagctgactcaagagtcacattctgcgggatgcacttttagagggcatggtgtgcatgaagagttgggcagtca

SEQ ID NO: 31007 - DNA, 5767 bp, Cannabis sativa
  modified_base (1613)..(1616): a, c, t, g, unknown or other
aagttcttatttaggatgttaataaacatacttgagagtagatctaagatcctgataaaataaattccaacaaggaccatccatcaaatcatgtcggccaatcctaatttggatttctgctttctacgcaacagtgctaatgccatgctcgccttttaggaaaagaccaagagagaagaactgggcgaggaagaagagattgaagtagaacaagaagattcaaccaagtctcctacagtgtaggctcaatttttaagttgttttttttttatatatttaggataatggctatatggccgagacagcggtttgccccttgtggcaattttgtaaagaccaatttgcaaaattggatggccaactttgcttttattttatcttttatttattgcctcgtatttttgcattacaacttaatatatttttttacatgtgttttttgtcacaaattaaacaattataccttgatcaaatttaaaacacctgaagcatttccattgctattattttcctatgatattatttaagtagttagttacctactatgtgctcgagcaattattatttgttatgctttcgatttgcgagcaattatcagttctgcttcgcgtaaatagttatgatctgtttttaaacaaactgaaacatagttttaataattcatctggtgaatcactttgtatatttttgattgcctgtatgaatagttaagctttctattcacaccataggttaagtattttttcaaggcatcttggtgcctcgttttaacacattcctataaaatgctagtcgttaaacattcagcttcacatgtagcttatcgttgtttgtatgagttaaatctcatttacaactgctacctttgactttgcatcgtccatagatgacatcaatcaaccacttaaaaagctttgattttttttgtaaatggagggtttgcaatatattatttatttcctgatatttttcagttgatcatacatatatatatatatatgcccctcaagtaattttaaagaataaaactttgtaattacttggaaaataattgaactttattaataattgaagttcaaaatattacatcagaaagagagattacaacattattttactggtagtagggtcgcaaatgctccacgttgcagtggttctttattagcgagccattaagtcgggctaatttataaaccccggttcccactgttgctcagatcacataaggcccttcccattttgggttaaattctcttacagatgcatctctcgtatttgcaaatactcgcattagcaccaagtcaccatcgttaaaaagcctcttcttcgctttccttttaaaatatattgtcaatcggtgtcgatatgctgcattagtgatttgtgactcattacgtttttcctcaagtagatccaaggacaatttcaagagttcttggtcttcttcttgattatagaaatgtcgtctgtgggtcgcaatatggacttctactggaagcattgcctccaagccaaatgccagcgagaatggagtatgccttgttgctattttcttagttgttatgtgagctcaaagtacttatggtagttcatcgacccatctaccttttgcnnnntccaacttctttttgatagtatccatcaaggttttgttgttgaagggattttacaactccaaaatagataataataataataaaatgatgaataagtgcgagtattcaacctagaacggtgagtactcgaactgggaacacaaatacttaacaaaaattggaaatacaaagaacaagagagaatatagtggttcagtcagatcacggtctgcttagttcactgttgcaaggattcagtatctgtcccatttcacggtggatcactcctttatatacaaagcaagtgtcctatcatttacacaaggattgcattcattgtcaatccgtttatacattaatttacattaattaagataaaaacttaaacattaatacatgaagaacattttccagtttcattcactaaatatagaagtgtacgcgacttctatattgcgacttggctgttcacattcttgcataagctcgcaagcttagaatgcattcgagactagttaggtctaagatgtctgcgttcttgtacagtcgcttttacggacatcgtataacgagctgatagaaccaagacatgcgagtctacatcggtttatcgaggttgttgggtcgtcgggacctgctcgcatcatagagaatcaatctctatgttttcgtaggaggatcgtggggatactcatatatatcttggtatatgtgggttaaatccactccttggtcctacataatgcgagtaatacgaatgcgattagacttggttatatccacatcatgtcgctgagtctagttcaggcaaggtttgaactcgaggagtctctcattgacatctcaactttccttggggaaatttagtacacgtgtccttcaaataggagtccggtctcgagtttctaggtgagataaatctcactataacacatgcccctagtttcgcgacttgacaggtgcaatcatgagggaaactataagccagagacaggtgaaaagatgtcacgaggtggtgacatttggttgtcccatcaagggtttcgaaaaatgacggctgtaattattgtattttatcctccttatggtgccacgtcacgaaactcttcggttttcttgtaggcgtgcccatggctaaccgttggatgggatgaccttaggcattccagttgacacgtgtcacaatcccaatttatgaggggtattggcatttaagttcgctgatacgaaacgattctctcatctccctctcatttctattttcctccttttctttttctctgaaatttcaaaaacttaaatccttcatccagatttctgccttttcttcttaaatctcttaagtttcagaagtgatcgaaacaaatcacagggagaatcatcaaaactcaaggttagattcgaaactacttgcgtattcgatttctaattttgaaaaacactttgcatttcgaattttgaagagtggaaaattgcatgttatcttagggaatacagattgggccttatttctctgctaaaactgggtaattcttaggagaaaatagacttgtaatttatataattgcgaactttaggaagaacactttgaatattcgcaccttttttacttgcttttgtgaatactcgcgagtattaggatgaacatcctgaattctcgcatgcatacttccttaggaattctggaggtttggccattccaacccataatttagaatttagggttttctatacaatctttgtatttttgcgtgggaatactggttaagtcttttgaatggtgggtgtgtcgccgtattccaatgctcatgcgtataatcgcatgtcccttgaggtactgcgatacacccagccatttgcgacatatgccagtgttcccttttcccataaaaccgtatatttcaagtagtagggtttctcaaaacagtgaggagtttccgttagcccaatggttacgcgaaaaaggcgtgccgcttgagatataggagattcctcagctatttcttgagatataccgctagttggatatgcgtgatatgttcgtaggttgtgattggttagatttctcaaaacggtcggtgtttcccagtaactccagggtcatgctcgaaaatgcatgccacttaggtcactaggtaactcccaaggagaacttgaacttattatgcgagtgaggtcacttgtattattttcgcacattcaccacactgaaaagatcttctatctttcagatgagcgacttgtcggacagccagatgcttggctctggaggcaatgctttcgaaggcgaccaagatcaggaggatagtttcatcccaaccagaactacggagcttcgcccgttgtctttcgcggacatcgaaagaatggttcaggagctcaacgaactggggacaatcgagatccgcgatagcgagtccacgatgtctgctcgtgaacatcttgttcactccaggcatgctcctgatgccgaagtcgaggagatgggcgaggactgggaggctccaaactgcgagtcagatgaggaagaggacgctgaagggagcgggactgactcagtcgacaacactcaattggacaaaaccttctcatgcgaggatttgattttgcgagtcaccaaatccgacctaaccacctttacgaggttaaatttgctacgacccagcaccatgcgtcctcgccctacccagagacctcatctgtgtttcaccaatcctatgataattcctacaaagaatgtggttgtttctataccattctccgctgtggtgtattgcttccttttcacccattcatcgctgctattattaagcggtatgacatatctgccttccaactaaccccaaacagttatcgcatagtccttggggtttatgcgatatacatggagtacgcacataaggagccttcgattgaggaattcagctatttttatgacataaagaacgtgggccttcataacggcttctcttgcttcaacaaatgggcgacttctaaaattaatggggtggaaggcatggtttccaatatgggagattggaaatctaaatggttttacgtatttaaagtaccaggcattaggactgactttaatcgtcgacctagtacgtcgcatttctcaatacttagttaatatcaatgttaccttatgatatcgattatcatatactttttacttgatcgcagatagaccggctcgacctgttctggactcggttagcagagaagtcgctgaagttctcggttgcctccctattcaagatcgctacttgggcgatttgtgcacgacctttgaagttgcgggaacacaagctaagtctgaagaacgccagccttcatcgggagccagtatacaaggagccatctgagaaacagaaagagaagatagacaagcgtctttctaaatagacctctcggccaacatcaggtaacacatcgcgtacatgcggtatatctatgagttattgtttatattttaacttatcttttcttgtcctcgaagaaatgactttcctgaagcaagctccggtgctcaaccacaagtggaagattggaacagcgaaaacctctcctgtcgttccccagaagaagaagagtgacgtcgtggttatccctgccgcggattcatccaagaagctagctaagccttcgcaagacaaagggaagagagttgtgattgacccggccgttcgagctcgcgacatcctaactcttcaagagaagttcgtgggcgatgagttcatatcaaaggtcggcaggactcctactgaggaacttatgcctcgctctgcagaattggcttcgtagttcatcactatgttttcgagggcgttcgttgctggttccaaggaagtcgagtttttgaagaagcagaacgtccagcttcaggggaatgtcaagaaactgaagcaagatgcgactaccaaggacaaagagctcgaggaactctataagtctaaggagcaagtcgaacttgaagccaaaaactctcaggcaaagattgaggagatgtctccagatttggaggccgagaaggagaatggaaagaagcagtatgaccaagaggtttctgactacatatacacgactctttccaaaattccagactttgacttcgcgatccttggagcagaggcagctgaaatggctgaggcttttcgagctatgtcgcc

SEQ ID NO: 31008 - DNA, 2057 bp, Cannabis sativa
agagtctacttgtgcatgtcactaaaaatcactctcaactctttagtgactcacacttttctgcgcgtcactatatggtgtcactaaaagggcaaattgtagtagtgcataaaactgtccctatatgatcccttaccaaaaccgccacgtacatggaacatctaccgatcttaacatcatagttaattttaatccaatcttctagaggaggggaccaaacaggagacacaacagtcaatgctgaagcaaacaagcaagccgcataatctgtgtagcaaatagagatagaatcaataaagtgcttcatgttactcgaggagttgttatgtactttttcgttttgggtcttccaaatcgtatccactacaatcaatgcatataggaacagcttgttagtatccactccttttgacttcaagttccagagaaatgttacccaatcccaaacacgggctccagattcaaaaaccggaataactccgtaaggggaagacctccaaagatggtacgcgaagttacaatagaggaagagatactccatcgattcctcactcgccccacaaagaggataagagatctcctcaatactaattctctctattgtgtgaccaacgaccttctctttctctggttctctctgatgcgtggttgacgatccacgataaccaccgtcgaacggacaggcgaataatttgtggttcctttgtattttttgtttattttttggtaataaatcaagttttggtaaaatttgcattttttgtatttttttttttatatggatcttatggggtacaatggtgggtatgatagtagtgtaatctggaggttatggatgaaggtccgatagtggtccgatgttggtataatgatagataaaggtacaatattaacacaatacattgcttttggcctctacctctcatagtcttgtacactccattatactgtactaatattagttaggcttggcagttatttctgttacacatttgtttattttttttaactgttagttctatggtcaggggtagtttgtttttaggctggtttgttatttcgattgttagctcctagtgagctttgtataaatacatggtattgcatcattcttttaaattaatcaattcaagacttttcattctgttcaatgtctttttagtaatatggtatcaaaatggggaagagaagctttccctagatcttgatttcttcttctcctctgttgtgtcttattttccagcggagttacttctcatgttttgaagttttgtctagaacttctctttcttgtagttcctttccacggtcagtgtttctttcctgatatggctttgtttccaccatggaaactgacaatcaaactaaaactcaaggaactggagacaatggcctgtctgctactgttgaagaaggtgtgagtctgactatgcagagtaatcgtgcaaaacaaatgaatcctcttgaagatccttaagatccttactatattcaccatggagacaatccagataacattcttgtatcgcaaccactttgtcatacatgaccatgtcaacaggaagaagattggcagaggtaaattcaagaatgggttgtacatattggattctaaacttcatcactctcctattcttgttgtcgctgctgatgtctagcacttaagtcttggacatccctcaaataaatgcttaaagctcttagatagaaaaatcaattgtaatactcccaatttacataaagatactccttgttacatttgtcctatggaaaaacaaaggaaacttcctttcaaaaataacatcacttttgttgataataactttaatttaattcattgtgatatatggggtccctatcacgttcagtctcactcaggtttcaaatttttctcagaatttttgatgatcgatccagattcacttggatatatcttttgaaacaaaaatctgatatgcattctgtcattcctcaattcttgacttatgttgaaactcaattcaattataaaatcgaaaaaaaaagaaaaatagattagacaatgcccccgagcttgt

SEQ ID NO: 31009 - DNA, 1767 bp, Cannabis sativa
ggcgatctgcgagagcatgaggctttacccgccggtaccgtcggacagcaaagaagtcagaaacgacgacgttttgccttgcggtacggcagtgagaaagggagagaaggttacttaccatccttatgcgatggggagaatggaatcgatttggggaaaggattgggcggagtacaggccggagcggtggctggagtgggaggagaaagcggagaagtggaggtttgtagggagagatccgtacagttatccggtttttcaggcggggccgaggatctgtttggggaaggaaatggcgttcttgcagatgaagagggttgtggccggagttatgcggcggttcgaggtggtttcggcggtggaagaaggtgttgaaccggttttcatggcttatttaacttctaaaatgaaaggtgggtttccagtgatgattaaggaaagattagatacctaattatgttttaattaatcatatttatctaataataatattattgtataattatattatagtcaataaaatttattacaccacatttagttataacaatagtgtagacatgccttgaaaaaaatattggtactataattaggaggcggatgaggtatgtctcaaattatacagaaattaacaaaggaccctctcctctcagggggctttaggtcagccgattggaggagagtaaagagtcatccaacaatgtccattgttttggaggagagctatatatatatatatatatcctgaatgtgattcctgctaagtgaccacaaacaatacatactataagacttgtaagtgaaatttacgagtgtcactttgccgaatacaagtcacatcaaatcaaatgtaccactcaattggtgggaattaattcaatggttcttgctaatcaaggttttatggtgctcttgtctataaatagaggaaaactctcattgtaaaagagatccggatacatgtttataagcaaaaacgctaaagaaattgtggggaaaccacaattaggaatacatacggcaaggagaattggcagagagtatttcccattggggatggggcaaaaatagggcgaagaacccctaataaaaaattaaaatttataataaaattttaaatatataaaattattaaactacataaaaattaaaatgttacacattaattattatctaaaacacaacttaaaatttataaaaaagatactaatatattaacaaaaaataaacataaactagaaattataaaatattattagaaatatataataaaatactaaacgggtcaatgttccctccccccgtttaacatttggggtcaaaaggtaattcccctccccgttccgttcctcatttacacgggaaatctccggcccgttaggggtggagccctttcgaggccccatcctcataggaaaaatgtgcatccctaaccaaaattgttgttcacatttaacaatccctaattatattaattgatagactaaaacttattaatatcctaactacttaaaaattttcaatctcacttctactaacttctacatatttacattttcatattttattctaattgctgaaaatctcaatatatgatttgaattaatgtaaatatcgtatatgtaagcttaatttgctctaacatttattatttgtacataattggagaaaaaatctcagtcaattactataaatgtaaaatctaaattaggttgcttattaatttttatatacataattaggacttatatagaaattaaaagctac

SEQ ID NO: 31010 - DNA, 894 bp, Cannabis sativa
aaaaaaaaaaaaattatattagaatgacattctaatatattaaaatacaatcaaataaaagaatgaaataaaaattgtttcatttgtattctgttcccatttattatctccctccaaacccttttaagttttgtatctttctctctctttaatgctatactaacaataatttgaataagattaataatttttgttatttataataataagattacaacaaaatacgattaaaataaatataattttgacttgactatcacaagatcacaaacacaacataattataccaagaaaaacactaatttattcaaagaaaatatgaaacccaataattaactcatgttatcgacatgacaccatatatatattcaactaaataatgtaatccaattaatatataatcattaaatattcctaaactaaatatttttttcacagtttagggtacgtgtacttttagcaaagttttattggtaatggtatacatatcatttcatttaaagtagtgaataagtgttattgtaattaccacatgatgatgtcatatatatccatataggcataaatatatttatgaaacaaaaccatgaattataagtttcaacaaattaataattttaagtaaaagaaaaggtggtagaacgtagctttctttccaatacaaccacaagagatagaaaagaaaaagaaaagaaaagtatttgagaaatttgtgatgaacaaaggtcgaactaagttaatggctagaaacgtatgaaaaataatgcaatgtatatgtatatatttatatgttgtgagctttgaatgttttcaggctaagattagatatttctcttcaaccaaacaaatttaaacgacacacatatcgagaatctatatatatatatacatata

SEQ ID NO: 31011 - DNA, 1822 bp, Cannabis sativa
atgtgggaaaggattttttgaatgcagaattgagaagtaatcctagtttcgtttggtgaagtatttttgaaacaaaggagctagtgcggatgggggcacgtcggcgagttggaaatggttctgcaattagtattattttggaccattggctactatgtgatgagaatctgagaatcagttcgaatcatcctgcctttttaaattaaaatgttactgctcttatggtcactgatagtttggcctgggatgttgacttggtgcgtgatttgtttaatactagggatactcaactcatcttaagtattcccttaaattcaagtcgtattaacgatgtttggttctggtcttttgagagctcggggaatttttcagtgaagagtatgtatatacatttgcagcaaagaaaggaaggtgatttgcaactgttggggtctgatttctagggtaaattatggcgtctgaaagttcctccgaaggtgaaagatttactgtggagagctgcctcgaattgtctaccaacaaaggttcagatgtggcttaaacatgttaatatcgactctaaatgccctctgtgttcctcggatagtaagacaatattgcatcgactggttgaatgttcttttgctcagtcttactaggacagaacaagaatcggagttagtatggattatgctggaacttttacgggttggcttgactcttgttttaaaacttttgagggggaacaaagaaaaatcatagccatgacttgttgggctatatgaaaaataagaaatgattgtgtttggaaagagaggagggctaatgtggcatctgtcactcttttggctaaaagcatgctagaacaatggagcaaggcacaagataagtttcaagtttcgactgctgcatttttgacagcagttgatggtgctgaattgtggtagaaaccagcagcagggtaggtaagaataaatgtagatgcaattttttttttttcaggtgcaaacatgtatagcttcgcatgtgttgtaagggatgaatcgggtcacgttttggaagctattccttgctgcaaacaaggcagtgttactccagaattagcggaggctatgggcgtgagagaagctttaagctggctaaagaggaaagattggaatcaggttaccattaaaacgaattgtcttactgtggttcaagctcttcgcaaccctctttctatgttttcctactttggaagtgtaatttcagattgtaaggctttgtggaatgatgtcaatgatgtgtctattttatttgttaaacgatttgccaatagtgttgctcatgcaattgctcgagcttcatcttgggtcgctgatcgtgtcattaggagtaatgagtttactcctgatattcgcgatgtaatcataaaagaagctttattcataaaaaaaataaataaataaattagagtatcaaataagatatagaaaagagataaaataaaatattatatttttaaataatatgtaaattattagcatctttaaataattgctgctattaaaaatgctttaaaagtatttttttttgttttgcctaatgttgtatcttctcctcttgtgccaattttgtattgagaaatgctaaagggtaccagtgttgtctagcaccctcctacatgtcaatattgttgttggttcaactaagtatcgagtcagtatcaagtcccatataatttaatataatagcttttaaggagtatcgctaaccaatcacaacgcgacatgtcgacaatgtgctaagcaccactattgcctaataggaaagatcttttgtattgtgtcaaaaaaaaaaaaaa

SEQ ID NO: 31012 - DNA, 4248 bp, Cannabis sativa
agtctggagtaaggcgagtcagacctacacataagatctactgagatttcaaaaacaaattttcttttaaaaaatacacaaaattctttggtaagaacaaaagggaccaagaattaattttttccaaagacccaaaaacttttagggtcggccataattatatgttagcaatattgattttctatttccatttgaacatatgtaatgagaacaaagaaaaaatgaatcttaataattcattcatttggtagatggtggaacaaattaaaaaccaattaatttttcatattaaagtcatggcatatattcgcgggcaaaattttttatttttaagaaaataaatttttttataaataaaaatcaaatacatgtttatttctacattaaataagagtatacttacaaagccgtagccagcggtcttgaatatcggccctatcaatgtatacttggagcaatattgagcaagaaaaatcttagtattaggggtttcatccacatatgcagcaataccaccttttgcactcccaattgataaaaaatggtcacattgttgagtggaattaagcaatacaatttgtgaattggcaaaacctctttgtttcaacaactcatacacgaaagagtatcccaaacacccaactctttctccactctttaatatttggttaatgtctttaattgttggttcgagttgttccacggttaaaagtgatgttaaactagctgcgtaactttgagtcaatattaacagaacgaacgcccaaacaatcaccacgaatcgagccaagttactcactactctctcctctgcaaacaaaccctatctttcgttaaagaaataaaattatatgtggaaaaaattttaggtaaggcatcctttttagttctactgtaggatcataatttgttttcagtatataaaaaaaattataaactaacttttcattgtaggcatattgatgcttgtttttagaaaattttgaataaatttattgtgctaaaaatatgatttgcatagcaagttgtatgcgtggtattttatattataagtgtacaattgatattttgaattttatttttgacataatattttatttagaattttcaaaaaattaaaaagatatctactataatgtaaattgtcatataaaaaagttaatgtgtaaatttgtgataaatatattagagaaagaatacttactatgtgcaaaaactatagtggaaaaggagaaccaaaagcttgtaccgatttgatgagacggtggtccgcgaaaatcttcattgattcggtgttctaaaacccaaacgacaaaaccaatgaagagaaagaaacaaaaggtggttacccataaatcccacgttaaaggcttcaagaaaacccaagcacttttagtcatgttgtccttcaccggcaccaccattgccacacctgattctgtgtatggcaatgtaaaatatacatattgggatcgatttgctctaattgtcatgtctgctaccaccgcatcatacttctgtcaaatatagtaatacagttaattagtgaaatatatatacaagataattatagtatgttacttttgtcggtaaagatatatgtatttttagtatttagagaaattatagctcaatttttttacatgtcgatcgatattatagttataacggacatttcattagcttctgaaaagttctaaataatttactatactaataataaatgtgcaactgaatatttgaaccatattttaagtacaatacattattctaaattttctaaaacatatagaatgtgatgtatgttataactacaatagacacaatcatatatataaaaatttataaattataatttctctaaatactaaaaataaaaaattattctaccgacattgacaaaaatagtaatattaataaaaatatatattacgtaccccaagatatacttgataaatcaagtcatcatacgaaccatcacgattgacataaaaatcataattaagagcatatggtaacgctctaactgacgctttaaatacatcgatgctaaatcctatgacatctgatgatgacaaaatgctagtgtttgcatcgcaatttatcacatctacaaactctctataaacactactgtttggaattccaatcctcaacctcttctcattagttggattctcccaataacctttgggagaattagtatactctcccggccataaaataggttttagacttgattttgaagttgaatattcaacactcaaatttgccaaatttcttactagcccattattttgtgtccaatacccaattcttcctttaccaccattcacaatattcactatttcaaaaattggtgtttttagttgcccattatctaagatgaaatctccagctaggcctttaaatcttgtacttgataaggtttccaataatttcggaccgattggtgacacattaaaactatcgagattagttgagccactagtatttgtgacactatttaacgtcgttgtattaatgacaccaccacttgtactaataagtttctcgacagctaaggctaatgcatggaccgaatcataagcccaaaaacccatgacgttgagtttggcatcgaaaaaagtgggatttttgccaatttgatcaatatttttatagaagtaattggctttccacctaactttaaaactatcaagctcttttgattgtggtacaaaagtcttgattcctaaaaccccttccattgagtcgatgatcgaggaatttaaggagtttaaacgattggcgaaatcttgtgttatgatccaaacatagccttgtcccaacattccaatcttattagctatggtgaacaaccttatccctaggtcagacgacgtgtgaacaacaaaaaccctagtttgcattgtgttgagtttgtaaagttcggccttaatttgatcatcagtggccgagggtggaatggcgctacgataagggacttccgtgttcacttctcctaaggcatcaaccaaataaggaataattccttctccatattcgttgtcaacgtaaatgggcacaacttttcgccatctgaaagctttgactatggaactaattgctaagacttgagatgagtcaccagtcgccgttcggaaaaaatatgtgctttgatttgaaattttaagagaaggacttgttgctgaaaatgatattattggcacttgagctttttgtcccaaatcaataatgaatttggcttgagtcgatttgtgtggtcctagtattgctcgaacttgtacgttttttataagatccaaagctgttgtacatttgttgcattgaaaataattcagtctcagaaaaaaaaaaattaatgtagtaaagaaataatgtaatatttaaggttgtttaggtacattttaaaatattagaatattattcaaatgtatagaatgattttttcactattttagtagaataactattccatgtaaaaaaaatgaaagattattccaatacaagataatactaataataatttttctatcaatttctttgtatacattttaaatttttattttactagattattttaagattttaaattcttaattaatttaataaatatttattttattaaattattttaaaattttgaattcttactagtagtcatgatataatcatatcataaattagctattttggactattaatttaattaatataaaatgcgagattttttaagtaaaatatatttattttcgttagacatgtgatgtttgattgaaggtaataaaacaaaatggaaaggaaatgaaacaatatttattctattcttttatttggttacattttaaagtattggaatgtcattctaatagaatacttattttattattttagtaaaatgactattctattttaaaatgaaatgaatgatcattccaatgtaagatgataaaaagtttgataattttttatcaaaagaaaatttaaatttagtttcattccatattcttatttctataatttcaattactatttttatattttcatttctttcaaccaaaccaaacgtaatatgaattattagagttgttgtactaaaagtaaaacactaaattatagtgcataaataatttggtgtgtcattaaagatactctaagtaaacattataaaggtatataattaaccatcatgacgagcttaattaatatattatcatgattataataataagttattaataacac

SEQ ID NO: 31013 - DNA, 2495 bp, Cannabis sativa
  modified_base (1230)..(1241): a, c, t, g, unknown or other
  modified_base (1334)..(1338): a, c, t, g, unknown or other
  modified_base (2030)..(2032): a, c, t, g, unknown or other
ctggtaaaatatttccaacagacagaacattcaaagaccaaatattgaatgaaaacttcttcttttattcagatacatgctaccctgaggtgaacatagaaattaacactttaataaaaagtaaagaaaaataaaaaggaacctcaccacccccagtttattaatagtatcggtgtaggtggtcaacggttcatgctcttgggattcttgttccatctagtctctttaaatggtaagtcttatcaccaatgttatctataacttcatatggaccttaccaattttatcctaagacccccaaggtcgccgatttcaaatcttctgctcttgactttagagttgaaatttctggcaattatattttgatacatctggagttggacctgtgactactctcaaagctcctaaattaaatccaaggattcttaaagtagagcatggttttgagttggtttgtaggtgtccctcctgtgtgtaggcactgtggattcaactaggattacttcctcacacccataggtcatggggtatagagtgtggcatgtagaagttctttcagtggttctataggcccaaagaactcttggaagttccttcagctagtgagctttacaagtttgaagcttctttttcaaggtggtcttcagaatgttattgagggcttccacttgtctgtttgcttgaggtctggccattgcaaaaaagcttttgagtattccatgtttggtacaaaagtcagtgaattgatcactattgaattgctttccatcagacattatcttgtgtggaagtccatatctacacactatatttttaatcacaaagtctagagccttcgtggaagtcaccatgttcatgggtttagctttcacccatttagtgaagtagtcaacagtgacaatggaaaatttgactcctccctttctagttggaagtgatccgactaagtctattccccagaccacaaagggccaaggactgttcatgagggttatctttgttggtcgagcccttggaactttcgagtaacactgtcattgctcacatttgtggacacattcagtgcgattcttcttcatagtaggccagaaatagccttagcaaataattttcttggaaagattaggtccgcatgtgtgatctcaacaaaatccttcatgtattcagggccggccctaacttttagtgggccatagaagaaaaatttattttgggcccttatttagaaannnnnnnnnnnnttttcaaaatcagtaaaaaaaattgtataatttttaaaggtaaatattttttttgggcccctgggataggtgggccctaggcacaggcctagnnnnnctatgcccagggccgggcctgtgtatttcatgcataatagtgcttatctctgttcgagctatgcaccttacatacgacattgataatccacatatgtatagttcctcatccatgatcgcgtatttgggggcttgatactacatcttctatgaagcaactctcgagtttttgctacgtaactagccattttttctccttttttctggtactccccagatacttcgttgactaaaagctgtgaatcactatagagttcaatattttagcactaacctgttttgctagttgtaaaccaacgattatagcctcatgctcagcttcattgttggaagctctgaacgagaaaggaagttcactttgaagctaaaggtttagtggagatattaaaatgatttttgctctggaatctttttcatttgatgttccgtctacatatatcttttagacttctctctttggcactgacattttaggatcgtcatttatccctgtgcactccacaatgaagtcaactaaggcttatcctttaatttaaatttggggctaatattatatgatgacctcgcttttggtcaacgtaaatgagtcaaaattgtaagtgattaaggatataatatacatgtaaaataatgaaataaataaagacacagagcttttaaagaggttcgaccccgagcagttcggtaatagcnnnctccccttgatttgtattgacttaagaacaaagaatgcagtgattcttctcttagagcttttacaatgatatctctgagtatatctcttagataagtttttagaccctttgtccagtgaggatagatcactatttattgggctataagctttgagggaaaagtttacctgatgtttacaatgactataattggcaagattacacattaaatatagaatacactgattaagggatttggacagcttgccatatctctgtgatatgatcccaggaatatagggattgcctctgtgattcatgatacaagtgttgagattactaagtgttggcatgttgttcggactgtacactgaccggttaagaaggctttgttcgtgcagatatgtgtggtgttctattcggcatatctctttcgagcagatatgtgaagtcgattccacatgtcaccagtatgtgatgccac

SEQ ID NO: 31014 - DNA, 2083 bp, Cannabis sativa
  modified_base (2023)..(2039): a, c, t, g, unknown or other
aaataattttttttttgcacattttttgtaattattttacttttgttgtacatttatgaaaaaagccctttatatatagagttgataagttatttttaatattattttttatgtcagctgaataatttggcagtgaaaaattattttatttttattatttgatgaatagaaataaattgagaaaatttaaagaaatattatgttgacggtaaaaaatagccaacattagctcgctagattgaggatgattaataaatttgagtaaataatttagagagacaaaaaatttatagtcgtttacttcccatatcgcgatggtaataaagctatgtctacttcgaatttttatttctcacgagaattatagaaaaatgctaagtatttaagctctagtttctagagagaggtactcggaccttgtgggtaattttttgaatgtaaaaaatgagctaagagagctctccttttataggtgaagtaggcccacaaaaataggataaaagtacaaattagatatttttgaccgtagatgatgatctaacggcgaaaattaggttctggtagtcatagccattttttgatgcctggcgggtgtaacttggagcttatttttcgtaactttcttggggtaaattttgacgacgatagctttagaattacaattagagtgtgagacatgacttgatagacattgaattatctttgaaatacaagtttaatcacatcaatcaaatcaaaattgagtgagttatgactattttattgaagacagttcatgaccgagcacccaagatgatatatgccgtcaacctggacgctaggtaagtgcaaaaacgtccaagggatgtactttaatgtgcctaagtaatattttgacatcacttagttaatttttatgttactggtgaagctggttactagttgtcgaaaagttgttgttttgtagaattgatagactcgaaactcttcatttctaagtgagccaaaaatgagaaataaaaagtttgaatttgacttctctgtgttcatgaatctttgttattgtgaaaaactagacggatggtcaaacaacattagaatcggataagcagaacctagcgcaccaggccttttgtcacacatgcgctcggtacttactcccgagctctcgggatatcgttttgatacttctaaggtttttgaacttgaggacgaggtctcctatgccatttttaacaattataaattcaacggtcgcatcagatttggtatttgagtaattgaaggtagcgtcccaggttgatcatcaacctaggcattgggccctgtttccagaggctcgggtttgtgattttctccccgaatttacttgaatcttcattatttctgatgacgaaagaaatgccaagaacacttttttcccagaaatttcagaaaaacatttatgatgagattcatgaagtttttaagcataaaaaacaagtgaaaattgactttaatttcaaataaagttttcgggtccgaatgtgttcttaagattttttttagatttcaatggtttttcaaattctttccattcataaaatcaatctaaaatattatattaatgttgtaaattagcatatgggattcgaaatgaatactgaaaaataaaaacataaaaatttcgtatacaaagaataaattcatgaatatagatactcgtatataatctttattttgtataaaaatatgataaatatatagagtagaatattctacttaatattattaaataagattattgaatgaatgagtatatatataatcatataggagtgaaaatataattatatatacatgtatatatgtatacgatactaataagaatatgtagatatgtatgaaaataattattttgatgcctaaaaaatattaatgttgaatgaatataataattttaacaataatatgaatcaaaaagattaaaatgaaaaacatttatttttattggccaaatgaccataaagaacatatatgaatatgggtgactattcaatggttnnnnnnnnnnnnnnnnnatatggttacatttttctttaacctgtaatagcaggttactaat

SEQ ID NO: 31015 - DNA, 3152 bp, Cannabis sativa
  modified_base (1457)..(1462): a, c, t, g, unknown or other
  modified_base (3098)..(3106): a, c, t, g, unknown or other
tagagttataatttctcaatttcggagattttattaaactctaagtgtattatttatgttgcatgtgaaatttattatttgtatgatttttgcacagtaatgatagaaaatgtgacagatagccattagagtcacacaggttagtttggaacctttgttttattgagaccattataagtggtatttgaaatttttaagttttaggcaggattatagttgtggaccattttatccctaagccttaagatttcttaagggtgaagtaaaagcaaaattagaattttactatttatttagatgttgtcttttagtgggatattgtagaataatctcacttattctaatttgtgcaactaaagtaaaacaaatggaattaagggttttattcatttatagaaaataagaaaattaaataaaccttatccttctctttctctttctcgtgaccctctttgaaccaaggaaaaaccagaggttaggctaccaaattcaagccattgttaggaaggattgaggagaaaccttaagccaagatcaaaggtaagcccttgatactttattctttgttgtttttgaagttttaagcttggttctattttatgattttaggaatttagagagtttagttttatttgagattgatttgtgttagagactattttaaagcttgattttagttatttatgacttgtttttggaagtagtagtagttgtagaaagatttgaggaagtttgagttttgtgaactcaagctttgctcattcatggtgaatttcattgcatgttgttttagatgcttttgaattgtgggttatgtttagaatactccaaattactattctggaaagtttggtagtttttggttaggttgggagctagttttgggggcttaaaaattgagaattttctagcccttgttgcccagtaagagcttctagaattggtgagcctccaaaggagagcttccgaaattgatgagcttctggattggtgagctccggaatgggtgagcttccaaaatgggagagcttctagaattggtgagcttctagaattcgagagcttccagaatgggagacttccattgaggactttaccaaggagagcagtttttgtattttggccataacttttcactcaaatgtctgttttagacgttctatacaccattttaaagcttgcgaagagctctaccatatggaatataatttagagtcgaattatgtatttatttaagagtgttttgactttatagtttggtagaaaaaccctaggttctatttgggtattagagaagtgttctagagtaaacacttattagttttgcattatgacatgggacctccgttcagcacgtgaatttctattcaggttgaccaaaacacttaaattaggaaatgaggtaagattagtataaaacatgtatatgtatatgtatatgtatatatatatgtatnnnnnnatgtatatgtgtatgtatgtaaattgcatgctgtgtaatgtgattcgtatactaccaacaccagtacggtagcggtacgaagtgcattggtacaatatatgatgttcaaagagtacgatcaagtatttaccaaccaacactagtacgagacaagtacgtagtgcatgtggtataacacttaatggtactcaaggtacaattcagccctacagccctaccagtactagtacactagtacaggactacaggacgaggacgagtacttagtgcatgtggtacagaggttgtacttctgttatgaatgttcttgatcatctgtgaagccttttatacgttatatgtttttcttactgagtctgtcgactcacagatattgtttacatgtgtaagtaaggataagacaaaggtcgaacaccaatgagtcttgggattgaggattattatacatatcaggatgattaaacctggagaatttggtctagagacgacttgggccttcattttgtagtcgtagagggacaattttgtaaaatgtatattgagtaatgtagtaaactttacaaacgagatcccattttttataaatagttatatatttataaaagtttaaataaaaatttaaattgacatgattttcaagaaaccctttgattagcaaaggtgtccacagtaagtagaaaaatactgcagcgtacctaagcaagtagggtgttatagcatgcctttcggttagatgatgagctatcctaattcgaggaggtgccatcgctgattgtagatgatgagctatcctaattcgaggaggtgccatcgctgattgtagattgttgcatcattaatcatgtatgatttctttttttaaacaaatcatatatgattttaattaccacaataaataaaaaaaactaatatattttttatttaaaataaaataaaattaataattttttttgaataatgaacatatcattaaaataaataaatagagtgtacaaaaaagatggaccaaacccatcaaacaagtttctaatccactatgagtgtatgcacaactaatccatgagatgacatggactagggatacttcaggaaaattggatagccaacttgaaaaaacaaaataatataatgattggagaaaacattcaacgctagacaagcaaacactttaaaataaaatggagacgaagatggatccacaaattctgctcaaagatagtttgggccccaacaaatttttcctccaactctaacattagcaaattgcaacatgatgaacaacctgaaaaacacacaataaaataaatagaggtaagaatatatcttctttctaaataataataaataaaattaaaaaataaaatattaaaataataatcgaaaaaagaagaaaaacttagctctgagatttaatcatttttcaaaaatctttcgaaatctccacatcttcaaaaacttacaacatgacattctataattctataactaaacatattttctttattttttttaaatttaaaaaatatctcaataataaaacgcaaacacaattcacacaatatatattctatggctatataacagaattgttgatttatgagaaattattgggtgacttttttttaaataaaaaaannnnnnnnntattagatgttgccacgtaaagaggtcagcatacatgtagttagtt

SEQ ID NO: 31016 - DNA, 2696 bp, Cannabis sativa
  modified_base (2414)..(2414): a, c, t, g, unknown or other
taaaaaagcttccctactggtagggaacttttactaagtcttaccatagtcttgccctatatatatgttggcatatttttcacttcaaactttaggttaagtagatatatataaaaagcatatacaagagaatctattaatagtgacttgggctcaacaagcatgatgaaggtaaggctataaccctagtttctctttttttgagacaaagatatcgacgtgtgggattacatataaaattattatatgtatatgatcacatagacgttttagatggcagtaatagtttcaggtatatgacctttgtagggaaaaagctagtggtgatgagcatgcatatataccttttgctgtcaaaacgtatagtcacagcctgtccttaactatatactttcactaaagagaaatgctaaaaaaatgtgtactattaaatataatgtttgacatgatctaataaaataaaaattattaactaacactatttatgtctaataacaattttgttttagtaaaaaacttaataagtcttttatatttaattacgtctaatagcaattttttacttaaaaaacttaacaggtcttttatatttaattatgaccaatgatatgtggtttgttgtgcacacaacaatgacacaaacattcactaaaccattatacataaatcactcgtcatctttaattggttaaaaaattaatgattttcttcaatgttttggtacataatttttgtacggatattattattactaaagtgtatctcataaaacctgtcacacctttaaatccggttatgaattttttacaatggcactgaacattcttgcttagttctctgcccaaagtgttcctaataaattctctcaatctcactcaaaccctagcaacgattatcaagtaagcaaaaaatgtaaagcatgcacacgaaagagaaaacttcccagcctttttattaattttttaaaaaggaatataaatttgatgcaagattcacacacgtcatgttctatgtgtttcacaacttacaaattcatatataggcaacaattataaaatctaatacaaatccaactaggctcatcttaaactaaaatatatatatttaaaaaattaatacatttaaaacataattgtagagggtttacttagatatttcttaaaatatcccacaatcttgcaacttcaatcctgaccacgcctgtccgaaattgattcaaatatgaatgatctagttgcttgagatatttgcccatgtcaaccaactactctacgattctctcagttatctcttgatagtctatccacattcgcacacgtgcttcacttgattctcacatgattcgttttcctacaattgtagccttattcaagcaaacaacccaccaaattcataaatggacctaacggatcccccactttgcacatctacaatgaacatggctcaatcttcaaccaacattgttgcccttgtcaaacaccttggatgaaccaccaagcattcacccatgcatctcgatcataactcgagcattttcagtgtgtctccccatcttggttcactggggtgtaacaaaccctcccccaccacatgaagtcaacgtcctcatcgagagggtatttgaaaattccttaatctcgtcctcaaaccaccacaaactcacatcatgtgctcatgtaacatctacctcgccctcaccttctcactaaacaagaaactcagtttgtcgatttctttcgctcactccttttgacctcatggctaaaattttcttcattttctttgaaaattctacccttaaagcagaggacctctcttcatctaatatccctcgctatccccatgataaggcttaaggaaactcacatgaatatcagatggatcttcattttgttcaacaaattcaatttatatgctactttaccaatccttgctagaactttgaatgggtcatcatacttctaaatagggtcccttcttatctatgactttcttctaaatttgagtaaatttcaacaaaaccttctcccccacttgaaactcaacatctctatgatgttgatcaacatatttattcattattttatgcgccatggccaagctatcccgagcttgattgatcgaatcttgtttctcccattcaaatcgataggcagttgcaaaaattccttgcaatttctatttgatcactttcaagagtgtcaagggttgatgtcccaatgctagctttgcttgactcatcccaatggcagaagatcgatgtatatgtatatgtgtatgtatgtaaattgcatgctatgctatgtgattcttatactatcaacactaatacgataacagtatggagtgcattgcactactacaaatattaaaattcgcgaaggtcctaaaaataatttttttggggaccgtcnctacaaaaattaagtaactatttaaaactatcaagaaaaatttagtattcccgacggtttaaaattataataaacaaaataggcgatattttttaataaaatgcaaaattttaagagagccatatacctgacggtttaaaaccgtcacgtatagtataggagacggtttactatacccggcgattttaaatcgtcgggtataagggcccattaaaaaatcgtcacctacttcttgccacatatcccacgtgtccacctactttttttctattttccacatgc

SEQ ID NO: 31017 - DNA, 4963 bp, Cannabis sativa
tgagaggggtatttttgggttttagataaaagtggtcatatattttcaatggtgatatgtattagtttagaaataaaatattaggtagacataagtatagaaaatcaaatttcccataattcttcccatattttttagaatagcttttgttattttagctttagcccgttcaactttttcttaatcttgggaatcttttgcttttagtctatgtggaatagacaatatccatcatatctattttaagggctggatgatagattgaaatttgattattgaatatcacctcttattccacattttttttttaaaaatatcaattgatgtaatattcgagttgtttaaacctagtaatcaatataaaattttattcaacttaaagtttttattttattttttgaaatggtcagaatgaataactcatatgtcacacaactgctatatgaaaagaagaaatgttgattgggacattgacactttaagctaagattgatatctttaaatccatgtcctattcaaatttttcagtcattctttttttttttttttttttttgacgcgaatttttcagtcattcttgaatagcgtacaaacaatcatagatttaggtgtatcatgtgcaacaattaatgttatttagatgtgtaatttacaaatttcttccacaaatttgtaaaatatacccttaagtttaaggacaagtttcactctctttctttgaaaaagggcaacctatccttactatgaaaattgaaacatctcgatttatgctctctaagcacatttttttttaaaactaaaatagaaagtgaaacttgaaaaaaatgaacttctatcatataaataaaaatactttataatagagaatggataggaaactctctaaaatttcgtttggtacgtcgtattgtattgtattgtgttagattgtattgtattgtattgtgttggattgtattatattgtattagtattatttaatacaacactatatttggtattgacttgtattaatatattgtgtaaagttataatatattttcaatacacttgaccccaacaccaactacaggtcgcgtccgggtttgggtctcgggtccgagatcgggtctcagtcccggtccaagtctggttcgggtctgggtccatggttctggtcctaggtttgggttgcgagtttgagtctggatccgaatccaggtccaggtatggatttgggtctcgggtctaggtctgggtcatggtccgggtccgagtctatgtctcgggtcccaagttcgggtttctgtccgggtccaggtctgggttcagggtctaggttctggggtccgggtctaagtctatgggtatgggtccggtccggttttgggtttgggtttgggtccgggagctgggttcgagttcgagttcgagttcgagttggagattagtgtggactccgaatcttttgtaaatattataatacaagctaatacagagcatttattatatattaaataatacaacatacattatattaaaaattttggtcgtaataatcaatacaatacattgctctgtctaaacatagtgttatttattatctaatacaatatgactcttatacggtgtacgaaacgaaccctaaatgtatggagctccatactttgctgctaaacctttttaatcgtattttaattaatttttttatttttttattattttataaaattaatttaatttgataaattaaattataaaatattattaaaataattaaatacaaattatagtagagattatgattgaagcaaaagcaataataataaaactgatttttttattttaattttttaattattttagttgaaaaaaatagagaatatcattaaaaatgctcgaatatttaaatatcaatgtttttgctgaagaatttaaatatcaattttagtaccttaaaaaaattcgatgatagtgatattaactttgataattggtatataattaccgaatgacttaattagtgatattcatattctagtcaataatggatagtaattttaaacttcacaattgattaagtttgaacacgtaactagaaattatatatatgtgtaaatagtggggaagtatgttgacattttttatacatttattttgtaacaacttgattattaaacgcactcttttcttaagcaagccatcttataaactcatatttatatacatggaagaagtcagaaaggagctatctctagattttgaaggagattaaattacatttttttttccttttaaataaatggtcttacataaaaaaataaaaataaaaaatgttactaatcatttagcaaattttagaggggacttgagacctcatacttggtgctttacatggttctgtgtttgtttatatacatagaatcattttattttgttagaaatctttacaaaatacatcaaaaatttgaaaaataattacaaaactacataacataatatattttttttttactttaactctttgattttttttttatttacaaaagcacaccttcaataaaaataataaatagttttttggttgttttataatttatgtctaattgtattattgttgtcatgagattgttttttgttgctttataatttatttatagttattataatgttgatttattattgattcttttttttttttttgctgagaaagtatatgttagtaattttaaaaccttagaagagtatttttataaatactcttttaaacttatagataacataatttgtaattttaggtcgtaaaatcgatattaaaaaaaaaattaaaattcttctttttcttgcaaaaatttatattaataaaagagtgaatttttatttatttattttttttggaggtatacctttgcaaaatatgacttttgtcaaaaaaaaaaattatttttttttaaaaaaaaaataagatttaagtaatataatgtaataggttactcatctggttaccttagggtacctggttactcttatttaggttttccatattttttttcaattttgttttaatgttcccaatagtataactttttttgttaaaattaataaaataatttttcttttgaaaaaagaaaaagaaaactatatttttgtacagatgatataaaaatccattaaatttgtaatttcatcttaataaaagttatacaggagttgagaatctctttgtttatcgagatttttagaaactaattatacaataaattaagcttaaagaagaaagaaagatttttacgtggttgagacgttaatggggtttagtttatgagtcaatattattgagctagaaaaacttcaaagtattcttacacaagtgttcttgccctagcttaagagcctaattcttagcctttgattgcggaaatgattttccaaccttttgcatgaaggaataacattctatttataggctagagtcgggtatggatgaacccggacccagtaggattttaatttctcaacttggcccattgatgcagcaaaatacaatatatattgactttgggcctgttaggtgaggcccaattcacgagataacggtcattcatacaagtggggacagtttggtgatgacaggtatcatgcgcaaccatgttagtacaaagaatgtcagagaatatggtgttggacaaaaatatggtttccttttggtggtgcgcacattctctgggtctaacatatagaacaaactcctaacacggtgggaccctgtgtcaaattatttgatatttattgcatttaagaccacatttatgagttatgggtatttttgtaattttgacttgagaagagttaaaatcgtaattttattatatattgtggtaatagaatatattattatatagtatgttcatttttgttttattgcatgtgatttttaacaaatttatgcggtatagtcacaattgggtattttagcttgaatctggttcagggtccaaaatttatgagttacgtacttagggaaataacatgaaaagtttattgaattatatgatgatatgagtacgtatgtggatgtgaatttattaaattgcccataattgttatttgtattgattttttagccctaggggcaaaatgttcatttgatcaattttattaaaatgaattaagtcattttgttgaatgatttagaaaaggaacagtcagggcattaaatgttcaatgatatgcctcaaagttttgaaccgccgaaactcaaagcatgcaatttttcgaattaggtaaatacgattatacccttaggatcattgaaaaagttctttttaattaaaaaattacttttactgggcaattgttatacccgaaatttggctatgtaccagaagctgacacgtgccatacaaaaggaatatgaatcagctcaaagagtatatattaattaaattgcattattaaatataatttaactaactcattccaattaatcaaagttgataaaaatattcaaactcgttgactacataggcatatgcgagataagaataataactattagcgcatttagttgatgagacaatatgtccactacggaataaacagagtaataaagatgtacaaggcgagacactaaaggtcttactagctgttgactcacatacacgagcagggtgaaaataactacactcaaccatctcgtcttatacacgacgtaatagtcatctcgcatcatcactacaataggagagtactgcgagatgaagcgtatctacacttagtatttttttttctctcaagatagataagaaagataactcaaattcgacaagaaacaaccttctttgtcagcatagtcgtttaaaggataaagacaaggagcagttgggcagttgttaaatattatcccatgtgcaaataaatgaaacgtgaggaatgttcatgtttcatgagcagttgaaattgaatcgatctcaataaaaataaa

SEQ ID NO: 31018 - DNA, 1479 bp, Cannabis sativa
tattgttattaaagtttaaattccgcgcaattttttttattagtaatcccgtttaggggattaggctttaataagtgatttggatagcgtgcctaattacttagggcgttacaacacctctcatggctcctatggaggagatttgtcatcctcctccacaggggtcacatatccaataggcacaccaatcataggttcctcatcctcaatgacattcacctccttagagggaagagtaatatccaacaaacaagcctttgctttccacaccgagagtctagaagacaggcccaaggagataggtttgtcgaataattgagagttggttggagaagccttggccttgcacgacctctgcacctcatcactagtctaaggctcctccgaagagtcagagatagcccgagcaacatgatcatccttgttactaccagtcgggccgactcctcacaggaagtctccaaccacacgcttcactcttctaattaagatgcatggcttgtttcccaatgagcaagtttcaaagtccaaccttcttttctttaccggtgtagtgtgttcattaaatttagaggatgcccgagcaccaatgtccatcgaaatcttttccagtttttttgcaagacaaatgatcctcaaaagtcttccttttttgaaggagtagctgtaacagtacgagccaagtcatgaacggtctcaataccacctcccacaagtctcttctaaagaaaattcacctccacacacctctttaattgttctaggtttcggcctgaaaaaaattagacaaggccctttcctcatctactagcatattagattcttggccacaaatggaactatcattggacccctccaaaacttttaactcaaccggccctaaagaggcagccaacccaaccataggaggcccgttggaagaaggcctatccccaaccggccctaaactcgaggcactaaggacaactcctttctcaccacacgacaaagacaacccatcatgagcatcacaatcaggcccatggaagataggcttcggcccaacacttgaaaaaagccttacccaacaaacagcatccccaccaacattaaaaaaaggaggcagcccagcatcaatacccttcctcgagccagcagaagaaaaatcaatagaagaatagttaatgagcctaagaaaattggaggcaagctcaaaatctctaggttgacccaactctttcaccactgccacctcattgcacacatttaaaccattcaaaccatttgtctagttctccaaacagtgttaatcaacattctccaaaccaggtaatatcgtagaagcctttccaacaacaggttttacagtcacaacatgattaccactaatggcattcgaattagcacgcctatcaaaagtgttcttggggatccaaactgccagctttttggaacgttgtacagatcgaggccctgtcgtcgctatctttttcttcgtgc

SEQ ID NO: 31019 - DNA, 1247 bp, Cannabis sativa
  modified_base (893)..(894): a, c, t, g, unknown or other
tttatggaagattcacatgggagatgtccgacgacgactatgatcctttcgtgactcagaatgtccttcccatataaagaggaaaggaaagaaggggtggttgcgacacgtatgcattttgcaaaatgggaacaaaacgacaactgagtcttcagagtaccacccgcccaactacaacttgtgtggttgcgttgcgtcttaggcactgctgcgtcagctttccataatcaacacgtgtaacacttgtctcctgccacctgtgaaaagagattgttggactaagaccgcatatccctctctcatatcgacatatctgatcatattcatgagtacccttcttattattatgcccatcttataattaccacacacatactccctcgaatataataaatcaaactcaatccaatggtacgtatatatagttacgaataagttctgttcacccacatttctttcattcattcattaataatgcctctcacatataaaagatttggtatttatatagtgggttaaaaagtttattaatatctaaaataatattttatattattatttcagtgatattatgatctcttatacttaaattattatttattttaaaatcattttgattgtcttaaaatagtattcttttttttttaaaaaaaaaaaatgcgtttataaataaaattgaagttagacttcatgatcattacaaaagatattaataggtatagtagatatatctaccatgcccgtaacattgttggcaaacgcccatttgtccacattataggccgcgtaattacaacttctagttatacaagagaaattacaattagtcataaaagtagagaggagcttgcaatgacgcacatagttctcaatcccctaaatagagtcatccnnttttagattcttgataacaatctctgaatcactctccaccaaaacaaaaggatgatgcaatgagaccgccatctccatggctaaaagacagaccgcagcttctccagtgagtgggtcagagaagtgtagccttttaaccgccacccacaatactgattcgttatggtctctcgcaatcgtcacaacacacatagtttcacatccgactttgacatcgcagttgattttaacccaatcttccagcggcaaagaccaatcctgagtcccaatagactgtggaggggaaagaaggcaagagccataatctgtgtaacaagaagaaataaagtcaatatagtgtttaatgttaccca

SEQ ID NO: 31020 - DNA, 4884 bp, Cannabis sativa
atatttttatataatactatgttaaactttaacttatactaaagtattatatatttaggtgtccatataagttaatcacacaaatagttttacataaaatataatttaatataatattatacaatacaatacagtctaatacggcgtagcaaacgaacccttaatgttctgatggaaacaagccaaataaacagcaggattacaaactctcactcaaagatgaaagcatacgtatcaaaataaaataaacaaattgctacaagtcatagctaaacaccagaaaaggaatgaaggccacatagcatactaaaactcaatcaactgtccttgtcaaggatattgatcaatggagactgagtaatgtcaccccaaattagcatcttgtcacgtacaatctttcttgaaaattcctctggcatgtcagttagcttcaattcagctagtgtcttcaagttcttcaatccatctgggacttgcaatctctcacaaccccttatctccaagtcccgaagtttttgcagtgctttttcttcaataatcaactctttcaaatcgtttatcttccatatctttaagactagaagctgaggaaatccgtcactcttgcaaaccatgcttgcttccttgtaagagtcagaatataagtatagttgtttaaggttggggagttttcctagcttaggcattggatcatctgtaagagctgaggctgataaggtaatctcggtaagtttgtgaatgtgagtgagttcgtctataaggagaggattcactatcctcccaaataactctatcctagagagattggtaaggctcgaagggctcaagaataggctattgggcttacctgtttcatcaatcgatcttagtcttagagtttgaaggcgcttcagtttagacattcgcgatgacaatctcatttgctcaaatccatccaagtggaacaccattgctaacttcctcagatcgtttgacttgtctaggcaatccttgagagggctatctttatcaacaaacacaccccacaaagtttgaagcttcttcaggaaattgcctcttggatgatgcataaatttgcatcggttgctgtgatgcaagtacagatttcgaagtctctgcagtttccagatggaactggggagagagcggacataagtatgcttcacatccaaggtttcaaggtgcactaagtcacctatgcacgatgcgattctctgcgagtaagtccaccttaagcctagatacttcaaccttctaagctttcctatgctgttgggcaattcaggtttgaaaacgccttcaagatcaagaacctccaattgttgaaaatgaccaagttgaattcccttgcaaagaaagtttcctattgtttctccaggttcttctccttctcgagggtcaaaagttagaaaggagtgaaggtttttgtagtctagttcaaaagtacattttgcaaagccaccttctagaaattcattgcctgcgcgaagaaagcaaccaacgtcatctctgggttcatcgtcctgttgaggatcgaaaggtagaaaagagtgaagtctattatggtctcccatatcatcaagttttgagtcaatgtcactgtggatgaggcagaggctgagaccatttttgttaaaatgatgagcgagcctttgaaggcgcatgagcttttgtggtgaatcatgagaaaactggagatatcgtggttcttttgtacatggaaagcggcatgtcttcactttcccgctggtatttttcttaactatctgcacaattccatgatcaatcagctcataaagctgcttctctgcaatttcttcaagagtttcgttatcatctccactttgttctactaatccttctgagacccacaacgtcaataatctcctaacagggatatcaaagtccttgggaaagatttcaaagttctctagtagtttttgtatatgtgaaggaaacttcctctgtccagtttctgtgaaactactttttaacaatggtaatgtggcaagagcctcagaagcggtggcgttctgcttcaacatcatatatccaacacgcatgatgttaagcggtaagcccaaacatcttctagcaatatcatgtgcaattgtttcttcttgtggagaaatgtacaccatctgtttgagcaagcttaaactttcatctgtggttcgtagacgaagttttagagtgctgtaactactgtgatttgggtcagctactgaagccacattctcattttgtgacgtgattagaattctgctcccttctgttttcccaaaggacattctttccattattttatcaaaaacattatttgttgagatattgtccagaaagagaaagaacatgtccttcattagaatatggcctatcttctgcttgtagtgttcgagtttctcttctaaaataagaccatgctgacccataacctgtaccattacatcatcgagaaatgaaatttgatcgtcgtaatcttgaggtatagaaagccacagacgtatagggaaatgggccacaacagttctatgaccataaatctttttggccaaggttgtcttacctatgccctccatccctactattgaaaaaacgccaacggtgttgcaatcttgatgctcagtatcagtaatgctggcagtcaattgtgaaacaactgcttctacatcttcttctagaccaattactaagcttgaatcttctcttaactcgccgctgtatgctgttatgcttctttggagaacacacatatgatgcttgatttgatcgatttcttgggaaagctgaagcctagctcgtgtaatcaacaatgtattgttgctctttgcatatgtcacaaatgttgttgtagagttgataactgcctttacaatattttccatttgcttcgaccaagcttctctgatattttgaattgcagcagttgagtttgcattattcaagagattaagcattttctccatctggtcacatatcaacctaagcttatcgaagacccagcctagtcgtggcccctccgtcttgaggtaagagcgaaacttgtgtaaaagggatggaaagttaatttcaaaatctgtctcatgaaaataacggtgtttggattttgatggatctcgtatgatgaactggaaaccatacttttccttcctttcgaaaaggtcagagaagctggcatcaatgtacttcatgtctgccttaaactttcgccttgctctccaaaatctgagaatatatagagctctaagccacttacatcgaagtgaagaagatacttttgaaaaggtgtcgatagcagccctggctttgctcacgatttcatataaatccatcaaccatgccctttcaatttggctctccaggcgaagatttttgatgtgttgcaagaaaggacagagtagcatcagttgcatctcaactgtttggcctttaatgctgtctaaactttttcgatcgatcattttgatagcagcttctacttcctttaaaacagaagatatcagccctcctgccccagtttgtagtatagagttgaccaacttgttctcgtgttcttcaataggcctctccagaagcgttcttataacagaccatgatttctccagtgactcacagatgtgtaatttaagtgctttcttcaccgtaaaactgctgtttatacgatccttgacctgcgtggtattaagaaatagctcgtttatatctgttaagtacttgatcattgttgagaaagacaaagatattctgttgaactttaatttattatttcttccatcctcaaaggttttgatcagcttatctgccttgacaacaacttcactcgcatcgtttacccaagatacctcgaatccagttagcccaacagcttctgctgtactagaactgtagtctagtccagtatcccatagttgatgccctttattcttcacttggtcactcaaagaagaaattgcagcttcatcatccacaatggcacgcaacagcgccgactctttcctaatccacttgatgtcattgtccaggagttgaaatgctatgaagtttacaaaaatgaaaatgcctgctgtgatgagagaaagacacaacaggactcggcacaatgttatatgctttacgtaaagccaaaacaaagtcaaacaaaatatcaaacacaagtgggcatcaaactggttaaaatcaaagaatgcgtttgtcttcttggttgctctattatccttttggtgttccagaaaatatgtcagcagaaccaaaccaaagtttggagaaccggcggagatggcattctcatccagcggcgaaaccccaaataggttggcaccagctgctacatccgtcaggaccgcccattccatcgtgtcccactcttatctttctagctactatgaaattgggtaagaacgaagcaaaaacattgaatcacagaccgaagtcagtcacactttttttctattttatgtcagtcacacacattacttttttaaaaagaaaatatctacacattactgtgtggaggcatagtcctaaccacaaccaaaaacttacacttgtcttcaaattcttacattcatcccctcatgttgggttccattaataatttagaaatatgattatgaaagtgaatttatcactaaagaatgatgtcgatagctgtgaagaaaacaaaattgtgggcaccctttactagagtaagaaaattactgttttttaataaagtactaatacaaacttaaaatatcttggacgcaataattctaagagactattatatttttacatagttagaactttttttcgcacaccatctcacttctatttataaactacaaagaatgtatttaaatatttttgaatttttctaatttattaactaattaattatttctt

SEQ ID NO: 31021 - DNA, 3033 bp, Cannabis sativa
tcaaggacacttctggtgtcaatattgttaacgttgagacgcttaatttgcttaagcctgctcatgggggtcaccttggaaaatcaaccacaattaccgtcgtggtgcaggctgagataaaaaaggccaaagaggtgcttagttttatcaagaacatgtaatggtagaggcgaacgagcaattgacaggatgtgaagaccttccatttgaacttttggttggtggcctaatgaaggagcttaccaaggtgagttttgtatctttgaatttattgcactatctatgtcatttttttaacttggctcattttttatttttttagaccaacttgaagctcgactatgtttattcccaagccaaatctattgttctcgggaccgattcttccaccaataagctgaagaaagctttgaaaggggacaaggatgaaaaaatgcaaaaagcacttatcttggtgaggtgaataagaagcttattgtcgtaaacaacacaatcaaggagttaaagcagtagctggttgacatgtcttccactgccaagttggaaaaagacctagaacatgagtcaaaaagggtccgagaacttttggatgagagagaaggcatccatactcaccttcaaaatcaagagaccaaaattaaggatctcattgaagctctcaaggaaaaggaggaatcctaccaaaaggagaattcaactcataaagaagagaaaaacgagctgaggaggcgctcgcatctgagagggatgcccatgccaaagatgttgaatatcataagaccacttttgcggaagtattctatgagtttggaaggctaatatctcaaagctcactttggctatctcactctagaaatatatgctaacatgattgggtattgcgaattttggaaagccgaggacaaggcgaagaaggttggccaaaatgcttgtgaaaatgctagggcaagtactgaccaaactgaagctattgatcctacctcttccgtccaggttccacaagacccattattcagtgaatacctgaatcctgcgaccccaatggactgaagttgaaaagttttaaatttttcttctttttcacgaccattaatggccttattttttgatacaatttagccgaccaagaggcttttaaacttggctttaattttttcactctgtagacatatggctgaccaggtaccttttaaccccgggctttaactgttatatattcgataaaactttttcaatttgcatatatacttaattcttagatttttacttcagtattttccatgctaccttacttatgttgtagaggtgtaggtgccccctaagtgaccgagcaggctttatactcttgttcacttgaaaattaactaaatgctccatagtagcatgttcctactttatatttgagcagacctatttgcacacatgttaggtaactccgtgacttaaaagataaatcactaatatttgcaaataatcatataaagaattaacacaatttgaacgataagtaattgttttattcatttattggatggaatgtgttgttacttcaataacttacatttattgaaagtaagaagctattatatgttcaaatatatcgtagcttatttaaactttaaaacttttgaacgggtattccatccaaacgaccgaaattgggacatcaatttctacaaattaggccatcactgtatttgttgttggagcttttcctatagtgagtgggagaccgatgtgtccaagtggagctatgcttttttcagagaaaccgtacactagctatgcgtaggaaaccaaatctttaagatgaagtcccatatttttgtatgttgttttgaaaagaatatttaaggaagccccattatcaatcattgatcgagaaaatatcatctttggaattttcacttcgacgactagagggtcgttatgtgggtaaatgacatggctgacatcttcttcactaaatgagatgataatttcctctctgcgcgactgctctggttttctctcatccacaaccaatacttcttcattcttttgttcatgttaaagtgtttgagcatacatttctctgaatttgttcgaatcaacaacaatatgggaccccccaatgatcacttataaatgcccgaccattagtggaggcattagatggttctgattgttataagtttggctaacttgttggttctggttggtcttaacgtactgatgtatgtgtagattatttcttttaatgaggaattcaatttcaacctttagattgttacactcatttgtatcatggccaaaatctttatgaaattgggagtatttggtaatattcctcttgctcatatctttcttgatcgtagggggtttcttgtatgacacaacggattgagttgctataaaaatagtttctcgctcctcggtgagtaaggtgaaagcattgaactttgatgccttatctcggcagtattgttgattagagctgttattgaacttccccctttcacattgacgtggttgtttctattgttgaccttttaccactatggttggaactgttcccttgctggacggatgtattagctgcagttgtttggagtgcaggacttgggtcggctattttctgaccaactgtgtccactagctgaacttcttcctctaactttataaatccccatttgttcggtcttaaaattcacatcctaagattttttttcacaaaaatttttgaatagtttatagcactaacaataaagttcctaatatatattcaggtttattatcgcacacatatatatgtttgaaatttgttattgcaacactacacactactcaaaaatcttcaaaaatttacaaaaagaatgccataattacaacaaactccactgtgaaaaaattatgaaaaatatccctaatagatatcttttaaaataaaatattgaataagagactaaaatagtaattaacacttctcttacaggaaatattaatagtatgataaatttacggtaaaattatctaatatttacatattgatac

SEQ ID NO: 31022 - DNA, 4239 bp, Cannabis sativa
tcctagtcataattcctgagatttcacatatagggttaatcccaattattcaatttcacatagtcacataatttgcattccaattataaataagcacaaagtgctcaaaacaatctttctaatgatataaagaacatctcaaactgagtcccgagtcaaaagttatggcggaaataaaaaccaaaaaatttcgagaaaaatagggcctcgctgcggcgagcccagccttggccgcgatgaaaggccctgtaacgcaaaaatttgtcatttttaaaacctttgaaaatcaataccaaccttgccaaaactcacccaaaaccaaacataacctcatatttcaatacataccaatcatatgcatcaacaattatgattagaaacttaaaacaaaggcccacatcaaaattaacaacaactaacttaacatataccacaaataatatggatacacataactcacaagcttaaaaatccatgctcaaagctgccaaggaaacccaaaattttcatggccatacccagaaatcaaacattctttatttcagccctaaaaacaaataaaacaacctacatgcataccttacaatcctacccacataatcatgcataaaacaacacaaatcattcaattctaatacatatgcattcaaaaaatctaagacaacaagaacaagtttcatggctggtaaaattagaatttaattcatacacgagaaattacagagctttaccacaatcttcataagttcaagggagaattcacccaaaatccactccaaactcaaagctttctttcaactccaaagaagtcaacaaaatgaagaggttaaggggagagagggggttcggccaagagaggttcacagcaaaaatattttttttttctcactttctaaaaatattattttattgatgaataatacactaaatagtcaaatgaccaaaatacccctataagtaattatatccacacacatatatataagtaagggcacatttttcaaacaacaaacaatgcataatttttcaggttttcatatttatcaaataatgccataaataaatcccgaaaatttattttgggccctaaacccggtttggcctaatatacctagttgtgactataccgcgctggcttgtcagaaaacacctatagaaagatagcaataaacacactatataataatatagtctacaagcacgatatatattaaaaattacaattttacccttcttgggtcaaaattatgaaaatgcccctggtacaccaatagggtcttaaaatgcaatttattagcatagtttcacttattaaattatataataatataattcgacattattacataattaaattagttagggttgctaatttgatttaataaaccttagggcattacaattatcccctccttatagaaattttgtctcgaaatttacatgaacaactctggatatttctactgcatatccgtctcgagttccctggttgcttcttctactgtattgttcctccataacgctttgattagtgcaattgtcttgtttcacaagactttttctcttctatctaatacttgcacttcttgctcttcgtatgaaagatctggctgaagttccaatgcttcataactcagaatatgagatggatctgagagatacttccgaagcattgaaacatgaaacatattatgtccaggtgctagcgctggaggcatagccaacctgtacgctacttgcactattctctcaaggatttcaaagggtccaatgaaccttaggctaggctttcctttctttcaaaagcgtttaatacctttcataagagacatttgaagaaacaccatatcttcgatttgaaaatcaatatcccattgctctggatctacattgctattctgtctgctctcagttgcgagcattcacactctgcttttatcaactgcctcacttgtcctctggaaagcttcgggacacaaaaactttctcgcacgtaattcatcccagtcaataggtgatttgcattttcttccataaagtagttcataaggaaccatcctgattgttgcctgatagctgttattgtacgagaactcgatcaagggaagatactttacccatgatccttcaaagtctaatatacatgcttgtagcatgtcttctaggatatgaatggtcctttcgaactatccatctatctaagtatagaatgctgtgttcaattttagttgagtacccatggctcgatccaagctctcccataatctcgatgtgaactttgaattcctataacatacagttctgcatacttatcaatagagaaatttgtcttaacaggtaaaaagtgcactgactttgtaaacatgacaactatgacccacacagagtcgtattgtccagtggttctaggaaatccaaccctaaagtccatggcgatgtcttcccattttcattcttgaaggttcagtggctgtagcaaacctgcaggcctttggcgttcatctttcactctctgacaagttaaacacttagcaacatattctgtgacatcattcttcattccaggccgccagaacatggccttaagatcttaatacatctttgttgtcccctggatgaacagaataaggagttgtgtgagactcattcaaaatttctattttaatataatcggtcataggaacacatacacagttcataaaaagtaacatcccagcattagccattataaaatcactagtcttcctagtagaaaacctatctcgagatttcactaagtccaaatcttacaattcagcttccttaattcttttcagaagagtagattgtagggtaatttcatttgctagctgcctagagatctgtatcattgtattcatctggtcctgacctttcctacttagggtatcagctacaacattggccttcccagggtgataaagaatttcacagtcataatcatttaccatctcaagccaacgcctttgtctcatgttcaagtctttctgggtaataagtttcttagacttttgggatcagtgtatatctcacatttctcgccacacagtaatgccaccaaatcttaagcacaaatactactactgggagctctagatcgtgagtagggtacccctgcttgtactcttttacgtaccaagaagcataagctattacctttctagtttgcataagaacacagcctagaccttctcttgaggcatcacaataaacaacaaacttttccgtatcagaaggatgagttagtaatggagctgtaatcaagcgctgctttaactcctaaaaacctttctcataccgatcagtccaaacaaacttcagagtcttccaagttagttccgttaggggtgttgcaatttttaagaaacccttaacgaatcggcaataataagcagctaaacccaaaaagtttctaacctcagtagacaattttggtgttggccaatccttaatagctttgattttggccagatcaaccatgatcctatctttatccactatgtgccctaagaaagagacacgcgacaaccagaactcgcacttcttgaatatagcataaagcttgtgatcgcgtaatcgctgaagtactactctgagatgtagttcatgttcttcctctaatttagaataaactaggatatcattaataagcactatcacaaacttgtccagataatccttgaatacacggttcataagttccataaatgtagccagggcattagggagtctgaaagataaaaccagaaactaataatgtccataccgtgtacaaaatgtagtcttcttgatatcctctacccaaattctcaattgatgataacttgagcaaatatcgatctttgaaaagaccatcttacccttcaactgatcaaacattcaatcaattttgggtggagtatatttattcttaatagtgagcttattcagttcctgatattcgatgcacatccaaagtgacccatacttctttttcacaaaaaacaatggagcaccccaaggggaataactcaatctggtaaatcccaggttgagtaattagtggagttgaatctacaactctttcaattctactggagccattcgatacagtgcctttgatagtggttctactccctgaactaactcgatgacaaacttaatttctcgagaagctggtaatccaggtaagtcctctagaaatacatttagaaattcgcacactagtctcatatttttagg

SEQ ID NO: 31023 - DNA, 1708 bp, Cannabis sativa
  modified_base (49)..(49): a, c, t, g, unknown or other
  modified_base (1083)..(1085): a, c, t, g, unknown or other
ctagcaacataatgtgctactcggcttaaaaaaaaattaatttaaatanaccaataagaaaatgatacgtggataataacttgacatttaatgatcaggtacctacaaatgttcagaaatataatttaaaaaatattactgctaaaaatttaagcttaattagatatttatttacaactaaaaattaaacttaactatttatggtccaaattactcactaaaatatttgtgttttttataatttcaatttcctttatatgatttccaacaataactatcatcaatcgtataaaaagtaatatataattattaaatttaaatatttacatattcaaaaaaaaaaattactattattttaactaatttatataaataatatttattattattattattattattaaattatagatctttttttaaaagtaaattataggattttttttatatttgtatttatgtcgtgtcatgtcactctaaactcatatttttttgtggcgggtcataaaactagtgatggtcttgcttttgcttacattatagactatgggctcaatggtcacagtttttggaaaaattaaaagttactttttgagaaaaaaaattgtgataaaaatggaggaaattacactctataccttttttatattgtcatcttttattttaaccctcttttttaaagtctatcgtttttatctctttttttaaataccttaccgattttaccccctatcatctcaatatactctccatgtgactctcttatgtcagggtattttaggtacaatacatataaaaaaatgtatgtttcaattaaatataaaagtagaggtagatttggttgattgataaataaaagaagtatttttcaataaaccccataaaaatgtgtttggtaagttataagaaaacagctttttgaagaatactaaaaagctaaagctgctccaacccaacttttaaaaaaagttatttaattaaaagactataataaacttttttgtactggaaccatatttacttatttattatatattaaaaataaaaaaatatttaaaataaattaattataataaaataaannnttattaaatctcttattttaaaaaaaaattatattttaattttatattaacaaataacattaatctgaaaaaaaaattatatacttgagtttctaattttttctacatttgataaattataatataaaaatactataaattatttttatcaagtgcatataaatttatatttgaaaaaaattaaaaatatatagaaaataaaatatttatataaaataaatgtttacatacatatttgtgattataataaactacattataacattattattattattataatagatcttaacaactaacattactttgaaatttataatttaccaaacactcagttaagcttttttttacagttctactgtagcttctttttctcacagcacagttgcagctgcttttttccacaactgtgccaaattggccctataactagtggatttagtacactacaataaatatatatatttactattattttaattgatttataattgataaataatatttattattaaattatatggctttttaatataggggatttttttttacacttcaaaacaattttctttgcatttttacgaaattatacatagaaatccatattgcaactagcgctgcaa

SEQ ID NO: 31024 - DNA, 2234 bp, Cannabis sativa
  modified_base (86)..(95): a, c, t, g, unknown or other
acatgaaccaaatgacacaataagtgatgaaaatacttctttttctttattgatatttgaataataaggattacattgaaatggannnnnnnnnngggcataaaacccaacagagtttcactgtctagtttatacattacaatttctctcttgcaattgatactatctattatcccaaattttatccacttgacatggtatgtccacatagtcaaaatcaaaagacacgtggggaacaactcatcactaacctgccaggttagtgcgtgcagccttcaacctccaggtttatgcatgcagccttcaaccagccagattagtgcgtgcaacctttaacctgccaggttagtgcgtgtagccttaaacttgtcaggttagtgcttgtagccttctaacctgccaagtaagtgcgtgcaaccttcaacttgccaggctagtgtgtgcagcattcaaccttccaggctagtgcatgcaaccttcaacttgtcaagttagtgcatgcagccttccaagtgccaggttagtgcgtgcaaccttcaacctgccaggtgagtgcctccaaccttccaacttgctaggttagtgccatgcaccttccaacatgcaagatcccatggctgcctggtggatacaagcaaacacagatctacatacctgccagtaaagccctagctgaacctatagctagtcggctaggagtgccaacttccatacaatgggcaaccttcagcaatgttggtaggccaacctgaatagcaaagctatatggacaacctccaaagatagggttgtacagacatgtcgaataacctccaaagacagggctagcaggccaaaatgtgtagatagcccttaacaggctgaacaaattgcagggtgcaccacgagccttctagaagattctcaagcttacttacaattatgggacaagtccaatagcccatgaagatagggatattccctcaaagatattatcctagattctagagatttatctatctttttttgtatttcaaattaaagataaaaaatatgttattttccctattttaaaggaacatattttctatttaaattaagatattttgtaagccttatactatataaacggcactagatcacatgaaaaagggccaattctaagtttcacacgccaatagtctctctccttctctctctaagcctcacacgccattaaggtctcttagactctaagtctattttcttcataagatctcaccagttctttatctgtaacacattgttctcacaattttaatactgaagagagccatagctagaaattacaaggtctaaacttgtaatctgcatgttattatctcaagagtaaatacaactacaaagggagtaggtcattaccctaacatcaagggggccaaacctccataaattcatgtgttatttttactatttattattcttatttacaagtggtgataatcaacaattaataaggctccgctgtgagttggctaaatttcatgtcaacgctatctttatacttagctaagcactctaaatctcttattacactaattgtacaatttattgtctaataaaacaacaaactatgttatttgataagatgactagtgaccatttttacttaatgaagtaatcaattgtcttatgttgtcaatgagacaaccgtatttaccttacagcgggttcatagagtaataactgtatcactcacattgttactttataaagtaacccgatctttctagtcgtccaataaaataacccatatatatacattctaccctctatactcactaaagaaattaacctcactcacaggagataatcaattctttattaggtacccacgtaccacatcatcttaacaatacattacatggtctaatatcctaccatgaaattattttaaactcaattttcctttctaagaaaacatctttcattttcaaacatttgaggtaaactaatcagtcttattttctttcccagcagaacttcattacccacatctagaaggtcatctgaatttcctctttcaataattagggtcataacccataccttaattaatacatgatggaaacttctaagaatcttccaatatgttattgtcattaataattaataccctgtccatcttaataatacccaattaaatcacttgagtacatgccctacacttctcggaggagcattacctttcctaggttttaagttgtcattgtata

SEQ ID NO: 31025 - DNA, 2493 bp, Cannabis sativa
  modified_base (30)..(30): a, c, t, g, unknown or other
  modified_base (145)..(160): a, c, t, g, unknown or other
acatgtatcaaatcatgccccttgaacttntaaggtcattaaaaataccccttagattgttggatttaaggacttttttctaattttagtaaaaaagtctaatatgcatgaaagttcaggggcatataatttagtacatgtcaannnnnnnnnnnnnnnntttggtagatatcaaagtctagggagcataatttagtatataaacaatcacggaaatagtaaaattgaatgaaattagataaaagtccttaaatccaacaatcttaatagttcaaggggcatttttaacgactttttaagaagacatgatttgatatatgtcaaagtccagggaaaaaatcctaattagccatatttagttatacataattaaacttttcacaaatttgtaaaattattaatatggtgtaattaatgtatctatatataaatataaaaaaaaaatgtatgaaacggtaatagcagtctaaaattattttatttatctcattttattgtctctttaatttttttttattgagtttataaatatttattatctaatgttacacataattataattctaattctaattttttaaaaaaaaaataaaaatatttataaattcaatttactgatgttagtataaagttattatgttattattttatttacaagtttgaaaaaaaaaaatctaattaagaattatttactataaattaaattttgttataaaatcactctaataattatatattcatgtctcattttttttttaaaaaaaaaaaagaaaattaactatatgtatacccatatattcagttatttagattttggtggattacatttctatgccttttcgtattttcttcaatagttagaagtgtgtagaatgatctttgattactcacgtcaaaatggtaccataacctttcctaattacttatacttattaataataataataaagggggaggtttttttttttttttttttaaaatgaacatcttattaagcaaccacactaggcttatctaccattaaataggcagcagcacaagagggcaaagaatcaatccaaatacaagaagaatgggtcattcgactccaaattgctaaagcatttgctacagcattacaatctctatgcacatgagtaaactttaaagaaagaaaatgatgtttgaggctaagaatgtctctgcaaagcatgccccaatctgaattaagagccgaacccgattgaaggctgttaatgatacttaaacaatcagcagcaacaatggctttcgatacagcccatttttgcgcaaggcgaacccccaatttaacagcagcagcctccgccaaaaaaatagaagctatacctggaacaaagacagtttcagccacaattaattcaccaaccgaatctctaagcacagcacttaatccacaccccattttatcagcaattagagaggcatctgtattgatcattacacagtcaaaaggaggaggaccccattttggttttgctgttacagctttgtcctgccgagagtccttacactcaacaaaataatcatccaactttgcaagagcccatcttacccaactatggatctcttgagcttggtgtttaaagatgaagttatttctacgctgccaaattagccaagaaagaccaataaattgaatcagatcttccttaggaagtttgccccataagtaaaagagaacatctggagctttcggcatgtatataaaattgtgagtgtcaaaaccagcaagcttccatatcttaagaactttaggacaaaaccatagagcatggcaaatatcctcctctttctcttgacaccaatcacaagtagtttccaaggacatacctctttttgacaattctattttcgtgggaagccattgattaaacacacgccaaatgaaatttttcatttttgggatgagcttagaactccatataaacttccaccacgctttcaaaggggctgcattagaacattcagctagattcgtatgaataaatctagttttgtaaccacttgcaaccgaatatttaccattattatttaaactccatgacatccaatcgggactagaagtgagggggataataccaagcacccaagggatatcgtctttatgaaaccaactatacacttcattaattttccatttcccagcagtattaattaatttgtcaagagtggtaccttcagggagtagaacttttgtacgaagagaaaagggcctgcctcttggaagccatgcgtcttcatttatgcgtatagtacagccattcccaacacaccaccgagaaccttgaagtaattatttccctaccccataagtatacttcgccaaactgttgacccataatggcctatattagcattcataaagttaccttgaggaaagtagagagctttaagcacccttgccattaaactctctggttcggtgatgagtttccatccttgtttggccaacattgctttgttaaaatcttc

SEQ ID NO: 31026 - DNA, 5102 bp, Cannabis sativa
  modified_base (1966)..(1966): a, c, t, g, unknown or other
tagaaataagacgtacagcagatcaagaggtaggtaaacatatccatacattcaaatgagttgcttacttggcacacatcaacaatgatagagtcattgcgagccagatgattctgccaatattcatcagcaacttctacatctggtctaccatctccatctttaacttctaaataaggtttgcatttcacgcgattgagatcttcatgcagtccatccaacaaaaatgccagtagctcctatacaataataataattaacttaaaatataaaacccagaaacctgaaaagcaactcagaaaacaagaaactttactgacttgggaatcatgctgattaaagccactaaattgaggagcgaaccgagccaattttgatttgaatactcttggtgccactggagttgctccaggagcccataacttccttaacaaatctccaaatgctaaagcaatttcaccctggaatataagtatcaattcaaagttcatctcttcgcaattacagtagttctaatgtacatattctcattcaaaaataaagaaataaatgaactttagaataattataataagaaacaagacatacattcatgcccaatggattttcatgattaatttctctgccataatctccaagaaaatagtcaacaagctttggtgtgtgagctaagcactgaagtgaactgttcataaaacaagtatttccaagattttgtagccctgtcaatcccaaagacccagcttcgccagagcttccccagaacgaagcagttcgaaagaagctcgaatttccattaccagttgtaccattcatagaggaatttgccatactagaattttgtactgatatctcatcttttttaccatccctacacttgattgagtctgataacccataaacttgcaagtccaatagaatctgcataaaaaatgcagttagacccaaactataccttaataatgagccacaagggtaagcataatgaaaaccaataaaaaagagtttagttgaaaggaaatatgattctcaattttttaaatagattcataatatgtatcatgtttatgtggaaaagaagaaattaacttgcactatatttcaaccgcacaattattcctatactaatatcattatctgaaaatgaacattttaattatgaaaaagacatgatcacatatttgaaataaaacatttcattattttaacataaactcctatatgctgaaacccacttcaaccgtgaaattacctggtaacaaagaaccccaaacactaataataaaaagaaatgaacatgtcccaaacaaaaaataaagcagttattaaaaatcaatttatataatttttaaaataagtaagaaaatagacctctttgttttattcgcttttagtaaaaactaggcctggtatggaagcatttttatatttgatattctacacaaaaagaaatttaaggagatttcagttcaataatcaaataaatagacattacaaaaataagagtaatgtagtgaactgcccgtggaacaccagaatcagttaggctagaataggttgtgctaaaataacataatgaaaaacaaaactggccattaaattcaattttcacacggctgacatcatgaaaaaacagggagataactccccttggcttttatgtacaagagattgagatcatgaacagaaataacagagagagaagtgcacttattcatgtaaaacctacaaatcaagataactcttcaaggcttatgtacaggagattgtccaccgctaagaacacgcaatgaaaagtaccatacaatccagaagaatgcaagtcctaaatctatgcaattacttgaaataacaatatacataaagcagtaaagaaccacagatttttcaaatcaataggtgaactgaacatgtggataaaacagaaagtaggtacataaacaagattgagagagagagagagagngagagagagagagagagaactatgttattaaaccaaatatatcgcaagtacctcctctgacgatggctggcaatctcttagaggcttaaatttctcatttagcagaaataaatctgtctgcccagaaaagtcccatatgtgtaactgcacagtaaaaccaagttaaaggccagacacttgaccctaaaagaatgtcatttacaaggactaagatacttaattaccagttcagactccaagctgaagattttgcacgctcttttatagaactcagccccattttcctagataataaagaaaaaactagcttatgagtttcatacgatgaacaaactatcaagcagggagagagtgaacacttgtatcattaaccagaaaagtgacccaaagatatgcttataaaaatatctaattattcatacgaattgaaccccatgaaaggcccagagcctataagtcaatgcattacacatctaatttgtatcaattttattaattcaataatctaaagataacattctaacaagtacggaattgaaaaaaaacatttaatcatcattatggtgttttagacaacttaaatttcatcgaccaacctattatctaagcaccttacaagtaaaaaaaaaagtccaaaaacaaaaagcattctaaatcttgctacgaaaaaaggttgaaactttaaaatatatataattctaaatcaatgtgcttgacccaccattaaagacttcacttgaatttaacatatatatgcaagacaggtcacaaaaccatattagaagataaaagtaaaatataaattttatcttaagaaaatactttttacactgacctttttgctgatcttcactcccaaagaatatgtttctcgcaaaacagaaagtctcagttgtaaaggatagacatctgccatgtcatcttctgcagctgaaaagattctaccttcctttataggtaattttgaatcactatgcctacagtgatagcacaccatctccaattaaaatgttattgtgtagactaaatttaatgcccccctcaagatcatatacatattggctaatgtaaatttgtaatcattaagatatgaaaactttgaaagaatatatatcaagtgaaaatagtgttcaagtcaattacacaagaaatatcatccacatatataaatagatatgacatagaactgcagttcatagacagaaaattaaatgcaaattacgaatataaattcattatcacccatctacttaaaataagaatccaaagaaagtgagtacaaaacagaaaattatccgaaagcaaacagaaagcaatagaaattactgattgaagtgatgtttgctccatacagcgagcactcaaacagaaagcaatatgcacaactttgaacataagttgtattaaaaaaaaattgtcctgtaatgtgaggagcacaagcacaactaaaacagatcaggattctgtcacacaatttttcatcatttataaaacaatcttgaatatctaagagtgtcagataaaaccatcatgtagtattgcagacaaatatttgtataaatatatttatataagggaagatatttttcgaatgctatcacataaaacccagttactcacaagcaacaagattggttagtggaaacattccatccgaaaattaagaaaatctgataccagttaacaaggtgtgagaactagaagcctgcatgcaaaaaacggttattatctccagtatgcatggaaaaaaatgagccactcgctatacagaaaatcttatccaaataaatgtaccgagtattgtaaagataaataatgaataatttactcaacaaactcatgtcatcattagtggcatttaagacaaacaacacttcatttgtctcttacactcatctccacaactaactttctccatttacttcaaacccattaaagaagttaatctatactcaccatctaagtgcctgcacccacatttcaccagaaaccaaagcaaaatcccttcctgacacacccacttcgccattttccttactctgcgcattatcctcttcccttctgagattaaacataagatctgggttgaagatgttgttaatgatcttcataggacctccatataacgaagccgatgatgcagcataaacaatccctttcctatccgaatcccccaaaaccgaatcttgtgcatccttccaccacctgaaaccccaattcgtacatcaaatccagaactcaaaacacattgagccacagtcaaatctcggaattgcagaagtaataatcccaaatctcacatttctgtctctccatactctccataatttctcagaaaaaaaaaaaaagaataaaaaaaaaagtcttcaagatttgtcctcagatttccaaaaagtagagaattgaactgattaacagtttaatcgtgcataaaatatatacctacatacatttaaatatagatacatacatagagagagagagagagagagagagagagagagattggacctataaggaactaagtagagttgctgttgggtgtccgaatcgaggcggggagtggaatcggggagatgttgagagaaagaaacctccattcttgaagagaagagaataaaaagaaagaaagagaagaatcagatcatgtgtaatggtggagatgatatgagagggagaggaaaatggcggattttgcagaggaagaaaagaagtgaagaaatggaatgacatggaatatagataattgaagaatagacacgaaaggaaaggagggaaatgataaataataataataataattaataattataataataaatataggaatatttctgtgaaaaatgaaactccaaagacattggccgattacaatacttcactcccaacatcttattattggtggtcgataggtgttttttttttaggaaatttagagtgtatattaattttgttatttttttacaaaaatactgttaggtggtattttttacttttttattgtattttttttataagtctcatagtgcagtatactatgttaagttttcactagtgttctactggtgttttattggtgttctactgttgttttgagttgttctgctttgtgttttactggtgttttataaaaaca

SEQ ID NO: 31027 - DNA, 1953 bp, Cannabis sativa
ccatttgagattcaaccttctcacgaaaaaaaaatattttcaaaaataagaaggcttcattcctcaattacagtaccttcgaaagagattttttacccataagaagaacaactttagagttttctttattagcctttttgaaagaaaaaaaaaagtaggaaaaggggaagataaactagaactagttacaactataagttgtaaacacctgtatgtgaaatgggtgtatactaactataaaaagtgatttttttttaaaaaaaaaaatagaaaagcagaaaaagaagttgatatgacctgattgtagaagataattgtgttgagagagagaatgtacatagaaaataaacaagaaaataaagagtggggagagagatatagacaaaaatattcatgtaagtacaaatcgtaaaaatgtaattaatgaaagtttaaaaagtaatgatgaaaataatgaattgtacaaaagaaaaagatacagagcacaagtaaaaatgtaaaatactttacattttaggttttcaaatcatagaatccaaaaactctctaattattctcttacttttttattttgagattcctaaccaatcacatattcaattttttaaaactcaaaaatattaaatcacactacaaccaatcacatatttagaaacaatttttcacttacaaaatttattttttttttccaaaacacatttttaaaaaacacaatttttgaatcacaaaccaatcaaacccttttttttttgttcctgaatcttaaatgggacggggatgaagatcacactctcagccttaacggaaccgcttagaattttattttatatttctaataatattttataacttgtaatttatatttgcatttgtttagtatattagtatattagccaatataactactcttcgcgcggctaatttcattattttagtattataataaagagtaatttgcggcataaatacctaagtttatctttcagttgcagtttaatacctaagttaaaattttggcggtaaaaataccttctgtcacacttttagaagttctgtaggtacctactgttaagtgccatgtcattgtccaggtgtcacggttgattggtccaaatcatttagtttatatttttatttgaaattgattaaaaattatttgaaataaaaaatattaaaaataaaaatatataaaaattaaattaaatcaaacataattttttttttttgactaccacggcccagcatttatcccacaccaacaaaccaatgacaaacccatatatgaaaaaaaaatcactcctttataatcaatgacaaccccaaaaacaaagaatgaatatatataccataaagacaaactagtaagacaaacgaatgccaaaccagtcgtatactccaggaaagccacaccccaagaacaaacaccaaaccagtagcaccagttgcaccccaagaaaaccaccctagaaggatctcacaccagtcgcaccccaggaaaaccaaaagccagaaacacactagtcggaccctggaagaactaaaaacagactccaaaatttcattactcagcaaaataaaacaaaatacactaacaatattcagatttatataccaaaattcataaaaagaatcttaatggtgagaaataaaatccggtaaaaatatacatctaatataaaataaaaccaaatcaactgcactcatatctcaaaattacaaaatgaaacttcaaattctcctaaaattatttatatttcttcagattcaaaatttcttacgatagaacccatgactcccgtcgatgcccaaatctctgccaagaccttagccaaatctatgtcagtccgcacaaagagaaggatcccaagggagagagaaagagaggcagagatatagatctaggggttttcaaggtggtaaaattcagagtcgttctgtctggctctgagcaga

SEQ ID NO: 31028 - DNA, 2165 bp, Cannabis sativa
tagtgaaagaaactttcaatttcactatatctttcttgttatgtttctttcttggtataatctgtgtgtgtgagtctttatgcactgtaaactacaatcccagaagagaatataactgagagatcaaactttgatatagaacttgtattatgcatctctagatgtgttactatggtgttactaacacatctatagaatacagaagacaaagaaaatggattcaggtaaattttcatattgttaatattgttccacaaaatctgcttctttcatattgttatacatgttatgtaaaattgtaaagactcccatatatatatatatataattgatctacaatattggccatttgatatgctcttccccatattgtttattgtcctttacaccaagtgcaaaaaaaaagtctgaattctggtgtccatttaatgagcattatatcaaatcaagagttacattacacatgtttatcttatggctagagaaaatttgttaaatcagcactctgtgatgattatgaaactctgtgaaagtgaaccaaaaaggttcatgactagtatttggataacaaggaaaatgtctagaagaaggagattgtcactacattgtaattgttttgttgtttgctgtttaattgatgagaattctttcttcttgattgaaaaaagaaaagaaaagaaagaaggaatgacattacactatagagataaattgaacactaatagccactagaaatgagcatataacatatttatttaattactagattaattgtcacgtggttagttagttaaatataatgttattttataaaagtatttggattataaagtatgaagagaaaacaatacaaaaaatttaaaagaaaattaaatgttataagctattggtaactaaacttggtagtgcttattcatggtaaattttggtgactggggtgaaattcttttcttttctgccccctaaaatcttgtgagcagtttccacttcaccttaaaagctcttcaaacaacttataaattctgccatcaaataaacatggcatattggattagcaaaataacaaactcaaacaagcgttggaagaagtgatttcaatgaaataaatcaccatttactttgtttgaaatcatagccctataaaaaaataatatggtttcctcttatacctaaattttatgagcatttctatcatatcatggaaacagtagacatctgtgacatataaaagctaaaaacacggagaagaaaatgatataaggaaaaaataataaatttcataaatttgatcacatagaacatattaaaaaaactttctagaactcaacggggtttctccagaagcccatttgcacaatgatgaccctcccacaattcaagcccaccaatcaccatccccagcataaacaccacaggctgcttcactttccttccttagttcaataccaggcggttccggccacactaatatcaacacttgaaactaaaatataagctaaaaataatgaagatagtacctttactcatggtttgatataagtaggatgaaaatagataagaaaaataataataaataatgtgaacatttgtctctttttgcatctatattgtttaccaaaaatcaaaaaatagtgtgatttagaatgagttgaagcaaccctttcaagagaataagcgggatttctaacccgaacatgtaaacttgaaccaagttgggagcagtagcaagctcaggtaggagaagaaaggaaagaaaacatttatatgtgtttccttagagcacctacccattaattcgtgaacatgggcatcaagtcttattttactacagtgaaaaatttattataacaatttaaattagggccagtgaaacaacgcatataaactgaaattaaaaataaattctcactcaaaaatacaagccttgagcaagttacaaaagtttttgcacaatctacagaaccctcaacaaaacatttgaaagaggaccaagcaaatcatataccaatcataaaatatacaatatatgttcaattcaaagtcttaatgcttcaaatcatataattaaatacaacccacctattttatgcacatagctttccctcttacatgtcagagtttcccttaagagctataagagctgcattcaacaatattaaacactc

SEQ ID NO: 31029 - DNA, 1443 bp, Cannabis sativa
atctttatcaattatacttctaaaattaatgtatctgtttatcttataattgtatttcatatattctataatgtagcatctattaattacttgcttttagggcataaatcccaacatataggcctaataatattggatgtggtctaatgaacacccaacaccaatgtcaacctgggcgatggagccctattttagcccttgaaatgatcttgtttgcttcccaagatcacttgtatctccgttatttttgaaaataaaaaagatgcacaaaacacttttttatagaaaatatttagaaggcccatgttgacaaaatgtcaaacttggcactgggactaggccacaggtcaacctggtcgctaggtcctagttttgctcaccaggtgatcttatttgaacacaaaaaatactcatattttaattgatgacgtacgaaaacagagaatatgcccgaaagacttctcaaaagaaatgttttgtaatggtccaacaagttgacaatacttaaacctaggcactggggcctggcactaggtcaacctgggcgttgggtcccagttttgactcctagatggctccgtttgttccccaaaagaacatatatgttgattgttgataaaaacagataatatgcctggaagactttgtctaaactattattggaatggcccagggatacaacattttaacttgggcgttgggatttagcactaggccaacttgagcgctgggacccaattttggcctccaggtcgattcgttacctaaagcacttgttttctcattttggatgatgaagaagaaaatgctcaagatacttcttcagtattttagttggaagcgccctaggttgacaacatgtcaatccgggcactgggtgcatcaccaggaggcctgggcacccagtgcctgggtgctccaaatgagaagtgttcagattctgattacgatgcctctaatatgtttgtgacaggagctctaaatgagaagggtacaaaggttgtgtcattttccctaagacagacccgaaaattggaacctgagttaggaatgtaaacttgggcacaagttgaaaaccctaagcgctcgggttgacttccgggatgacgtttcgtcttttttttttcagtttctaggcctcaaagttggattattcatctttttcgttcagaatactaaacgatggtgagttggaaacaacttggctggatccaaacacccattcaggagtttcgagagtcaacctgggcagagagctaagacccctcccaaatcgactgctatatgactcagaactactaaactttgtaaatattttacttcttatcacgtgtcaaacattgatgtctacgtcaccaaggatagtttttaggtaaataaacaccaattcttgaacatatttaggaataaggctcccatttttcaagctaatttaaccctagt

SEQ ID NO: 31030 - DNA, 1445 bp, Cannabis sativa
tactaattagccttttttttttctcaaatctcttttgaaatctcttttttttttttttttttttgaaactttactttgttattttgctatatcaaatagctcatagtttgtatatcagaatatatttataatgatttattaaaagtattttttttatcattttgtgttcattgattgggttcaaagaggttaggggatacaaacggattcaaatgggtccttaattttgtaggaattcgataatgggaatgaaaaaaaaatgctaagaattttcttttgattaatggaaactataatctgatttttctttgcccaattttttctttctattgatccaaatttgctaaagaggtggttggttatattgtgaaggtgataatagtgatggtatggtggttggggtgtgacagtggtggtagtgtggtggtggtgataataatggtgggttgggtggtgtggtggtgtggctggagaaaaacaaagaacaaaaagaagaactagaaaaaaaaaattatttatttattttaaaattttaatgttttgaaaagaaaaaaaaattaaaatattttttttaatttatttattttgatatttattaaattattttttataatatttaaataattaaatactatacggactactaaaaatttgttatatatgtacacgtgggcagtccactgtgttatttaactaaggtttttggacggcaagataatgaacaaaatggaacttgggttgagtaggttttatagtcaaaatattgatttttgtggttaattaagtgtcaaaaaatatatagtttgggtagttttgccgctaatatttttttacataaatagcatgtatagtattcatatattctaataaaatcttcgtaattaataaattacggttatttattcatttctattaaaattcctaatgatcacatagttagattgagatcataatcttacctatttaaccctcaatacacaaattacaccatattttataaaatatgctctaattaatcataattaaatttttagaatattacacctatgtttggaggtgtataagattttatggttattaggatggttgaggcggataataaaatctctatattatgggaacacttaaagagtatcatattactttagttgtgtccaagttcaaagtgggtgccacaaattagttggataccttgaccaaaataatagatggggattaggcgacccgaagagattttaaaaggattttaggaagcaatatttctcttaggatttcaggaagtttggagtctctctctgctacactctctggtcagtgaggaatcaggcttttcacgaacatgttcgaccctccttcttcatcatttttaatcggattaagagtttggtcgctgagctcaattcggtgttcacctctcctctggactcttcgattgatcaatcttc

SEQ ID NO: 31031 - DNA, 3543 bp, Cannabis sativa
  modified_base (47)..(47): a, c, t, g, unknown or other
gaagggtaaaattgtgaatttaatttatttacgtgcttatggactanattattatatagtatgcatgtgttttctttttttcaagcgtgttctgataagttagcacagtatagtcacaaccggttattttgggcagccgaaaatacaattttagattgaattattggcattttatttatgagtggataatttgaaaattattttaatttatttgtgtatggaatgaccttaatgcccttgaatgtttatgtgtatgctttatggccctaggggcaaattggtcattttgaccttcgttttatttacaacaaaagaaaagaaatttgaaggaaaataagattttatttctgcatttcccttaaaccaaaaatgaccccctctttctctcaaactctctttttcaacttttgattttggtcgtgaattgcttgaagatttgtgttggagtgaggcttgcttcttgctttgatttgaggtagtcttcttgctaattttatttgaattcttgttgagatttctattgttgagaagcatgaaataggttgagataatcttgagatgtatgttggtattttcttgttgatatgagcatgtttgtacttggatcttttgagtttatgttaaattaggtttggaaagaatttaaaaggattttactagtgtttttattctgttattgagctatgaaattaattatttgaggcatgagtttttggcttaataatgtaagtgttggatgtaggattatatgaaattatgctcaagttggagctttgaattttatgttgtttaatatgaattttgatggttatattgttggatattgatacatgaatttgagttttaactccctatgttgataggttatgtattgatgattggttttaagctttggtttaggtttggagtgaattgcatgtgaaatggccatgtttttcattgttggtttgtgttttttttgggttttgaacccaggggtcgtggcctagctttatgggtgccacgaccagcctccagttggtagcctgtgatttggtcccaggtgccacggccccatgtggggagtgctgcggcccgccctcttgtttctggatagattcaaatgcaaacttcgaatattgataactttgtgatccggactctgattcgagagttatatatatcgttggaaagctcgttctaagctctatttgattatctgtatattaattccaagtatatattttataaatgtggaattagggattaaccctatatgtgtaaatcccggaatttgtcactaggattaccgacacttgatcaggagcacccagggatttagaatctccacatttgcaggacaccaggtaagatagtagttagcacatagagttatgcaccgtggcgcttatattggaaataatatatgtgagtaaataataacagggattagggttattaccctaatatgagcggtttaatagcctagggttattaccctagtaatatatgatgtgtaaatgctatgccatgttaattatatgagtatattgagatttagggttatgtgttcaaggcataaccaggttggacttgataactagaaccgagatgaaccattttaaggccttatagtatctagacgtgtgagcgcaacacgtaggtctatgtcacatagacataaataggcatgtgagcgtaacatgcaggtttgtgtcatacagaaaaatgtgaatggaattactatctttgtgataagtaatttatgattattgatattttctactatcttgctgggcttggctcacgggtgctctactgtgcaggaaagggtaaatctgtctctgatcagccatgagttctggagctgggcgacgtatgtacatgtttgagacatactagactaagcaggttggggtctaccaaggatgattttctataattctgttttttcgcttaggtcggctattgagaaagagacttgtaataatattttataaaatatttttgcgatcccgaaatatgtcattttggttataaaattaaagttattacaagtgtttatttttattctatatttgtttaaagtctaaattttcccgcgcttttctgtttagtaatcttctctaggggattagggtttcttaattatcttgggtaacgtgcctaatagttagggcgtattacgttttatgaaggctagtgactttatagtggatgaaacagaaatgttacgatttatgaatcgtctttgtgtgcctatggatgatggtattaaaagagagattatgaatgaatttcatacgactccctactcagttcctccagggtcaacaaaaatgtatcaagacctaaaggccatgttctggtggccaggcatgaagaatgacattgctgaatatgttactagatgtgttacttgtcagcaagtgaaagctgaacatcagaggcctgcagggttgttgcagccgttgaatattctagagtggaaatgggaagacattgctatggacttcgtggtaggattagtaagaaccatgggacagtatgactctctattggtcatagtggacaagtttacaaagtcagcacacttcttacctatttggacgaacttctccattgatcagtatactaagttatatgttggagaaattgttcgtcttcatggtgtcccaaagtccattatttcagatagagatccaaaatttacatcaagattctgggaaagtctacatcgagctatgggtactcaattaaagtttagcacagcatttcatcctcagacggatggacaatccaagaggactattcagatcttagaagagatgctacgggcatgtgtgcttgacttttaaggatcatgggtaaagtaccttcccttaattgagttctcgtacattaacaactatcaggcaacaatcgggatggccccttatgagcttttatatggaagaaaatgtagatcacctattcactgggatgtagtgggtgcaagaaagttcttgtgtcccaaggctgttcagagaacaagtgaggcatttgataaaattagagcgcgaatgctcgcgactcagagtagacagaagagttatgctgatccaaagcatcaggatattgattttcagattggggacatggtatttctccaagtatagccgatgaaaggcattaaatgcttcggtaagaaagggaagcttagcccgaggttcattggactttttaaaatcctcgagaggatatggcaagtagcatataggttggctatacccccagcgctggtagctgtacatcatgtgttccatgtttcaatgctttggaagtatgtctcagattcgtcccatatcctgagttatgaagcactggaactacaaccagatttatcatatgaggaacaaccggtgtaaatacttgatagaagggagaaagtcttgaggaacaagacgattgcactggtagaagtattatggaggaacagtaaagtggaagaggcaattcgggaactcgagacggatatgcagcagaaatatctggagttgttcaggtaaatttcgggacgaaatt

SEQ ID NO: 31032 - DNA, 1674 bp, Cannabis sativa
attgacagagaaaaggaacaaaaaaaacaccaaagaatgaacacccaaacacgaagaaggcaaaaaaaaaaaccaaattacaaccttaaacagatgcaagtgggcttagaagaacaaagtaaaaaactgacaaaagaacgtcgtcgaagacgctgtcacacgtgcctccacgcgccaacgcgtgggaaaatgcgtagaaacttcaggcggcacgtgagccccacgcgcgaggaatctagcgaccagacttcagggtttggtagatcggcggctgggcaacactcctgagtgggcgagtgggcggtgagaataaattcgcactccaaataggattttcaaaaaagaaccctaaactcaaaccctaatctctcttttttctatgaacccaaatttcaaatttcgaatcacaaagctctgataccatgtagaaaataatgaatcgaattgtgtctgtatttcatagaatagtacatatttatatacaaagctaggagactaaatggaaaactactaattataaaataggaaactactaaatacaagttaccctaattttttacaactaatatacagctaatattctaacaagtcgaatctacgggacccgcttcaggtaagttgtagcttaaatttgtaactctcttaagggaaatttttggacttgatattcttagaattgcaattggagcgtgaatcctgacttgatagggcattgaaatagcttcaaaaaataagttaaatcgcgtcaatcagatcaatattgagtgacgtatggctgttttactaaaggctactatgataccaacgcccaggttgacatccaacgcctaagttgacatatgatgccaacctgtacgctgggtgagtgggaaaacgtgatggggatgtattttttgatgcttaagtgatattttgacatcacttagttaatttttatgttttggtgaagtcgttcaccagttatcggagatgttactgtttcacggaatcgggagactcaaaactactcaatttacgagtaagtcactttgccgaaaaagtgaaaatatgaagttgtgaacttgacttgtctgacttcatagctctcgtttactatggaaaactagacgaacactcgaggcaaaatcagaattagataagtaaataccagcgcaccaggtcacatgtcaacctgggtgttgggtgctctttctggagcttccaatatgtttttttaatacttccaaggttcttgaaattaaggatgaggtctcctacccaattttttaccatgctagaaagaatgcttagagcagaatttgcatttgagtgatcgaaaccaacgcaccaagttgattgtcaacttgggaacttggctcaactttcatgcccttgggattctcgttttctctccaagtttacttgtatcttcattatttctaatgacagaaaaaaaatacccggaacacttttttgggaaattgattggaaacaacccaggacaaaatatcaacctacgcgttgggcccaacactaggtgtcaacttgggcgttgggtccagtttcaggccaccaagtggtgccatttgatttccataaatacttgtatcttaatctttgataaaaacagataatatatctggaagcttcttggaaaaactccttggaaatggcccaaattggcaaaatgtcaac

SEQ ID NO: 31033 - DNA, 975 bp, Cannabis sativa
cacgacccgctatggaaaatttagaaaatgaatctcgtgctttaaagatgggtcgtgacactacaagtgagtgtcgcagctcgcctgttattatgaagacaattagggttttgcccctagcacaaagctatataaagacctctttttcaacacttttgaggagataattaaggagggacaaaaattgaagcagaaaacggctctgaagacttttatcaacatttttttaacgagttgttttcttctaatctttttctatgttcttagttaattgttattagatatttcaattatgatgagtagctagactttttatttagggtgttaatggatattgtttaacatttactctgttttaatgtaatttaattcttcttcaattttctatgtgcatctatttcattcgtacataattttttttttaattgcatggtcaacaactgtttatgatatcaatacgaaatctgagaagtgagtattgattatgttatagtaaataatagacacaaattttaatataagacaagtacctatatggtttgtatagcaattaggattttcatgcttattgcctcctatttgtttaaatttatcacgtgagtaggaaatttgtatatatataggttgagatttatatgtcgtaacctaaatataagtttctttagtaaatctgttatcacatgaaaattgaactttaagaattaaattatgttaaaccaggtaaaataaattcaattaaaattaattatcctaaaatttaatcattgttgatctcatcttaactaattgcattattttttttgttttgttatttaatttttgcgtagattatttagttttaaaatctttctatcgccaaataaaaataagaattttcacttttgtaattttaaaaaataaaaaactaattaaaaaaatattaccaaacggactctaaacataaatcagatcatgtgacactagcagaaagtagtt

SEQ ID NO: 31034 - DNA, 1542 bp, Cannabis sativa
aaaaagagaggaatataaactaaactagacattgtgtgttgttgatatggtgggtaataattggtatttgtgggagctggatacaccattcaatacgcgttttttgggtactagatttgaagcacaaatatgctttaacaactaacttatgtaatttaagcacaacaacaacagggtttggcgtgggctgatagacaagccagaattactaaagtgtgtgtttgttaaaagttttgactcttgcgtataatgtttaaggatgttggttggaccacacccttaaacattatatattagatgttagattttactattcgatctgatccaattaatttcagtcatccaatctattcaattgaatcagttatatccattgaatgtatttcataaatatttattggtttaatttgaaattatttaatattttttagatcaaattggatctattcaatatttggagtaagttgaaaaataccacttttattaatcaattaattaaatttatctctaattttatatttaattgaaatataactcttttatatgtattgtacctaaaataccatgatataagagaattacatggagagtatcttgaagtgcaaaattggtacaatgtttaaaaaaagagataaaatggtagactttaaaaaagagggtaaaaaaagagggcaatataaaaagggtataaagtgtaatttcctcaatattttaggtctagtatgtattggattaaacttgatccatccaatctaagaaaaaatgggtatttatataaatatgggaaaaataaaggggatagtttacataatatggtaagaaaacttaataggaaaaaatatggcatttaaaataaaaacttaacatatatgggatatgccactttgaattaccataaaaaatattaaaattccattcatatttttaaaaaataaaaaattaaacaaatgaaactacagtgatcgccggaattgtcactagggccgaaaagtcgctatagtttgccgtcagtgtcagaaaagtcactggagtagctgtcagtgtcgaaaaagtcgccggagttgctgtcagcgtcggaaaagtcatcggaattggcattctacttcatgaacttcaaattcctcacgttgttgttctctctgtgtggtgcgacaactagagtacaatcctccttgctgcaaattatgtgcttcatgctcgtaccaaacacatagagattgacctctattttgttcgagacaaagtcctacatcagcacatcaatgttaagcatgttctagctactactcatattgttgattgtctaactaattcaatctccagcaccaagttttctaaactttgagacaaattgtgtgcagtttgaagggggttattaaagaagttggttagttagttagttgttactgttaactaactctgttagttgagtgtcctttgattgtattgttagaaggttttctctaatgcctatataaatttcattttctctctctgttcttgtacaaaaccttgattaaagattttgttggcttttctgaa

SEQ ID NO: 31035 - DNA, 2329 bp, Cannabis sativa
  modified_base (772)..(787): a, c, t, g, unknown or other
aaaatcacgtaaaatatctggtgcgattataattattatatttattaattttcctatatatatctgtgtttaatttattacgaaaaaaggctcattattcgttaacgaaaatctgcgtaaacagttattatagacatccaatggagagtgttgtaaaatattaaaaataaatgtcaaaatcaccaaaatcatctatcaccgtaaatacttgattgtattttcctttattacattgatttagtttatcattcttttagtcatattttcatataaataagtgttcaccctattaaaataaacttattaaaaattcttattctctttctctctttctctcttcatcttcttctctattttgtattattcataataattttaaaataaaacataaattttaaatacaatctcaaatataaatttatgaaaaaatatttaaacaaaatacaataaactacttttatattatatgatttttttggctacatgtataaaccctttaaagcatccatttaaaaaaaaaatacccttttaaaatatgataatatcttataatttgaatacctactaaaatccttataatactatagtgttcataaagtatccaatctaattcaatccgtagaatttaatccaatccaatccgcagtgtgaatatctgcacttgtgcgaattagattggattagaaaatctaaaatctgcacttgtataaattgggtgttaattgacatgtaaaaataacggacccaatacatatttatatatattttaaannnnnnnnnnnnnnnnattaatattttaatataaaaataaaatttaaaagtaaccataaatagaaacacgtgaaatattagcagaaatagatattttaggcgcaatagaaaggaatgctgtaaccggggtgggtgaaccctcatagatatcaggtgcccacatatatagagtcaaaagagatatggagatacatattatacaaatatatttcaaaatatagtatatgaaatgtaaattttattcatatttacaatgttaaatatttttttatacatataattattttcgtcttgctttaaatttgttattttttttttgttttcctcaaaaaaaaaaaattttgttattttttttttatttattttagtttgttgtttgatacataaagtaacaataatttattttgttttgttgttagttatatgaaaaatagattttaaaataaatattaaattattcaatattgaaaagtagctaatttaaaataaccgatccaatccgcacttttggggattgaattggattggattgagttactatgcagattggatcggatccaaaacataaaaacacaataatttattttattttgctgttagttatacaaaaaaaatatttttttaataaatattaaataattcaatattaaaaagtagccgattcaaaataacggattcaatccgcacttttggggattgaattagattggatttgagtttttacgcggattagattggatctagaatataaaattcacacttcgtgcggatcgaatgcactatgagcaaaatagtgcaaattggatcggatgaatacccccgaaagttggggtagttctctaatttttgagttaagctagtaaacatctttccttgcaacttgaaagaactccttaccacactcatcctagaagtcaaatatgaaacttgggtctaagctttcaatttcaggacgttgtttgttatatgattaaggtgatttcaaagtgttttaagtctctttcatttaaatgcaatggttaaatattacctttaaaaatcacaacataaagccaagcctaatttttgccatatcacagcagaatctattttggtccagtcctctaagggtccccaaccaagggggctagtccctagactttgtcagttccaaatttttaatcctaactttctctcaatttttttaagctgaattttttgattgaacatttccttatgaaaatattgaaaaatgatatattcttcattttaaaagtgaattattgaaaaatgattgaatacatcaaacgaaattttgggtgttttaagataatgcatgcagattccatcattttatcccgtagaggaaaagacacgttagtttgttgctgtacaataatcaaccatggaaacaaaatggctgagatgaatagtttttgtctacatctgatgaaatagtacaattacaatcttttggatattagtacttcttagaaatcattaaagctcctagttttttggattctagctcttagaatgtgaacctcaatgtataattacaaatgactatatcaaagaa

SEQ ID NO: 31036 - DNA, 1528 bp, Cannabis sativa
agagagaaagagagagagagttgtgttattgaagcttcatatatctatacatatatatgtagagagagagagagaggagtttaatttggtgtgtttttttggagagattagattgaatttgaagagaggataatatgaatatatattgtaattagggttgggccttggaaaatactcacgtaaataccttgaatcatctgactctcatgaaatctatatatatatatatatgttaataagatgaatcaaaagccgtacgtacagaatataaacccttcaaacacgtaaatatatatatatataaattgagattagtaagaatagagactaatgagattacatataacgatttgctgacacggtcatatataattagtaataacaaataaatataaatatatatatatatttatatatatataaagcaatgggaaaatctatatatatggtttgtactatggtcgtgtgtttccattattactaaaagtgacaaaaaaaaaaaactaatactaaatgtgttcttttttatgcatagacatatagggcccataatatccatgagtaatattattaattaattattataattagtttcattaattaattatgcgacaaaatatatatttgaaaatgaaaaagactttgttcgatcgatccaataataccaacatcaacacttaaattgtgttttattaattaaaataataatatttacatatagagagagatagagctatagctagctagagttagttataattataatatatatatgccctaattattttttttttttttggcttaattgacctatcaatatcattagatttgttcatatgagaaatgttgaagggtatcagtagtgcctagcatcctcctatgtgtcagtatcgctattagtccaactaagtatcggatctcatatagtttaatatagtttttagagagtatcgctaaccaatcgcaacgcgacatgtcaagaaagtctaggactactgatgcctaataataatgctcttgttcatataataactagattattatttagtttgatttattttggcatagaattaatttatattcatatatatatatatactttataaaattatataagtattgatccaaatgatcatcatgcatatatataaaagatagatatatatatatagataaaactacattatatgtggtaaagagaaaaaggaaaaaaaaaaaagcattcatatataatatatattgtcttatttttttattttatgtgtaaaattgtgtaaaattaatgatttgttaaatatgattccaattaaccatgcagctttgtttattaataaatagtttcatacataaatagcttattattactaattaattaattgtaaaaaaacaaatttagatcaatacatgatgaatccatcaacatctcaaaaattaaaaagcttacaatgaaatgtgattgtatatatagactatttggccccattctcaaaaaagaaaaaaaaaatgtaaacaatataatatatatata

SEQ ID NO: 31037 - DNA, 1421 bp, Cannabis sativa
  modified_base (45)..(66): a, c, t, g, unknown or other
attttcattgttttagaattcattaggttgttaatccaacatacnnnnnnnnnnnnnnnnnnnnnngtaaaataaattccaacagttacacccatactaatcatgtttttggtttacattctggtacattcacacctgaggtgacaactccaatccacccatcttccccaactccaccattgcccactgccccatcccatcccacatgtgaaccagaaaatactcctcctcatccacctggttttcccatcatactacatccaccatcaattccaccatctgttatacctcataatgtacctgaaacaataccatctttacctgagcctgtatcacaacctaatgtacttgaaacatctctcagtgatgcatccaccatgccaccaacatcccaaggtcattcccctccacctgctccaaatcctgatgtctttgtcagactacatcccatgaaaacaagatctcaaactggaaacctaaaaccaaaagcctacttagccacaaaacatcctctccctgaagctctattacccagtgaacccaagtccaccaaagcaactttgaaaatcctcattggtttgctgcaatgaatcatgaattcagtgctctaaaaagacaaggcacatggtctctagttccacctcaacctgatatgcatataatcaacaacagatgggtacacaacataaaattaaaagcagatggctcattggacaaatttaagtcaagactggttgctaaagggtttcttcaaaccactagaatcgattatgaagacacttttagccttgtcataaagcctgttacagttcgaagtgttcttagcatggatgtgtccaaaaattcgtctgtcacacagctagatgtcaccaatgcctttctcaatggcacactttaggaaactgtttacataaaacaacctaaaggctttgttgacccaaagaaaccagaccatgtatgcttacttcataaagccctctatggtctaaagcaagctccttgagcttggaatgaaaagctcaaacataccataccgtagtggggatttcaggcatccaaatctgacacttccttgttcatccatggcacaggtgacacattggtttatcttctagtctatgttgatgatatattgataatagggcccaataattctctgcttcattactttattgacaaattaaattcagcactctcattaaaagacttagatccaattcattacttcttgggtgtggaagtttatagagatgctataggaatgtacttgagccaaagtaaatacattaccgacatacttatcaggttgcatatggagggagccaaaatctgtcccaatcccacaagctcgacagcaaaattcagcttaaaggatggagaaccatttgaagacattgtaacgtccccgcttcaagcctcca

SEQ ID NO: 31038 - DNA, 5106 bp, Cannabis sativa
atatttttgggttgattcttgggatgggaagtacttgtcatttattagtcaaacattaattttcatgcttgtaattgagaattttcaatttgccaaagcatatgcattttttacccattacagtactaatggctttttcaggtctcccaattaatatagttttgaaccactcaaaactttttctcttttttctaaagacaaacttaactctcaaatttttctacaaacgcctagtgaaggtaataactttatatattcacatttattttgaatgtttttcacgtgaaaacaaagttttaaaatgtgcagaaattagctcatttaataatattaaccgattattttgttcgtttaatataatatacggatattaattgaaaatgttatttgaaaattggtttatacacacccaaaaaaaaaaaaaaaacacagaatatattttttttctcattttcagaagataataaaatataaaatttccgtgacataaactgagtgtgtattctgtcaaaataaataaataagtgggacatgcatgcatttaaaatgattcatcactgatactgttttaaaaaaaaattatattattcaccatcaatgtatatatgtcagatatatatatttatattataattatgtttctacaatgagcctcttaaaagaaggagtgcattatttatctgttttgatatatatatagaataatttttgagtcaaatttttttatatttaattacgttatagttatttaggatatattttacaaaatttagataaattctgaacaatttacaatataaaaagttattcaaaatatttttttttttgtatttttacggaattctatatagatcccttatgacaattaacggagcaacttaaatcgcaatcaaaatctatatagcaacccacatagaaactaccgaagaaacgactctaaaaacccaaaccgtaaaaaaatagtatatgaaataattttctttttaattaatatgaattcaagttctcaaaaaaaaaaaaaaaaaaaaagaatttagctaaatattttcatgtaaacagtctactagtagttttcaaacaatattcacacctgcttaaaatattttaattaatcaaaataatcaaattattttgaactctttataaaaagaatatggatagataatgtgttactcatatttttcctaatattaatgaacgataattattaaaaaatataaaataataatgacccataataaacacaatatatgactgttaaaaagtatgagatgaatttatctaaaaaaaaatataagatgaattaaaacttaaattgtaaccaaaatttatatatgtatcatagaaactatagaaattccccaaagcataaatttaaaaaaaaaaaattaaaaaataatatataaagtaataattctcttaaattttaatttcactcctattaagagtgcttctcgtgcagaattaactattaattaattctccagctcgatcatcatttgcttaatttatggtgattaattaacggtaaatgactaaataataattcctatttgaaagataatcatatgatcagtgataaaagagcttataatagcatatattttttcttgtttgtttgagttatttatatttcgaaaattaaaacaatattaatttcgaaagttaatattttcaaaattaagatttaattatagttattttttaaaagtgtaataataccatataaacacttttggtgtcggtattacaaactaacctaataatatatatatacaaatgcacacatgttttttaaaatatttgttgcagtagtagcgttcatgatcaacaattaaagtagcacgaggtcaatattaaaacgtttacaaagtgaaaaataagaactcatcattaattattagtattagatcttcatatctccttttcttattatatatatatatatgttggggtaattatatagatatgtacattattaaatcgttaaacttttttctgatccaaaattaaggccatggttaaattatattagtagaaagaattttggaatataaattcgagaccagccgtcgatcgtgtcggtgaatttcataccagcatctggaatatatgtctaaaaaatgagagctatatataatattacctttcaaagcatgccaaagcaacttgtcggacaccattgttttgaccaaagaaagaaagtatttatatatatatatagtcatacatcatacttagtacaatttcaaaaaattcagtcttcttttacctttatcaaagaaggaagagaaaaattaaaagaggagtgttttttttcgattgtgagattcatgaatgtcggcatatatatatatatatgcttattagtgtaacataatttatttaaactaaagtttagtatacccatatgatgatatgatcttaattcatttttacccgcaaagactttggttacattcttttcaaagtcaatgttcattttgtcaactttgattgattttttttattatttatttatgagaacaagctgcatgggttccggaaccaaacacctcaatcaaggtgaatctggggttatcattgtattaataatttaatctgtaggggttttcttgtaaattttgtaaaaataaaatggaaaaaaagaaaagaaaagaaaagttagcatcaatttagtacttgtcacaattcttcagggggaattgctttgaattttattagataatgttacatttatatggtaatgttggaaataggggtaggtggatcaatcattttcatccaattttgatggcacattttaaggatatatactacacagtacatgaatgatacaagtctcaagtgggttttctttctcttctccttggggtactttggtcacaaaatttttaagtggtcgtatataattacgaagttttttgtagtactctttttaatttatattttttttataattatatacgttgtaattatttaaaattacttgtaaatttttaaataagttatgaatagtttatgatgtcgaaaataaagtttaatagttattcaccactcgtataagaaaaacagtggcacttacaaaatatgtagtcttggctttgacattgtaaactacttaaaattttaaaaatttataggtagtactaacctaaataactttataaaaaatgagactaaaaagtattttagtatactaataaaatagataaagaatctactaaaatactattttaaaagtgcactgtgaacttaatgattatatatattaataaataaagtaataaagagaagatgaaaacgaccagcataatcttaatttgatggaaagtaaatgtcgtttagtataagaaagtagaataatatgtttaatccaaatgcatggaaacaaaaaaatgatacaaagagttgcaaaattttgttggtcatgcacacacacacccaaaggttaattccaaattatgtagagagatcaagacagaagagtcgaaaaactttgtcgtgtggttttggatacaaaattatggatcaaacttttgtgattttgattgacccaccactcactatagatacatataactctctctttaattatagtataattaactaactttttatgtattggtaataaatagttttttatccctatatatgctaccttactaattagattctcacaccttgtcctaattattctcttttactatatatgtttgtctttaatcactacttagatatatcagtacgaaaagataaaaatcttatttttatagtcacaaaatcataagatagtaactaaatttgaaaatcttttgacaaaaatatcatcacaaatagattatcactcaaaattgaagtttgtggtgaaaataattagtaatgtgacagattaaatagttttaacaaactttactatataatattaaattttacaactaatattaatttaaaatacttgttatataagtgtgtatcaaatacgtacacatatcatacccaatttaaattaatcagaataaatattaaaaatattaggagaacttacaaaaatactaaaaaataagaaaaagtttacaaaaaatactaagatacggagatttttacatttttacggtatcaagtttacaaaaatactgttttaatgtttcaaaattacaaaaaactgtgttccagtaaaataaaaaaacaactcaaaaataatcctaaaaaaacataacgaataacatgaaaacaacaaaaaaataactacaaatcaataaaaaaaacaacaaaatattgacctaattctagtaagcaaaacaatatcaactcctcaatatgttttgtattacgattttttttacatagtaagtatatatgtaaaaaattaccgataagatagtaaatatatattaatcgttgattaataataaattaatatatataaataatatactaattgcttgaataaatgcattaggttcaactagaggagcaagttagtcagggacaagttcaagtccatgaccaaaattacatcctgacgtaggcgctcaggacaccagagacaccagatcatcttggagagggttgttgggtatgctagtacttgaaaaatattgtttcattagttatacaaaataaattatagctaactttattaattgattcgcaggtttcttgtcaaggcatctaaactatttggcaggaagaaaaagaaagtttctgatgttgtggctcaaaaacaaaggagattgagaaattaaaagcttaaatattaaatcccttaaatagaagaaaaatattaccgaacaagagcagaatgaggatgaggatgacgatgaggaagaaggacaggtagctcgttaagcctatgttccacaacaatatgctcaggaggatgatgatccacaaaattatgctcatgtatttgtttccttaaatgagccacatgtcatgtctagttttgctaaacagagggcagctaatcagctagtatttctttgctcaaacaatatcgataacatagtggcccaagcttatttgtacgaatatgagggtccaatcacagctcacactaagccctacaatgattcacaattgaaatcccaatctcaattgagg

SEQ ID NO: 31039 - DNA, 7033 bp, Cannabis sativa
  modified_base (6960)..(6961): a, c, t, g, unknown or other
aaagaccaagagtattctgcatttgatcaaaatataattgtttacattgtgaataaaaacacaagcaaacataaatatattaagttcgaatgtaaaggtatgaggcatttaagataaataaaagctaagttggccaaccaacttcgcagacttgtctttacaaaatgccacaaggggcaaaccattaggccattttcctaaacaaaaaataaacacatataaatacaagaccaagtctacattatcataggggacttggtgggattttcttgttctgcatcaatctcttcttcctcacaaaattcttccttctgagtcttctcgtagtaagcaagcatggttttggccttatcacccaaaaaactaaaatctaactcggggttggctgaccaaatctagtagatggtcctcctactgatgttgttgaccctttctttggttcaagcctccaactctttgagcttttgatcatgattgacttgtcttttaacgagattagcttggagaaatttaacaaaattctcgagttctttgattttttggtcagcttggtgttgcttttctgcttcatccttagtgcgagaaacctcagcttcagcatcgctccacttcttagctacgacatccctctgttccttcatttggcaaagctcagtctctagcatctcaatcctttgagacgaccgatgatgtgtagcgtaagcgagaaaagaagcctgagaaaaaaaggacaaattgaagttattaagaaagacagagtagggaagagtaagatcaaagaagtacgagattgacctaatgcagaagtacatgacttcttttggtcagatcctcggtattgtcgagaatagcaagatcccaatggcgagaccccgagtgttaagaggttgtgccaactattggtggcgtgctgcgagctcagttgagacccctcagtcccaacttcaaggggtaggggcaggagggctcgaggagaaccatctccggacgagaaccagaggacttgacctggtgtgccgatctggtaggttgctcctcgatcctcgcagcagagacctcaattcccgcaacagaggcctcagtccccgcagtagaggcctcagtccccgcagtagagaccttattccctaccttgggagatttatcagcctcaatgataagctggttcgaggatgtcctcgtgaaggctttagtcttggtccttttaggttcttcgagagaatctacgacctgatcagcttgggctactttcttcccatatctcttatcggcttggggaagactttttaacatgctctcaaaatctacgtccattcttgcgaagacaaaggtaaaagatcagtgacgctgggtaaaaacattggttttgtaaatggagtagaagtttaaaaaaaaagagggatgagttcagaccaggccacaattcacaaagaatgatgcttaccttcgaaaatctcttgtaagaatcgtctataacgattggccgtttcttcttggtttggtttaatcggatgatcttcaatcccgtaatcattcatttccaatttggaccgaggttcaaaatttgggtgtatatggggaggatagatgtttggtatattccggtgctgcaaattttggaagttaaattttctaacaaggaagggatatctcgggagaatgacaatcccaatttctagatgaaatttaacaaaccaggggtctatggaatatagctaacataaactatgcctaaaaaaatatatgaaccctagatattgaaacaaatgtagcattgaggcgtaaggcggatcatcactcgtgtaagaatgatttactcaccgtgtgaagttgaaaggctagatgctaaaaaattctgtaaatgaagacataacttctggcaaaataagtttttcaaacaccgagagtcgaagggcgggtctgaacaagtttgcagtaagagtatcaaagatggaaatggaggagaatagattcttaccattttatactttgagcccagtaacgttaaggtcaaaagatggaagatctaacagctagaagtggaaagggcgggtcattaatgctaataatgaccctcggaactatgaagccgccaaaataaaggcatgcaaaatatcgaaaagggattatgacgaatataccgtctgtgatcatttaaaaaatactttttaaggggcaattgttatacccgaaattcggttattatttcaaaggaggacacgtgtcaaattgggaagaatatgaatcaatgaacgtaacagtaattatatttgaaaatggaataacttataatacgaaattgacagagtatatttacaacttgccgattggaaggtcttatgtaagataaagatacaccaattgttaccttgaacattaacgagaaaccatatgacttcagatgtacaaggcgagacatcaacatcgctacgcattaggagacgagacatggtgactgataagacatttagtgtataatacaccttatgcagactaagtataatagtcaggtaaacccaaacaactaatagcgaggcacccatctcgctataggaaggcgtgctcatgataccttcattgatcagctccaaatacctttcaatggggttcacagctccgtcgagtcatctctctcagataaaagctgacttacaaatgatgttgactgttgaggtccaccttgtcgccaagaattgcgattttcagatggagcattatgtcttcaaacgcaggaacgatgaggcttacatcatcaacctcgaaaaggcatgagaaaagttccagctcgctaccaaggctattgttaccgtgttcccagcgagacatcccagaacgtcacagtttacaacgtatttaatacacatttaccttgacccggtaaagacggacctatcacagctatgtgattttcaaatattaaccacatttattttacgtggtaaataatcaagtgccacgatttcaggggataattgttgtaagatatcagtcaactatgtaattaactgccttactatataattataaatagaggcaagttacacttaaaaagggatgaaaaaattattagagaaatctaataagattgactcgtagactatgcagaattttaactgcaaaaccatataaaaaaacttttgtgttcatacctttctttttctgtttttattctgtgcaaatctatcactgttagggctcaaatacagttaacaaaaatcggcgttaacacttagatatgcctatttcttcacatgacaataagaaatggtatgacctcttggttacaataggtgcatgtaaagtgaggtagactagatgattttacaaaaatccaacgagactgcatttctcaccttatatttgtcgtgtggctacagtgcacagcttatatgtcgtgccactgtagcaacgacattcacctccttttttttcttatgtatttatattattatttatatttataaaattaatattttatttatgaaattaagaatttaatttaagaaaattctacaatttacctctttttttggtgtactaatgtactcttatctatttcagtattcaaaaaaattttttagtttaatttttttttcatggtcgtgtacattataattttctaagatctcctgtaaaattttgtaacagccagaaaaatttaacacgctagatttaaggttcaaactgactgttacatgcgtgactcttttatttagagaggtgcattataaaagcattttttgatctattgtgtgtaaattgaatgtaagtattataaattattgttatttttaattataatttaaataaaaattattacatttttgtcacagtaaaaataaaaatttaaacacacattaaatttaatgtaatttttttattatgaatgtaatgtgtcgtttttagtaatataatatttatgttagtgcaatataatattttaatttatcgagtttcattaattttatagaattattattattaaattaattagaaaatttatttaaattataatttagatataataattgtgatgattttagttaattaagataatagtaattttttttattttattaaaaaattaatataattataagaaatattttctcatgtactttttaattttatggttaaagtggagataaatttggacactagatttagtgatattgtgacactaaatttagtgtgctctttcaaaatgctattagaaaaaaaaaaagaaaaaacatgacttaattgtatatagcatggtggacatttgtcaaccattacattgaagatagggggagagagggacacaaaattgggacacggtattgatttgagtccctcttctactactgttataaaaactctatctactgcatttgcatttggaaaaaagaaaaagagaaatattaggcgaattccgcgaggaaaatatagtccatttgcaagttgaaaatgagggaaacaaatattccttatctctacaaaaatttgcaggctctactgttccatcactactttgtaaacttcagaccaaagtttcttgttgtttagcttagtttctctttcaagccaatcacgacacttggttacacgaaccccctaaagtttcggtaattacatggagaaagagtaacttttcggcagattgaacaatccaaaatatgggtttttcaactttgggcttgtgttctcatatttttgttggaaatggtcatggaaagaatgtaaagttccaatatttcaatgacataggaagaagcacccttagtttcaagcttttcaattctcggcgtgtctcagcaaggccactctcaagcaagtttgaatcgattgcgttcgaagaaagaacaagcccaactgaggtaaatcaagtttaaacatctcatttttctaaaattttatttatttttaacaattactcactttctgattctttcaagtttgtcccatttgaaattttgagtgattccggataggagtagttgagcttttcaattagatgtggtatgtttcgaaatctgatgcaagaatctgagttcaaaattggtattgggctttatgactttaatcgctattacaacattttctgataaacttgatagctctctcattgtttgaaaggtcaaaaaagaaatagaactatgctatgaactcatacgcagactggggaagggagtagtgtatttgggttcatcaaggatgggacctggtcattcacattactcacaaacacaagaattgggaagagaggtgagttctatcttcttggtttttctattttcatgaacacatgtttaaataacaagaacacaaataagactttcaataattagtttttcctttttccatatgctctactgtgcagattgttacataagctcttaagtctgttagtgggtgttacaattatggtttattgttattagttggattcagttagtgtgttagctaaattcctggaattgtattatttatgaatacacaaatatacaattctcccaattaccttcgtttgatttctcacacagattgcaactcttttggactgtacaacttggtctggagctggtccgggactaatggatgctgctactaaaggtgctttagaagcaggaaaaccagttggtggatttaagattggtaaagaagctggggaatggactacatcaaatttccacccataccttccatcagaagcatatctaacttgcaggtatgtgcgattaaatgctagaaagttttcgaaaataaggcttaaatgcaggtatgttgccccaagttggtttaaatgctttatgaaatgcaggtttttctctgctaggaaacatggtttggtggatgctgcagtgaggaggagcatcacagaccgaacagctgttgttgctcttcctggcgggattggaactctagatgaaatgtttgagatattagcattgattcaactggagcgaatcggatcagagcatccagttccattcttgttaatgaattatgattcattctatttgaagctgctggactttctcgatgattgcaaggtgtggggtactgtcttcgatggagaggttgcatctttatggaaggtttgcaataacaactctgaggctttagcttatttatccaaattttataatatgactactggcgatagagatggttatgaagccgaatcgactagcgggcatagaacaatttgttgataggattttgattttatttacttgttgcaaagagattgccctgcaactaatgcttagctgatatctcaaactgttgtagactatttgaatctggttgatggaatgctcttattttgttttaaggataccatcataatatattacctatctatactaaatattttttgtcagacttgcaagacttttgtattcactctacagcctatctgcattcctgtctgggtttccttcataaagattggttattcatgtggaaaataataatgaagcatggataatgtataaaattataccagattgtggaatatgaagagatgatgcattaccaaaagaagttggtcacattgataaacttccatagtatttcagctgtagataaataatctgcatcgtgtgtaactctctttagaaacagaggttatatgcatattattgggttctctttgggaatactagtgaagtaagtctaaaactccaacttctccctataattttggaggaatcagatttatcagtcctcaaaaaaggactaagggcatgtttgaagcattgggcaaaagttttggattggacaattttgttcctagcccatgtttggtgcattcttgagacttggaaaaattgaacaattttatcccctcaattggattagtcccactaggaagggatatataattcaccactgagtaggttaaaacagtcctaattgcgactatatataaatatctttatatattaaacggcaattcttggtttaacgatnnttggtttaacgattcttttttttatttagccttacacgattaacttaacagactgttaacgttaaacgttaa

SEQ ID NO: 31040 - DNA, 1424 bp, Cannabis sativa
acagaacacacgagaacaaatcacaactaaaaaaatttaggaggaaacgtggatttcatgttatgtggtttttactgggattacgactgtatgcatgccattgtaagttcaagactcattcccttctagacttctttcatgtggaatgagtaaaagggtgctggggttggagttgcgtgagcattattcttggggcgtaagagatgcagctttaataatttaggacttggtccttgtttcttttattttcatttcatttatttgactttggctcttcattctcaactgttgtggtactgcctgaatccagagtgaggctgccagttgaaaatattatttgatcattatcgttcttcccaaatcccagatgggtgcgcagccgcataaagggatcttcttcgcattaactggtgtaggaaacttaactcgcccttactcgatatgttcacatctcaggccatttgttttgaagatctagatgagcaggtttatgcagctcatcattgcatatacacataaaaaagaagggtctaggctcatctttgtatctgcagataatcattttctttgaagcctggagaccttcagtcttagccatctccatgtccagagtcttatttgatgactaccacagcaggtttggtattttggtgccatgaatcagtacctttaaagcgttacattttgcatttaccaatttgtattttttttttttgggttataagagagtatctaaaagatgcccattgcatattttaataaaccccaaaaaagtgataaaatgatgctccaggttttgcgaatctaatcgacctatctaatctaattggtaaatgtttattcaaaatgatagtgtcctgagtttcgactctaccagataatgcttgcttgcttgatcccttgatgactgggctatttgttttctgtactttttaacattttcttgatttggttttctgattaaattaaatcaccattggaacctcacactaactacctaccccacatcattagcttgaagaatctacttgtaattactattcaaaaaagaaaggaaaaaaagaatataatttgtgtttggtcaaaattcaaactcttatagttgggatggatacactgaattttcttttagtggaagaaatgagcaccattggtttatttatttacatttgtttgaagaagcaaaacaaacaaaggagtgaactccattcaaaaaaaaaaaaaaacaaagtgaacttttacttggaatgtcctttccatttcaaggacaattcttttcaataaatcataactcttcaattgaaaataaagtaaacggaaagcatttgatgtacaagggaaatttacactctttactaactttttcatttttatttcaattatactgttgtacggtaatcttaacgtttttacttttttttttt

SEQ ID NO: 31041 - DNA, 2836 bp, Cannabis sativa
atattatgtatataaagttgtttgttagaaacattaaactgagacttaacttgctaaatcattcttaatatcaatcaaataacaattatcttactatatatatttacatgcagactttgagcatcacatactctaaggatatcaaaatcactggattgttgtcattgaatagccaaatgttccacattgtgataaaccattgtgagaatgtagagatgagaggagtgagaatcattgcccatcgcgacagtcccaacaccgatggcattcatgttcagctctctaaaaatgttgtcatcttcaactccgctataggaaccggggacgattgtgtttctatcggccccgggactcaaaatctctggatcgaacgcatggcttgtggtcctggtcatggcattagtatcgggagcctggctaaggacatgaatgaggaaggagtccaaaatgtaaccgtgaagcaagttgttttcacaggcactcaaaatgggatcaggatcaaatcatgggccaagcctagtaagggcttcgtcgaaagtgttcacttctcgaatatcgtaatgagaaacgtccaaaatccaatcataatcgatcaaaactattgcccaagtcacgtcaattgcccagatcatgtaattaattactctaagaactacttaatcacttttcctaataatgattatttgcttacatataaaatattgatcatgtttttttatgtatattttacaggcatcgggcataaaaattaagaatataacttatgaaaacatcaaaggaacatctgcaacaacaattgcaacaaaattcgattgtagccctggaaatccatgtagtgggattagattggaagatgtgaatttgactttccaaaacaaaccagctcaatccctttgtgccaatgctaaaggaatatcttttggcactgttttaccaaatagttgcttatcaaattgatttatttatatagaattattttcctttattgtatttgtataattaattatttgattaattctttgttaatagtgtatcatcacttcattattaatttattcaattcttttacattagtctattgttgtaatttaactttctcaagccaatcatgaatatattacaatatccacttgttgaatatttgagtattccattaattgtatttatttgaaaaacttaattagtgaaaatacttcttattttaattattttttaaaaatatatatatttattgtcacaaataaatttaaatctacaaccttataatttacagcaacagaatatatcattggaaatatattatcattaatacaacatattataggggcacaaataacatgagatcggatatataaatatatatgtttaaaggttaataatttgagaaaataaaataaatattttataatttttactgagaaactaaaagttaaaggaaaacataaagataacataattgtaaaatatcatgagattcaccttatatgtattgttcctttatatttggatttgattctgaaaaactgtctacagagttagttagggatagttagttataacagctagtggttgttatgtaattgttcccttctgttgcttattttttcgtttctttgttctgtaacaaactctgtactcagctttctataaataccatgctctaatcaagacttgctaacttttgcaaagtcttgtgattcaatttttcaattgtgtcctcatagaattggatagataagttcaacagattttacatggtatcaaatagtgtttgaccaacgtcttcatggatcctcgacaccctgaacccactgcttaaactgctgctccaaactctgctacttcggcttctccagccattcaacaatggaatccttttcagaattcgttgaattcttccctcagtgttcgattggatcgaaccaattttcttgcgtggaaatcgcaagtcatccccaccgtcatcggtcacggtctcgatgatatactgctcactggtattgctcccgctcaagttcttgtcaatggcgccactaatcccaaatttaccacctggaaacgcaaagatcaattactgctcagttggttaagatcttctatgacagaaaccattcttggttctctggctcaacatattacctctcatgaagcttggcgtgccctggaacaaagatttgctagttaatctaaggccagacttctccagatcaaatcgcaaatctcaacaattaagaaaggtaacctttctatcactgattactgtgacaaaatgaaaattattactgattctttagctactgcaggtcatcccttggatgacagtgatcttgttatgcatatccttaatggattaggacctgaatatgatccggttgttgttcatgttaccagtcttgtggataatctttctatagagtctattcaatctctattactaactcatgaaagcaggcttgaaagacactatactgtcaatgactctaatccaaatatttctgcccatctaagtatccacaacccaagattcaacaacagacctagttatcgacaacctgcaaatcaaactcgtagttatccccaaatgcaacgccctcaagatcgtacctatccaagaaacaatgcatttatccctcggctactttgtcaagtctgccacaaagcaagccatactactgcgatctgtcactacagattcgataaggtatttgtgacaccaaagatcaatgactccaaagcttttcttagtgaactcgaagaccatgatgatccccaagtttattccagttcagccataccagaattcgttgaagattatgattggtatgctgacacaggt

SEQ ID NO: 31042 - DNA, 1116 bp, Cannabis sativa
ttaagtgtagacatgcttcttctcccagcgttcttatattataaatttataatgatattagtgagatgactactacgtcgcgtagaaagcaagatggttgaatgtagttattttttctttgctcatgtatgtgggtcaatgagttgcaagcttttatttctaagtatgtgggttaacgagctataagctccttgatgtctcgtctggtacgcttttattatatattctgtttatccagggatagatatattgtctcgtcaattatatcagtttaatagttattattcttatttcgcatatgcttatgtggcagcgagtttgaatatttctatcaacttataattaattaaaatgagttatatttaatcgcatttaacaaagcaatttaattattatattttttgagctaattcatattccttttgtaggacatgtgtgcagcttttgatgaatagccaaattttaggtataacatgggcatttaccaccatcaattgtaacttttcactaagataaggttgagtaaccatcatcttattcttttttttttttaaaaaaaaaaaccatcatcttattcttataaataggagttgactcaaagggaaaaaaaggaggcattttttgattgatagaaactctgccaaattgtaaacacaaccaaaactcaaaaataatattaactcgtagagtatgtagattttaactatcaaaccacgtaaaaatatttggtgtctgtccagcttccggatggcatgatttcaataatggatttggtccatcatcttgaatgggcctacatttgagcttgtattagctaaagtaaagtattagaattacacgtgtcctcttttcgaaaacacgaataacaattgggtatcacatcagtatggtattaagcaccttaaaatactatataacaataatagtacaaaaaatcattaaaaaaaaatagttacaaagattataaataaaaaaaaatttataaaaaaaaagaacacaaaaaatatttgctaaccaattattaggtaccacgtcaatatgttactttcacatatcaagtaccaaaaatcatttactaaatagtacaaatattattaaaaagacataaaagacaag

SEQ ID NO: 31043 - DNA, 2322 bp, Cannabis sativa
tatatatgtttatatatcatgtttaatacccataatggaatttcaaatatgaacctagacgtaattgttttttttttattatttttattattaatgtataattatgtcctgaaaaaattccaacttaattgccctaattggcgggaaattaatattgtacgtaaattgcattattgcatattataccaataatagagtacttacgtaactatacctttccgcttttatgatttctttctcctcagaaagaacaaaaaaaaaaaaaaaagcaagacatagtgcaagtcaaacaaacaagtagcagaataaataaagttacagcaaaaatacaaaaaccacaaaaaggagcaattgaaaattaaaataaataaataaggatgtcatcatcaattaatatgcatgcatcaagaaattatgattggtaaaggcacattcttaattaccatataagcattgtgattgaatgattaagaaatacagatatgacaactgtatatatatgtgttaatgttcattcaaagtcaaatcttaaaaacactggtatatctctttaaagcaatatagatgaagaaaagtaaaagagaaggaatgcactcaccaactattatttatttattattcagcaaaacaataaaaaaaaactattatttattcatttcaattttcaaatctctcgcatatcgcatagtaaataaaggccgtgcttttagagtggactgttctgcctaacatgcccattccattaatattttgataaaacttcttctctcgaactaattaaaatgaagtgcacatttaatattttgcttacctgataatacatgtttcttaaacttcccatccatcttagtaatttgtttagtgagtttgtacaagcagtacactacatcagtcatttcttcaccttgtttagacactcccgagtgaattcacactcaaaaaataagtgttgaaccgtctcttcatgtattctagacatgatgcaagtagagttatcgataatatagaatccatatagtctctccttagtttccacagaacaaagcaatctttaggtaaactatatctacaccatacttctttgcaccatcgtaccttttcctgtggtggacagagcagtttatatagccattaccgatttaatatttttgagctaaaaactgaatcggatccatgagctggctgactatattttttatctccacaattttcctacagtaccaactactttgggaagtagccctgccacaagtttctatattgtatataaacattattcacccatttgagccatagactatcttttttgaagctattgcccaaacatatttcatcatcgctaatgtgttccaggttgcaatgtctctgaaaccaatatccctagttgttttagtttgacacagtgtgttccaagcaactgctcctggtcccaagacagtagcttgacctttccataagaaggcacgacatatactctcaatttctgcaatagtcttctttggcaaagccataattggactccaatatgaatgtattgccaacaaaattgaatttacttagactactctaccggcaaataagaggttcctaatgctccatgctctcactctaccagtcattttctcagcaaatgttttgcactccactgctgaaattttctttacatagctagataggaatacaacgtacttgaaaggtacctcactcctactgaatccagacacatctatgattctctgacattccctttcatccattctactgtaatagatggctaattttgatttgtttggttgcagccccgaagtatctaaaaataatttaagacgtccttgtaacatatatatagaagatatttttaaagttactaatacaaaagaacaggataccatctgtaaaacttaggtgatttagccttaagggttcgcatctgtcatgatacccaaaatcaagtttcattctaactttttgtaatattctggtgaggtattccatccccaatacaaaaagaagaggatacatggatcaccttgtatcaattctcttttggattcaagaaaacgatgcatagtaccattaaacatgattgagtatctaggtgtttgtacacaagtcatgatcgaccttatacggaactaaaatttaattggaaatctagtttaatttgcatgaaactaatgtcctaacttcaattttcagattcatgaaatgaagatctcaaaaagttgaactagggttccttgacaatttaactcaagtataatctaaaaaaacttacatcaatactatagtaaaatatttatactggtgtatttttgttgt

SEQ ID NO: 31044 - DNA, 3008 bp, Cannabis sativa
ggtcacagagtggaatatcaaactgaaattgaatttatagaatgcctgcaacactgccaattggaagatgtcagggcctctgggtgtatctacacttggtccaataagcaacatagtcaggatagaatcttttcaaaaattgatagagttctaaccaactatgcttggctcgattgctaccctaatgtagaagctctatttgtagatgaggggacttttgatcacacaccagggattgtctctatttcctaaatggaattgtgggaaaaaactttttaagtactttcgtatgtggaaaacacatcctgagtacaatggaagggttgctaaagtttggaggaaggaaataattagaggcaccaacatgtaccagatagtttgcaaactaaaggctttaaaacctatcatgagagagatcaatcaacaaggtttctttgacctgcaaactacttcaatacaggccaaaataaagctagaagaaatccaggaaatgctacaaagagatcccctaaatcctatgttgcttgatcaagaacttgctgcaaggactgaactattagctgcacagcaaaactatcagtcatttctgcaacaaaaggccaaaatcaactggatccgagatggagatagaaacacatccctatttcatgttggtatcaaataaagaaataggaaaaatcagatcctatcaattgaaactgatgatggaacaagggtttttgaaccagggaaagtcacaaaagcctatatctcctactacaagaccctacttagctctaaaatggaaaacagaaagaaggtatctagcaagatcctaagtagaggacttgtactaactactgaacaggctgctatgctaacaagatattttactggtaaagaaagttgtgtttgaaattcctgggaacaaggctccaggcccagatggattctcaagtttctattttcaggataattgggagctagttggagaggatgtttataggacagtaacctccttttttgattcaggcaagattcttaaggaaatcaatacaactgtcctaacaatggtacctaagatgaaatgtcccaacactgtcaaggattttaagccaatagcttgttgcaatgctatttacaagattgcaactaagctcttgtcttctagaatcaaatgtattcttcctgagttggtatcaagctctcaagggggttcatagaaggaagattcattggacataacatcatgatattttaggatctagtaaggcactatggatggaaatcaaacaagcctaactgcatgatcaagcttgatcttcaaaaggcctatgacactattgaatgagattttgtggaggagatgttacttgtgcttcagttcccaaactcattcatacaaactgtaataaattgtgtgagaacacctaggttttctattatgtttaatggctctgtgcaaatatgggttttttgaagcaaaaaggggactaagacaaagggacccaatgtcccctttgctttttgtcgttgggatggaatacctatcaagaattctgaagaaagttggtaacaagagggacttctagtttcatgagagatgctctgaattgaagattaatcatatggcttttgcagatgatgttatgctgttttggaagggggaattcaaaagcatctactacatgttgcatggactgaagttgttctccttatcatctgggttacagcctaaaccccaaaagtaagcaatctactacagcaacatgcctaatgaggaagtaagtagagttcttgcagcctctgcctttgctttgaaagaaatgccttttacttatttaggtgttccttctgtgctaaaagaatatttggaaataaatgtactgcccttgctgaaaaaaatgacaacaaggataagaacatggagttcaagaaacctctcttttgcagcaagagtagttctagttaactctgttctcatggccatacatgcataaatgtgttaagtgatgcttttcacccaagaaagttgtgaggaacctagagtcgatttgcaaagctttcctttggaaaggttaagctatctcaaatggacatagactggtagcatgggatactctttgtcaaactaaaactgcaagtggtattggctttaggaggatccaagagtggaataaaacagctatggggaaatacatgtaggcaattgctcataaacaggacagcttgtggttgaggtggattcatagtatctatctcagggactgtgactggtggagttacaaggctccggcacaaagcagttggtactagagaagccttgtaaccttgaaggagcaattcaaagatggagcagggcagcaacttttcttacagaattatcaaatttccaagggttatatcttgctatgtccagaccagaccaaagtacaatggtcccagtaggtttggggtaagctaaatacccttaaacatagttttattgcttggttggcaatctaacaaaggctcaaaactataaagatagattgaggataatgggaatgacagtagttgagcactgtgagttatgcttagtgcataaagaaatgcagaccatttattttttgagtgcacttttgctgctacttatctccatgttttaaggttacaatggcatgttgcagccaacacacttcaatgcctcaccaggtggattggaagatcaaaaatcagcaagttcaaggaaaatgtattctcagccgctcttacatgtttgatgtactcgctcttacatgtttgatgtactcgctttggagagcccgaaatctcagtatttgagaaaaaacaagagcagatgcagggaagttaattgaaggagtaaaaaaggaggttgtacaaaggattagtatagtttggccaaagaaagtaaattcagaggatactagatggtttcaaaatttgtaaagaggaatgtatgtaagagtatagagttaatggatattagatctagtgttataccttgccatgaacaaagatcagagaaa

SEQ ID NO: 31045 - DNA, 2208 bp, Cannabis sativa
ggaattgtttgtttaaaaatacattgagtaatgaaaaaaggagaaatttctctttcactttcattctgcattatacatttgggattttattttggagaatccttcacgtaattaataaaaatcggaaaggatgactcattttgcgaaggaacctctttttaagcaacaagattttgcaccataatcatgtttcatggattgtgctttttaagacttgtttgaattgaactatttatttcacagttttgcactaagtttagttataagtagttctgtggtaatatcttctagagtttttctttggtatttgattgtgctttcgattacattccattgcttgtacttctacatacgtatcttttggtttaactctatcctatatactctcaatcatttccaatgaataccacatttgaataatcttatcatatcaataataaatcatatcatttaacttcttttgttcaatagagagcttatcctgctttcataattttcccggtggttttagtttgcatcatgtgggagtgtctctctccggtcttcatatgaaagggctcccagttgtatttatacatcaacactcttatacgagtatggaggcttgaatttaaatccaaggaatggatcatgcttccaatggggtctgacatattgtgaggtatggagactgttctactttatctgtctttttcttttttcagcttgattcttttagctataatgtttgacccgtgaattagcttgatctattttattatgaatgtggtagttatatcatatgcaatggttgctataacgttttatctttgtaaatattaactcttgacattactccttttatgtctaaatatgctcacctccattgttttcatttctcagttctgttattttatttttgctgatcagcatttatcattactcatcatcattacattttataaatccatgtaacatactaacatgtacaaagtaccttaaatagtttcttagttaatatattatactgcattaactagtcataactcatagcccgcttcacatagctcaaccacccacaggttaagcatgttactgtaaaatctggattgagagcaatccaatgaagctaaaaacttcaaacaactcttttaaacaatgaactgtgtttaacgttaatatgtttaatatgtcattcggagttgtaatcttatacaataagatttgaacctgacagaggttctccacagacttttacataactgataagaagtctggcctcagagctgtcgtcaaagctggttctgggtgtagagtcacgcccttggtttttgagagtgaacttgtcaaaaccacgagaagttgtaggattctctctcccccactaaggaaatggctaagagagagaaacctctcagatgaagcccgtcttctgcgcctagaagaagggtaacaccaaaaactcacgtttattgatttcttgtcgttagtcttttattataaatcttttcagttatcacatcacatcacaagaactttgacttggttagtatctggcatgaatttgagtttggcagatatgtacaagaagggagcacagtgagtgtggttggaatagttcatagaaataatgatgtgactatgattgttcaaccttcagaagttgtctctacaggatgtttatggcaaaagctgcttctcccagttgacattgatggagtcttacttagtgtttcacgaatggctgtggctgcccattcaatcagccgatagcccggccaaaacctggcctggactgctagtgtctgacgtagctaggacttataaacagtgtaggagagcttctgctttaacatcaagtctttttacagggcatttatttgactcgattattattattattattattattattatgatccattttttttcttcttatttgtttcatttctttgttaccaaaagctgtaacaatttgactaagttaaggcttgaatattatctatgattcattaggatatttaatgctttcaactttcaagtttaagttgactgtgattcttggttactcgatttgttcctttcaactatatagtcgttaaaaatagtttcttttgcaagtttgagatgactgtgacaccatctcaaagtgccatataccatataacgacactctagaataaatgttgaaggacatatgaaacgacattgaaaaaaaaaaaagaaaaa

SEQ ID NO: 31046 - DNA, 2565 bp, Cannabis sativa
ttacttctggttccctgaggttttggtttcaacctatactccctactcttatatttggttaagtgttaaaataaactccaaatatataaaggtagtggcttacatccagttccttgaggttctactttcaggcaatactccctactcttatattgggttaagtgttaaaataaactccaaatacaataaggtagtgtgctttacaagcgtgaagcctatttttcaaagtggtctttagaattttgttgacggtttccacttgcccgtttgcttgaggtttggccacaacaaaatagcttttaataattccatgtttggcacaaaattcgatgaaataatcactatcaaattgctttccattattatacactattttgtgtggaagtctgtatctgcacactatgttcatgggccttcttggaggttactatgttcatgggttccacttccacccacttagtaaagtagtcaacaacgacaatggcgaatttgactcctccattgccattcagaagtgatcccactaagtctattccccagactacaaaagaccaaggaatgttcatgagggttatctccgttgatggggcccacgaaacttttgaataccattggcattgcttacatttgcggacatattcagtgcagtccttcttcatggtaggccaaaaatagccttgacgaatgattttcttggaaagactgggtccagatgtattatctccacaaatccttcatgattttatgcatgacaacacttatctctattccagcattgcacctcaaatacagcataacctgctttgagccagttgaagttattgtgccatgacgaccatagggtcttactcatcaggcaggctcttctccccaatgttgttctcaacgactttatcctgagggtcatcttcatgcatatcctccagtgtattgttggtatttacttcagcatcacaaaactactttctccaaattttgcattctgaatgatgggattgtctcgattttgatcttcgtcttgaaggcttttttgacgactactcacctcctggggtcactagaatctccagctctagcactagctaggaccagtgaaataaaggctagattaggttctggtgagggccatgattactcagacgtaatctgcaagtggtctcactgctttctttagctctcaatgaaagcaccaaaatgttattgagatttttgaaaacagaataaaaataataagaacggaaggttaaataattaatagagaaagtataaaatgagataaacaatctttaacgtggttggggcgttaactagccttagtccacaagtcactattattcaataagtcttttgcttgtaaatgccttaggaaatacacaaaatgtatgttctcatgtttgcctgagcaaagtttgcaagagagttcaaccctaaatccatagggtttgtggggtatttatagtagtttgagaattacattaggtttcccatttccctctactgaggagtttatagtaagcaatactcgtgggctttctcatgaagtccagtccatggagaagatgatctactaactaggctgattggatttggattgatcttgtcaacaacgtgtacactgattgtggacaattaatctaaaataattgcacagtatttgttctagatagttccccctttaatcttgatacggtactctattgtgatctgacaattggagattccttatttgtgtgcaggaatataaagggaaaacggaagggtcttttaggaacgcactgtcttgcctcttcggtcttgcagtaccgaagatgtctttcaggtacagcttggtaagggcagaaggctttgcgcgtgcaaaactaaggtacgctcctggaaggacatatgtagatgggcttggcccattttttctttgttgagggtcccactgatgggtcttggtttctaacctagagtccacatgtccaatatcagaaatacggataacaacgtccagccactatcatattgttgcacaacattgcttgggtagctaccaaaaaggattatgtttctattgtttctgtattgttgaatgtgttcacaaacaatggataccgtgtgacagtttccttgcttagtagatttatgtaaaatagcggatttttatcatccttgctttggagtggttggcaacattccttcagttggtatttcaactgtatttgagttgtttcaaggttgtagtgtagttcctacaacattatctgtactagttcaacataaatgcaatatcttaatattagttctcaacttgattcgtaattaacattttgtttgttgttactatctcgatttttgcccacctgacgtggcatgtccacatggccaacataaatgccatgtgggagtacagcttgccaacaagaaggccaaactatctactcaacacttcaaccgattaggggtttgagtacataggagggacgacaaaatgatgaaccaaccacctcaagggggctggtcggcgacccatgggcgaccctatggccagcataggttggtcagcttacaagtactatatgg

SEQ ID NO: 31047 - DNA, 1306 bp, Cannabis sativa
aaggtggaatgtactttagactcggttttgatgtaatcaactcaatcttgatccaatagttaccgagacaacaaaatgcattacaaaatccactctctctctctctttatatatttgtatatacatacacatttctcatatacatgatacatatagtttgttttatgtaatctgattaaagtgaaatgtactttagactcatcaaactcaatcttgatccaatagttaccgagaccacaaaatgcattacaaaatctactctccctctgtctctctctatatatatacatatatatataattatatacctgcccagaaaggtggcactccacttaacaagatgtaaagtataacccctgcactccatacatcagcttcaggtccataaagcttacgcaaaacctcaggagcaacataataaggactacccacaacatcagaaaacgtttcacctgaaaaataaaaagcataaaaagaaacaaactttcttgaaaatcataagtaaagactaaaactatattatataacaaaacaaaaccctaaagatcaaagaacaagaaaccaaacctggtttgtaaaaaacagagagaccaaagtcagtggctttaagagcagcatcttcctcaacagtatcaaacaagaaattctcaggcttaagatctctatgcataaccccaagagaatgacaagcctcaacaaccccaacaatggtcttggtcaacttagcagcctctctttcactatactgacctttcttaacaatcctatcaaaaagctcaccaccttcacaaagctccataaccaaatgaacagtgtaagaatcttcataagtaccacggatcctaaccacgtttgggtgttcagacaagtggtgcattatctgaatctctctccaaacatcctcgtaatcctcagagcaaaggagctttctttttgggatcgatttacaggcgaaacgaaacccagttgatttgtccgtacagaggaaggtagtaccgaactgaccttggccaagctttcttccaagattgtatagctcagttacgctttgggtccgatatggaaggacccatatgggtttcgattgaggaattgaagtggatttcttcattggtgaatcagaacaagaaacagagcatgacccagaaaaacccagatgagtaagatcaattcaaatccagttccaattggaatttgaaggaagaagaagatgaagaagaaaacgacgacgacccaaaaaagccaccacttctctctcttcctctcactctgaatctatacataatatatataattatatattata

SEQ ID NO: 31048 - DNA, 2670 bp, Cannabis sativa
cattttatcaatcttccaaaagcacctagttttgacaaaacttgtctcatggctgatcggttaacacttttatggggtgagcctggaagtatggccgtagctgatgagactcatggactaggcacaacgtaagttttttgtagagggggatatctggattctggccctagtaaccttttacttacgtagtaattaggttgctggtgcttgcccccttctcgcactatagttgcactaatcgtatcttttgagatggctaaataaaagaataacatctctctagttattggtttcgccaaaactggaggcgttgctagatgcctttttatgttttgaaaggcctccttgcactcttttgtccactcgaactttttgttggctcgcttattagttgactttgaaatgaatctgttaagtgcagttattcttcctatcaaggcttgtacttccttaggctttgtcgatgatggcatgtctattaatgccttaattttttcaagatttgcctcaatacctctcacgttaactatgaatcctaaaaattttcctgaggaaactccaaaggaacatttttttcgggtttagcttcatgttatacttttttaatattttaaagcattccgcgaggtctgaggtatgatccttacttcttatcaattttacgaaatatcatcgacgtaaacctccatgtttcaccctatttggtttgcaaacattttgtttaccaatcgttgatacgttgccccagcgttcttcagtctgaacgacatgactttattacaatagagtcccatgtttgttacaaagcttgtatgttcttgatctgggacatacatttttatctagttacatccaaaatatgcatccataaatgacataagctcatgcccaacaattgcatccactaactggtcgatcgggggaagtagaaaatagtcttttgggcacgccttattcagatcgaagaagtcaatacaagttctccaagttccgttgggcttcgggatgagaaccggattggctatccacgagggataaaacaccttgcgtataaagtcgtttgctaccattttgtcaacttcctgtttttgtgccccttgcctctcagaatacaagggcctccttttttgtctcctttctgggtagtttggatcaacatttaagtgatggaagataatattagggttgatccctatcatatgtccatggctccaagaaagctgatcctggttcgccttcagaagcttactagctgctatttgagctgctcgtctaggttcttcccaatatatacacacttttcgggatttcctaggtcgagaatgacctcttccaattcctcgattggtttgaacaggtttctctcatcttgaactcgggtccagatcttcgtctttctgctcagtttcatctaccaagatcgccatcaacgaatgatggacttttctatgttgtatctttatgcgatagcaatcacgagccagcatctggtttccacacaccactccctcacaattttagtgtttggaatttaaaaaataggtgcttgatcgaattgacaacccttagttcgatcagtgctggacgacccaataatatgttgtaagttgagggtaggttgacaaataagaagtcttgcataacagtagcagataaaggtgcctcgcctaaggttaacgcgagctcgattatgccaaggctagcgatgctgtctctagtgaatctgcaaaggtttaccataaagggcattaatttggctttttcgagccccattttctttaggatctccttataaaggatatttaccgagctcccattgtctattaacactctcttgatccttttattgacgagttgaatggttatcactaatggattgacgtgaagatacctcacgtttttctcatcttcttccgtgaatacaatgggaggttcctcagttttcaccttcttggaaggttctgggccaaaggtcgactgcttgatctatatcacatatcttttcttggcattgttgctttcccctgcaatatgtggccctcctgaaataacaaggatgtcctctccatcaacaggattagtttgtaatccctggttgtttgggttattgggcagattgggctggttgtaaccctggccttgtcttttcacgtattgtttaaaatggcctcgagcaatgagactttctatcttgtctttcaattggcgacattcgtcggtcgtatgcccaatatcgttatggaatttacaatatttgttaggatctcttttgcttcttgaagtcctcataggctcaggcttaccgaaggctaccttctgctcatgtgcgaggtaaatattctcccgagtttcattatgctcggtataaatagtatacactggcacatatttgtcatgctttttctatttctttctatccttcgacggtttcgtaacgtcgtcctttccctttgaaccagaagcccccgagttattgattctcgtgaaacagttcctattgaaatattgttgggttcacctcccgagcttgttttcaacaaattcatttcctttcgggcttcctccttccgaaccaacacctgagccctttcgttgaacttagtgatgcttctcactggacgtccttgtaagtcatcccacaactcgccccctgcggtcaatggatcagta

SEQ ID NO: 31049 - DNA, 1855 bp, Cannabis sativa
ataataagattttatagcacgaaacacgtctaaaagcaagcgaaacataaaacctaaatcagacagaccgtttctctctcacatggaaattatgttgaccagttgccaaaacttctaagcaacaaacaaaccaaaacgcaaaactatcacaattcaacacagaaaatgaacaagaatagaaagcgggagaggtttagtatgaattataaaagaaaagatggataaaaagaagaggaattgaagaagaagaagaagaaacgataacctgatgatcttctcaaggtaatcagagacaatagagtgccagtaagggcccatggctgcagtgccttcgactacgacgatcagttgcttatccgccattactagttacaggtccggcgaaggagtcagcttagtttgggagaggagggccctctttctcagttttactagtttgggttttctcaattttcttctggaaactgggacttttccttggctttttctcggggaaaatatagtttcattaatattgtataggagacttatattttaacccacccaaaggccaaaatgataacttgaaactaatatttaaaaaaaaaaaatcaaaataatttataaaaattacttttatttattttcctctacttcttgacaactttaaatattgttttaaaaaaaaataaaaaaaaattaataagtaacttcttttaatttataaaattttaaaatacacataacaaaaattaaaattatcaatataacttttttttttgaatgcaaattggaattttattaatttgctaaatcagccaaaagacaagattgtaattcagtaggaacatccctcccactgaaaattcaatctggaaaagaatatgatgctctagcaaagctgtgtgcagtcatattagcagatcgtttaatggaaaacaaagaaacattgtttaaaatagatagaagctttcgacagtccatcaccactcccccaagaggcgaaaccatggtgatgttactttgaatagcttggacaattgagagacaatcggactcgagttcaactttatgtcattcatgttccttgatccaacttgatgcctctttaatggctaaagcttcagccatgtctggtgccattgtacccctacggtagactgttttggcctccaccaagtacccgtggtgatcccttgccaccaacccgaaaccatatgatgaactgtggtcaaaagttgttgcatcaactgagattttgagtacattctcaataggcttaacccaagaaaccgccccatcacctgtaatatttgagggataatgagcaatgttcgacttatcttgagcattcttccattgcacaaaatactaagaaactatagacacaacacttgccaccgtgcgtcttttaccttgccaaaccagatcaatcctcgccccccataaagaccaataaatcatggcaatctcaccccgtttttcactgctgaaagaagcacaaatccaatcaaaccaggctgtaaagtcaatgatatttgcagcagaaaaaccaagaagcaccacctgccaacactgagcaggaaaaggacatgaaaccagagcatgaaactcagtttcatcgtccatattacacacaaggcatgttctttgtacttgaacatgtttaacatgtaattgactcaaagttggcaagcatcggggcagagctctccaaagcaagtttagaacttttggagggactttaattttccatagtttattccacaagctaccattatcagcaggctgccatctttgtttctgcaattgcagcaacttgtatgcactttgaacagtatacatcccaaacgcttctttgcaccaataaactcta

SEQ ID NO: 31050 - DNA, 1182 bp, Cannabis sativa
aacatagaaataaactagcataaaatttagtatacgtgcctcgcacgtaattttttgctagtatatatatatatatatgtctaatattatttaacatataaaaacaaatttagtaattatgttgagttcttgttatgtcctgagcctaggtcgtgaaaaatatacaatacctataattttagtgtcaaaggtcacactttgattcttgttgaaaaacaatacctacaaatgatcttttaatttatattcgaaaaacatatataattacaaaattttaaagtaatggaataactcttataagtataagaaaattattagtaacaaagtaagaccattcattattagtaacgctattaacatattcatactgctctgtagggtcttttgctcgaccaccaaagtagtatggcctaatatcaacatgtggtaaggtttcaacagttggatcaggaagagatgcagagcaaaacaagtcccaatcctctcaaaattaagaaaattttactaagttgtttatatatatatataaacatagttacatttatttttagccattagatcactattgaatgattgtgattaatttaaaaattaaaataaataaataaataacttataacctgatactaacttgaaaatttatttcattataaaattttaattaaaattaattatatttaaaattaaattactaataatcattaattaatttgttacaatttgttactcaataataatcttttaaaaattaattttttagacttaaattattaaaatatttataataaaaccacttataatttaaaaatcacacataaccttaattaataaaaaatagtaagaataacttatttaatattctacactcaatattattatcaatactttaagtgttgaataagtgtgcaagtccaagattggttcaagtgatttaatttttttttctaaaaaaataaaataaaatctaatagcaattataaaattaaagataatttttttacggcactcgacatatttgtactttattccattctctgtcatgtaattcttctttctaagagaggaagttactttatcattttttcttcatagttctaaattattaatatattgtatatatatcatttgatcggagatgaatcataaaaaatgaaaaaattacaaaagtttaaaaattattga

SEQ ID NO: 31051 - DNA, 2470 bp, Cannabis sativa
aaccaaaacattttttcataaacttaattagaaacaacccaaaatgcctaggtcaacattcgtaaaaaaaaatatattataatattgtttaacattctaatttcttttttcgaaattgtttaaaaactggttagattttttttttttataaaaatctctgcttatatataaataaaaaaagttagacttcacggtcattgcaatataaattgtccgggatagaagctaacggaataaaaacaaacctcatgtgggtaaacgcccactatagctacattgtaggcagcaaaatcataagttctactaatactggagaaaatacagcttaattacaaacaagagaggtgatctatcacaaaatgagacgcagttcttgattgcccaataagactccttcctattgaacgcattgataactatttttaagtcactttccacaactggttaaattgatgatacatactatagttataatttatatattgccgtatgaatagtttgaattataatacaacgacaaaggtaatgtcctatagttttatccattattgcatgtaacataaaactagaaaatataattaaatatacaattaatatataacatattatacatgcatgtatatttaaaatgtacgatttctctgtgtatatatgtattttcaaatatatatagtacgcaaaagacttgttgatatatgttatattttattttaatctattcttaataatcttactgatatatattatattttagctagatgtctttttagacctatatatatatattaattaataatttatttattttatttacaaatattagtgccgaaatcttctttcttattcaatcgtgtccattttaatcgttaatacaatatttgtttttctaagtatgagctatactatagctatatattattaattaactaacatatatatatatatatattatagaagatcagtattttttttttttttgaaggattgtagaagatcagtattagtgaatagctaactttaaaagaaagataatattattcctccttaggtcttaattatatatctttatttattttttatttgataagaaatttgtcaatttgcacgcgattggacacaaatgaagattttggtacatataataaaataataaaaacaaaaaattaaaaagagactatataatttgtaattaagctaaattaatatattcaattcttctgtgtgtttacatgtacgtgtcatggcctcatttcaaatcgtataattgttcgcatggcccttattaatttagaaattatggagaaattaatataattatgtcctaatagttttttattattgattttacaacaataatttattcaatatatatttcttgagcgtataatatatacttatatatactaaaatatacattatattattattattattattatataatttctaaaaaaatcggtatatattatatataattcacaaaaatcacatgatgtaactattaattaactgatccaatagaaaagattaatataaatatacttatggatatatttttttttttgaaatgggatatatatattattaaatggtgcagctttcttcattggaagattagatatggtacatgcatgtataacaatttaatgaattagcaaacattccactaattctattaattaattaattaattatattaatgtacgtattccctactttattcaaccctaatcaaaccgaaacatttcccttcatacaatataaatacacacataccattctaataataataatcaaacactacaatttatatctccatctaaaccatatatcattatacctttctcaaactatatacacaccatcataactcctaagtataatatgtcttccaataatattttcatgatgagcttcattctttgccctatgatcatgtttatgttgtcagctgcagcaacaccaaccactacatctttcaatgtattgttaggtttcggggcgaaacctgatggcataacagactctactgattcattcctacgtgcatgggaagctgcatgtgcctctacagacgacgctctcatatatgttcccaagggtaggtatttggttcgtccgctcgcctttaaaggtccatgcaaaagcctccatatcaccgtccgaatcgatggtacactcgttgccctagaggactatcaagtgttgggtggttctgagaattggcttaacttccaaagagttagcggtgtttctattgttggtggtgcacttgatgctagaggccctgccttgtgggcttgtaaggccaatccagccaacaattgtccttctggagccacggtgcgtatttaaatgaggtttttacattacgtattgaaatttttaattttttttctttttaactgtggggtgaaattttttcaaaaaatattgtattttttttttcaaaaatactgtgttaagtttt

SEQ ID NO: 31052 - DNA, 2696 bp, Cannabis sativa
aaaaaaaaacataaagtgtggaagatatttattattataattttttaaaatatgagagatattttagttgatataattagtgttcaaaattttgtaatgtataatattaataattatgataattgtattttcgtgagtaaggtatatatatttataaatttgtgatattttaaataaatattattagttaacaataccaaaacttcactactttattttaaaaataaattcatttacaacaaaagattaaattgtgtaaaaattaacgcacttaaaaaaatattataaatatttacctagcacgataaaaaaactaaagatattaatttcaaaaataaaaacatgatgagataaattagaaaagaacctaaaacatgaaaagaactacccaatgtcaagaatactattccaagatctctacctataacttaaaacaattcttttactaaaaaatcaaatttcaaatctaaatttatgatccttacatgtaagtaaaaaacatatttataccaaatctaaactttctttaaaaaattattcttacccaacacaaaacttagacattcattcttcatcaaaacggaaaacaaacacttataatacatatctagctaagacatatatatatatagattaattaaagaatagagagactaacataagatactacatgataagagttagacctcttcggccaccatatttatcaccttagccttcttcaccacaaaaattacaattttattattgtcatgatgtcgtccatccattcatattgctctgccaccatatttatcactttagccttcacctcaaaaattacgattttattattgtcatgatatcgtctatccatccaaatcacttattgttcttcgaagtgcatgttcgtacatcgaacaattaataattattagaactcatctttgaaccgaactctagctagaactcatccttgaaccgaactctagttatttagataaaatacaattcaacaatgaaaaaaaattgtagaaaaattagagagcactactgagaaagtttctaacaatcaataaatatttgtgtgagtaaaaaaaaaaaaaggagaaattagatgtttgagtgagaaaaaaaaaaaaaaaaaaagagagagaaattagatgttgtatagatttttacttataaaagtaaaatatataatataattaacgtgcatatatgtatattatatatataaattaaaaaataattatatattttttaaaatcaattaatcatttaatatttataaatttaataaaaaaataaaaaaattgaaataattaaagagagatcaaaaaaaaaaaagcttattaaaagtgattatagagtagttgcggaattaccattggtccatttttttttttaaaaccctgctgtatgaccattattgaccacaataaccgatctttcgcatcgaatgccacgtggcaagcaatttaatttgtaaatgtaacatgtttctctgttattttttccttttcaaatttaaatctcatttatttaattagggtgaaaaacataaaacctattcatcataaccattgtccattgttggtacactacacaaacacataataacactgtaccgactcatctcttcagctctttcgtcaagtttaggaaagacatcttttattttatttttcagaaaaggaaaaaaaaaaaaaaaaagaagaaagcatatttcgtttccctttctgactccatagaagaaaacaaaatcagaaattgacgtcctacattctgagcaatctctttctttttgtaccataaattttctgggcttcacaaaacagagtaagcccatgtctgtttgttttacttttcctcttttcgaacaacaccgtccgacgtcgttagaacctcaatccggggatcagatgaaatcttttgtctctagataactactgtgcgaattttctggctgagaaaaaattataaatgaagcagaatcgacatggaccgagtcaagacccgctcaaggcgcacaacttttcctggttacccgatagagcaagcgagttattcgctcttctaatgcgaatcggactcctggtttgcctcgtggcatcaatttcgctcgctctccattcggctttctggggtagctcgtctcggcggttcgccttaccggaccggacaacgaaatttccagactactctgcacaaaacgacgacgtcacgggacccaccaacatctcacacgttatttttggaatcggcgcttcggtgcacacgtggcgagagcgcagccgttacagccttcaatggtgggaccccaacgctactcgcggcttcgtctggctcgacgcggaaccaaaacctgacgtaataaaagacactgtttctattccctaccgagtgtcggaggactggacccggttcaagtactccagctcacgagcagcggttcggatcgcccgaatagtcctggagaactttcgggtcgggttcccaaacgcgaggtggttcgtgatgggcgacgatgataccgtgtttttcgctgataatttagtttcggtgttagggagttacgaccacacgcagatgtactacatcggcggaaattcggagagcgtggagcaggacgcgatgcacgcgtacgacatggcgtttggtggtggtggtttcgccattagtcgcccactcgcggctcgcttggccaagatatt

SEQ ID NO: 31053 - DNA, 1834 bp, Cannabis sativa
  modified_base (1045)..(1055): a, c, t, g, unknown or other
  modified_base (1479)..(1484): a, c, t, g, unknown or other
gagagcctattccagtacaaccctagaacactttcaagcccccgcagggtctcgtatttccagaggttaccataaatttagaatttattaatgtactggtccatctcccatggactgtcgatcagcatcaaatttggagcattctcctactccatgacttcctattctgactcaacttcttcttgttggaccttcttagacacgatttctgtggaaagaaagaaaacgaagcagttagctacctgaactacttaatatagagagagggcagaggagaatcctcctccataaactgcttggagaggtccccactagattcactatccaaaaacgaaaaccttcaggggtcattcgttccagataggaaatgaggaactttgagaagaagaataaggaagaaattggtagagtacccagaaccagaaggatcctattagatatacttattcaaatttttaatcagacaaagatagtcgaaagttgacatttgggctagtctttactcttagtggaggagttgtactctgaagaagcattaaacataccagtattgcagagtcaaccacggaagtcgaatatatagaagcttgtgaagcagctaaggaaacgattttgttgaagaaattctacactgctctggaagtagttccagaagtagaaaccacttgtgctctactgtgacaacagtggagcggtggccaactccaaggaattaaggagccacaagagaggtaagcacattgagaggaagtaccatctaataagaaatatagtagacagatatgatatgacggtcttgaagatcacatcagaaataacctgacaaatccattcacaaagacgctaccattgacatcttaattttatgggtcatataactaatatgggactaaaggaggtgcccagtttgcttttagggaaagtgggagattcttaggatattgttaggattttttatgccctgaaaagcctatacagacgtttctattattaataaagagttgaacattttgatatatgaatgaatattaaattattaatattnnnnnnnnnnnaatttatatataaatatcgaaaaatttcttatgcatatatggattgtggctagtagttgtataaagaactaagaccatttagttatgaataaattagtcagcaacatattaaagttatagaatcttgaatcaatagttactagtacggtttactgatgcccattctttggtgtaagtaatctcgattcggattacagatgtagtacgacatcaaagtgaatgtgttgtatataatagagattattatatatgacaaggaccgatatgaatgaaactatctttattaaaacgacgtttatcacaaagacctaattcatatcataacgatgataaatagtagatcgacctaaatcttgagtaatcatgaattcttgttcatgttattagtttcttttattcacttcgttaaagtttctcagagaannnnnntcttacaacttctattttaggaatctaataatgtggatggctggaaacataatttacaattatgaaatcctaatttttctaacagattgaatgctggtgccctttaagtgttaattctagaactggaatggtgtgcacaaatttagatgagatctaaattatactaccactagtgaattaatggtactaaaggataaacaagtaattagaagggtaaaatggtaatttaatcaaaattaattatgcaccaatacatggagggctaatcattggaatgattatatcatggacactgtagtaaaactcagtaaaaattctataattattaatagtttaattccatatttata

SEQ ID NO: 31054 - DNA, 1717 bp, Cannabis sativa
ttaccatgatttcatgaatctttttttcgctttgaatgttttttcgattcccacgttagattgtaatctttttgatattttgattcgcatggttgtctgaggatgtataaagtgtgatttctagacaaaagagttctgattttgaacttcattgtgattcttggttctttaagtcacgaagaacacaaagaacgtgttttggttcttgaaaaacatgtttagatcctacgtacaccttggttggccatggaggtcttgttcaagacctggccagccatgggtgttcaccatggggtttggccagtaataggaggcaccctaagagctgtccggcttatgcttggaagtgagattcctggccggccctaggctgggttatgggacctggccgacccttttaggcttaggaaccctagccggccaaggccaaggttcaagcaaacagccagtcttctgtcctcttttgaccttggctagggtctcgtgatggcctagtaggaatatacaattgcgatcttatgtgtggttcccttaggaactctgtataagacttggtagtgagtccattataattaagtgcacaacttaggactcactatttgtctaagtagatgtatttgagacggtacctcgctaatacctagccttgtacaatgtaatttacctggaaagtacctttgggtacagttgaccagaactttatctgtagctttgttaggttgacctccccttgtctcttctatgcaggtgattttgagtgttgatctggggaggtggcaactgctgtgtcataggtcccatcatcttttcttttgagagatagtatttagtctatccccttgctctgttatgagtaattatagactgatagtgatatactatggtcagaacgaaacgatcatgtcacagtgcaccgccatatgaccctcatgttgccaatgtggcaatgatagacaaagttggcattgtagaggaggccacatttgtgatgatggagatttggaggttagccaggcagaggtgcctaaggctgattaggagactgagagttccaacatcgagtttgaggtggaggaggttgcacctattaggaggaggacttatagaatttgtgcggtcctccccaactaccctttgggtgcatatgatgtcaatggtcagccattgaataggctaggccaaccttcggtgctacgcctagaccatgtcttgatacaatcttcagagcctcaggttcttaaagctggatcatagggagataggtgggtctctcatgcattttttattcttgttgagacttttgacaagatactggccagtggactagcgagaggtgtccactgtgagatacccacgagggatcagagagcacactggcttgcccttagttggatggcatggttggagcatcatatccagcagggagtagtgttgctgttacacccatactttcgagatatatctacttacttcgggatgtgtccaatacaaatcatcctaaaagtattaaatacctctcagcgatatttgtgctctatgtggagctaggctggcctcaacttactccgtatgagattgggtactacttttatctaaagtctactccaaagcagaactgaactttcacttcagtcaggtcggccattgttaggttatttttagtattaattttagattaaatttagtatatttttaatttagttttaatcgtgtttgg

SEQ ID NO: 31055 - DNA, 3620 bp, Cannabis sativa
gggtgctcaaattattgccttagacaagtttcaaaacaaaagagtactcaaaatttccgaggttcaacaaagacagatgttcttcttgaggggacaacgaagcatcctgtggactcttcataagtagaagccttgattacttcatcagtggacatcaactgcagcatattttcatatgaaaaaaaatacataaatatagcagaaactgtcaatgagtcactcaaaatggtcataaaatagtgttctatgatcattagacaaaaatagctttaaatcaaactacaattctttgaacttctatagatttcaataatttaaaattgcaaccatttactatgacttcattttaaggttccatggtttaatcaacattcaaactactcttatataggcaactcaaaataggagaaccacaagtttcagaatataacataacaattgggcccaaaaagcaatatcactagctcattctagttttgtttaagaaaaaaaactgatttacctgtacgggatgtaattcaaaatgtttagctcttagcgctggactggtgaatgacacctcagtcggacgtgcattgatcacgaccacaatatatgagtagctgagacccaaaaaagaaaaagacaattgcagcattataactctaaatcctaaagttaacgtctggtaaaacgactgaaaactcaattttactcacattggatctagttgagataacccatgttgactttcatgaccatcttcgatgctcattactatgaccccaggaatagaggatggaccagtgttgtggaagcgtactcgctcctaaaaacattagatagatattataatgtgtaaattgacattgcattaatatcttaccaaacaccttacattttcttagtggaaaacccaaccataaaagataccatgaagtttggaaggaaaccaaaaaagatactatgaagacaagaatgggataaattgttattcaaaatttatcaattccaaacattataaccacggttctcacctggatagcagtggctgtcctcagacgaaatagcggtgaagagtacctaatacgtaacaaatttgagaaattctccacagcagcgaggatgtgacttctctgaggtttgaatgatggatctgccaatctaggtttaattctgaaaatagatacaagtctcagattaaaatcaacagatataacttatgtatgtatttatctgaaagggtcctctgaagttgaagtaaatatagtggatacagtaataaatatcagaagtcatgccttcagttattataataatcatctttcttttaggaaatgaaattattatgcagaatatatgagtgcttacagtggccaacttttctcgttcttctgttttggaggaagcccaactccccagttgttggagttgtatgtaaagtcgagcctgagcacaaaaatcaataaacatccaatctaaagtagataaagaatgctaatataaaaaatgaatattcctatttatgggatcaaaaactagagagagtaactgaataagaataaacaatggacctgttaaaccaatcaccagagttgtatgaatcacgatccattgattttgagcggagcaactcatcacctgcgtggaaaaatggtattccctgtacaataaaattcttaggatacttctttaggtaaaaattttactataattgctgtaactgaagataatgaagatttaagtaaaatgttctcagcaatagtagttaaaacctgtgacagtgctattatacttgttgccaaatgatttatccagcatctctcgttgacagagatttccattggagtctacatataaacaactgtggttagagacaaagtacatgtataaaaacaaagcagtaataaatagaatgattgtaccttcaggctgataatgtcaaagagtgtctcattgtcatgagcagaaacataattaacctggaagttacaagcagaccattagagtctaaattattccttactggaggaagtaatcaaaaactagcaccagaacatgtagcatcaaaaggaacattaatgcaagattaatgcttgattcagaattcaagattcctgcaaggcatatgttattatatgttccgtccttgatcattttttcccctaatacatatacattcctgatccaagtctcctataattgaccatacaaagtggatagaactaatttctgtaggttagctgaaatgctttgcagaaactttatttaattgatggataaaattaccaatcacaagatttcaagaggcttgttctctcctattctaatctatacgagaggattggggctctccacaatgagtctcaactcttatcaattttctccatgtcctttctatgagaccctctccccttgtatacttcaaggtgtcctaaaataattgccacatcagcccctaggactaatacaactcagccaccaatatacatcagcatttatttaaaatttaagagagttaacagctaaacctatagtttaaattaatctggtggcttatcagatttccagctccccacgaaaaataaataataataattaaagtgcattgccactataagattttttttaattaatctgctcatagcaaaagaaagagaaaataagaaaaaatatctacattatttttttacacatacattaagaaagagtgtcaacaattcagctaaatgaacatagcaaaagtactaagattacgtcatctaatttcattaagtgtatgtttcatcaaaaaaaaaaagtccttaaaataaatgtcccagaaataatttctaacctcggacctcctataatatttccttatatggtgcattaggtgtggttaatgccaaccaaatcagcagaaaaaagaaaatgaaaaaggctcataatgaaaaacaggattttcctttttcctttttttgtcaggtaaaaaacaggatttaagtaaatgcaaactgctgatgcaagtggtgagggagtcaatccttacagtttctgtggggtttgaggcaaatccaacagggacactcccatgagttaatacttcagatccttttacctatggaatccattgaacatcgagtcaagacaatatttttggatttaacaataataattacaaaacagaataatgacagtacaaaatgcagtataagatcagtataatttgaaagcttactttgttatgcaatagaattgcttatgtacgaaacttagatatcaaaaccttacagctactactactactaataataatattattagaattaataatagtaataagcaattaactaaagctatggaaattgttcatttgtctgcaagcaaatatatcacaatataacatgtaagcaaatatttgagaagtactgtattacctacctctttccctgaacaatttgttagcacaaagtccctcaaattggcagccatcccaacctgaacagtgagaaactttgattagcgaaaaatccttaaaaatgatatcaaagcttttttaaattaatatcaaagttgaaagcattagtctgacattaaataaaataaattatgtggcgcagttataataatagttcatatatatttacaaaacttgtcct

SEQ ID NO: 31056 - DNA, 1407 bp, Cannabis sativa
ttggtacttaagcttgttcaggcccgacaaagtaaaagctatggtaatcttaggtgttgcttacaatcccaggaaacctgagatgagtttcttggatgggttaagggctttctttggggatgatttctacatgtgcagatttcaggtgataaactctcttttcatttttggcttggaaatatgtattgtgatttttctgaatataaactcgccctatataaatagagactatagcattttataaccaaaataaaacatttttagtaccattaaatttgctagttttatccccttttcttcctaaaagatttatttccagattaagaaatatttacttcaactataaagattcttattcttcatatataacatctggattaatattgaaaatatttgggggattaagtcatgttggaagataaagcaagtgttctgatgaactcaactaatcttttttttcttcttcttaatttcttatttattctaaattattttataagtctacatagaaattgagacttcttaatttaaacaaatgaaagggagtaatgaaaagatgactttggttggtatattgatttacacaaagagccccaccctttgactttggtgtagccaaaaattcaataaacactaataataatataataaatgtgtttagtgaaatctccaattgctcaattattcatgttttaaattcagctcttgtattttgagagaacaatgctattgtcaccttaaggttgtagtacaccttattattattattattgtgtattgaatagtattatataaaattatatttcatacaatatttttacatataaaattatatgtagttatgatatacaacccaatttaatgtaatacaatataatactacctaatacgacataccaaatgagtttttaaggtttcaaacatcataccgatatcacgcattataagtggttagttagcgatttctcatattttttagactaaataggatttttctctaatcatgccccctgaacttttctagtcgttaaaatttttctttgaactattgaaattgttagatttaaggtcttttatctaatttcattcaattttactattatcgtgattgtttatgtacaaaaccatgctcccagactttgatatttaccaaatcatgccccttaaattttgacatgtactaaatcatgcctcttgaacttagacttttttcttcttaaatttggataaaagtccttaaattcaacaattttaatagttcaaggagaatttttaatgaccttaaaagttcagggagtatgatttggtacatgttaaagttcgaaggacaaaaattctaatcgcccttttatttaataaaaatgtgtaagactcaatattaattgtgaagtactgaatattaaattg

SEQ ID NO: 31057 - DNA, 3553 bp, Cannabis sativa
gatactttgtgaacacccctagagccaccactataggtccagttgagaataatgtaatctttgctttacatacaatttgctacaaatttatgcctctaaaatttggattctcatatttaccttcacgttttatctttaacaataaactataccacttatgtgattgattttagatgattaatttgtttaaccaattgtattcatttacgataaagttaaaaaagacttgtcatataattttatataatttatgttgcacattttattacgtttttatcttttagattgtttgtttcacttttccttatctccattacaaaggaataggcttgcttgatgcttgtgcttaggtatatgactttacacaattccctatatataggtaaacaaaaaaacattactatgtagtattcatggtgtttattactagataaagtattgccctataattgattagcaattttttataatatttattaaaatagcgttattattgcgcactagtaatgtcagcactttctgtaagtaccactctataattagttagaaatattccttaaaacttattttttttaagttatatgggatcccctacttaattatacaaatagcaatttgacactaaagaatgtgctaggcaccaatagtaccatttaacaattcttttattaaaataaaataagtgagacctcatatgacattgaactaataacgatattacaaggtactaaacaccacgagtgtctttattctctaaacaaaaagataaaggaaatgcctttttttcttagcatttaaaaaagaaaacataagaaaaaatatcaccattcaaatattagccttagatgtaagatgtttgatacaaataggagaatgcaagggaaaattagaatgtgacatcttccaaataatttaaagtaactattttaacacacattttacatttgtttttggttttggttttataattagcttgataattatattctcatttactaattcacacttaagtgaattgctgtcgttttcttccattctcgcatatacaagtcaaatattcttattttattaacaactgacttatgccagaacttccccgttctctaacatagatatattttaattaaatgcatgcattactctctagccacaataaaatatcttattaactaataaaaatcaggagaagtaaatacaatgggattaaaaaaaaatcataaatacacaaaaaaaaaaaaagaaagaataattcatctatcgcactagcaattttctatcagaaaatcgaagattctcatcagcagatctcaaccgttcagtcttgatcatctctagcaagaaatcgttccacgtgtcaataggcccaggcaaacaccaatgaacacaatcattatacgtagtcacattggccgaatgaccatatttactagggtgaccatctggcctcaacaacatggcttgagttgtatcaagcatcctaaactttaaccctcttttccttccttctctttcagcatttctaaactcctccacttggatcatataaaactccatacttgggccctccaaaacggtctcattattcttaaacggcaccgttctcacacaattccctccttggttccatagcccaccttcaaaatgggatggtgcaaaagtcctaagataagtaacacccttgtagtttttcaacccattgatggctttcaaggctgtcctcatggctctcctatacccatagtacatacccaaattggtcacatttggtaattggcagaagtggcagcctataattttgtggttctcgtagaagaccatgggtgtataaaaccattggcctcctgagagtataatgtagtcaaagtcctccatttgggccgtccatgcctcgtccaactcatccaaatagagattgaataggcccgttttagttgggcctactgtctctgttttttgggcttttaccaaatgaggggtccaatatgtggctagagtgaagttgtaagttgtgtacttccaccgtttgtattgttcgtttgaagtgtatgactcatcaattggatattcaacctgaaaaaaaaaatatacagcgtatatattaatttaatctaatgcatgtgtatatgtatatttcaatcaatagaaaatgtataaatatatattacttcatatatttattaaaaattaagcatgtaaaccaaacaactttatgaaaatttgttgtaatgtccaaagacaatgtgacaaaaaatagtttaattatgctatcttgtattgtatatatgtatatttttcgatagtttgattctttccagctggaaatagagagagctattatctgtaaacttcactagacaatatcgatccttccaagaagtaaaataatttattatttaggtagaaaacagtacacttatttttacccaaaagttaaaggtgagtgaacattaaaagaaaatacaaaaaactgtgtacacttgatcaataagagactattatttgattgttctcatactttccaatatctatcacatatatagagaatagtaataaataatcaactttaaaagttgaaactatactgaaactatgcatcaatacacatagtataaagctattttaataataataaaaaaaacagcataaataataattttgtaaagaaagaataaatacattattaataagtctgtatgaatatcatatggtcgaatcaatcaatatctacttacaaagacacatatggaataagaaagggaagatgggccacaccacacaagaaaaagagaaaatggacatcacatccctattattaaaaaaaaagaaaaaaaaaaagcatacgaaacttatcttttacgactaacaatacttatcaccaaagttctaacttgtgtagtgttatagtactacagatatactgaaaattaccacatattacgatttttgtataattacgtacatatatatatatatttgcatagagaagtgtaatataattaagttttaattacccttgaaagtagacatatgagagattgcatttggtttctagcgacagagtcacccacaaaagccaaggatttatctctaactaattccaagaactgagccgggttgaaaacgggcaagttacaggcgtcgggtttccatttccatttcatgaattcggagtcgggtcggccatatttcatgcagttctggtgctcgtgtatggcccaacacgtgtcatttgtgtagtaaggggcttccgggttgggaacccattccccggaaaaaatgtcacacttgtgagtggacgacgactctattttaatatcatccaaatcatcatcaacaccaccggccaataacgaggaagaagaagttgtagagaaaaatgaggagtattttatacaagggtggtagattgggactgtggtaaggataactaggaagattagtgctaagagacccactttttttgtacaaaactgcttgtatattaatccgtagtagtactgatgatgatgatgatcgttattagcttgattgtgcttcattgatgatgatgatg

SEQ ID NO: 31058 - DNA, 3058 bp, Cannabis sativa
tataacttatttatacatatatatataaatatagggatggggattgacagtgattttggggattcatccaagtccaagaatgttaccaatacatccaatggaattatttgatggtcgatcaataacagcttctgtgtttggaggctttaaaggaaagacccaactccctatttttgcccaacaatgcatccaaggggtacttactcactaattaattacttaattataatttgattagttcataattattataaaatatattaattattattttgttttgtttaattaattaattaggtggtggaattggataaatttataacacatgagctaccatttgagaagattaatgaagcatttcagttgctcattcaaggaaaatcattgagatgcattttgaacttgtcatgatcaaccttcattcttctatccaaattgccaattatatatatatatatatatatatatatattgagtggaaaggttaattgtgatgaaaattctatatttataatatgtaatatatatgtatattgcagtttaatatgtaatgaatattattataataataaatatgatgagtttgatgccctatatatataaagatgctattttaaaagggtcacatacctactattttcttaaggaaataaatttatgaaaactaggtttagtgacttggctataatcgtaattgtatcacaattactttgcatgtagactcttcccttgaggtttatctcactgtgtttactcttgagattttaataaatgtgtttttctcaataaaaaataataataataatatacaaattaatctaagagtatcttttatgaaaatgtaaattggtgaccaatcactaaaatataatttattttgtaaaaagtgtattctaataatatgtcaaaagttaattcaaatttgccacgtaaataaagaatgatacaaaatttgtatcgaaatatatatattatttttaatatttatatctgtgccatttgtaatattttagtgttaatgaaagtattttgcatatagtgatctaaaatagtataattaaagtttggtaaatattataattaaacaaatgactatatacacgtataaaaatatatacaaaatttcaaaactttaaaaaccagtattattactttctttcaaaaaaaaaaaaaaaaaaaccagtattattaatgagttattagcaaacaattaagaaaataatagtaataacaatggagattattgggtggttataaaaaatcaacaggcaagatattatattaaagtataatatattatttaatttaatatatatatatatatatttgttaatacatatatcatatattaatactttttataaaaattcattatttaactttttgattcaaattttatgttatatttatttattgttaaaatatatttaaaattttatttgttttatttattattagtctcttaaaactaaatacattattatacattcagcgtaatccaattcgatgtagtgcgtaccaaatagattatcataagcaaaaggtttacttaaatcatgggatttggttactaaaaatagaaacagaatcatcacctaccccattacaagttacctgtaactcattactagaattgggtttttatccatatcttcaccattgaaaactacagaaatagagatgattatatgtcattagcatttagcactaaaaaaggattaattttatttaatttaattttgttattgttgaagaagcaaattaagaaattagtatagagataagattgaataaaataaccggcctagctaacaaattaattttcattaataaagtttggtaaatattataactaaacaacttcccaaaacaagataggctctctatatataaatacatataaacatatacaaaatttcaaagccttaatttttacaaaaaccaatataattaaagagttattagcaaacaaattaagaaaataatagtaataacaatggagattaatgggaatggtgataacaaaaccacaggcaaggtcatcacttgtagaggtaataataattattattattaattacaacattttgttaaggattaatgtgataatattgatgattaattaattaattaattaaataattaaggcgcggtggcttatgggcccggcgagccgcttgtggtggaagagattttggttgagccacctcagaaaatggaggtcagaattaagatcatgtttacctcaatttgtcatactgatttgagcatttggaaaggagaggtatttatatttattattgttaaattaagaattacatattaattcatttctatgtgttaattacttttctaattattattatcttagttcttttttttatttgaattatattgtatggttaagtttattctagaaaaagagaggagagactcaaattaaagttaattatgagaagaaaaaaaatattactattagtattatcatcagatagtgtcttacaagttaataataatattcataataattattaaattaacatgtacgtgtgtgattcaatcctttattatacaaataacagtataacaattttatctggtgatgatgtttattattttttctgaaaaaaaaaaatgtatagttcacaaaagaaaaataatgtaggagtgtccatatcactttaaaaatttaatgagagacatgactgttaattctactataatataggaaaattaatgtgattaaattagaatttagactttctttcgagaactactaattaatcaaataattaaatacaatcattttttatctacttaattataataaatagttatatttaattaattttgttaatttaactgttcagaatgaatcgcaacgagcataccctagaattcttggccatgaagcttcagggtaagccatatatattttactttaattttttactcacaaaagaaaattaatgtcggagtactaatagtgtcatgcatatgatgaataaaaattcaaaattcaaaatatttataaaatatttaaaacattcaaatttat

SEQ ID NO: 31059 - DNA, 1859 bp, Cannabis sativa
taggtaatcacccctccaatgagtgattcatggaaagcatatattattccagggcttctttctatttaagttgaattactgtatttctccccgaggtaagtggtaaatactgttacacatttcaactcttaattaatacaaataattagtaaaatgtatatatagatgggtgcactcttaatgggtattacccatgaatgagtaatttagaaaattttgaatttttatgattaatttttttatttaattagaaaaaaattcttatttttacattatataggttgggattggtccatcagctaaaagaaataataaaaaaagttgatttgacttaaatatttttttatataaacatatttttgatatagtgtaaaaatatgtattttttgataattttttgatatttttttttaattaagtagctaaattaagcatataaattcaaatttctcttttattattcgctatcagaccaaaatttaatggtttaatatttttaaaattaatatttacagttaaatttatttattactcattaatgagtaatacccattaagaaatattctatatgtatattatgtgtacttgttgatggtataactgttgaaatatattacatataatatatttttacttttagcatctctaatgttaatattctttaagagtgttatataatatatattaccacttcatttaaaaatataataattttttatccttttttttacattacttttgacacatttaattctaaaaacacttcaatatagtataatattttttaaaaatataataattataatctcacacattattatatatataatttttttttattaaactgttatatatattgtacttttaatttattattatataaaaaaatatagcatcaatattactgtgtgccatcaatacaaatttcagaaatatcattcctttagcgcacatcttcatatgttgccacataagttttccacctcatcaagcattctctaaaatattactattggagatgctctaagggtacttaaaagtgctaagtactataaaagttagcgtattattattattattataagtcaatataaaattctatacattttaatttaataaatgatatagaaaattgctaaacacttgtaactcggcatattaatatacttggtcaccaatactaatactcgtaattaatagtactacttttgtttcttctattgatctaggaattttaatttgtagtaaaagtatagttgagaagagaggcagagatattttttggtgtgcctagaaatgtatgggtgactactcattctaaccatcgtgattacattttttttttacctataatagcaggttaccaatagatcaaactttcttttttagaatcaattaattataattaattgtttttttaaaataattaattcaatatttaacaagagctcttttagcaattaataattataaataattttttatataaatctctactataatttttttaacagttaagccatttaattataatatttacaaacaaaaatatttttttaataaaaattagacttctttttacacaaattaaaattctcttcttgtataataaattttcaaataattaattatttttaaatgatatcaaattatttttttataactagaagaactaattaagtatgagtttttctattcgagtttgagggtgcttcattttttgagggagcttgactttattttttgaccctggtttggttttatgagtaaatgactccttataaaaaaaaatggaggaatttagctattttttttttttaaaaaaaaacacattcaacctatttcattttttatttttt

SEQ ID NO: 31060 - DNA, 1443 bp, Cannabis sativa
acattccgtaaaagtatatcacgggacaaaatcatatccctataaatatgtatgtatatatattatatatttatatattatagggtggagtgtactttttaaaagaggtatttcgatagattttttatctatttcaaggagagttttttaatttaattttttttataatgatgtgtattataattatttatgactggttataaattcaaaaatttttgaataccttataatactgaaaatcattattcaaaaaaaaaaattatatattttattggacgatcaactatttttcttatagttatagtaaataattatttaaattttattttccaccactaaaaattatttaaatttttttaaaaaaatgataaattaatcttaaataattacagctatcattgaaaaaaaactacaaaacaaacaacagaattttcttatattatatataatatatataaaagctgtgtgtcattaattcattatcattcaaaagtcttttttaattttttttagagttcttgtttgtttaattgttacgtggaagcttagctagctcaaataaaatctcacatgtgtacagtgtacgtaccactttgaaaaataacatataattattaatatatatatatataatataattaatgcacatatattattaattaactaattaatattattggatagaattggctcaagttattaggaggggtccactccatttttttttttttttttggctaactgtttgacttaataaactaaggtaatcaatattattttggctaaagtcggcatgcataaataactgttcatccttttgaaatatattatatttatatattttattggtttaatttggcaacaataatattagtgattagataagatttttcaatgttaaaaagtatagggtagggttgggacttgtacaattaattaattgttgattagatttgattttataattgaaattatcttttgtttatactattattggttatatttaggaaaaacttatatgaaaaaaacaggcaagaaaatagagaattaataaatctttcttgttaggtataatggtctaggtaggtgtaaaggctgccctatatttttttatttttctttgtttttttttttgaaagtttcattctagtttctcttcattattttctaattattattaactatttagttatatatttttagtgagtgtagcataataatattataacttaataattatttaaaatattaggtttgaattcatgctctctcttttgaaaactatattataactatattagattagatttttaatttacaccccttttaaagacacctcaatatttataatttttattttatatacaatttatatctttaattgtattatatttttttaatttttttcttccaattcaaattcttaaaaaatatacatatcaa

SEQ ID NO: 31061 - DNA, 2789 bp, Cannabis sativa
acaacgggacattttccaccttttactccagcggtggtatccgaaggtattgtccaactgaccaccgaccagtatactgcaatccaggaccagctatgtgctctgcaggctgaagttgatggacaaatcagggctcgacatcctcctcgagtaccggcaactcgcacgaaaaaccctcaggtaactaactctagacgccgtaataaccgtacttgtagggaacgaaaggccaatccagagggaatcgatttgaaccaatcaatgttgagggatcaatccgcgagataccccaatcaggaggcacagactgaagaagaccctgaacgacgtaatcctcgcaacaggcctcagttgcgagacaacgatgtcaaatccgcctcctcgtcctcgcatggtcgcacacccagcaggtacactagatcaggttcggtggaaacaccgcaaggaggacgatatcaagttcacaggggggatctacgcaatcaccttaacgttgtcttcagggcgcgctcccagatgcctcgcgatttcgaagagccccgtgatccccgaatgggcgatcaaggcgtaaatagtcgcgtcaatccgccttccgcaccagctgcgactataggggtcaatatccaagcaaacatagtcgccgtagtaacaacgcttgcggcaacaccagtcactgctcccttagctgggaatattgaccaaggtatgcttttgcaggccttaaaaatgctcgagtagcagagaaagcccatatacaagctgcatgggacttctcctttcaccgtagaagtgcgacaagctcgacttcccaaggggttgcggttatccgaatccctaaaatatagaggtacctctaatcccatagactatttagaaaaatttaatactattatggaagtggatcaggtgccccaactcgcaaaatgtcgcattcttgcggcaactttggaagagaatgcccacgattggttcagccaattgcccgaggcatccatctcgacatgggagacctttgtcgacctgttcgtcatgcatttccaagccacgatgacttataggccaccctataccactctggctaacatcaaacaagaacccggtgagtctttacaagactattttaaacgctttaatgctgaggtaacataagtagagaaggctcctgagtcttcgctagtatgtatgttaataacaggtgtcctgccaagaaccgatttctggaaggaactgcaagctcgaagacctgaatcgctcgtcgagttctttgccatggcagagccgcataagaggattgagaattctctggctgagttagagaagggcaaagataagcgtaagtcaccagtgccgcgatcacgatcccacaatcctagagggaagaattccagaggacgaagcccaagaagacgcagtccacagagacagcgaagtctgaaattagccaagtcccctcccaagaaggaatcctccccaaaaaggaaaggtggtccgcactttgtgaactataccgagttggcagtaccttgagaccatatctatgccatcgaagaaaagaatggggtcttcaagaagcctcccccgatcaggggaaaccgcgacaagagagaccctaaaaaattctgtaagtaccacaaagatattggtcacactactctgaagtgttggtttttgcaggacgagattgaagagctgatcaggagaggaaaattcagcaaatacaagaagaatgaggaaagtcatccccgagcggatgaaaaagaagaaaataagaatgcgagtggttcgagaactcctcacaacatcttgacgatcataggcggaccccatatcgcaagtaattccaggaagtcacaggagcgatatgcgagagaagccaaagaaaagccactcactaatgtgaacaacttaagcgagtgaccgaagaagctgttcaagagggagtgcgacgacatcacattcatggaaagtgatgcgagatgggtccaccacccacattctgacgcactagtcatcgtcgccaatattggtggagacaacgtccaccgcatactcgtggacaatggaagttctgtgaatctcttgaacttccaagccttcaaacaaatggggttgcatgagaaggatctgcgacctgtcacatcctgtatatatggttttactggggatgtcatcgcattaaagggaatgatcaagctcccaatcactttaggaaccgcacccgtagtagccaaatcaatggctgacttcgtagtaatcaaccaatactcagcatacaattctgtaattggtcgacctattttaaaggacatgaagatcgtgatgtctatctatcatctcacgatgaagttccctactcccgcagcagtaggatctgtacgaggagtccagtcggactcgcgagaatgctataacacaacagttaaactccctgaaaagaagtcagttaatgtcatctatttgctagaggcaccacctcctcgtcaggaggtcttcaaaatagaagaagtgccgcataaagacgagccagattcggatcagaggatcctcgactatgccacaactacccaggccgcggaagacactatcgaggtacctattgatccaatagataacaataaatttttgaaaattggttctaaactaacttttcagcagcgagaaaaacttgtcacttttctcaaacaaaacctagatattttcacctagaaacattcagatatggtcggaatatctccacaggtcatgtgtcatcgattgaacatagacctcgaagtgcgaggtgtccgaca

SEQ ID NO: 31062 - DNA, 2020 bp, Cannabis sativa
  modified_base (57)..(72): a, c, t, g, unknown or other
aaaatacagggtccattttattatttaacaaaatacagggtccaattggtaactttnnnnnnnnnnnnnnnncaaaatggtatttacccattaaatgtaaataagttatttttatattatacaatagggttgtacataaacttttttataaatctcgcaactcacaaaatgctcaaatcaaaccgagataacctaatgaaaaatacaaactgaaaaatatgacaaaaatataatccgcccaagggttgaaaataatattaacctgtccaatcaacccgaactaacccgaccaacccgattagttgtatttattatatatattatataatttatatatatttattaaaaaataaaaaaaattaaactattatatttcttttatggtggttgatttgaactttgaatttaatttatatatttatttcattattacaattaacaaaaatataaaaattaaatgcgaaaaaaaaataaacattagtgttcggtttaggcgggttaacccgaccaaacaaaccaatttttattgggtgggttgaattttttttttttaattgggcggattgcatttagatttttgtaactcgatctttacgttgggttgaataaattataacgcaaacagaccaaactgaccgacaaaaacctctattatacagtgttataaaactatataatgtataaaactatttccaaatagcatgaaattcccaaagacttttatttattctctttattcatattcatatatattatcttaattattttattttgtttggtgaaagatacatggaagagagaatgacaagtacattctcatttgacaatttgtagcaaagaatggtgtcatcaaattcttcaaaccactttgccacaaaataaataaataaataaataaaaaattcttcaaaccaaacaaacaaaacacaccattttaaaaatgaaaattctgaaagaggggactacaatattacaatacataccactaacatatattttaaatttttaacaaaaaaatgttatacatagctataagagtaataatatatgcacacaaaatatgcactaacacaataataaatgatacaatagtgcttttttaagttgtaaattttatctttaataaaaaataatgtcacgttactgaatataatattttggtataaattttgtgtgtatctatcgatactctacgtataattttttagatttgattttaattcattgattggtctaatatactaaaaaatacaaatacatattataaaatataaggtattaacaaaaaaaaaataattaatataaaatagcgaggagtgtcattcccgttcttgtcttgtttaacattcagggacaaaaaataatctctttcttcacctcgttccctatttagatagataatttctgctccattaagaataggtccccgcaaaacccatctccataagaaaaaaatgcaatcctatctattatacttagaaaatgaaaaaataaagtataggtaagtaaagggaggaccgttgaatttatattctatatgatgacaccctttggaagtacatatatatatatatataaaaataaatataaatttattttttggggcacaaatagaccgattgttgggagagaatgaaaaccgtactataaaaaaatgtatgttattgtatagtttttgtgggacatgtaacatccattaatggggaaccatgagaatcaaaatccttagcttgatttcaatttggaaaagatggactacaactctttatttttgtcactttgcaattactacctagctagtttcacctttgatagtgatatttcacatacacatataatatattagggtgcacttttaatatgtattacttataaatagatagtactataaaaatttaaatttttatacttattttttcatctaattagaaaattttttcatttttatattatatagactgagctttgttctgaaaaaaaaaattaagaaaaaaagttacttaaatattttgtatataaa

SEQ ID NO: 31063 - DNA, 2929 bp, Cannabis sativa
aaccaatttaatacaaacataataatcttttataattgttacacatttataaattccgtataaataaattgaaaataatataaaacagtcaacggccaccaaaaatttatgcatgttgtttaataagtacatgcacatgacaatataattcataatataaatttaattatacgtgattaattttgcatctcctctttaatttatttaaggaataatttttcagaaattaattgatcgacttgccttttatctgaacatcattcacaacttttctaaagattcctggcacaatatttgctagcctgactacttcattgataacctgtacaaatgaataacccataaatgaatgattcacccagaatcactgtgtgggtattttaaataaattaaatgttcataatataataaaactcaccatatgtgtaaaagtcatcgctttgtattcttcccatgtgagctcagagtttacatgaaaatcagtactgccacgactttttattattgtctcgtactctttctgcaattattttttttattattttataatttactgacacacataatgtcactaactatatgacaaaaagctagaaagaaaatagtttctagtcctaggagctagcgagagagctaaacaaaacaaacaaccagtacgtagtatatactaaaagatatgaaataagaacatcacaaattacaacattgtgaggaataaagagacaaaatctttcatggtagtttgaaagtgatcatatatttttgaaactcaagaatttaattaccaaaaaaaaagctcacatattactgaattgcatgagcaaagtaaaacttaattgaagaatgtctatgataaaaacctcttaaaaaagtgcactagttttcagtagtaattaatgatagtacaaaggaagaattaatttataaaataatacttaggtgaactagaaaaaattagaaaaagctagtgaagtgagtgagtttggagaaagaaaaaagaaagtagttgaggagtagaagaagaagatagtaccgtaagttgtgctagcacttgaggatgatcagaaaccaacttaattgctaaagtaattgctgatgaactggtctcaaaggaagcaaagagaatcaaaaagatcatgtctacaacaatcgcttcatttagaaatttctcatctctcttctccatttcttcaagtaaatggtccaagaaatcaccctcaactttctttgatgctttcctttttttaaaagtatcttttattactttaatcacattctgtcgtccctgttatatatgatatcatgattattaattagtatatatagtttatttaattcattataaaaataacaaaacaaaaatatataaaagtacctttatacatgcatgaaaagcagttcctgggatgtttaatggaaaagatataagcccatccatgaatttgttgaagttatctttcaatttctttccttccttcaattcctcataacttaggagcttcttaacaacaaattcaaataccatctgccaatttttataaaccgaacatatttttaaatttatatatagatcaattttgacatgcatgcatctattaatataaaatgtatagttgtaaaaatatatatgttatacgtttaaggctccttcttttacgtctacaatgccaccatgatgagtaacccatgaaaagatgtgagtgcgagtggattcacccatctcaagaataagacgttccttcaagctttgagggccaagaaggtgtaaaatcaagttcttaaggtacttgtgaaacgttccttgataagctagcatgctttggttatcacccacaatcttgttgaaagtctccaagtaccaaatgtggaaatcctttccttcttgttgaaatatttggtaattgaattcatggtcagtcgacactataactttctgcccaactatgctagtgcgaaacaacgatccatatctgaaatatataattaatcaaaaatatatatcttttatttaaaatagtagtttattaacgaattaacattttttggtttgaattttttacactaccaaattaggtctctaatagtatattgtattctttttgtaaggtcttatagtatatattgtttgtcaatattaccctcgaaattttattcatttttattgtgaaataaataaaacatatttttcatagtaatttatatttttactttttacttttttaattattaaagtaaaaatgatgaaagatatttaatttgtatttatttaaggatttttacaccatatattgaaattttcaactattttactattttaccgtgggtggaatttttttttaaaaatactgtatattttttatactgtgtactgtgttaagcttttactgtttttctacgattattttttagttgttccactattgtattaatttgttttgttttgttgttttacagttgttttataaaaagacagtatttttgtaagaaaaaaatccgtgtgacagtaaaattgtaaaccgttacttaaaatttagtattttatttatcaactattatggatcgtgtgtcactcatttcataataaaattgaatagaatataatagaaagattacgtgttactgtaataattatatttcgagaagtattattaatgagtcttgatgttgtatactataaacaatttgataggcatacaaattttaagaacaaaaatactaattattctttattaattactaaaaatattaattaattatgatatggaattaataaaaacagtacttactttgacattctagttttgatgaatggtggaatgtcataggttgaagttggagaaaagaaatggagagtctcaccaataagagggaagcccattgaaccaggtggcagctttccatggcactttgggttctgccatctgtaaca

SEQ ID NO: 31064 - DNA, 1953 bp, Cannabis sativa
tagaagagttaacagttgtgtatcttttactctatggagtggatcattagactttaccataagcaaatagtataaaggtcaatgttgatgcatctttatttaattcagatcataagtatgggtttaaaatggtagctagagagggaagggggctgctcattgaaggtcacactttgatttctcatggaatgattggtccagagctagctgaggcaatgagatttcgagaagctcttagttggatcaaagattggggctgacaaaatgtttgtgcggaaacaaactatttatgggttgtccaagctttatggagctctatttatatgatttctttgtttggtaatgtaattaatattgtaaagctttaatttctgaacttggagatataattgtctattttgttaaacgataagcgaataagatagctcataattttgctagagtctctttactctactctggttgtagtttctgtttggaatctgtttccaactgattagttagtaatagaagttgatggttaataaagttgatttttctacaaggagagagctggaacaatcatattggctcgagttagtgattatataagtgttgagggactaagacttgctgtaattattttcttgttgttcttgagaatgatatctcttattcttagtcaataaagaatggtggcgtgttttctaactagagtaggattaagttcacattaattctcatgtgtttctgtgtctacatctataagctatttacttttatctctctgtttatatttctgatttactatatgtttgatgatttcttctttatttaaaatttatttgtttaagtatcatcttggagctaaaattacataagttaattcctacaattacaaccttcatttctgcaacaccatagtaagacagcaaagattattactaactattactaatccttcacttgtgattaatctagcatgaaatcaagatgaaaagttaagaggcaatcatataagggccctccaacttagatagtgtacgtatcaaaaactactctacaacctaattatatacatatcaaacactacagtgatgattgacgagaatgaatgttccaatgtgcatttcaaatgagtcaacttttcatcagtcatgtcaataagttgagaggcctcacagtacatttttttagagagagaacaccaaagtaattagatatgtgctgagtctctcaccctcttttcccacataatcaaatcatcacatggtctttattctcgagtcacacttggaaaaaaaaacaaccattgtttttcttacagttgaggctttgccttgtaaaaatagagaggatctcaatagtgaagagtgatatcccagttactgtatgcttggaattgttactgtcaaaagattgtcttcatttttgtacttaaaattctcagtactttaagagtttactgagcaagacttgggttttgtactaaagtatgcaccaaacctgccaggtcttcttccctaaattcttattctacacttaaaggtatcaccaaagctgtcaacttcctcaacagctctactagagttgtacatgtttagtaatccatagctgcaaattcaatgttcttgttgtaatccatagctgcaaaaaagtaatcacattatgagaacatattcaaatttatgtgttagtgttggttttttaccgtttagaattgtaagaaaaccaaccttaataggagatacgctaagaacttcacattttagaactttcaaggtgatctttagagattcatcttttggtatttgacatagagaccctgaaagattcaatcaatcaaatccggttgcttatcatcaatcaaatgatgtatatacagacttaaacaacaaaaattctcacctatcatgaaacagctgaacattttttcaagagcagaagacgattcttgataagtataataattat

SEQ ID NO: 31065 - DNA, 2000 bp, Cannabis sativa
atatatttctctctttctctctctgtgtgtacatattttctttctctctttcttatttctctctcttctatcaaactttaaaaataatttatgatcacgttactcggatgagcatgaaaaaatatcattgcgatttatttatgtgaacattttaagatgtcaacaacatatattttttcgttagaaaagaaaccattttgttagtatacggtgattagttactattttataatttgttttaaatcttaattaacatttattttaaaattttgttaattgaataatattatattatacgaagctttcaaaataacaaaaatgtatataaaataatcggtatataaaaattgtaacttgttatattacatagcaactcattagttttgaaattttttttaaggttatcaaaatttatttcaaattataatctaccgtaatataacttaaaaatattaattagttactaagatgtatacaaataagtttttagagagtctaaccaaaatgtatcacaaattatatgatataaaaataaaaccttttatataaaagtaactaattagtttcttatcaacactattagtagccaaaaagttacttttaaaaatagaggaaaataaaataaaataaaagccgaaaacatcataaatgtcaaatttggctgacgtggcacgtcagtaatagtattaattttattattgtaaattaagtgcaaataatatatattattgtaaacttccttaattttcaatatatatcatgcagtacttaattaggctccaggatcggtcctagacatagttgggctaagcccgtgtctaggatagtctacactttttgagggcccaaaataaaaaataaaaatatttcaatatgcttttatttaagtaaaattaaattattgtaaaacacaaatatttatagtttagttggttggggtgtatcatattacacaatggtatactttgaagatttttcaacctaaggtattcaattcaatcaaatgtgttgatgataaaattttgtgtatgtgtaattaatttattttgttgtgatatcggttctatttaatttatgtcctagtatagttggaattgattctctcttatttttgtttaattagaactgattttctgaactattgtgtgttatttatatttactcattttattgtagaaccggttccattttaatttatgccccacctgattttttatttaagtcattttagaaaatagttcttgaattatttatttgagaactcggtttttttattttattaattcaaggaactagtttttaatttagtcattttgagaaccgatttttgatttagttaattcaaaaaatcaggttttgatttatttgtttttatttaactagtttttgtgtgtaaatttttatcttgattgttttacggaaccaatttttttgtttcaaattcttaattagttgataaatttagtcaggttcgtgatattaaattttgagttattgtgtgttattatttatttttatttattttgttatggaaccggatctgtttatatgtatgcctcagtatttttggaattgatccccacgtttttttaaaaaaattatgtgttattcacttttactaattttgttgtggaactagctataatttgaagttatatttcagtgttttaggaactgattttctctttgtttatttttttttattttaattataaccggtttgagttattctgtattatttgtttttatttattatattatagaaccggttctatttttaattataatcggtttgaattattgtgtgctacttatttttatgcattatgttatagaaccagttctattttaatttatatctgagatatctacttccgatgatttttccggcgactatgacttttctagtgaatttttttggtaccgatgacttttttagtgtcgcgacttttctggtgactgtgacttttctagtaaatttttttagcgatacttattat

SEQ ID NO: 31066 - DNA, 1388 bp, Cannabis sativa
  modified_base (1341)..(1341): a, c, t, g, unknown or other
attagtttcaaatttactaactttcaaacacttggggggcaatgaatcaagttgggattttttaaacacttttttctatttcccatcaagtaaaatatccatctgatcacaaatatttcatccaaacattaatcaataaaagtataatcaaaagagtaaaaagacaaaagaaaaaagaccatcttgagaagaccaggagtgccagggtccttgactgaggtcttgtatttagctcgtttaatcacttgcccagttgacatctttgcttcaccaataaatccaatccaatcaaatgatcatatatgggtttagatcaaataacaaaaagattgaaaatttggattaaaagcaggaatacggtaatgggtgttatcacatttctataaaataaataaaagctagggtttttcttaaaaaaggtattggggttaattgaagttgagtctaattaagaaaggtaaagggtgtccctgttaatgggagcaacgaagaagaagacgacgactccaaaatctcctaagcagttctctctcttctcactctctctctgtgagtagctttattgagcgccaatgaggaattgggattgggacaagaaaacgacatgtcgttttatgagtgaaagaccacaaacgacaacaacttcactatgctctcttactagtgttcgtttactaatgaaaaacgtggtcgttttagtgcatggttgaaagtgatttgtcgttttcttcgagactacatgtcgtttaaacaaataatgttccatttagcaaacttattattgaacattattagtactctattttgtatgataatttttttttaagaacgattatataaattaaacaaaattttaccaaacatttaagtttcttccaatttactggtcaaacgatctgctaacaaaactgctttgaatcaaattatcatttcactaagagaattgctagtacaagtttcttgccgggacttttttctgtttaaaaacaataattttctaaattgattaataaatatttatttatatatatttatacagactatataatacatgtattttcctaataaaccataaacataagtattaactaatatatacttaatttaaaaaaaaaaaaaaaaactaatatatacttaaaaatgaaatgattactaatgatgtttatccattaacaactcaagtgtatcaagttacaaaatcatttttgttaacaaagaaaagatatattacagcatttgattcctcagttccacttctgtgatgatctcaattctcaagctcatgagataataatattgctttcatcatcatcgtcgtcgtcgtcgtcgtcatcatcatcntcatcatcatcaccaccaccatcaccatcaccatcatcatcatcatc

SEQ ID NO: 31067 - DNA, 3021 bp, Cannabis sativa
  modified_base (307)..(313): a, c, t, g, unknown or other
aatactgtatgaaagtggtataatgacatcatgtatgtgtaagatgtattaatgtaaataaaacaaaaacaaaggtaaaaagattagagtggccttgtgagggtatatgagtgataattttaagtttttgtatttttcatgtaaatttttcaaccgcttttattttttattttttatttttcaaaataagaatcaaaatttatgagttattttaaaaatttatttaaatatattttttaaaaaaattatagtctttttttaattttcttttattaatatttactataataattattattattattannnnnnntattattattattattttgaatggtcccaacccaccatcaaagagaaaacctctaagaagggaaagaggaaaaaaaatatgtactcattcgttacttgcttcatgcaatataagagattgaacacaacgagggacatcactaaaacttatagtgtccataattagtacgaaacaaagttttctaaacattctcttccttaatccttaaccgataaatccaaagttgagtaactcttacaactaaaccttcaattctcttagctccatgagccatttaatagggcacttagataccgattctgctcccaaaactaattcaatgacaaatttaattttccggtgagtagataatccacacaaatcttctggaaatacatctaaaaagaaaattcacagacaagtttcatactttcagattcgatcgtaaaatgccacctagtataaaccactgtaactaggaatcttatgcaatctctgtgcattaggtctttagccttcagagctataattccgggtatacgagatccttgtactatacccacaacacaactaggttggtactaacaggttcgaacactaccattttctcgcttacaatcgatcattactccatacttgaacaagaagtccattcccagaattatatcaaagtcacacaattgtaactcgatcaggttggtagttatctcacaaccgtcaatctaaaaagataagaatgtaatccatctagtggacatcatcaactctctagatggtaataggattctaaaccccgaaacataaacatcgagaggtttatgaaaacttccatcattctacttaacatataagagtgtatagctccaaaatcaaatatgtagtgccttgtcccgcagaaacgccacgtgtgtgcttttattaattagtttataataacaaactatcagtttaagaaaatgtgatttaattaaaaattttaataaaatagcttaattcataaccaaaacttttcttacaaaataccactaatttcgggaatctccttatttataaacttttataccatattgcaaaacagctgttacaaaattagattacattttcaaaatacaactaaaagatggatcttgtccactaagaaccaagacacggcgactggtatgtacattgtcgggagacctctaactcatggctggtccagttttctttttcccttacttggaccacagagcactcgagagttacaaagactcagcaagaaaaacagataaaacataattaacacataaagcataatcttaaaacaatacatcatatatactaagcagtcattcaagcataatgaagtaaaggtaatcaattaattatcttataagacaaaccgataagtacgaaacctatcaatggtttccaataatgagtaataactcatttataacaacgctaattattgtatctttacctcgattataatcgagtcacaattgataataatcgaatcttatttgacatgctaagcagtgcaattggcttttcttacctcaatccaaaattaggtgtgtgggccgacctgagtggaataatgctcgacgatctcggatcctaagtcacgacaacaaaacttgataaacaacttaactaatcctgaaataggatctaaaatcaaagtcgaacaaaccctaatcaatataggtttggaaacaacctaaacatcgataaaacgccctaaactaggttttgaaaaacacaccgaacaaaaaaaccaattttttttaaaaaaactagggtttcccctactggccaactggtcgaccgatttctcaatatcctgtagaatcggtcgatcagcttttgctgtagaaatggaaaaccctggtttttacttcaaaaactaaccaaatctcctctaaacctaatgaaactttccagaacagtataaaataaacacacacaaacattcaaaactcaaaaacacatcaaaatgacaaaatcaccatacttgagtgaaatttgagttcttgaactcaattcacccaattcaaaaaataacagccatggaatcatccaaatcacacttagacaatcttaatttaaacctaaaagcatactcataactcaaacaaaacccacagtcctgaaactatacaaaaatcccaacaaaacttaaccttggaccttaaaaatcaaagagaaaggatgagaaacttacttccaagcttgcacagctcctagggttagttaattcaactagaaacgggttgatttatgcaaaaattaccttgggttcttaccggtcttagggcttcgaaagggaagaagaaagagagagagagtaagttatccaaatttttcctaatattcctcaattatcaaatctaataataataaatcaaataaactatcctaataatcagctagaagttactaggaatttacatataagacaatttaacatctaacttagtaaaaatattattttacccttaattaatacttaagctaaaatacaactttagggtattttggtcatttctaactactccaactaaactgtcaactcaactttctaaactagtctggtatatttccaatataattcattctattatcatcgtgacatatttgactaattcaccgagtttccactgtccccgaacttgaaaatattttatttcaaaaaaagtatataaattacccacatattctgataaaatcttcgtaattaataa

SEQ ID NO: 31068 - DNA, 1444 bp, Cannabis sativa
ttcacaagttttacgatgccttatttatatatatttgtaccttctcatgtaccattatgccattattttctaagttaagagtacataatttaaacaatgatttgtatttcaacctttattacttttgaacaatgatttgtgtttaaacttccattaagcttaaaattgaaacaatgagttcttttcatcattctctcagttgctaaagccctcttgtgagtttatatggtaagaggaaactaacaaaagttagatgattttggaagaaaatgactaggtcgagtccaatcgataaaaaataataaaatacaaaatatgttgcaaatcaagaaaatatgtcaaatgagatcgctgacattgtttttgagagatttatttgagggtttttaatgataaaatcccatagaagggatatatgtttatctcataacatagattctctcctaataatgctctttagttcttttatcacttttcacattcatctctcaccttcctctagccacaaattgggaaaccaaggccactcgtaattccgatcaagtcgcttatttagctttaggatcaagttttatcgcccttaaaataataaaaatgtagaatttaaaacacaaagctatcatagctcttttaatatccattaagccctatctaactaataaaaatattaatgtttgcgatctaaccaaacattattgagtcatataaagctatttttaaaaattcgaatcttttcttacattgatcaagtctaattttttatattttacccaaaatacccttctactttttccatgtttatatctcttttttttttttttgaatgaaaaaggatgctttatttaaacattgatatcatccattacaatctttaacaattcggaaagtgaattgtttttaaaaaaaactacgatctgacaaataacaagaactacgcgcaaggaaatgcgcgaccttattagcagaacgctttataaagcacaattgaacatgagataattgtgagagtaggtactcacaatctagcacaagcataccaaacaaagatggcagcaccactttggtatggatagcctgaacagcaacgagacaatcactttcaatcaccaccttactccatattttccccttaatcaaactgagggcttcttttatgcccaacacttcaacagtttcgggtgaagaattcccactcttgctagaacatcttgcttcaataatctctccattagtgtcccttgaaatgaaaccataaccgaaagcattagtagcttcaaaagtagctccatccatgttaacctttaccatagattcagttggttttgtccaatgctccgcctctcttcctacctcaaagtgagataaaggaggttcacccttagtttgttgagcattttgccattggtaaagatgagttcgcgctgataaaactacttcagcagca

SEQ ID NO: 31069 - DNA, 1068 bp, Cannabis sativa
tcaggttttgggttttgaggtcaggggatgttagtcctaggtctgtttggactgttggtggtcggaggtgaccagacggggctgagcatgagattgtgtaggtgaggcattagggaggagtaaggggttgcgcaaatcaggtattagagaagacaaaaaggaattagggtttttttctcaaaattatttgttttttgaagtcagaaaaaaaaaaaaaggcaaaaaagtaaaagaaaggaaaaaaaaaagttgtttttcaatttttttttatttttaattaatttatttttaaatatttaattaggttggccaataaaattgtatcgtgtgtacattgtgtccatataaattgtgtacacgtggacatgcctacatggcagttaactgcaaaaaaatagataaaagtctctaagtactaacagaatttaaatttaaaaattttaccgtcaaaaaataaattttaaaagttaattgcaagcaaggcaacactattaggatgaaaaacctaacacaactcacatgtgtacttttagcttgtagtgtataagtgttagaatttgaggacaagatgaatgaggttccatcccaaaatcaattggcagtgggaggagtagctcattcctcttatatattctataatcttttcacacattagcaatgtgggactctctaacatcccccctcaagatggtagctattttatttgctcaccatcttaaacaactcgatcataagcggctcttttttggctcactatccctaatcacaagtggttctttttgcctgatcacaggtggctctttttgctctacttttcggatcggcatttttggatttttggtggctcttttttatttttggctcactatccccgaatcacaagtgactttttttttactttggctattggatcaatttttatttttatttttggtagctcttttttttcggctctacttcgatcggcttgttttttgggggttggatagtcgctagagatttttttttgttgtttgtttttgctctgataccatgttaagaatcatgggttccatctcaaaaccaatt

SEQ ID NO: 31070 - DNA, 1147 bp, Cannabis sativa
tttaagggaaatttttaacggctaaaaaagttcaagagcataatttgatacatgccaaagttcgggagaaaaaaatcctaattaacctaatactaatagaacaatttgatgttataagtttcacatatattttgttttgtagttttctttttttacattattataattattgaatgaagattttttttcaacaacaattattaattaaagatttaattagccagtaaaccttacattattttgtaaggcaatataaatatttatatatatgtacaaaataaaactaaaaactactatcataattaaaatctgtgacaaaataaaaaccgaaagaaatattaagattgttcaaaaaaaaaaatgtaagacttgagctgactgggtctgaatttgttatttacataggagatccccaaatgacaatcaacaaggaacagttcctcttattatactattgctctactattctttttctttcttaaaatcttatttataataattggctcttagaactccatatccccaatcacaataaatcaacaaggctaattatgttataattaataagtaggcaatatatatacaataatattggatggagcttaaacaaaattcaagtgaatatatataaacaaaacaagagaatattgtaataataaagtcaaaaaaagaggagagagaggggggccatgcggttttgcaggttatgattgaattataagagggaccaaagtgcatgcaagctatgtagcgtagtgtgtaaatttaattggaggaaattaaaggaaagggaatgggtcacaccacaaaacacgccaactataatatatatatacccaaaacaaaaccacttatacaatccaacactttgccatttgtcaccacaaaacgtacacatgaagctatatacacaagacaagccctagctccactacatacttttgtcaaaagataatttggagaaaatgagtattatacaataatggcttgtaacatttatcttattattattattattgctatagagtattgttattttggtatatacgtacatattgtagtggtacggtacttaatttaataaagagaattgatacatgataatcaatgaaattactaatcacataaaaggtttaaccagataata

SEQ ID NO: 31071 - DNA, 1356 bp, Cannabis sativa
ttctttcaatatttattattttgtgtacaaagaagaaaatcataattaaattgatcatcacaattatatcattaatgattttgttggctggattttctgtcaactaaaaaaaaaaagaagaaaagttgagagagaatgtaggacaataagaaaaatttagactgttaatgaaaccctagccaacaagtgatgagttaagtattagctaagatttggagcttttacattgataaatttctacagacatttcgatgttaatttttgtttaagatccaaaatttagaatccatttacaagtactaattggtcataattaaatccaactgttagcttttttatatttatatacatatatattagtgatgaggaacatagttgatagacttgaaacaacttttattacaacccaagcttacactaaaaaatagggccgctaatttgttttttttttttttagtgtagcgtaatggtgtttttacaatcaattaatagcttgtagcttaaaggtcttgggttcgaatctatgatctctcccttttcccatccttccctcaccactaagctagccttagtggcttaaatagggccactaattaaacatgtaaacatgcactacatcccactatcttctagagaataccaaaccattacctatatatagtcatctatttatttgctggatgtatgaaaaggattagggtcagtcttgaaatatagagggtaatataaaaaaaattataaaaatattagattttaagcaaaagtttacaattttactatcgtacggaaatttttacaaaaatattattctttttataaaataaccgtaaaacaataaaatagaacaattaaaaacaacagtaaaacaactaaaaaacaatagtagaacaataataaaaacagtatttttttttaaaaaaaaacacaatatttttgaaaaaacttccgcctcacagtaaataaaaggggcaaatttcaatatgtggtgtaaaattttttttaaaaaaaagttgagctcttatttaaagaaatatggtatttttcaaaattactgacaaaaaatgtataattttaaagagatttttacaccaaatactgaaatttctaatttttttttctttttttattgtggcgcggatttttttcaaaaacactttgtttttttacaaaaatattgtgtaagttttatactgtatattgtcttattttgttccacggttgttttttagttgtttcactgttatttaaattcttctattttattgtttgggtaaatactattttggtccttgtgttttgcaaaagctatcaattggaccctcttttttgttaaatgacaaaatggaccttgtattt

SEQ ID NO: 31072 - DNA, 4106 bp, Cannabis sativa
  modified_base (4043)..(4045): a, c, t, g, unknown or other
aaaaaactaagtgttttggtgtcaatctaaaatttgggatacttattagttttcttgtttaataatatgaattttgaatgaatataataaagatatacatacacatacacatacacgcataaatatgtagggcaccacactataataatgtatactttttatactttaccgcggtaaatggtacactttttatacttgtggatcaattttttttattatgatagatgttcattaaaccaaaatcatttcaaacttttgatattgtcacatgaataaagattattttatattatatttttagtattttaagctattcaaattttgttgaaaccatagagaatgttcagtataattacaatacatatcggcatataaaaatgctaattaataacttactctagtgtgtaaaaatgtgtgattcatggaagtaaacgaaaagtagtattagtgtaatcttacccttttgtgtacaccattatatatagccttatgatttttttatgtatatatatattaaagtgttagttgtaaggtgttgagtttgttacaaattctgttattagttaaagtagtttgttaggtattatgttagtttgctgttgctgaagtgtgtgtgtatataaagtgttgtacctcctctgtttcattctaatgaagtgagcattcattcatttacaattctttttttctttctcttctgaaactaaaatggtatcagagtcaaccgattgttgagctcttcttcctcttcgcttctcttcttcttctttgtttcctctacttctccatggctcgaggaggaggaactcaaactcgaagtaacaagaacaatggagttgcagctggttctaatcgattttcttccttggatgaaagcaataagcttcctactaccgatccacgaagtccttattttttgtccaatggcgataatgcatcttcttcgttggttcctaaaattatcactgatgctgagaattatagctcctggggtagatctatgatggttgctttaatggtgagaaacaagataaaattcatcaatggtaaattaccagaacctgataaagacgatgaagattacgagtcatggatcagatgcaacagcgttgttatatcgtggatcctcaactctgtatctcccaccattgctgatagcatcatgtacatggaaaatgcataacaaatctggtgtgaattacaagaaaggttccattagaagattgctccaggaatttttgaagttaaaagaagtatgcagaccttaactcaaggatctaatgatgttacaacttattacacacggcttaaaggactttgggatctacttcaggaatacagaccacaatcggtctgtatttgtggagcaatgaaaataattcagaagtactaggatgaagataaggtactccagttcttaattgaacttaatgaatcgtatctgaatgctagatctcaaatccttcttcaagatcctctttcaaatgttaataaggcttttgcttgcataattcaaaaagagaaacaaagaggaattatcatccctcaagttgaaagcaatcagtctactaatgagaattccaatcaatttactagaagcactcaaggaaatcgaagcaataacaggtctaataatagatctgatactcgacctattttctcacactgtggagtgcctggacatactatagctaagtgctataggatccatggttatccacctggtcatcgactatagggcaggtttcctagagaaacacctaaccaatctggtaatcagcaaggaaagtcgattgttaatttcatagtaggaaataacaacaaagaaaatgccaatggagagatggatcttgctactcaatgtcagaaactcatgaatttgctaactcagaaattgcaggggacagctccaccagctccacaaactgatctgcctgttgtgtcaaatattttaggtaagatcaaatctattcctaattttagttggatcatagatactggtgccacacatcatgtgtgctccaatccatcattgtttcattctattcaatctgacaataaaattaaatatgtaggcttacctaatggttccaacaccagagtttcttttgttgggagtgtcaatctgtaaaatatcatgctcactgatgtgttgtgtgtcccagagtttcatcataatctcatctttgtttgtgctttatccaactctgctaactattcttttttatttcttcctcaaaatgcattattcaggatatcaccaagaatcaagtgattgggatgggtgagagagttggaaacctttattacatatctgagcacaaggctcctactgtttgttcttctatttcagattttagaataagtgataagaacctatggcattatagactaggtcatgcttcttgtgtaaagaaacatccattgaataaaagtttacattttcaatattcctattgtcatgactttcattgttctatatgtcatcttgctaagcaaagataattgcctatcattagcaatcataatttgtccaaacactatattgacctaatacacattgatatttggggaccatacaacactcctactgttgaaggttttaggtattttatcactataattgatgattgttcaagatttacttggattcatctcatcaaaaataaatctgatgctcaatttgccataccagccttcatacagcttattaaaacccaatacaatgttcaaatcaagggtcttagatctgataatgccaaagaattacaatttcctgcattattctcatccttaggcatcatacactaacattcttgtgttcaaagaccacaacaaaattctgttgtggaaagaaagcatcagcatttattgaatgttgctagagacattctttttcaatctcacattcctttaccctattggggagattgcataagcactgctgcttatcttataaatagaactcccacacctaatcttaaacataaatccccctttgagattttgaattctaaagatcctagttatcaacatttaaaggcttttgggtgtttgtcctatgcttccacattattaggagctgggagatctaagttctccctaagggctactgcttgcattttcctagggtatccccctggaatgaaggcatataaattgcttgatctcagcacaaacaaaatatttttctctagagatgtcatatttcatgagcatattttcccttttctaaaccaaggtaatttgccttctgatttttccaatttttttgctgttgatgcttcacaaaaacatactgatgctttgaatttctatccctatgttccaccagcacctgaatctagtcccaactaccatgccattcccaatgcaccagaacctgatacaccaaaattcaatacaccagtacaagttccaaattttgatgctcctgaaacaccacttcatattcctaataatcctgatgttgttgatattttagcaccagttgctaatactagacctataagacacactcaaaggcctacatatttacaagattatcattgttttttgtctactaacaatgttcaatctcatgtcactaaagcttctacagatcatcctttttcctgaaatagttgattacagcaggctgtctcctcagtttcgagctttggttctttccatctccagtcactttgagcctcaattttatcatcaagccaagggcattcctgtgtgggataatgctttgaaccatgagatcacagctcttgaatctaatgggacttggattattgttagtcttcctgctggtcatcatgcaattgggtgcaaatgggtttataggataaaatacaatgctgatgggtccattggaaggttcaaagcaaggcttgttgtaaagagatttagtcaacaagaagggatcgattacaatgagaatttttccctagttgccaagcttgtttctgtcaaattgatacttgctcttgctgccattaataactggtttttgcagcaatttgatgtcaataatgcttttctccatggagatnnncatgaggaagtttatatgactatacctcaagggtatagtcctaagggggagttgccaccta

SEQ ID NO: 31073 - DNA, 1692 bp, Cannabis sativa
ggcacctgggacaaaactcccaggttcctacaagaggggaagggccggcggccatgcccagaccatgccgcgacacctgggtttcaaaccaagaaaaccagcaagcgtaaacttgaaaatcagctcccaaacctatccaatacgtcccaaaacttaaccgaattttccaatacaacaactaaactttaaccatcaaactgggagttcaaaacacccttccaaatattaaaatttgacaagaataaccccaaaatttagattgcaaatccatgaacatcaaactccattcaagaacataattcaagacaacgtcttatttacaaccttaaacttccaagcatgattcaaccttatttttccagcaaccaaaacattaaaaacacatggattcaacctagaaaacactctaacaatcccatctaaagcttaagaaaaatccaaaactacatacaatcataaatccaagtataaacatgcttcactcaacacaaaacatccacatgcaacataagctcaactacaattaatttcatgctttcaacaattaaattgagtaagaattctaaattaaaatcagtagaaacactaccttaaatataacaagaacttctctaaattccaagcttcaaagatagcaacattcaaacaatttctctccatatttagagagagagaggggtttgggttttgggggaaaaatagccagaaaaataaattttttccttgccaaaattcattttattaaatccattaaattatggccaaaaaaccaaaatgcccctccctaaggccatttcacacttatccatacaagggaatttatgacaattcacacataaataaatgcgaataattttttagattagtcatcaataattaaaattccaatatttctaattaaaattgcatttcgggcacgaacccggttcggctcaaaatacccggttgtgactatacagcgccaacctgttagaacacacctaaaaaagaccacacaggtatactgtataataatatagtcccataagcacgttagtaaattaatttcatttttttaccccttctcaggttaaaattactaaaatgtccctcgctccccaacggggtcttaacatatcataattcatataaattcacatatattaaattatataataatataattcctcaataatacataattatctaattagggttttgctaatctttacataattctagggaattacaactaccccctccttatagaaattttgtctcaaaatttacctaaagaactccggatatttctactgcatatccgtctcgagttcccaggttgcctcttccactttactatttctccacaatattattaccagtggaatcgtcttgtttctcaagactttttctattctatcaagtatctgcacctgttgttcttcatatgataaattcggttggagttccaatgctccataactcagaatatgggacaaatctgagacatacttccaaatcattgaaacatggaacacatcatgtacagctgccagtgctaagggcatagccaacctgtacgctacttgccctattctctcgaggatttcaaaaggtccaatgaacctcgggcaaagtttccttttcttgccaaagcgtttaatgcctttcttcagtgatatcgaagaaataccatgtccccgacctgaaaat

SEQ ID NO: 31074 - DNA, 1676 bp, Cannabis sativa
agtcactcaagctggggatgggactcacctgcttctcagatgtcaagtggaggccttggaactagctccaacttgcctaaatgccaccaactactctcggcacaaaaattgatgagcagattccacctggggaaccacgtgtagattagagagcccaagaatgtggatccttaggttgaacagcttaaccaacctgtggctaccttgcaacaacaacttcaagattctctcgacaaacaatatgaatagtttcaaaactagtttatggagaactgccgaagcattgaaagtcaatgagctaagcaggaacattaaagagctaacctatgagaacaaattatgtaggcttatcactctggtcatggggctacccccaacaggggtcttttcgagttggttggagagattgcccatcaaccaactggctacgtggaaataagtacttacggggaaacccttaacacatggaatggtactaccacacatggtagtcgtgcaagtactaagtaagcaacaagtgctgagactccacggagggaagcaaactttgagcaagagcccgaatagactcaaactcgagtgccccaaccatctacctaatgttgaacgaccataaacttccaagaaaactaatagagctcctccaccaggttctcgatatcgctctaatgacaatagaccttgagaccctacgaagggaaagggaactgccactcacatcgaaggagagaattaacgactctacttcaaaacaagaggttatgagatccaacaagtaaagactaacaagccacatcatacttagaagtatttccaagaggagaagggtaaattgtgtttttactgtgatcgtggccccaacgatcaataatttgagtacttcccttagatagatggggaggagttgaacatgagcaactagttaatttctctctatacttgtgatccacctaaagactactttgagggaaggagtcactacaatgctctggataaccactcccacagtatatcatcccaagacgacctgaatttcattttgaagacatcgtagtgttgccttcacgactctgtgatcaggatacagcaactagacctatgttgactagagttcatgatctaattgggagccaaaagacctgtgttacactttgaccaaaaactagttagtggaagggggggcttctagggcttaccctcatcaagtaataaaagttccagttggggcgcgaaacactacccacaatttaaacatgatagagtttgacaacctagcgaccttggtgaaaggaatcacgaccccaaagttgttagagttttaactagatagagagtcgctcactgctctcagaccgaatcaaagcactactaatgactccaaagttcaagaatcctttctggcatcagtacactgggaaagaagattggctgtctcccattacttcaaagtgcagatcgatctacaaggagtaagagacaatgccaggtacagaattttccctgccacacatacaggtttagctcaatggtggtaccttaagcttccccctagatcaagagattcctggaaagatctagtggatgcttttggaatttaattagctccatcacgatagagccaaattgaacttaatgattgggttgatgtgaaaaaacaagaagataaacccctcaag

SEQ ID NO: 31075 - DNA, 1125 bp, Cannabis sativa
  modified_base (85)..(90): a, c, t, g, unknown or other
tgctgccttattacataaagacttagcgaataattcaagtattaagatgtttgatccacatgtccctgtccggttggtccacgtnnnnnnggcaaaatcaggggcaacaaacttcgattatgaatttctcagagtcggctatttagattcaaaactctcagagtcggctatttagattcaaaactgtgtggtacttaatgttgattaatttaattatatataaccaagcatatttgagctgaagacatttaatgatggctctaatagattccttctcaatgatatttatacttttggggagaggtttttgtgataaagatcacaatcaacagagagtgtttattgatgatcaaagaccaaattaaatgtacactcatactttgaaaattgatgagtcaattttaaccaaaataagtatgaatctcaaccattcgttggtggagactattatgttacattcaagtagtgatgatatattcaaaattatttatatataaatgataatatatatgataatttttcttatctatctaaactttgagaaaaaaaattaggctttatcctaatggattcagagaaagcaaaataatcatgttatttaagtatacctattttggaattagttatcttaagtaatttgattatatctttaattgttagttttgtttttatttttgaaaggttgatttgataattttctataacagatttttataagtagttttaaatttaattgttttacgtaactagtttatttgtgtcatatttttaattagttgcttagtgtaattggtttctctagctctggtgaccgatccagtccctcgtacaacccctactagctccgatgaagctatttctaccattgacagacaagacagaccacaatcgaggttctcattcacaagatcaaaatgacttcttcagattgcaacgaccatgggagatcttcaaaaagattgctccaaacttgttctctatcattgccggggagtaagtcaatgtgttgaccgatcggtttataaagccaaggtgcaatacaatattttttagtttacaaatagaataaaaagcatttttggtgcttgttggttgactgtgttgttctcatcattgattccacca

SEQ ID NO: 31076 - DNA, 2648 bp, Cannabis sativa
  modified_base (1154)..(1158): a, c, t, g, unknown or other
gtgattaatgaccacttatcacacctttttatggctaaatactcaatgtcgatatgttagtttcgactagaactattacagctcttatccataaatactatagctaaatttattgcaaatttttttaatggcttaaaatataattctgaactctaagcctagtatgaaactttacaatacaccatatgagatatatcttcaaaataataaatgaatctgactccttaatagaaataacaattaaagtttttcacaatacatcttactggtgatcttaaggacatcatcaaatgttaatttatgtgaatcaacataaccagtgaaatcataacttaagtggttaactaaatttccaaaatatcagttcatttaaataaaatatgtatcaatataatctttagtatcttaaagatacctcatcactttgtatgaaaaataaagtgatcttaactttagttattttgatactacttaataatcctgaaataaatgtaatggaaagtcttattcagactcttaattatacattaggcttctaaaaatagaaacaaaggaatgttcttaatttattctcattctagatcagtttacaaatgttagtttaagttgaatttatcacacttaaagataaaagtaatataagatgagtaatacataattttatttaattagagatgttgtggttactctctaattaattaaaattatatatgttatttatattctttatctcaaaataataatttgaggtatgaattatttcaccttatatagaaaacttttatcattacttgcaagtaacatattatatatataaaacaagtattactctcactaaccttttagtatataattaattacataatgctcttttcaaacgtaaaggaaaaaatgacataatagaaataccatttgtgagatgtttattttaatctataggtagacttcttaatcttgcatatgttcaccactattatatgaaaatatttataatagtctgtataccttctcctctagttcactgtttggaattgattaataaattgaaacaagtaataaataccaaggttactataatagaatcttttataaagacaagtatgtaaatctcttttgttgttgatttttagttcaaaatgaacttcttagcaatnnnnnttgttttatatctttatgtttctctatgttgcctaatgagtctttatcggtaaaaaatctataattaatgttctccacccattatgcaactttactaaatttcattgctctttaagatattcatttatttattcatgacatattgtaccacaatttaattctttgcattctacagttttaatttgtgtctcaaaattaatattgtagttgaactcttattgtacataatataatcactagaaaatattgatcttattattctaataagtcatttcaaggatggaccaataaaatctttaaagagtaaattgtttagaaattgtaagcaattactaaataacatgacttattagaactttatcattgacttgtgaattattaatgattagttaaggattctcaataaccattaaacttaaaaaaaattctgaatcataattaatctaatacttgaggtgagagtttgagaaaataaatgatcttttctagaaactaggttcctagatcgatcgctctcactgatcaagtcaattcttaatttcataattctagtgctctgagatggataataaaacatgtaacccttaaaccttatagcatttatgatgaaatgctcatttatggtatttgggccaagttctatcatttgacaattgtactctaactgtatacatatatttctaaaatgtgttcatgtcataaagttagtttccatccttatcacaactcagaatatgtttgaaaaatgactttggtcagaacacgatatgatatgttcactcccattgaagaatatcaactgataaagatttaagaaaatttggagtttgctatgcaaactctgttaggatatatgccctaaaagtaagtaattaatgaataatatgttagagagtatatgaaataccatataagataaatgatacattaattataatagtataattattaaatatctgaaaatttcttattcatatagtatagagaaggtataatcttataagagtgtataagaaaattaagattatacgatatgaagaaaataagtcggtagtgtattaaagtattgggaatctttaatatagaactgctaagtacggttcactatgtactatacttctagtgtgtgtaattttgatttggatcacatatgtggatagacatgaagtaaaggtgttgtgtataatttgattatgcatgactgggccgataagtaataaaaatctttcaataacatgttgtttgccatgaaagagttattcatatcacaataatgatcattagtagatcatcatgagtcctgagtatacatgaactcctgtttgtgttcattgagctctttgattcactcgttaaattttctcagaaaagatgattcttacaacttctgttttgggaacttaataacatgagtgattgggaacatgttatacaatagtagaatctaagctttcctaacatatcagatattagttctcttatagtgttaa

SEQ ID NO: 31077 - DNA, 2298 bp, Cannabis sativa
agtgccccagttgtaaaaagcatcatctgggggagtgtaaaggacaagggtgtttccagtgtggtatgcatggacattataagcgtaaatgccgtcaactgaagcctgaagtacaaaagactacagtgaaacccactccatcaagggtattcgcgataactcaagctgatgcagaagccatccctttaagggtaataggttagctctgggtcaacaactcttatttctctatgttgtttgactctagggccactcatttgtatgtggcagcaagaatttttaataaatttgatagactgtacgatagctatgaatcagggtttggaaccctactgcctggtgaagaattagtcttctccaaaaggggtacatattataggtgcatcagaattgaggatagggagttaagtgctgacttaatagaaatgagttttgcagattttgatattatactgggaatggatttcttgtccaagtactcagccagtattgaatgaaagagaaaaccttgtgtttttgtcggaattgttcgaggatctcggatcccagtaatttcagtattcacagctaaggaattgttacgagatggatgtctagggtttctggttgtggcattagatactgaaagaaaaacttctccaaatttcatgattctagttaccgagttattcaagattagatcaattaattttgacttatgcattcaagaatcgggttgaagagaaagcaataaagaactcaatgacttacaagcttcgtccgcactgaaaacaaatctcaaccgactagtgcttaggttccctgaaccagggtaataacatccactaaatccaaaagattcatattacaatctccagttcacaattaggaatttaagacaatctttatagcaattagtaatgaattaccaacaacaaccaagattcttggttgtacgcacaagattctatgtgcagcagctaagttcatcttcgacacttttcttcaatctaaaatcccttcagatctgatgacgaagatgacactgaacaccctccagtctaaactcagtagcaccaggctctgatctttctgctatggatatccatctctaagctatgcaatcaaaactcaaaaatagcaatgaacaatacaagatacaacaaacaaactcacatgatgtatctgtactaaccaaaattatgaattagctagctaactcgtttacagaatgaaattagctatttatagacaatagttcaaccgatctaagaacaattaataccaacagttaaaacataactggctcaaaaggacattaacagaaaactggtatgcagttataacagattaaaaccacagatacgactggagtccctattaatataatctttcaaaacaatgacttatacaatctcccccttgacagattatgttcaatgatcataaaaaactaaacaaaataaagactataacttcaaaagatatccagtaacacagaactatggaactatataatgtctttggaatcataaacatagcaaaccgtaaaaacatatcaaaagaaaaacttgatactatagaaatctcccccttcattgaacatgacctgattgctcaacatattagtcagactcccctagggacattggcacagaagacaccaagttaggtgtagtggttactggagacgagtcagctgtaggaggcagatcatgtggcactagacgtgagactggggcagagacagacaacttcccttgcacatgtgcgttactaccagacccatttgaggatgcaccaaacaaatctctatgaaactgagggagagatatatcaattgatggagttaaatgatccccataatgattttgcagcacagtagacttgatgatgagaaccattttgtacatggaggcctcaaaagcaagatggtgctttcgatccttcttatatcttttgacaaaggatttattctttgaaaacatttgcacctaccagccgaagtccgataaccctttgaacagaggagacttgcctttgctcatctttgaaatagaaggatttgtagaagagggctgcctgttaacaactgatagaaaactcttactgagaacgggatttggaacttgatagtcatgagttctaagaggagggtgcaccgctagtcgacctgatatctcagtgttggcctatgtgctagctatcaagccaaccctaaacagtcacatctttttgccgtcaaacgaatttcaaatatctagctaggactgttaactatggtctctggtatagttgtgacacaaataccaccttggt

SEQ ID NO: 31078 - DNA, 4154 bp, Cannabis sativa
gagcaaattaagaacaatcaccaacagttatgtgagtacttacttagaattacaagtactcaaaattttggctacgaaatagacaaaagctagaacaataattacaaaaatttggtgtgcttagtccgctgttggtaattgttttttagatttttttattttatttggatcacctctttatatagaaagtaactatcttttaaaattatataaccgatcagataggaccattattacaaagaattaaattaataaaaacattccaagagtaaatgtaagaacagttttatccgtttttgtcttaattgcaacaacatgtatgacctactaagtcgtagtttgtctaatagaccttttttgtaatttatgaatgtctgtggtcatctttgatcgcatactcaggtttttcgcgcgtcgacgacttagaacatgcgagtctgtgacgagtcatcgaacacattagtcattcagaccacacttatgtaaagaatctgcatttacttatcgcgagagagatatacttattcgtcacacataatcgatatgcgtgatcaatattaacttctcttgccaaacataattatgcgactaaacacttgtcccgatcgcatcttctcgcaagtttgagtcatgcgaggttggctctaggaaagccattatattgacacgccatccttttccatcgagaattgagtccatgtgtccacttctcacaagactatactcatatttcaagacaaaaaaagtgtactataacacatgcccctagttttgcgatgacatctatttgtcaacaacaaaactatatttttaagggacaagctagttgtattgtaacatcgcgaggatttttggttgtcttgtcgagaattttaaaaggatgattgcatttattattcctatctttccaaagtgccacgtcactagacccttcggggtttgtgcaggcgtgacttggataaccgttggattaaatgaccttcggtctccaaacaccacatgtcatgatctcaacgaatgagtctgacacctacatatttgacccctcccttgcctttggaaaattctccgatcagatatattccccaaattgtgaatgaccacgaactagtgatagagttcatgttacttggcgggcaatggacatatgatgcaatacgctagcatttgtcacaactcttggcaaagttgattgcatctgcacgaagcgttggctaataatatccttatcgcataatttttagggccaaagaatttctaccagtatgattactgcatatacctccatgtagttctcaaaaaatgtagtcgcatttgctactattaatgcactttagaaggggttgattaaaacgtttgcggtagagtttttcattataaataacatatcgagtcgctcgatactataatctcttgacttcattcttatcttctgaaagcttcccaatttttagatatgcaacgataggggtcattcatgtaacctagttgtcttcgtttatctacataatttcttctcgatcaatggttggtttatcgagtatgtcaacaagaattacattgagtaatttggcctcacgagttaaggccaatcgggctatggcatctgtatgagatgttagtacgaggtattcagctaaccacaatctttttgaacttggacaacaacctataagtgtaaacaaggtatttggtaagatggccacctcagtctagatactctccattgaattggcaaacaacaatttatgaaccactgaaagcttcaagatactcaaccttcatttaaagtgcaagtttaatcttgcaattaaggcttcatacttaacctcattgttagaagcattaaatccaaaccttagagtcgcgtgaactttaaatttttttagagtaatcaatatgattcatccccctgattcttcactgttctaggctccatcaacatatagagtccatcatgtatcctcaaggatgtctgggtcaagacactcttttgagtttgttgctacatgttcacaagaaaacttaaggataaagtcggtaagggattagccttttattacgaatcgcaatttgtactggatatcaaattgattgagctcaattgactgtttaagaaggaatccagatgtatcaggcttggccactacttttgggagaggataattagttaattactcgattgtatgagcttagaaataaggtcacaacttttgagaagctacgatgagtgcaaagtctaatcattccacttgtgggtaacaggatttggcatcaagcaaatgcctgctcacataatatacaagatgttgtcttccttggtcttcgcgaatgagcactgagctgattgcataatcaaataccgcaaggtacatggacagtatttcttcaggtagtggcttagagagtattgggggtgccccagctgcgtttttaaagcctaaaaagcctcttcacatttatcagtctattggaatttcttattaccttttaaaatctggaaaaaaaaaatctttgcattcattagaggatcgtgaaacaaaacagtttaaagcagcaatcttaccagtgaggctctgaacctctttaggcttagtaggagatcgaatctctactaaggcttttatttttgcgggattggctttgatgccttgatgatttaccatgaaattaaaaaaaaaattcccaaaactcatgccaaagatgcatttgagtggattgagtcgcatcttatattggcttaaaattttgaacaatgaatccagatgagtgacatggtcgttcgcgtattgaaacttgatgagcatgtcatcaatatatacttccatggtcttgcctaatagatctacaaacatcatgttaactaatcgctaatatgttgcacttgtgtttatcaaaccaaatgacataactttatagtagtacaaacctcggtctttgatcaaggaggtgtgttcatggtctggctcatacatcaggatttagttatatcccgaatatgcatctatgaagctaagtagctcatgacatgcagttggatcaacgagttgttcattacttggttatagaaagctatctttcgaacaaactttatttaagtctataaaattaacacaagtgcgccaaaagccattaggctttcggactaagtcaggaatagctaactagtttgagtaaaatgattctttgataaattcacattggatcaggcagtcaaattcttctttgagcgctaagtacctcgcgggttctattttctgacgcttttgtctcctcgcacatcaggatcaatttagccgatgatacatgatctcaggaagtattccgaccatatcttagtgtttccatgtgaaaatatctagattctagttgaggaaggtaatcaacctttctcactgatgtatggttagtttagatccaacttttaaaacttttgaaacatcagtgggatcaataagcacctcaattgtttctttagtagcttatgctatgtttgtgtaatcgaggactctggggtccaggtctggcttttccacatgaggaacttccttgattctgaatgactcgtatcatggcgttggtgcctcaagcatgtaaatcatattacatgacttattcttttctgcgatcttaactgcaatgttgtaacattctagtgagtcggaatggattcctttcactgaacctacacctgcgggtgtaggaaacttcattgtgaggtggtagattgatgtcacgatcttcatttccttcaagattgggtggtttattatcgcattgtatgttgaatgttgatcaatcactgtgaagtttgccatcgctgtcacgggtgcttcactaagcattataagcaacttgatcgttcctttcaactcaattgtgtcttcagtgaactcgtagatgttcgaggcaactggttttaaatctttctcatgtagtcccatctatttgaattcctggatattcaaaaggttgacgacactaccattatccaccagaatgcagtgtacattatcgtcctaatatttgcaactactactagtgtatctgtgtgggggtggttgacccatctcgcatcactctccatgaaagtgatatcatcgcactcttttttaaacaactttgctggtctgtcactcaagttgttcgcgttg

SEQ ID NO: 31079 - DNA, 2206 bp, Cannabis sativa
atgttaatgaaacatacttgttaggaaatctacatcctggtaaaatatatccaacagctcagtgtctcgccctttggccttttctaagcatggtcattgttcaaatttttgtgcacctttagactttccctgtgaaaaccaaagttttccactgcgaaatttaacatgagtctcacttattggagcaaaccttagcataagttaatttctcacgcaaggacacatgcccaactttcccgttgagaaactaaaatcatgccattctgtgaaaacttatgctttcccttacgaggcctatatcagggtaaatgacatattataaacacttggatggaaatatggcttggaagaaggacccgtttggagccagccatccaacttggtttccacttacaatcccacgacttttcctcgcagaagctaggagattatcaccaaaccttcaagaattcccctataagtagtcatagagaagaaagacccagcttggataaataatgtaaataacacttctcggagcaaaagttgggcaaaacagaactgtggccgaacctccttctcgaagactggaaagggatacaagttggagttcaagaaaatgattgagaatttggaagagaccaaatctcttagctcatttaagggtaatgcctgcaccgaacaattggttagtgcagcttccatcaacatagagtttccatgtcagttgttcaagtttttactgctgctctttctcttgcttcctctttggcttttgcttttttcctaaatcttgagagatttcaagagatgagtttatgcactcagcgatgaagtctacaagggcttaaccctttatggtcagtcttggttgatatgtgatgtcaaactggccaagttcaatggcccacttgagtagtcggcctgatgcgtcaagtttttgtaaaacctaccgcaatggttgatcggtgtacacctttatcaggtgtgcttggaagtatggccttagctttctggaggccaagaggaagctgttggctagcttttccatgagtgggtactaactttctatgtcgattagtcttttcctgatgtagtatacagggtgttgtacatagtcttcttctcttgttaggacaacactcacaacatgctctgtgactggtaggtacacacttagctcatcattgtctagggtttttgacaacatataggtggttgagccaattattttttcaactcgtggaatgctttttcacattcctctatccacccaaattttttgttgcctctgagaatgttgaaaaagggtacacacttgtttatagacttgtacacaaatctgcttattgcaacaatgcatcttgtaaggctttgtatttccgtgatggttgtgggtgacttcatgtccaaaaggccttggatcttatctgggttttcttctattcctctggcattgactatgaagccaaggaattttcctgtgcctactccaaaagaacatttgaggggggttgagcttcatgttgtagttgcggagttgagcttcatgtcatcgtttagtggatcttaaagcattcgtttaggtcctccatatgcccccaaccttttttaacttgacaagcatgtcgtccacatacactccatgttgcagctgatgagatttttgtacattttgttcacgagcctctagtatgtggcccctacatttttcaacctaaagggcatgactttgtagtagtataggcctaagatcgtcatgaagcttgtatgttactgatttggtggatgcatctttatctagttgtaacctggatgcacatccatgaaactcaggatctcatggccagctgtggcgtctacaagctggtcaattcttgggagcgaaaagcattcctttggatattctttgttcaggttggtgaagtcgatgcacactctccgcttttttttgggtttaggtaccagcacaggatttgatatccaaagtggatagaatacttttgttattaagtcatgggctcacagtctctcgacttcatctttgagtgcttgggcgcactctttgtccaataacctcctcttttattgtatatgtcagatgtttggatcgatattaagagcatgggccatcacgattgggttacttcagaccatgtctccatgtgaccatgcaaataggtcctggtttgcctttagaaatcttattagtaatgattttatttct

SEQ ID NO: 31080 - DNA, 2040 bp, Cannabis sativa
aaaaacaaaattaccagctctatgaggtgaaacctccaaattcaacttctgggtcttcttcaaaacactaaaacgacctgtaaaaaccgaatcttttcaagtgaattacttaacaacaaacacaaatgaagataacccagttgctctatcttcacaaaaaccataaattttgatgaaaaatctaaccttttcttgaagcaggaactgaagctgttgacttggaataggttttagctgaattgagtgacttgtatgaaggaggagaagttctttggttgctggaagacagtagaaggtgaagtgagaacacttctgccattgttgattgtgaagctgagtggattggtgaagtgtaatagtctttgctcggaacaaaaagatttttgccactctttgccgggaaaccaaaaagttcacttttttatcccattaaagtgtccttttttgcccacatgataatttatgtttttattatttctaataaatatgatgttttttcttatcaaacataccaaaatcttaatctcaaattataattttaaggaacttttaatttcttctctatttttcaaaatacataccaaaattttactttatatattttactttctttagcaccatagatacttaggccccgtttggagagctttttaaaaagctaaaatcacttttagaaaaagttatgagttaatatgtatttggtaaaattataatttttctcaagttttatcgattctctattttgaatttattaagagttaataccattttaaatcatgtaatttacaaaaattactgattaaatattttattttgttaaataataaagtaaatcctgtattttttaaaaatagtacaaatagaacagtaaactcaattttcgacaatttgtttctaatataacccacttaatgacaattcatacctcgaacatatactataaaacgtaatcagttttgttataacacctctaaatcagattattattaatttttattttgaaaaaaaaaaaattgtttagggtactatttagtactattttaaaaaatacaaagtccaatttgtcatttaacaaaaataagtgtccaattagtaatttttgcaaaacacatagtccaaaatagtataagaagctttagaagtagctaatagtatatgtttctgttggtgttttaaccactttgaaaagccaactgtattaactgtttttttttttaaccagctcagcctatggttaatgacttgtccaaactgtcataactataaatacctcctctccccaactcgatcaatacactgctagagaacaactatcatcacaagtctaagttagtggagtccaagattaagagagagagcttatgtagtgagagagaaaccagagaaaaagagaggaaatcaccatgatcattgctgatattttcagctaattttttttgagtggattgagggatgtaaaaagagattgttcactcttgaagtgacttctctcagtgtgagctttaattgtaatttcttgtattcaggattggtgatttcaagttgtattctttctctctcagatttcattgcaatgttatgacatatttgattcattcaacttgattgaactcatctcttgttaaaatttcttatttttggttttctaattgtttgttattgttgtcattatgattgttgtccttgaatctttgttatgataatcttgatcaggtttctaatccgcaacagtttcggtacaaacccaataatatagaatttgtgccttatatgtgccttgttgaagataataatagagtttgtactgacaaactagagaaaaattacaattttataaacattgagtacttattccgttaaaaaaatttaaatttataccgcttacaaactcaaaaccttgagcacgtatgcatttatttattcattttttttagtaaattttattcattttaaaatatatataatattaatacaaagctgaccctgagttaaaataggtcataggcaaaaaaaaatatttggacccttactataaagata

SEQ ID NO: 31081 - DNA, 1063 bp, Cannabis sativa
  modified_base (664)..(664): a, c, t, g, unknown or other
  modified_base (884)..(890): a, c, t, g, unknown or other
atatatatatatatgataaattaatatttgaatgattgatctggtgaagaggaattgctaacttgaacatctatatttcatatctacacaatttcaactgaagtagaggaagctaagaacttcagttcaggcgccccaagttcactttttcaaataatacgtacacattaaaaaaaaaaaaaattatagaatttgtttaaggatcagaaaatatttataagaaagggaaaaaaacgtaataaagactgttcatgaataacatatataatgcgataatttgttcaattcaattcccattatcccccaatctttacacaatattaaaaggaaaaaaatgaaaaaagcactgtccactttaatatagtataaagtgtactgatagaaatttaatcgataggtcgatcttgaaatttagtaagttatagaaaaaatattattttgaattcttatttagaaaaaaaaaatgtaatattttttaaaattagtaaaaaaaaaaatgtgtaattttaagaggagaaattatttgtgcctctgggctaggtgggccctaagcacaggcctatgccccacctttgtccaaggttgggcatgcccaaatgggacgaagattacccgccttaatgggtggtgggacgagcactacaaaaaaatttacttttagtcncaacaaaatttgtgactaaaagtgaaaaaaatgtgactaattataaatcatgattcctatgttgtgattaaaaagtccgtagttaaaagtacaaaaaatacaatttgttgtgactaaatgtatttttagtcacaatactcgttgtgactaaaactaaattagtgacaattatttgtaactaaatactatgttttagtcacaagtaatattttgttgtgannnnnnntcacatttaatcataaaaaaattaggttgtgattaaaaagttgtcactaaaagtagcagttttttgtagtgggggatggggtgcaattttatatacccgaagtgagtttggggtgggatcggggatgatagtactacccaccccatattcgactcaaatatatatagttttta

SEQ ID NO: 31082 - DNA, 2326 bp, Cannabis sativa
  modified_base (702)..(705): a, c, t, g, unknown or other
  modified_base (1009)..(1018): a, c, t, g, unknown or other
agagaagctgaattactcgatgtaattcctgtagacatattaactcacccaacaatcaatcgagatgaaatgatggaagttgatacagtcaaaaaagtcacctggatgaccccgataatagactacttaaaaagaggagtgcttcctgaagataaaatggaagccaaaaaactgcgatatcgagtcgctcgatatgtcatttatgaagacaagctctattgcagaagcttcaatcagccattactcaagtgtatcgatgggacttagtgcgattatatactccaagaggtgcatagtggaatcagcggcaaccacgccggggtaattctcttgctttaaagatcatgagtcaagggtattactagccgacattacgagcagatttatctagctttgctaaagatgcaataaatgtcagcaaatagctacctatgtaaacagaccacctagccaattaaattctatcacaagtccctagcactttgcggtctggggcgtagatttaattggagagttaccaaaaggtaaaggaagagtaaaatacgttgtagtcgctgtcgattattttacaaaatgggctgaagccaagcctcttgggactataacacattccattagaatttcattccaatacttgaaaattcaaccaaacaaaggaatagaatgaaaattgtttcttttccattccattctatttcattnnnnccaaccaaacgccacctaagtgtaataattttaaattaaagttataagtataataaaattttaattatgaaattatatgtgtataattttcaattataaagagttttgctataaaaattttaatataagggcaaaaaaaattgctaaaagatccttatttaattacaaattacaaaaaattaattaataattgtaattaatttaattttaaaatataattaatcttcattaaagttttataaggaaataaattattaggttactattaggttataagttaattattatttatttttatttaatnnnnnnnnnnatcacaaccattcaatagtaatttgctaaaaaaatgtaaccatgatggttccatatttaatgtaaccattgaaacctcctccatctatacttttactctttttaagttaataaataatatataaaaatattttttctttttataaaaatttatatttttagttttaggttcttaaccattcaagtaaaaatagtaaaatacatttaatttacatttatttatcaactaaaaattattgcgtcagacaagcttgttagataacacttacacttggaatggaagtgatcccttccgttgccctttgtaaactttattttcttaatttttctcaaatttgcctttgcttagtaaaattcacaaataagatctagtctcatttagaattctaatttattatctaaaaccaaataatggagtctacaaggaaatatgatctcagctattgtgggcaccatgggtctctataatcaagctcgcaataagtagttctaaaataaatttagtaaattctttaacttactaattcctcctgattccactgtaacactctattctccaagaatagatacactattaattatccattattttaatctaaataattaaagattctctatagattgtctacattaatatggactaaaattacattgttacccttcaatgtattttatccttaaaacccttggcttcctataaactgaaataggaggtcttccatttatgtctattagccaagctctaaggaggcatgattttacttctaaatagttttagaagctatatgttccatgtttatgattagcgctcccactcaaatgtactaccctgctcccaagatgtaagtattgagccaaacctacaggtaggctacaaacgaacaagctaaagaaaaagaataacacagttaagccaacacctaatcatcttttgattaatattattgatctatgataaactattagagatttaactagaaaagatattacgtcaggtttacggtatctcttttgctataaatattagtccagtccgatgtatagtcaatacatctgatcttagcttgctcctttaataccttcgaaaatggattccacttatgcaagtgtaagtaaactatatcaataattatcacgtccgtataaatcgtgtgcactgataaatcatgggactacatataatcacgaagtaatcatataaaccaagtaatataagtttaacttctatatcattctttaatagttaataagattaccatgagatgagttttatttagggcataaaatctcaacatactcccacttgcac

SEQ ID NO: 31083 - DNA, 1851 bp, Cannabis sativa
  modified_base (33)..(39): a, c, t, g, unknown or other
attaataggaaataataaaatatttttgtcaannnnnnntgccaaaaatggaattaacagaactgttgtagcttttgctgaatagaagtttctgcatttttagccttttgaaatactttgccttgattgtctgatcttattttttgtagtaaactaactgatttaattgtcttcttgttgtgtaggtgaagtaagtgaataaggggttccacatgtactatataagtgcttttggggggaaaacccttttcactttttacatttaacttctcttactagaaatttacatttgaagaagctcctccttctctctagagggctgaacccatcaagcactattctctcgagatttttgtgccgttttgacgaaccatgcttcccacattcttcctcaacgatttcttgtagtgagcaagctttctagtcttgctatttcacttgatttggttgattttaccatgaatggattaacattattccttgctttgaacatcctttaattcttacgttagattgttttcctttcaatattttgatccgtgtgatagccttaggatacataatgtgtgatttctagacgaaaaagatctgaatttgacctttgttgtgattcttggctctttgagtcaagaagaacgcgaagaatgtgttcgagtacttgaaaaaacacatgtttggatccgtacaggtcctggccggccaaagaggtcttgtttaagacctggctggccaaggaaggatattaaggggtctggccggccaagggggtgcaccccataggttggccaacctatgcccggaaaatgagatcctagccagccgcaggctgggtcatggggtctggccagcctctaaggcttgggaccctagtcggccaaggcaaaggctccaagggggcaactagttttttccctctattgaccttggctagggtctcgtgatggccttaaagccatatacaattgtattcttatgcgtggttccccttgaaaactctgtataaggctttatattgagtccattaaagttaattatataacttaggacttacaatatgtcttagtaggtgtacttaagatggtactgggccgataatcgaccttgtacattgtgagttacttagaaggtacacttgggtactgttgattagaatgtctttgtagctttgtcaagtttttcacctccccttatctcttcaatgcaaatggctctaggtgttggataggggaggtgacaactatgtaggtcccttggttgtcttatgatcttgaccaaaacaaaatagacttgtcgtagagtgcctccgtgtgacccctatgtagctagggtggttataaggggtcgagtcaggattatagaggaggctactcagcctcatgttgaagttgacccagaggttgaccagggagttgaaagtcgcgatattgagtccgatctagaggaggcctcaccagttaggagaaagagatacagaacttgtatcatcctctccaattatcccttgggtcattacgatgccgatggtaatccgctgaataggcttagtgagccttcagtgcttggcttggatcacgacttggttcagtcttctgagcctgagatactggatgcgagatcacagggagacagtttggtctctcccgcttttaccctctctgatgatgcttttagcaaggtacttgctagtggtttagtgaggggtgtcaatcaatgaattttggctatgtgcatatgcgaaaatcttaacatattttggtgtcaaaatttagtgaaaataacttcaaaaggaaaactaaagagaaattataaagacaaagtggtcttttatattttaaaatcaagatattatct

SEQ ID NO: 31084 - DNA, 1127 bp, Cannabis sativa
tttgatagggaaagttaaggatgtaagagtggctaattagattataaaagtctgtgtgcacatcaatattactagacatctcaaacgtggcttaagagtggtcattaatgagaagggcacgaaggtgtctctactctttcaatatgagcacctctggaattctgttatgattgtggtattattggccataaagctttagataatcctcttaaagactttcaagataaggaaacaaggccaattcacaatgaaaggtatggattgtggatgtgtgctccaacctctccgcctaggatttggggatagcatggtagtatcaaacaaattgagtcacattttatgaacatgagaaaagtgagaagaattgtggatactgttaaatgctctcagccaagaagaaacatggtggaagagtttgctacaacatctatcttaaaaagctgagaactggagcaggagctacacaatagtaaggtggctacttcaaaaagtaagcctataattggggagctcccttcaatccaaacaataagaactgatgcccctcctgtccatcctactcgacttaattctgaggaggagttcccaccttccactagtaatttaatggtgtctccactgcaagatattcaactgcattttaaaagtattctggtggaggattcaggggccactacctctccagcagtcggggtgcatcaaccttgccctcctaaacaagtatagcattttgaagagtcccataaaactgttgaaattagaagccacgataaacaaaaagccattatttactctaaagcagaggtgggtaagttgtttcaaagtaccttcaagccttcggtcaaagcccaaaagaagaagacgtggaagaggcgtacatcctccctagatggacgtggtgctggtagtttgatagctaatttggtgtctacacattcgactaagggtaaatggcctcctagtggtgtaaaaaggaaaaatgatgatgttggtacggtagaagagagaagagtgaaacaaaatattccaccagttgttagtcttatggtggttgatgatggagtggcgcagtctacagagcacactcaccagccccaatgagtatcttatgttggaatttattttac

SEQ ID NO: 31085 - DNA, 2347 bp, Cannabis sativa
taatttccaaattagctaagcgggctttacagatactaagcactactagtgtccaataacaatactctatatattaatacacctaacattgatgatattgatcaacgtcattaattaatttggattgatctttcttcgttgcctttcaataatatttttattgctaatacttatgctcactctatagctaagtttgttcttacagtggatactgattgttcttggttggaggaatttccatctccactaagaaatgttatgtaatttattcaaattaatataatagtctttcttagaaaaaaaaaaaaaactttatgtttcttcaatgggtggtataggatttgtgctaaattagactcaaaaaaaataaattaatattatatttagctcaaattttacaacaatattccaatatattaagagtaaatgattttatttcatagaaataaaaaacaatcaacaaaaacattaaatttttattgaaaatatataattttttttttattaaatatacaaataaaatgttaaaaaattattaattacattaataagtgacaaaaaaagtaaataaaaaaaattatatttattgtggtgtaaaatttgactaatattatatatattttatgtcaaatttgacacaatttttaacatgtgttaaatttgaattactttatatgccactattaaagtttacttttatgaaaatgagctaatatatataggactcttttactgtgagaacttttctaaataccctatttgtagggcatttaatagcttgttctaattaggtaaatacattgtaatatcgtggtcttgaatacaatatatatttaaactaggattgattaaaatattttttttattcagctctattttctgacatttgctttttgattgagaaatgctataaaacccgagccacgtggcctgaattttctctcgatccaagtgtcatgtgtccatcatatagtgtatcatttaaccaattttgtataattattttttttattaattcattatttaatttcattcaatgcaatggactccactaatataataatctatctctcctcctcccttctccgttatctctttcttcctcctcaagccctcactcttcttctccatcttcttctgtttctctcgtgatatatgtttttttaatctatcttcatctttctaataattttttcttttttccgtttagtgaaaaatagagatttaatataattcttgaaaattagtgttaaatctattttttttttgtttatttgtatttataaacaacaataagaaagaaagaaaaacagagtgggaaaaaaatatatataatgtaaaatgataactcttaatctgtgatgaaatgattgggaataaaaaattataaagtaaaaaattaattactaacatgtggatctcatcatttcttatttcttatagaaagagtaaaaataaatgggtttaaaattttcaccaattccttctagttttatttttatattattaaattttcttctgggtttgataattagtatttcaacattgagcaatttttttttctctcttttagttaacaactcttcaactgaaattaatttttttttttgaagaaaagtcatcaactttattgattgcaatcatttatgattacatgaagcaactcagtagaaacatcattgcttgtaagagtacgatcagcgataaaataggaagctcgagcaaacgagtgagcaacactattagcagatcgtttaataaaattaatagaaacatcacacaattgttttaacaactctttacaatccgaaataatactcccaaaataagaaagtaaaggaagattactccgaattgattgaacaacggatagacaatcggttacaacaattgttccaatccaacctttctttttacccagctgagagcctctcgaacacccatggcctctgccaattcaggttgcacgatccctgcacgacaacatgttattgcctccaccaattcccctgttgcagctcttgccacacacacgaagctgtacgattcactgctgtcaaaaattgcagcatctgtgttgatttttaaactggaagcagtcggcttttgccatttatccaagccatcagcatcagttaaaaaatcgagagtaggaactgatgacttatcctgtgcttgagaccaatttgcaaaagttgttcaagctagaaaagatacacttgctactgtagattgcttatcagatcaaatcaattcatttatagttttccatatggcccaacatgtcacggcaatacaatttcttgtagcctcatctacttgcttgaacattttttccaaccatcca

SEQ ID NO: 31086 - DNA, 1580 bp, Cannabis sativa
ttttttttatttaaagaaaacgactttttatttggataaaattacagtaagtatcagtagtagtaacagtaactaactactttgttttctataaatattaaaaaaaaaaaaaaacccggacggatccaaatcttagtcaataataattttagaaaattattaataattttcatttttggattgaaattgttaatttaattgatcgaggctccatcaacctccttcctgtcccccaactaaaggaaaagatgccaatcccacgcgttaagattcttccatacatgtaaaacagctgtaacagtttggaatttgtacgtgatatccgagagcgttatatacacgcgctgtttcagagagtagaatcaacagtccccaatgatagatacgataggattttttatcgtgggccgtctaacccagcgaaccggctattatggaggcccattatgagtttttcctatttttatttttttacgaattcagctcggcgcattcgttgagtagcaagccgagctgagccgagccgagctgagccataatgaccccccgccacgccgtgttcccgcacgctttaaaagaaaacacgcgcgcaatgaagcgttaccccactttcccgccgagtcatcatattgaaagatgctctttaatcgaacggctcagactaacccattatcggagactggctccacttccatcacttcccactttataatttagtttatcctaggattcatttttatttgttcttaattaattaaattagtactcataaaatccatattaaggatttaattaatgacatatattatgataaaattaatttttttttaccaaaaggaaaacttaagatgtatgtgtaaataattagtaattagtagcatcatatatatataaattgatttaataataagaataaatctttaggaataattaggaggatttttttcgccatgcttttcaataagtaaaaattttaacgtattaatatgatttaaattagttaattattagtttatgatgtaattattactcgaactgttttgtcacaattttaggaggacctttactctttatgtaataatgcttgtttctctaaataattctcttttcttttcttactattagaaaaacgaaggcccatgattcaattcaattatgaacactatatataaaattttactggccaaattagtcgaaacttttttgttgtcaccttaataaataaagtgaaggaaaatactaaataaataaaaagaaattggaagtccgtgttttatgcatatgtaatgttaatatatatattaaaacgaacttatcatggatttggcacaaaatctatttaaagaaaaaggttgtcgcatgttgcatgcccaaataatcatgttcaaagaaattaggttcaaaagggtaacaaatttatatatatatatatatatatatatataaatattcttaattacattaaagagtgaaaaaataaaagaacaataaataagaaggtggctgccgcaaacaaaaggtggtgggatggtagcggtggagccacaaaaccacccatcacaagtttttttttttttttt

SEQ ID NO: 31087 - DNA, 1452 bp, Cannabis sativa
acatatttgaaagaaaagtatgaacttttaaatctaatacaaactatattaaagaccacaacaatcatataatttttattgaattgtgtatgcaacccagactgtaaattttgtagcaaaaacatcagattctaaactctgatgagaccaaataaactacaatcttaatgaaaattacattaaattagattattgttcattgacatttgaaagtattatggaataagtaacataaatagcatacttatcaagcaaaaaacaaaaggggtgccaagtttagttcacatttcattcatgtttatagccaaactttctttcctccattttgtatctttccaatgtgatactttatgatactttaacattaatgcttcaatttcttattaactaataactagtactttgcatcccccaatatcaaccgaaaaaaaaaaagaaaaagaaaaaaatataattaaaagtgaaaaatatagttaacaaaattggggggaaatgtgtggaattataataatcactttaaattatgtctaagtaactttttatttatttttttagaaacaatttgaaataaaaaataaaagagcatatgaaattactttttaacatttaagtgcatacatcacattcctctaaattaatataataatttattttcatatttcattttgaaaaatatggtgccgttaaaaaagaaaaaaatatgttttaagagaaaaaaatagagataacactgaacaaaaaaaaagttatataattttcaagtgttatgtttatatacatagctactaaaatcataatcccataatagaattttgataattggatcaagaatttgattaaaatttactaaagaaaagaaataaatgtcaatacaatatcccttaccacacaattttaaagggaatattaacctcatattttatgttttttttcttttaaggaaaaatgaataaacccattaaaaaaggcacaaagacaaagagaacctgagatcaatactacaagcataaatcatttaaaagtaagttgggcagaagaccaggccaccaaactcgagaaatttctaatgaaaaaaaaaacaaatttagctagataatataagcactattattttttcatttgcattgccaattgtaaattgtaaattttgtaacaaaaacatcagaatctgaattctgatgaaccactactatctaaatgaaaattacatgaaattagagcattggtgtttaaaagttttgtttatccaaataagtaacacaatagcataacatacttgattatcaagcaaaacaaaaggggtagtaccaagtttagttctcaatatctcaaagtcaaaaaataagatataataattctcaataatcaatgtcactataattattgttgaagcagatcgaaaacattctaaacccgggcctcaagaactcgaagaagaaaaataaagcaatt

SEQ ID NO: 31088 - DNA, 3889 bp, Cannabis sativa
ccattaattatcgtttaaattgtgttaattctataaaagattgcttgcaaaattttagtgatttatttctagtcatcgagctacctgcatgtgtacaaataggttcgcccaagtaaagggtctgaacaaattaatatttcatactctggttaagttacaagtgaccaagagtctaaagcatgttcggtcacttggggacacctacaactgtaaacattgttaagatggcaggtaaaataatacaaaatttcaaagaaaagttttaaatattttaaaatttgaaaaaagctaagtatatatgcaaaaataacaaagattttatcaaatatataaaggtttttagtttaggattaaagactgtccagtcaaccatatgtttgtgtaaaaaaataaaaaagagatgtaggccgaacaaaaaagaaagaggatcttgataagaggatgggtttcaatccaatggagttgccaaaatcctcaagggccacaatgtcatcttgatcggtgaccaagaaatcacggtcaactgcttcaagctgctcattatttttaccaacagtttcatcagcaagttggtcggccttctttgccccagctaccttagcttcttcctcggccttcatttcctcgcacttctgcaacaaggactcacagtctttctcctccatataattaaaatttgcttcaagattggcctactagaactcataaaagagctttgcgtctatctctaagtacatcccatggtcattagcatggcccttgatttccttgtccaaggctttctccttggcagttacaagctctttttctttggccgcctctgaagacaggccttcaactttttgctctagattttgaatgagtatctgcagagtgaccagctcattagcccgcctagtctcgccctccaagtcagcctctaatttggctaccttaggggcattaaatagttgttgttctaagtctttaatcttcttagaagacatgaatagcttattgttgacctctcccaaggtagtttccttgtcattaatttggccttgaagtttttccacttttgtcttatccaaagaggattagacggctataactttggtccgagaatacaaatagtcgagatggaggttcaccgaaaagaataaacaagtaagacctacatggtacagcccgaactaaaggtaaataaaaaggaaatagttaccttagtatactttttcaaaagggtggaagctagaagatctataggcattaaatttgatcccctcaacttctcgtttagctcaccctggttgtgctcttgatagaagttaatcatgtccttttccttttaagtctctaaagcaattgacacgggtgctttctcttttgtttttttggctcaggggagcaggagtaggcttaagcttttctttgttgggagctcaatggcaaccataggagcagagatgttggtggaaataacttcatctctggtgaccaaaggagttgggggtagagccgagggaagatccttcttggacgaacccttgtcatctttcttttggacttttgtcagactttccatcccggatgatccaccagcattcttttttagcagtgcattgaacctgaatgacatagttgcacaggaaaaaatgaaggttagtcttcacaaaaatgtatagcaaaaggcaatataaaaattgcaaggaatatactttggacatccagggaagcatcttcttggacaactataaaagaggcatcgtcatccaaagattccatgtttgactcttctaatcacttttcccttcccaatgacaactagcattacaggacgtgcagtcatctcggtagcctctctaatcaaaataggcacccagttagggctctcttctttttcttgttcttcttcagcttagacacctcccacgcatatacaagagccatagtcaaaggaacatcttcaacaatcccctcaaacggataaagtacaaaacgaatgaagttctctattgtggccaacaaagatatgttgtgagccctactcggtagtaggagaatgacatgtgcccttgaccgtagccccaaagtgaaagtgggatggtactatatctttgccaactagaaggataggtggttggaatccatctcatgtacaatataataatctctaatgaacccagctattttagtgaccccattggatgtcatgccaatcaaccaagaattctctagataagaaaaataaaaataactcgagcgattatgccccgggctagattttagctcgaacatccgattggtttcatgagtggacagcattctccaccgcctcttcgcatgcaagacaaacaacacagccaggtatttgatcaactttggtgtgaattacgtggtcaaatcttataataatctactatcctcatgaagtacggatgaagaggcaagatcgccccttttaagcatgtggaccaaagcatgcagagttaccttccaatggatcggtggcaagttgtccatcgtaagagaggaaagtttccacaccaccaagaaggcctttggcttgcagattattaagtctcttccatgagagagtggatggaggagaaacccaccgagtcttgggtttatcctagtacttggtggggagagcttctttataatccttagtgatgtaatcgcgaccctcaattaggataatgccaagttaagagatgggctcctcagcctcgttgtatccttagtatggtagagtcacatgagtcgcctcttcttcctcctcatcgccaactagacagactttgccttggtcttctacctcttatacttccttgtcattaataagcgcttcggtgccttctttaggatgttcggcacgctcgacattagccattgccatcaaccgagaaaaatgacaatcctcagtcgataacctcctctaggtctacttggtccgcaccacctacttatgtctgaatgggtgctttggctgggtagtgtgttatgcaacgttcactacaatgtccactagcacaaagatattcctcaaaagctttagacaaccttcgggtagggtacctagaacgtctactcgtaccctgtatgtccaagatacaggaaagtattgtctctaacctctgtttaactctcaaataaacatgtcgcacccttctccactactttggtcggggtaatagtggtgttgcaccacaggctctgaagactccgatgagtcaattgtaacctcccaaacgtcaaacctcgaggttgatgaatcttggtgaggatgaagtttcgcagagcctaggtgatcttcatgaagtagttgaagcaaatcttcgtttatttggtgcttaccccctagaaattgtcagggttcatctacaaaaggaaggagagaaaggtgaaaaccggacagatagaatggcttttccaaaggaaaaacattactgatgctctgattagaaagatttaaggttcaaaggaaggaatcctcgtcctaatggcaaaaattccaaagcaagcaggttcaagaacacaggaagaatttaggaaattcccagatttgccgagtaagaatttttaagcatttttcagtaacatggtttggaattaacaaaaaataattaagaatcataagttgtacaagggcattaaaactcagaacgaaatcctaatatctaatgtcgaagaacagttcaactgaagctcaaatttcacgaaacgaattcaagccatagataaaatgcaaaaattttaaaaaaatactcaagaactaaaaaacttactcactattagaacatcctggattatgacttgacttaatctctagatattgccttaatgctcttctaaaccttggtggaaattttggaattctggagctaaaatgaaatctttgatactg

SEQ ID NO: 31089 - DNA, 1164 bp, Cannabis sativa
attatgattttgcagcctaaacaaaaaggctctattgggatatctcttgacgttacgtggtatgaaccagcatcaaactccacggcagatgttgaagccactaaaagagcccaagattttcagcttggctggtatatatataaatgtattttcaaagtcaccaatacatatactatagcttaatgtgaatgtgtaagtgcaggtttcttgaccctttgatttttggagattatccaaagtcaatgaaagagagagtgaaaaaaaggttaccagtattttcaaaatttgaggcttcactagtcaaagggtccttggattttgtgggcattaaccattacactacttactatgcttggaaccggacagttgcacttaacgataccctacaagactctggcgccctaacaattcgtaagtaataattagatgttggatggagcttgtcttaatggaggcctaaaaaaaaaagagcaaaggtcccacatttttactttttattatttttttaaaaaaataataataaaaaaataataataaacgaatataaggcaaggcgagagacttttatcttctttttttcatttaaaaagaaaattacaaattgagaacaataatcacatgaaatataacatactatggaaaaccagaaacaataaaggtagaaaataaaaaaaattaatactaagatatatactgattcaagttcgatagatcgatgtaatttatggatctactccaattcagaaataccactaaatcttctttattgattgagcgagaacatgtacgttacagtaccgagacagattttatgttgagttctctcaaagtgtttcaactctcatactcttacccaagaatcttcttcatctatagaagatttttcatacaaaacccaaacccgatctctcttttttccactacctctctctacctctcaatctctttctctctctaactctcaatctcaatctgaatcatctaatcttcgtcctttcgattccgtcttaaatgcttgagtgtggatggtatttatagccttaggattaagatcctaaagtcggtagccgcaataaacgaagttgttaagttagttaggaaataactaacttaacaaaatctcctatgagcgagatccctacatcagcatcagtcttagtgcat

SEQ ID NO: 31090 - DNA, 1595 bp, Cannabis sativa
tcaaccattgcttgaactgggctgcttgcttgtaactttgtggttcgaattcagctgtgacagcaagaataaattctttgtaagcttttgaaaattttgcataaaattttgcataagacatgaatttagaaataggatgaggtgaagaagatttatcctgtaaaagattgtaacactcaaaatcttgaagataacttggaggtcgtgtgactctaaaggttcttcgaggagcagcaggtggtggtgtgggatgttcttgctgtgacacctcattattttcaccatgggcatgtgttggtatgaaggtttcctgctgtgaagtagcagtatcttcatcatgaggaatgttgttatcattatggttttgctcctgcaatatggggttaggtgcagcatcacaataatcttgtggaacataatctgttatgtgtgtgttagtaatgtgttgagaaggcaaaaccagaggcaaaaaaggatctatagactgattgtgcaaattaagtttatgaaaaggaaagacattttcatgaaaaataacattgcgagaaataaacaattgtttagtgttaatatcaaaagccctttattcctctaggataacctatgaaaacacaggttcttgcccgtggagtaaatttggttctatgggaagaaatagttgaagcaaaagccaaacatccgaagcatctaaggtcactgtaatcaggtggtttccctagcagaatttcgtagggagttttgttcttgagattcggtgtaggtgttcgattaattaagaacacggctgtcataagacactcagtccagtattggataggaactttagattgaaaatataaagcccttgtaacattaagaaggtgttgatgctttctttcagccacggcattttgttcggggtgtctcaatgcaagtgaaatcatgtgaaattccatttttggagaacaaatccttgaaagccagttcgggagcattgtcagatctgaatcgtttgaaaacacaattctattgagtttgtatataagaaagaaattcaggtataatagatataacatcagatttttgtttaagaaggtaaatccaagtgaatctagaatgatcatcaaccaaagtaagaaagtatctatgattagagtgagaagtaacatgataagggccccaaatatcacaatgaataaggtcaaaataatgattagtaaagttgtttttattaggaaaaggtagtttcctttgcttagctaaaggacaaatgtaacaaggttcaatgctttgtaaatttttagttttacaattcaaagaatcttgcagcaagtctaaacatttattagacaaatggcctaaacgcttgtgccaagtttcagccgatgtaaaagcattgatgagaacgggtgtggtgtccaacatgtagagaccattagctgattcacctttgccaatcatcatcttggtgtgcgtttcctgtatatagaaattatcagcaaggaattttaaagagtaatcattccctttagtcaaagaactaacagaaataatattgtaatggaaagagggaacataaagaacattgtgaagagtaagatggttgttaatcctta

SEQ ID NO: 31091 - DNA, 2520 bp, Cannabis sativa
  modified_base (757)..(761): a, c, t, g, unknown or other
tattagctttgaagagcagagaggaattgaatttcattaattggaaaaaattagattacaatggcaaagggactgctatatatagcagtaaagtcggttgtgagataacaaaccaaccgaaagtataacagatattaacaaaccataactaacttaactaacttagcctaagtctctaatactactactaagccaaagttgtcaaaataaataacaactgttacaaaacaaacttaattatcttacaattgtttaacgaaagaactagtcacagaagttgtaagtgtataagtctctctattcgcaactcgtcaaatagatcgaataacaaagaaatatcactgaccacctataactgacataacaaaactaaaacatacgcacaccaagtcgagccttaattagaaacccaagcagtcatcacaatttgaccacattgaatgtttttaggtttattcagatctgattcaatgatatattagatattaaattttactatctgatcctatctaattgaattcaatcattttatcgatccaatattcattgaatgttagattgtatcgattccatcccgtaaatgtataaaatcaatcattagaaacttaagcagccactgcccaccgcaataaatgtataaaagcttgtaatattattattttctttaagagaaatgttaaagggcatgagtggtgcctagcactctcttatgtgtcaatatcactattggttcaaagtatcgggtcccatataattnnnnntaataacttttagggagtatcactagccaatcgtaacgctacatgtcgaggaagtactaaacaccactagtacctaatagcaatgttctttctttaatattcctccttgcaacatagggttcactatcacacaaaacttccactcaaactataattttttatatttggataatcatattcttatatgaattaaaaataaataaaaaatgagtcatatataaaaatatgaattattttactcataattaattagtttttgagatgaaacatatcattcttatcagttcacattgaattaagtgactcacaaaatatgtattattaatattaacacgtaaaaaaaccttgaacaagagtcatatataaattctaatcttattaaaagctacttaaaaagtactgctttttgtaattacaagttatattcctaaaaaagtaagtcttattatataggaagtcatttaaaaaagttaattgttttaactttaattgaaattttaaaaagttatattattttatctttattataatatatataaattaattgtacatgtgtgtgggttggtggaatgctgcatagatatatttatacttacacacatggttaataaattaatttgaagttaattagacagaaaaaaaaaaaaaaagaattgttggtggaggatttggccggaaaacatttttgaattaattacacttctataattgtaaatatatattttcacaaagtaaatttattcaaccaaataataattattgtgtgatattaaagtcttcaaggtaactaataagtcttcagtcaagtagtcaagttagttgtgtgtacgctcttatataatttccatgtgaatgcaacatattctcatttttcacagttcttttcatttctcattaattttattttttgtcaatataaaatttaggttgatttatatgtatatatatgtatggtcaaataaacttttgaataaatggtttctttcatgagtatgtatgtaatattaacttttctatttagtttgttccaaaaatattcattttttcgtgtaagaatattttatatgtttctcaagattttagaaaacaaaactatatgattaattaagttaatttatgtctaagttatgaaatctttttttaaaaataaaattgtttattgaataaaaaaattactttacggtcattacaaaaagatctcaaaatctttttttcttaaaatacaatcgagttactattttacaaaagttattaattgaacattctattttattaaataacaaaatagatcctatatgtattttttaaaatagtaaaaataagattttgaattcaattttcaacaattttatttttaatataactaactttaagataattttcaatacgaacatataaagaaaatataaccagatttatcataacatgtctagatcagattattattaaattttattttgacaaaaaatcaattagcattctatttgcacatttttaaaaaatacagagttcattttgtcatttaataaaacagaaagtccaattaataatttttgcaaaacacagagtctaaaataaaatttatcaaatataatcgttcattaaatatatattatatagttgtagttattttttttttaagttagttgtatatgggaatttaaaagactacatctatattcgacaaggtgacccgctctccacctatttatttatcatttgtgccgaaggattctctgctctaatatctcggtttgaa

SEQ ID NO: 31092 - DNA, 1121 bp, Cannabis sativa
gaaaaaatagtatttgtatgacttgtgaatgctcaatattttgggccagatgaatattcatttttctgattccatagatagcgacttttgtctagaatgcaggtctgtattttaacactactgcctagcaataattactctaataatccaaccttgaatagttattttactgctatcctttttatactttcaaaaattaggttgtcattttttcttttggttctgcaggttattgaattcgttaagaaaaatattggcacatatacacctcttttagcaggaaatacagtctatatggatttcatattcataaaggtaaaatgtttttgtaatagttactattaaggggagatttagtgtattttctaaccccttacctctttctttctttgttcatttactagcatagtttttgttttctttcagaaatacatgccagaattagctagccttttctcccatgttgtagttgatgtcagcagtgtgagagctctatgcattcgttggtatcccagaggtacttaaaaatattaagtacttagctaaatatatgaaagctactttcgtacgttacttaagaggtggctctggccttctaaaatgtttagaaattgttttcactttatttcactccattgattttgtttccaaaccgggacccccagaaagttactggagaactttattggttttagtctacttaagttaaaactttacctaggattgacctgattttgcttatgaagttgcatgttcatgtagctaaatgcatttttttcttggataactgcactaagattttgttgatcatgaagcaatagtctatattatataatacataatgtcataaagtgatgtagaaattagggggaaatataaagaattgatagaacgagaaatttagagtgaagtgaaacaatggatatacaagatgattttaaaagagaaagcaacaatttaaaagaaaggaactctaaacacgtataatttaattatgatctgaaaaataacgaaaaccactaatactatttataaatcagttaaacaaataataaattctaggaatctaaaaaacatactaatactgtagttgcttgatattattttttttagtgataatc

SEQ ID NO: 31093 - DNA, 2236 bp, Cannabis sativa
  modified_base (1448)..(1454): a, c, t, g, unknown or other
tctctctctctctctctaagctcaatttatatttatatatggaagtaaacgatcgaagccacagccacaggcatgggcaaaggctgtaaaaaaaccataattggttttgggtatgagaagacaaacttaattgacccatcatcatcatcaatgcaagaaacaacttgttcttcccatgcatcggattgggagtgtaattctggtcctctatttgttgatgtgaatggccgtggtcgttgttattgctatccccaaactcgccatcactgacagtctcaaagtcgtggtcattgtccatatgggaagaagagggttttgcaggagtcgaactcgatcgtgattttttttactgagtttggtcgtgattattttgaattggcatattttaaagcaaaatttcatgaaacgcatcaaacaaaagagaatactaacctcatcagtagcagattgattagggatttccacaaggatgggaggagttgtactagcggtggttggaggaggtggcggggctgcttgcggccattgctggtggtaaggatgaattttggcaccgaccattgccgttcgaaggagggacgatgaagactagtggttcggtgtcattgagattgggtttgggtttccttttttggattgggattgagagtgagaccctgcgattgaaaatatggaaaagatctgttgtgaaatgtagaaatatagagtaggagatggtatgccattggaattttcgcaaatgggttcaaatccaaaaaaaataaattcatactcgtttggactgggattgagagtgaggttctgcaactttagatcatttagaaaaaatggtgtcaatatagagaaagggatggtcaacgcttcacgttaatgttccgtctattttcttgaaaaaaaaaaattataacgttaaaaaaatcgttaaaccaaaaaatatcgttagataaccacttttaatataaaaagatatatatgaattctcttatttttcatttattgagagactaaattaaaaaataatactaaaaattaataatctattaatttatacattggtaaaaatggtcaaaaaaaaaactaagaattactctattatcatcgtccccatcaactgagaaaactaccaaaactctaatttgtctttttggaagatcaaagatcaccttaacagtagaagcatatgcttccgttatttagattcttcttctctttaaatcgagatttctttagatattaagatttttttgttgatacactacatgtgttatatgagtgtaaaatatttttaacatcgaaaattttatttgcacccctaaaatttttaaagacaccctattttaataatatttattttatataaaatttatatctttaattgtattaagtgtttttttaacttttttttccaattcattttcttaagaaatatacctatcaaataaaaatannnnnnnttttaaatgttatgacaaaaaaattaaaataaaaaattatatgaaaattaattcttagaaaaaaaaaataaaaaaaatatatacatgagttagaaaaaattacgaaaataaaaatcaaaataaatgttgagattattaacctaaaataatgtaaggaaaaatttttaaaaaatattaaaagtattttttaaaaattatttaaatttatatttttcaataataaaatgtatttatgattttatgggatgcaaatagaactcctattctaacattatatccaaaaatataaaatcaactattttttttttttctcgaaaggatataaaatcaactattggatgtacatatatacacgtggtcataattaagattgccttttaatatacgttgcattcagaataggtgtcgtattatatcctcgagtgacaagataaaaaagcatgtggtatatatgattgtttcagctaaaagaatataatttttttgttgataaaatcttagaagcactcatccaactaaaataattcaaatttaaagaagaaattataaaattaaactttcaacaactaaaataaatcttaactattttacatatttttttagttcaataaataagacttaattaaatataaagataactatttattgagctaaatatattttaatattattttttttaactttgttatatatatgtgtaatattatatattagaaagaaaataaaaaagttagaatggtgtaatgtaaaagtttgaattaaaaaaataaaataaaatttta

SEQ ID NO: 31094 - DNA, 1394 bp, Cannabis sativa
aaattaattatatttttatttttgtaacaattaaatgaaatttagaagctttttttggtttagtcgggtattaccgttgctttgtagaagaattttctgaaatttgcacacctttaatagaaattaactaagacaaattagcagtttgtgcgatcaataagtgcaaagctagttttcaaaaattgaagtagcgactaattatagttctattgttgattttacgatcagatcagaaaaatgtttgtggtttattgtgatgcctcccgatttggagtgtgctctgatataagttgtcaaggtcattgcttatatttctcgatacatgaaaaagtatgagcaatactacctaactcgtgatttaagaattgtcgcagtggtgtttacatttattatatggcagcattatttccacgaagagaaacatgaagtctacactgaccacaagagtctcagatatttttttactaaaaaagattttgaatatgaggcgaagacggtgattagttaaaaaaattgattgtgagattctctatcatcttggaaaagctaatgtagtagcagatgctttaagtaagaaaggtcccaagcaagttttcaacatgaagatgatcttttctcagctagcatccaaaatggttagggctggtattgagtttgtgtttggcaaacttagcaatttgacactttagtataatctattggaaaggattagaaatggtaaatactattttgaaccctgtattttataaaagttatcaattggaccctctattttgttaaatgacaattcagaccatgtatttttaaaaatgttacaaaataaaccttaagcttaatttttatcaaattaaaacttaataataatcaaacctgaagtgttatgataagaataattatatttttcacaatcgttcacgctagaaactaatttcaagttggttatattaagaaaaaaattgacgaaaattgaattcggggtctattttgtactattatgaaaaatacagggcctaaattatcatttaacaaaatagaaggtccaatctgtaacttttacaaaacataaggtccaaaataacatttatccgattagaattgctcaaattacagatcctaagttagttaagtttcgggaagaggtcttagctggtcgagctaaagacttctcagtctcaatcagtggaatgctttagtataaggatgtggtagaatatgtgtaactccctaattaaaagaatgtcacatgtcgtgattacattatgctaatctcattaaccggggatcaagtaagccaagtgaattaaaacataataactagtaattaaaaatagcttgtaataacttttaatttaaacgaaaatattaatatcattttgggatcccgtaaatctttt

SEQ ID NO: 31095 - DNA, 2128 bp, Cannabis sativa
atcgtataaaacccctattgcaactagcgctacaaccactgtagaaacccaaacagtaaattttaaaaaaagttaaaaaaataatatataagataatacctaattatatatgaacatacctaattatatattaacgtataactaaaccttaaacacttagctaattatatataagcatataactaaattattaaattcaataaatatatatatatatatatgtaaactttcaatgcataaaaaaaactgtaaaatcatagtatatgaaagcgttccaagactgacttttagagtaaataacttttcaagaatgatattagaaacttttaatttaaaggaactataagacacaaacttattatacaccaatctagactacacgttacgtgtaactaagctttgaatcattttttgaaaattttgtcattaaacttaatttttaattaaattttgacattttttaatattctctcaagggttatatctgctaattaatgacaaattcaaggattatagtacagctttgtgaccaattcaaggattaatgatattttttaaggcattgttatgaatttaattatacgaagttaattgttattatttacaattatttataaaattcagaacttaattaagacaaaaataattcaaaaactaatttactatatctggataaattcaaggagctcctgtaatcacactaaatttataaaatcattttattaaattttgaaagcgatatgtatataatttcagggcaaatttcatcttgaaaatcaattgagactttttgctagcttcaagaacatctttaattatattatacttttatatatgaatggagcaacctaacttaattaattacttgttgacaagacaataaaaaatatgagacgtggtatctaatcgtgacagaaacaactgttttcattatgataatgatatctgaattaggacatattaatattaatgtcatcattacattaatagagggttaaatagaaaacaaagagaataaaacaacaattttatttttctttaaaaagagcaaaataaagtaatttaagtgacccagaaaagcttctttaattttctttttcttgtatcttttgaacttgcctttttcttactatagtatatagtatatacaattcatatgtttgaacttagcaatatcataccacattgctttaaaaaaaaaaaaaacaccaaataaataattagtgaaaatatatattttgtaatgaatacttccaacaccttgtggtttagcttggacaatgtccgatcaaaaaagttaattagcaatttgtataacattagtttgcaaaatacctcagtactttaaaataagaagatgtaatagtagtgacaaaactctaaatagttcattttgtaatactaaactccctatgtaaaatatttagtcaaattcatagcattatactctttgcaattatatttgtattgatttatcttaattttaattttaagaatgggaattatactcctttaacaaattagaaaatatatgatttatttctgttaagtttaataatttttaactatatcttaattaatttgtgttataattatatactaaaaattataattgtgatcatagacataatttagtgatttcacacttttttttacaaaatgaggtccaagtttgaattcaccttccaatgttaaaaaaaaaaatatattatctcaaatttattaaatatatatatcttgactaatatgatatacaagtgtccaaatttaactcttgactaaacctcaagagtaaattgcaacaaattttcaaaaatatgaaattttaccaccaaatattttatatagagagttaagtgtttcaaattaaactacataataaatttcaccgccattatcccaaataagaataatatttaggtaacgtttggttagagataatgaaataatttttatttcattcctgtattttttattgtatttaaaagtattaaagtattattccaatagaaagtctttctacaattttagtggaatggttattctattttgaaatggaagaaaagatcattccaatgtaacataagataaaatttaatgattttttttatcaatttattttttaaat

SEQ ID NO: 31096 - DNA, 1252 bp, Cannabis sativa
tgttttactggtgttttacaaaaacacagtatttttgaaaagatttctgtgcgacagtatttttgtaaaaattaactcaaattccagtatttttgtaaatttcccaaaagaaatgctggctcccatcggttgagaggtacaaaaggctcgacaaatttattgaataaaatttgggttgagtcgcagattagattgctctctttaaaacattcatgacattgttcagaattgtacaagcagactatcaaccttgtcacctccagaataaaacagttcaatcgaaccattttatcggagctttattgcacggcagagaaccgtcaaaataccacacacaataaaacactattgctcgagattagaatacatattgtaatataattgtataaaaactgtacataatttttatgtattaaaagatttgtttctcccattggttcggatacattatatagggaatgaacataagttagtaacaggaggaaagtcgtttctaatcttgagaacgttaagatttggggattgtgagaacgttgctgaaaattaaaaaaattaaaaaaaaaaaaaaagaaaacgtctctatttaccaatataattaaatacgtttaaaaattattttaagtaatattaagtaattaaataaataaataaaaaataatactttaatttaataaataaatcttttctaaaaaaataaggtgcatgccatactagccagttttttaatttttttcttttttttttttttttgaaaaaggactaatcgtaagtcttcaaaatgcacctttttattttttaatctttcatattgtataaggtataggtgttcagatttttctattaatttattaatgttaatccatgtatactttgtcaaaaaataaagagaaaaaaaagttatacatatgtacacacgcaagccaaaattttaattagaagaacgattaattttcaaataatgattaggattttgaaacaatttaagagtgattttttttctgtcttggtatataatttgttttcaatgtatgtattttttcgttaaaacttttattttgattgttcttatggaaaaaaacaaaatctaaccatattagtttctacagtttattgtttcatgccaattaaagcactcttaagaaaataataataaataatggggtgttatgtaaaacctcacatcactttgaggttttacacacctcaaataagacaaatagaattttactgtagtaaataactttttcactta

SEQ ID NO: 31097 - DNA, 5322 bp, Cannabis sativa
  modified_base (261)..(270): a, c, t, g, unknown or other
atcagtatctaatataactctacgtatactgatatcactatttcaatgtaatctaacaggcatttcataaacatgcacgctaaatatgtaatcacatacaaatatcattatactaatcttaccttcatttcgaattcaggtgttccggtcaacctaagtagaactgatactcgacggttcacaagcccctaagtcacaacatacgcaaaactgataagttatacgctaaatcacttttcgaggacttaaacttgaaactannnnnnnnnntatcgataaatagcatggcaaagccctacgtatcgaagaaacacgagaaaaacaatgaaacggggaaactacctaaaaaacgacatgtcgtttttctgtgtcttgcacaagtaaaaacggtaggctgtttctacagaaatggcctgccgtttttcactgcagaaaaacataggtaccctaaaacgatctaaatctaccccaaaacataccacaagctccagaacacctaattgaggatcaataaacatataccaactgaaaattttataatcaagctactaaaattaaaatcaccattaaagggtcatttttgagcttaaaagctccatactagcttaaacactaccacaaccacaaaaacgagcttgaaccaacttgaataatcaaaaatcaataaaaggaagtactctaaaacaaacccgtaccgcacagatagaaaaccctagaaatcatatatgcttgaaaccttactttaactaaggaaaacaaagggaaaagacttacgttgattaacacttgtgagtcctacacaatccttgctaaatcaccaagaaaagaagagacaagaatcaggtttcttgctagttctaagggaggtcgaatgagaggcttggagaaagagtatacttgatttttttttctaatttatctttctttaatttcactaactaagataattcaacaaataactaaaactaattaaaataatggctagctgccaacaataggaaaagccatatatacatgccatgaaaatgaccaaaatgtctccactaaaactttagaaaggagaaatggcctataggtaaaatagtccaaaactttaatcccgcctactcctgacattccaaacgtcgatctagctcgtcctgctattctaaaaatactaaactataataaagtgactctatatgccatacgtcgtgtttcactattaccggacataaaaatgtgaaaaatataaatagcacacctagaattcaaatatatctccatatttataaatataataattaaaagtatacttttgaaattataccctaattatctactaattctcggaaataaactaagcggtcattacataatgtcagcaaacaacaccctcaactcattgaattacttcttctccttatcaatagttgttatctgtgattttggatagatgatgcgtgggcccttacaaaggcccattacctagccaaagtggacaaagtacccaacccgtctaccaagaacggacaaaatcagacagctagtctagttcacgcattgctccttagtgatgaatccggatgtgaggtcttggataatgattttacacttaatatgataacaacatgaatttaaggaggataccctcagaagtcatctgagaatagaatatgaaagggcgtttgggaccacttgccgtctcggaggttgcctacatggcactcctctaacacgatctacaaaaatttaacgacttatctcacctatcagacattggaaagtaacacagcaaaaaggaaatcacctttttgggcggacacccactattttgacatccttttctcccaacaacgcatcacgcctcacctgtcactgtcaatagtacgaccgtatacaaaaggcaactcaatttaactgaggcctcacctacccaatccaataggtcaaattatacaaataaataaatgtattttaccccataagtggatcttgttgcataaatcactttaatggacccgaatccgtctgacccatcaaggatatgtgcatataaatatggcattattgctcaatacaaagggtttgattctcttggttcatgactaaaaaatacattataaactctataatcaagagattaataacagtgactcatgaactaaggctgtaatgccctactagctaaggcacgttacagtgtttaactaatttcttgtgccaaccttcgctaattaaaaggttttaacataaatgtatggttaacaaaacttttgtaataaataaaactataataaacataaaatactcttacaaaatatttataatctaggatcccaaaatctatttataaaacatacataatagatacaaataaccaaaagttatcgtctagcgatataatcaaaatactgtcagcaatgtcccgagatcgtaactctcgaagcttaaacgactagatatgtacaatcttcatcaagctcatgtctagtatcaaaatgaattaaataaaatctttgtaaaattatagtagaaattacagaataaagattgtaatttccactaaaaatatattatttaagcggtcactttttaatttaataaataataagtattaaattatatttctcaataaaaaatactaaatccatcacgattatattttcatcaatatattttttttcaaacattaaaagataatctcaattgaaaaataagtatacaatcgtactacatatatatgcaaattgtataattttagatgcatacactacatatattacacatttcatggggacatggccaaaccaccatcctaaagtacctctgcccctacttctatacaacataacaacactaaatttgccccgatgactcgtactttttatatcttattgagagacggtgtctcgaatatggtacaacttacgccaataccagctagcatcaactttaacttaatacctccaaaagtcttgtcccttcaaataaatattgttgatggtatggccacaccacttcttaaagtacctccatccttgcttctatacaacatacccacactaaatttgccccgatgactcgtactttctatattttattgagagaaggtatctctaatgcatcacaacttactctaataccaacttgcatcaactttaacttaataactctagaagtcttatcttctcaaataagtattgttgatccacttgacccaaagagggtcttgtttttgactaatagcctaaacatatttggctattataactttgttctattttgctcattcaccatagcccaaacccccataagctttgggtaagcaaactttatcacacaaagtaaggtgcaacttactcctcaagctgttgtgttcccaaaggaaacacacacaaattttatccacctatttgacaatactttgaggaagcaaaaatagacttatccaataatttctaagtcttaacaaaactgagttgatgggttgagatttacctgcataagagaggtgaagactttcccaagtgtgaagtcttagcttgatctgtttttagaatgatgcaacaatcatctgctttccacttagttggtctcaaagaaaccccaaggtaattgagaggaaacaaccccttttcaaaatgaagaatctgtaataagttttgtttttcccactgagaaacgcctctaaagtaaacttgggatttacttttatttgccagtaggctagtgttgatgtagaatcctcaaatatatccttgatacattgcaccgagcccttttgagctttacaaaaggtgattaaatcatccacaaagcacaaaattaataattttcaaactcttgcacattggatgatacctgaagttcttgtctcttgctctgaattgtaacaactgggcgagatactccataataatgacaaattaaaggacagatataaggtcaccttgtcttaacccttttgcaccttgaagccttgttgaaatcttccattcatcatgcatcaaagtataagaagtacctttgagacaaaccataatctactgtatgaatcgagttgggaatcgaagacagttcaacaacctttctaaagaaaaccaataaactgtatcatatgctttgctaagatcgatcttcataacacatcttgaagaaatttttttcctattgtagttcttgattaggtcttggaagatgagaatgttatgggaaagtgacacattcttaacaaagactccttgattctgattaataagattaggcagaacttctgcaagcctgctggcaattttcaaagcttgttacatagcttagctgcaagggaaatgttgggaccatatctatctgtatcactcggactgcactatcagtctcctagatttctttccgtttgactcatcagaacatagcaaattagcatccttttttctattgctagttttgtgaaatcctttcgtgcttataatttcaagtttgtagctagtgattcgtgttggtctaagtatgttggtgaattcactaatataacactgttcctagttgaataatattcgccacgtacccctgtaacgtatataatataaataataataaataccaagttctttttagatcaattgagtagttgacttatatagagatatatacaatggcaaaacaaattgaataacactataaacgattcttgattgactattctaaatcattgtttttacgaacagaaaaaactgctaggtaaaattaaggatgttaattgcacacattcaaaaaataccattgaccattgaccgactctaatgtttttattctgatttaccctctaatatttttaaataattaattatatataaaaacgaaaagaaataattaaattcgaagctatccttccattcgttcctcgactgaagggttttaagatctggtttatatacgaatgttgtctctttttcgttccgctactaataactgaggggctatcatcattgctttcactgctgtgtgtctggtttggtttgtccattgttttagagagatttgttagtgcatagtaagtgcttgataaaagtagtcagaaaaattagtgggaaaaaagaagggaaatgcaatggtggtcaaggtttaatatgcaattctcatgcattattatcttaaattaggattttatgagtgcttcaagaaaatatattcgtctccataggctataagtaaataatttgtcctggtaatgcttaaacacaaacacgtaatacacatacaacatacacaaaattcactatcattttattggaaaaatatgtccactattattgttttttgttttattattcttctttttag

SEQ ID NO: 31098 - DNA, 1734 bp, Cannabis sativa
ttaggttgttaaatcaacattcttatcagtagatctaagatcctggtaaaataacttccaacagcatgatcatgcaaactcttactataaattagaatcacatcaaaatacaagacaacaaattttccaatgaatgcttgcaaaatatgattcattaattgcatgaaagttctaggtgcattagttaatcccaaaggcatgactaacacttcatacaatccatgtttagttttaaatgcagttttccactcatctccttctttcatacgtatttgatgatacccactcttaagatcgatcttaaaaaaacacacaagaaccatgcaactcatctaacatatcatctaaacgaggaatgggatgtcgatattttgtcgttatgttgttgatggctcgacagtcaacacacatccttcatgttccatccttcttaggaaagagcattactagaacagtacaagggctcatggtttctctcacatgccctttggtcatcaatcgttcaacttccgtttggtttttctttgtttcatcaagattagctctatatgatgggcggtttgggattgaagcacctagaataaaatcaatttgatgttctatacctcgaataggtggcacaccacgcggtacctcctcgggaaacacattctcaaatcttgaaaaatagaaacaacaacactaggtagcgaagaatcaagttggttagtgtttaaaagagcctccttgtaaacgaacaaaagcatttgttgttttgtatgctaagctcgcgtaatctcactttctttttgcatacaaattattttattttctctctattattttctcattaatagaactgttctctttcttttctctctcacttgtttcgactgttttccctctttggctctcttttttctcattcttttgctcactcaagtttttcaatctcacttgatcttcatagacttgttttggtgtaaaaggagctagagttactgttcgctgaccgaacatgaaagagtacttattggtgaagccgtcatgttggacacactgatcaaattgccaaggtcttcttagaaaaaggtgtccagattgcattgggacaacatcgcacaataccttatcctcgtatttgccaattaggaaggataccaaaacttgtttggtaactctcacttcaccactatcattcaaccattaaaacttgtaaggacgtggatgtttaagcattggaagtcccaggttctcaaccatggatgaacttacaacgttagtacagctactcccatcaatgatcacactacataccttgtctttcacatggcaacaagtatgaaaaatattctcacattgtacctcctcttcctcttcttttgcttgcgaatttaatgcccgtctggtgactagtgcaagcatgtaattgtattttggcacatactcttcatcttctaatggtggcatatctgcaagctcttctcatcttcagaatctacttcgccattttcacaaatcaacataactctcttacttgaacattagctagctatgtgtcctcgcccctgacgtttgaaacactttatctcactagatcgagatgaaataggggttgtttttccttgaggagttgtagttctggtggctcgtttaggtgtagaggataaacttggtttgtaataccctaggattaagtaggaatggcaaatggggcgggtctgccccgccccgcttctgacccgccccgccccg

SEQ ID NO: 31099 - DNA, 1242 bp, Cannabis sativa
ttataatgaccagttgattctacaatattttttaattgcattgctcatataacttgatcaagttttaattttttagtttacggtctcctctatgtgagcaataataaacatttccatctaaattctaaatgctctaactattagaaatagaaacgagatatgtaatttactttaagcataatgaatttggacttatgctttcaagaagaaaaatatgttgatcttactgataccagttctgattcctagaaaactcttcatgcataatgagaaaactcaaatcatcttagtctcattgttatgaagagatccattcctgaacatctattaacttgtttggcaaacactacaatgtcaaagagttttttgatgttgtagaaaaactgtatgatactggtgaaaatactgaagtttgactcttatgaatgaaatgacaatcattaagtatgatgaatcaaaaggagtatgagattttattctaaaaattaggaatgttcagtccaaattgaaagattataatatttctcttcttgattcttacattactcatcgtatttttcatgcacttcatgacttttagtcttatcaagacaacctacaacatttataataaattatggagttttagtgacctaatttctcagcatgtagttgaggaaagcaagctaaaatggagaagattgaaatttcttactgtgtttcttaactcaagcctaacaaaggatagggaaaattagagaaaaagcaggctaaaagatctcaaaaagtcaaataaaatagagtcaaagcttaaattgggaacttatgttagagttgacgttatctatgttagcacatttattcttgaattatagtttagggttaagattgtcttgagaaatatcttctaagtttctatttttaagaggaatttagtttcactaccgcttttggttaaacgaggatattcttttctttttgcacataataatgttgacattatacttgactcccaaattattagaattttttttttattctgacggtatttacaagttctcattggctcccttagcttcctcttttaacatttaaactgaaggcaagggatcttatattaaggaaacatccttatcgttataacacaaacgattggctcatatttccagagaaattattgatcgtttaattaaagctaaaattcttcctcctcttgatgcttctagttgggatacttgtgttgattgtactcgtagaaaattg

SEQ ID NO: 31100 - DNA, 1594 bp, Cannabis sativa
atggttgtaaatttcaaggctgcagactgggcacgagattaattgtatgtcatcttcagattgagctgcacaataaaataagattaaagtctgcacagtttaaagcatatgtcagaaaaaaaaagtgaagacacttactcgggtggcctcttttagtaagtcgcccatgagtagctccacgaacacatcctctccctcggccagttgatcatttacttcaggaagtacacaatgttgatagaatgagagcatctcctttcccttctttgtctttggattcagcatgggaggagtagtttgaggcttgggcagtccgggcccttcagtgcttgcccccttagaacccttggacagggtagctacagattgagatttagatttttcttggccagagggatagagtctaagaccactgcctttggatcatctgaaggagtaacaaccaaactcctctcagcggtcatttaaggagtcttggtgctagaggcaatgctctttggcagtgtgtcgtccaccttagaaagtttggctggagacttttggccggaggcatcacccgaccttttcttcaatgtgtgcaatatcctttgagacataattgtacataagtaaaggagatataaatcaagtaagtataagcaaagctaagaaaaatggtctaccctacatatgtacaagagtaccctcctaaacaagtaaagaaggagcatcatcataagagttctattcttcttgctcgacaacaacgacttttccctttccttccacgttgatggaaggatgagtagtctcttcgggaccatctctgattctcacaagccactcaacatgtacttggtcactttgaggagccttcttttgtttcttcttctttagagcttcatgatcatgcgcaacttccttctcctaattggatacagccccgtctgccacctgctcggccccttgaccatcatcaattgggtaaagcttatacttaatgaaattggccacagtagccaaaagtgaaataattcaagtgtctaaagaaagtcagattatctactgggccctcttcctaagtttcagagtgaaaaggggctggcagaatgaatgactttctgcacacccctaatgatttgtgtccatgcctttgacaaattaataatcttccacaaagctgccaattttagacatgttggtattcgtggtgccactcaaccacttctctttgatctgggagaggtagaaatacccagacctatttttcttgggactggactttaagtcaaacaaccaattggtgtcatgggcggacaaatgaccccatcctgtggaagcatacaacacgaacaaggcatataagtactttatacccttaagagtgagccgggtcagactaatgtagtaatagtttgaaatttccttgaagtacggatgtaatggcagtatcgcaccctgattggcatgaggtcttgaccacacacagaagccatctttacgatctgtggaaagctacctaggagaaggaaggaaagccttaacctttcatagaaggccctccttgcagagattggtcaatctctgaaacgtcaggacggatggtggagagacc

SEQ ID NO: 31101 - DNA, 1397 bp, Cannabis sativa
ctttccttatgaaataatcaataacgaaagaatagagcaagttatcttgtcggaccacaacagcacaagcccaccacttttgcctttagcttccacaacaaaacagccaacaaaccccaaagcaacacgcaaaatttcagcacacatcttattcagtcttgattccgataagaacaccaattccagacaccaacgctgaattagggacttcaaagtacggaccgtccaagggttccccatcccttgaacgttccacaataaagcattcatggttgtaggcgaccctggctcacagggttcgcctcttcaacattttgagcaattgtcaaatcttcgttctaagaaatgccaatcggtttgtccacttttccactctttcttttctttgcatctttcttgaccgccactttccttctctgttcttttggtattgaagtgttccccgaaccaaaggcaaaagggagactttcctttagtccgggtatatccattgagaaaccaatcggaacatcaactagattttggctttcactcatcaccatgttattgcttgctgtcctttgaagtttaccagcccccactacctctcgatcttccaccaatcttctttttccccttccatcttgagccatttcatttgattcccccccgttttcctcctgctggtactggccccttgtgttttgcagcttgtgaagctccttgctgccctgaattgattcttttccttctattacttcacaccttctctgaacatgcccttcctcttctcttaataggggttcaaaggagttacccatagagatattgagactttgtcgacttccaccttgaatgttctgctcatgtacaattagagtctatttatttccacatttcactacttgaaatccatctcgaaccccgttatcaattttcaatcaagttccgtacgccattgctatctttccatcttcccctatgatttctttaatttcaagagaacaatccttttgactatggccaatccatccacatcgaaagcacatgaatgggagatcatcatacttgaatgccacccatttcttatgtccagtacacggtagtaaaaaacctgggcaaaccggtttattgatcgacatccacacctgaaatcgaaagaacccatccgccaccattcgggacacatcagagttttgaactgtaataaccgaaccagccacagatgccaatcttgtagtgtttttctcagtgagataatcaattggaaccccaaagctctaccccaaattggaaatacagttagatcattcttccaagagtcactagagttccccatcttgcccaaaattagtaccccattcgataaataccacgacattcttgctaagattcgggattgagtttgttcggaattg

SEQ ID NO: 31102 - DNA, 4515 bp, Cannabis sativa
ttaggtattaaaaagtaaaaaatgacatttgctttattattttaaaaaaagtacattaactatctatagaattagaaataggctcatttacttacatttctcatataacaatttgaaatagtgttcattttttttttttttgtgaaagaaaaaacaaaagaatttagaatggtattagatatttgtgtgtccttttgcaattttctaaatcctttggacaactattgaaaaagaaaaaaataaatgtcggaaaattaaaagacgctaacgttagggcataagaacactacttatttagcttattaaaaaaatgagttttttcatttttatattttaaaacaattttttttattattatttttacgaaattctatatagaaattcctattacaactagcaatgtaacctaaatcgcaacaaaaaatcgtatggaaactcctattgcaactagcgctgcaactactttaaaaacacaaaccgtaaatttgaaaaaaaaaattaaaaaatcagtataggacaccacttatttttctattttatttctaggaaaaaaaaaaacaaaatctatcattttcatgtttactattttctttttttattgtggtaattacatcaagtattatttttttttaaaaaaaaattagttgaaagatttttttatatatatatttttacggtgttttataaaaaataatacgataataataaaaaaaaaaattacataaaaagtaataggaaaataacatcaaaataataataaaaaataataaaaattagtaacaaattaacaagagtataatataaaaatacataagaccgtattttctgtaaataaaattttaataattgtaaaaatattgaaaaaaatttacaactgtatttttataattttttgttgttgtttctatgtctctttttttaaattatctcttttttatttttttaaaagcatgtttaaatctacctaaaaaagaacacgcttaaataatcttgcgtggcctaaatttgattgacaattgatttggttgaatgcaatgaaaactgaaaataataattagtattttaaaaagaagaaactaacacaaaaacaaagaagtcaaagtttatatctttatagctataaaggccaagtaagtaggtatattgtattatttgtatattaatttatatataagctagaatagaaagatccccattatggggtttgaatatgtgatcgagactagtccaactttgtctttctatatctaacacagattttgattctattacactcaaaccacaaaatgtatacatatttgtatatatatttttgactgattcaacttccaacccaatggaatttaagacagtaataatttagtaaccgatggatatatatatcataacatgtttttctaggccaagctaatggaatggaagactcttcttcttaccccttccaaagaggacaactttaatatttatttctaattccatcccagaaatccaggttaacccttcaacaccttatattttgcttttttgggtttatggccatattacattatgctaaatttatcaccacatttgataggtataagatcatctctaatctatcggcaaaatgttatatataatgtgattttttttacataatgctctaaccaattgcaaaatttatgtttcactaataatagaggggactgtaaattatgatattttttaactttttattaattaaataatacattgagttagaattagaaaaaatttaatgataacatatttaaataaaacaatataattataagaaaatttagtgacttttttattttatacgcgtgttaaatagatagtttaaatattgatttctacattgtaaattattctaaatttctcaaaattttgcagaatgtcataaataactataacgtacatgactatgaaaaatttagaataaaaaattcttatagataccgaaacagttaggagttgcattagtacacccattttaatggggtgtatggtaaaaacgcccattaatttaactacgtaattaaacaatatcaaaaaatatttctttttacattatatttataaatatatatacaaaatatttaagtcaaacttaatttttaattttttttgccgaaaaattttattcttgattttttttttcagcagatagaataatcacaactcatatatcgtaaaagtgagagatttttttaattagatagaaaaataaagtattaaaacttaaatttttttaatattttttattcatgaataatactcattaaaagtatacacgaacaaatttatgtatatatttagaaatatatttaaactaattatatatgggaggacaatcaattattaaatcataaagaatgaagctttttaaaaacaatccaccacgatcaacacagaccgaatttgaacaaaaaatggtgtttaagaaacaaggaaacgtgcatttaagagataaggattgatagctcaatagaaaatttaaagatgtaaagaatccataaaagaaagtcttagaaaattaaataaccgccttagagaaaataaagataaccattatcccatctttatcactaataaccaaaaacaattcattttaatattaatggacaataactagcattttgagtcattttaaataaaagtggtatctgaaatataatttaacaataatacccaaaacatatggatcaaaaagatattttctctacttttttttaatttttttttgagaaaatacattggttatcataaattaaaaggataaattatttataataacaaagtatataagtagaatattgtctaatcctagagtatatttagccaaattgtggtaaactatattagttatacgctcgacaagaacaacagtcacactaaaaaaaaagatagaagactaaaaattacatctgaatgatccaattcaaactatggaatattacttttactcccatttcgtgtgatacaaaattaccaagaatgaactttgagaggacagcaactaccttaccatactcatctcgaacacagcttcaattccaattatattacaatttgcatttaaagttgcatcaacattaatttaaagtcacccatagtcggcggcttccacagcatgggcacagggattgggaaagatagcctcagaatagcactaaatgatttttaacttttacaagccaatcgtatctagataaatatttagccattttgtttgtttgaaatttgaatcataatttagccattttaaattatttagaagaattaaaaatttacaaaaatgatatgtacttatatttttaactaaaatactaaaattacctgccaatggtgactaaaaacgatcacaacctaacaattgaccttctctttgccatcgctattttgtgtgctataaattttctctacgtgaattacttttcttagttactgtaaagaaattctaacatgcaatggtgaaaaggatttgagctgtgttatctctttcattatgaaaacttactcaagacaagagccagccagttacatgactcgcccacatttacattaattgaagaaatggaacacaacccctataggctataacctaacctatgaacgaacacaatttaatcactactcgagtatagccattctcaacaatcccatttaaatcatcatcaagattacaaaccctaaccctaacctattttcacatgaccatattaaaagtatctcctccataattactaggcaaattcataaccaactatagatttcaaaggaagaaaatctgtgaaacgaacaccacccctcaacacaaacaccaaatccaatgacataaattttaacacacaatcagtataaagcagcagctaagccatgtcaccaatcaatcaatagatgaatgtagacactaagatcaaattcatgtcatctgaaatgtattaaatactaggaagaaaatttaaggaattaaaagttaaaatcaaatgagcaaatagttccacaaggtcctcagtttaatcatcaaacattaaatatcccaaccacatccagtcttgcaatctggagaaatcaaaggtagtatgttccctcagggaccatttatgcagtaaaatcttcaaagggtttgaagataaaaggtatacatataaatggaattttgaagtatgtgttattaaagggaaggaagaagaaaaaaaaaagagaaaaaagacaggaacataataatatattgccatcagtgacaaagcaaacctagcggcacgagcaccagcatccagcaaaggccacccacccccattcagtatgcagacaactcctgaaaatgcttttcttccaacactctcacaaaatcacatgtttctcccctaaaattggagagtatggccccaaagattctaaaaaaccggctgaggggcggtaaggggaacaggtatcaaaaattccccccaactaagcagtaaaaagcatatgccaccatggaagttcaaagataataataataaaaaaaaa

SEQ ID NO: 31103 - DNA, 3991 bp, Cannabis sativa
  modified_base (1858)..(1861): a, c, t, g, unknown or other
gttagtatttacattattcgaagtcgggctctcttttaataactttctgactcttatcttgatttttgtttcgcaaacttttgtcatcaaacaatacacactagcactagctcttccggccaaagtggcctcccacgcctctagaaggccttagaggatttggctgcctcaaatgaggagtgagattgtcttcaagccaaggtcaaccttctcaggctcaacttgaacgaggtgacaccaaggttgacgatctttcccaacaacttcaatcatcagaggagaagtgtcaggaagctgtgctcagacataccatatgagttagtatttacgttattagaactgaggctctcttttaataactttctgactcttatcttgatttttgtttcgcaaacttttgtcatcgaacaatacacactagctccagctcttccggtcgaggtggcctcccatgcctccagaaggccttgaaggatttggcttcctcaaatgaggagtgatatcgtcttcaagccaagatcaaccttcttcaggctcagctgaacgaggtgacaccaaggttgaagatctttcccagcaacttcaatcatctctcaccctgcataaggagttcacgactaaggcactacacaaacgggatgaacttaaggccaagataatctgattaaagcagcgtactgtggttgtaaagaacaagggcattgagcgggaagaagataaggttgaattcttgtcgtatgctatgtggataaataaccccaatgcgaatgttagcattcttggacgtgttgagctctagcttattgaggcattcaaaaacgaggatgagaaaaggagagtgacacgtgaggccaaacactgtggggatgctggcacttctggtgatggtaatcagtagttgtaatcttgtgtatctatgttgtttgttttttcgggggtcgacaggctttgttagagcgacccttgtgcttttactttggatgactgtaaggaacttgttttttacttcttgtgtctttgtgtgttgttgttctctttcaatgtgtgtgaccccatgaggactctaccagagtaggtagcattttatttagggattattgactcttagagcggtctccacctcattttaattacttattcttttattatgatgtaagggtgcttattgttccttgaacgcgcttcaaacttttaatttatattttcactactgcgtgttgttgtgaatctttgtttatgcctgagaaacaaccttttctttttagcataaggccatgagtttctttcaagacatcatttggctaagcaacttatgatcttttgtgaggaaaaatgtattcccttcgttggccaagggtcgctaatccttgtcgacttaagaattttttttttatttttttttacttctcctcttgccccccaagtgtgtagatttattcatagcattgtacagtacttgagttttgctttcaatcttcttctttttttttttttggaaaaaaggacatcaatttaaagtatgcgacaagacatgataaaataattccaatgtaacattgatttagttcacttatacaagagaaagggaaggtagaagtgttagttttatggtactacgcaacaaaagagttttgtattatctaattatcattgtactatagtctctaggatttctatatgtgtatacattaaatcaaaacaattaaaatgtaagtttatattataccttttgaagcctgctatctcaaattttttctacctgacgtggcatgtccacgtaagccagagatagagtataggtggaatacaaccttgccagtagtatgatagggtctccatacaagatatagcaaaaccnnnnagcagtaaccaaatggagtgaagcaagccctcaagaagctgtactaacatctctggccagccaagagaagcctataggttatgtcatggtgagcatataggcaggccaggatctaggcacaagctggccaagcaaaaagtgacttccagacgaagggagcttccgttcgactaagggaacctgacctctacaaggaaatggagtacaaagttgtcctccacttacaaaagtctaacttccatatccaaagactggcttcgtcttggtaaagctatagtgacctgcaagatcctggtagacacaggacttgccaagtcctggcaggagcatggccaatcataccttaacctacaggccttggccggccagacctcaacctatgaaccttggctgaccaggacatatcttgcagtgcatggccagccagacctctcttgtaggtctatgggcagccaggattaacctagcaggactctgtgcacaacctaaaacatggacaacaagctacctacaaattgaccccttaataacccaacaaagtgattgaaaatatctactttcaagggacaatttagtcttttgtatttaatcaatttaatatgtaaatatctaagtgaaaatatctacttgttgtttgcttagtacttgcacagttaccaggcatggtagtatcgtttcgtgcactaagggtttcctcttgagtacttattcccacgtggccatttggtcgacggggaatctctccagccaaatcaaaaatacctctgtggggagtagtcctgcgactggaatgatatgcttctctgattcattgagaaaatttagccctttactgctcctactcaacttcttgtactatatattctgatagttctccacaaactagttttaaaactattcatgttatttgttgagagaatcttgtgcctgttgttgaaggtcagacactatttggctaagttgttctacccaaggatgagtctccttggggtcttctagttccacacgtggttccccagttggaatttgtttgttggttttagtaccagtagcagttggtggccttagggaacgagctgtggagctggtttcgagacatcaacctatcacctacgatgtaggtgtagtcccatcaccagttccagtgactagcgtgcccctagtatgctcttctttcaacacttgaggaccgtgttgcaaccatctcgtaagtgattccttgagttatgggtctcaatgaaagtaccaaagtattaacacaaaaatcaggacacatatgtctagccaaacccactcgctagattagtgagaatttattaagagataagagtgaatagagagacacaataatttatagtaattcactccttgtgccgcgaaagtaatggtgcaacatctactttgagttcatttctcatgagatggattacagaaaaatagctaagcatggaagctttaatttctagagagagatgctctgaccttatgggctattttgtgaacataaaaaatgagctagtggagctttccttttatacggaaggaggtcctattaaaaataaaatattgtaaaaaatatggaaaaatacatttaggctattttttgagtattgatgatgatctaacagtgacattgactccagagtttggtcgtcaatttctagagcttgagtcgcgtctgcgggatccacttctggtaagttgtagctaaaatttgtaactctcttgaggacaaaatttggagtttataacttcaaaggaaattgtagtgttaagcattacttgataggttatttaaatagcttcgaaatgcaagttgaatcacgtcaatcagatcaatattgagtgagttatgaccattttattaaaagttattcttcgcccagcacccgggttgacatgtgacatacccctggatactgggtgagtgggaaaacgtgttgggatattttttttatgcctaagtgatattttgatatcacttatccagttatgaagctggccaccaattctcatagatgttctcattttgcaaaaacaggagacttgaaactacctaatttctgaatatttcactttgccaaaaaagtgaaaatatgaagttgtgaatttgactcttggaacttcata

SEQ ID NO: 31104 - DNA, 1448 bp, Cannabis sativa
aaaaaaaaaaaaatactaaatctttaaaaaaaacatactcatatatataaatagtatattatatatactaaatactctcctaacataaagagtttcataaaaaaaaacattgtgacacaacatcaccacctttcactttcaaccaatgcatggattgtacataagtataataagaacattagtccccactcaaaatatatatatataaaatatatattgtggcaaatgggtattatcagcatcaacatcaaacagttgataataaatcccaatttgaccacacctatagggattatgtaatgtggtcctccttaattatttattctatttccttaaacttcttatttcaaaattaaaagtgggttaatttttagaaaaaaaaaatttaaaatgagtcatttcattactaaaaaattaggaaactattgacaattgctatgtaaaatacaggaaattataaattttacagtttttttatattttttttttttttgcaaaagtatggtttttttaaaatttaaaatatatatgatcaaaaaatttgaagaaaaaggttaaaaaatatggaaaaatcaagcaagggtaaccagttaccttatactgtttttctcatatattttaatttttttttctaaaattttcccatgaaataacacttttgagaaaccatatttttacaaatgtataccttaaaaactataaaattgaaaattcccctacttgaaaccttcggatggccttgaaatttggtgggccttaaaaaaaattattaagctcttttattgaaaatattggctcctaagtcctaaggctaaggcctaaggcatagtccgccttagcccaggcctaaccctaaaccttcgactatatggaaacccgagcaaagttgcaataacagtctacaagtcaattaagttattgaaaagactcgaacctccaataatgtgggactcgagaccagaaaactataacaattgttatataggttttcgggaaaactcggacctcccactaactaggtggtaggtccgagtaggttgttatgagtataaacaagacttaagatcaaaaattccaaaatttgacgtgtaaaaggcactaatggtaacaattgagttgattctaagtaccaactacttaagggagacacaaaatccgtaattaatggcttaaatctacaatgaaaataacacctatcactttcaataaaaccctctaaaatactctaaattttaacataaataccctaaaactaattattttttttaattgtttttaaagcacgttacaactgattaattaatgacatttataactaaaaaaactgctgtaaaagttaatagcaattaaagttaaaaaaaaaggaaattctatctaataatgataattaatattaaattaaataattacataaaacactattttttttataaaatttttatattatt

SEQ ID NO: 31105 - DNA, 1654 bp, Cannabis sativa
cattcatcatgattgaataggtggcagctcttagacaagacatgatccactttataaacttggatggcattttgtacgcattcaaaagagcttctaagaattcccagctcaccgtatcgtaagctttacttatatccaccttaagagtacaccttggggatatgttcttccttttgtagttcttcaaaatgtcttgaagaatcataacattatgcgcgattgatctcccttgcacaaaagaaccttggttctagttgacaatcagaggaagaacctgagatagtctcatacaaatcagctttgaaacacatttataaacggtggtgcagcaagctataggcctgtaatccactgcctttgttggattttcagtcttcgggattagggtgagcattgtggcgtgaaattcttggggcatggatcctgtaatgaagaaactctccactgcatgtgtgaagttagcacccagctccgaccacattttcttgaaaacaccagctccataaccatctggccctggtgattttacatccgaaatactgaaaaaatcttttctaatttccttctatgtaaacggtttgactaagctcaaatgttgctcaagatttaaacaattccccatctccatacaacctgttttgagactagctgtaggcctggattcggttcccatgtatcgctggaagtgaccaatatagtgatcgaccacctcagagaaattgtctatgaccaccccttgttcattagtaaaagatataatgctattctctaccctcctttttttcaaactagcatgaaagtaagcattattctcgtctcctttgctaagccaagtcaccttgcttctttgtctcaagaaactatggtataatttttcatggttgatgaagtttgtggctgcctctttctcttcatgctgaaaattcaggtcttgagcatgagcttgagcctgcattcttgctgtcaaaaaatgggctttagcttcataataccttctccctatatccctgtaacttctctattgaacttcttcatgacatgtttcaacctcaaaagcttgagagatagagctttcatccccacggccctcacaggtttttgccaactttcaaggacagcttgtttaaactctggctggttagcccagaaattgtagtatctgaatggttttcctccaatcttctcatcaatagccattaaaatcacacaggcacagtggtctgaaatagtctcccagctgtagtgagcttttgtcaaaggaaatttatcattccaatcttcattcacaaacgtatgatctattttagaatagatcctcttgtctccatcttgattgttagtccatgtgaagtccgatccagtctttaggagtctttcgttatgactttgggcaagccagtttgtagcatccaccgtttcattgattgttacatcattaccccccttcctatcttccaaatcaaaaggagcattgaaatcccctgttatgagccaaggtttggccggcagaagtttacccacatccccttcctctcctcaccagtattgagatcatacacatatgtaatactcatagcattaatctggccagcaagtttaacaaagcaatgaacaaattgcggatctccacgaacaacaatcacccgagcaaagt

SEQ ID NO: 31106 - DNA, 2041 bp, Cannabis sativa
ttttcctctttgaataatttgttaattattcatttcctttaatattatttttttgataaaaatacatttttctacaatttcaaggtttttattataaattgaaaatatattttcattaactttttaaaattaattgggtagtcgaatgtgcaaaatttaaaaattttaaaaattcactgctacaatagtttagggtttagtaaaatttgggaatttttgtccatcatttttatttatatatatatttaacaatgattttttaaaatatttgttatatttgtcacaattatccgtaatttatatttgtattattttaacatgaagagttaacagtgttcatttttaaaaatgtgattcaaatcgtccattgtatgcgtgcctattctattttaaacacatgcaacaacatattttactttacttttgtcaccataattattaattctaaattttcgtaaaacggtcagagtggctattacagctacaatatacaatgtcatatgaaaaaatagaatgtaattttttaaagcacttgcaataaaaaatgttcctatctaagaatcttcatatataacatgtatttgttcaatttgcattttatcgtaaattaaaatcctagcaaaaagtgtaaagatgacaaacatgtatttgagttattattattatttttaatcatttataaaagcaagagtagtttggttgtaattgaaaatattttaaatataaatcaattttgatttctaatttgaaataatcttttaaaaagttatgatccaaaatataatttttaaaaaattaatgttatgatactaaaatgtagaactcataatattatgatcatatttttaaaaataaggtcttaatagtaaacttttttacaatacaaggtttaaaattgaattttcaaaaatatagagtttatattgataattcatcaaaatataatattcaaaatggtataaatcttatttttttttaataattatatgtgtgtcatttttttcttctaaaaagtacattagcttaaatttttataaaagtatatgataataataatagttatataatatatgtatgatagtaaagatttttttttttttttttgaaaaaataaatagagaattaccaactgtaacaaaaaaaatgagaaaggcaaattaaaaataataataaaaataataacaataaaagaaggtatattaaaataaaaaaatgacaataacaggaaaaaaaattaaaaatattgagtgacaaaaaaaaaatgacaaaggcaaactaaaaaaaagataattataataataaagaatttttttaaaattcttaaatttttacaaaaatataaaataatacttatagttatataatatacgcatgataaatatttttttttttggaaaataaatcgagagtattagttaaatgtgaaaaaaaaatgtgggaaaggattaaaaaaaaaattaatgacaataaaagtaggtatattaaaaataaaaaaaaaaaaagtgaaaattttaagaaaatgtttaaaatattgagtgacaataaaaaaaatgacaaaggcatattaaaattcataataaaataattgacaacaataaattagttaggaacaaaaggcatataaaataataaaaaaaaaaataacaacaataaattagttgggaaaaaataggtatattaaaaataaatagaaatgacaataataaatttaaaaagaaaacatttaaaaataatgaattatttatgagatataatgaacaaaataataaaatagctacaaaatgacaaaataaattgactaaactaagaaaactcaaaatgacaaaataaattgactaaactcatctaattaatttgataaaatgacaaaataatttcaccaaatcaaaaaaaccttcacccatctttatttatatatatatatatatatatcataaattatagattataagttgaacatgttataattttctacaagtataattattattttaaaataaatttaattaaaatattataaattaaaaattaaaaaatatat

SEQ ID NO: 31107 - DNA, 1294 bp, Cannabis sativa
aataaaataaataataagaaaaagtataacagttttgaatttaataaaatgaaattgtgattgatgatatagttatttttaaaagactatttaaactttttttgctttaataaaaagaaataatttatctaatattatgaaagtttttacattttgttttgtggtgtggtagaatccaaaagtaaatttagtatgaaaacggtaaaagaaggcatcacaacgttatcattttttaaaattgaaaaataagaaaattatataaaaatattagtgatagaatatttctataccttaaagagtatgtaaagagatttatataaaagaggattaaaattaataattatgtaaatgtgaaatttataccctaaattataatgataaaaaaatgaggtcatgatccgtatgtttaattatttccataatgaaatctttattgtcttactgttttattaatgagatggatacttaacgctcttaaaactatagatgacatttacacacgatccaataaaatataagtttggagcccttgaaaataaacgagaccttgacaaaatttaatagaaactagaatggattttgattgtatctcattgaacataaataagtatctaatatatccaattggatgtttccaaggcctatcgtaggaatgaaataaaaaaaatttaaaaaaaaaatacgagctacattgtgaaaatgataagagacttgaaacccttgaaagtagatttgaccttgtcaaaatcgaatagaaaatagagtggaccttgacagtttctcattgaacataaataaggttagctctaatattttttattggctttaggcagggcctatcataaggtgaaaatgatatctatatatatatatatacagggcctatcatataaatacgttcaatgtgttggtatgaattatggtgataaataattatacttggtgagccatgcaagtggaattgacttatgtacggtgtattttttacataagtttcattgtgagtttagagattcatacttgtacatgttttgagagtattgttgtggtattgaatgattaggattttttttctcaacaagaaaaacactgaagttcttgaaatagcgtaaaaggtattcttaacaactgaggtaagaagagtggacatctgtgcatagggtgtatgttgaaacatacgaatttattataagtttgatgttcatgtgcttatgagattttgtattatgaattgttgtttatgttagtattgttagcatgtgatagtgataaggcttttaactgtttgtgtgag

SEQ ID NO: 31108 - DNA, 1746 bp, Cannabis sativa
tgattctcctatccacctaccagggataaaggcagactggagaggagagaccaaatcttccatgagcggccttagtctattggataggatcttcgcgattaccttgtaggagaaattacagagacttattgggcggaaccggtccatactcgaagggtactccactttagggataagacatataaaggtgttgttgagtccgggatcaatgtaaccacactgaaaaccttccttaacagaatcacaaagacaagagcccacaatgttccaatatttcctaaaaaaacaacctgagaacccatctggtcccgaggccttcaagggatgcaaactgaaaaacaactgtccttatctcctcgttagaaggaattttcacaagatcttcattcaattgagaggagatacgctttacaaacagatcttcgaaatcattatcaacatttggccgagaagaagaaaaaagatccaagaagtaggaattgatgacccttgctatacttttcttgtccttccaaatcttcccatctttatccttaatcgcccagatattgtttctccttcttttaatgacagtggctgtgtggaaatattttgtattgcgatcacctagagcaagccaaatcttcctggatttctgcctccacatgctttcttgtttcaaccaggcatccatcaattgagattgaattctaaactcttcttccttgagtacatccgagataggttgttgctgtatccattccaatcttcgctccagattcttgatatcagctgtatttacatttttcaaattccttctccattcttgcaaggcctttcttgtactgcctacattctgcaatcgagaattagttgcaccacgacttgtagaacaccacgacttcatgacttccattctacaggaatcctcccacgtccaagcttcaaagaagcgaaaaggaatatagcctcttgatacaaataaatgagtatctagtaagatcggggcatggtccgaaatagaaataggcaaattctgtatccctgagccagaatattctgtcacccaattagcagagcacaacgctctatctaacctttctctgataagaccccctttgaatcttttgtttttccatgtatacttgcttccagtaaaacgtaaatccacacatcctgtattttcaaggaagtttctcagccatcttgtttcagcagaagtgactttgttgcctcctaccttctcttcttgatttccaatacaattaagatcacctatcaatacccagggagtttggcaatgattgacctccctttccaaactgctccaaaaaacatctttaacttgagtgtagggagtgccgtacacagcatacaacttccattgaatctgaatttgacaatcctaaactgttgcctcaaaaaaaccatcagccgcatagttaactaccagctttatactacgattccaaaataaacacgagcctcctgcaaggccatttgcactaaaacaaattgcttctgaaaatcccaagttacgagccaaaacctccatcttatctttccttactttcgtctccattaaaaaaatacaatccggcttgtattttttaacccaaaccattaaggcttggggtgtcgggtctctcgcgaggccccgacaattccacgataggcaccttcatggggcggttggggggcttggtaagggccgcctcctcgcccgagtaaaaattttgtgaactttccacttgtacctcaacaagg

SEQ ID NO: 31109 - DNA, 2422 bp, Cannabis sativa
  modified_base (242)..(243): a, c, t, g, unknown or other
  modified_base (621)..(621): a, c, t, g, unknown or other
tttaacatagtattatataaaaatatgatatataatccaatttaatataatacaattaatacaatacaatatgacgtttcaaacgaagccttagtttctagttttctcgatatttacgcagtatcatttattcccaagatcttaccaatatcactaattacattatctttttattctcaattttttaacaaaaaaaaaaaattaattataaggataaatatcattttggactctgtgttttnnaaaagttactaattggactttctgttttattaaatgacaaaatgaattctgtattttctaaaatggtataaatagaattctgaattgattttttttatcaaaataaaatttaattataatccgatctaaaagtactatgacaaaactgttcacattttttgtatctgttcgtattagaaattgtttttaagttggttatattaaaaaaaaaattgtcaaaattaagctcgggtcttatttttactattttggaaaatacaaggtctattttgtcatttaacaaaacaaaggtccaatcaataacttttacaaaacatatggtccaaaatagtatctactctttttataattagttcacatcaatatatatatatatanatatatatatatatataatgaaacattaaaaattttcacctcaaacctcaaagtggttcaattttttttagattcactcacttgttattaaaattggttaaaggatttttgcccctgaactttgacatgtaccaaattatgtcccctaaacttttatggtcgttaaaaatgacccctgaactattaagattgttggatttaatgacttttatctaattttattcaattttactatttcagtgattgtttataaactaaaccatgctccccagactttgatactaaatcatgtcccttgaatttcgatatatactaaatcatgtcctttgaactttcatccatgttagacttttttactaaaattggacaaaagtccttaagtccaacaatcccaatagttcaggggcatttttaacgaccttaaaagtttaagaggcaaaaatcttaattagccttaaaaaagatatacattttatactaacttaaaaaattcaataaatattaaaaataatatattattttgtggcaataaaattaagtgtgatgatatgattgtattacttgtatctttacaaaaatttaaatatataatattagtggtatttttgtaacttcttctcatagtctaatttcttgaggttctgcctatgtattctctatgtgttctattgtaaacatattattgggatttttaaataaggtgtctaaaataacatttttttttctacgaacatgttttatttttctatggatatttttttttttaattacattcttatggagtcttataaaagtaatttaaaaataacgtgtaaacaatatagtacaaatataaaacaaaataaaagtataataaacaaatgtataatgttgttatgaaaataatgtaaaaaaaacaacagtctatacttgtgtaaaaaaagaagttcaaattcgtaaaaaacaataataaatctgcatttttgtaacttttttgtcatttttagttatttatgaaaaatatttgcaggttgtggcagagatggttgggacatttattttggtattctgtgtatgtgctattatagcaagcacccagaagattaaaggagatgtgggtctgttggagtatgcaagcacagcaggtttaacagtaatagttttgatcttctcaataggctccatttctggtgctcatgtcaatcctgctgttactatagccttcgcaatcttcggccatttcccttggcccaaggtacatatactttaacttaaaactaactacataactatatacatataaaccttgtcgtttatgacttgttttcttatcatctctacaaaaggtcccactttacatatttgcacaaaccgttggttcgatattggcaacatatatagggacacttgtttacaacatcaaagccgatctgatgatcacaagacccctacaaggctgcgttgcagccttttgggttgagcttttagcaactttcattattatgttcttggtagcctcattaacttgtcacgctcaatctgtaagtaaacaatttctaaaaccatatgcattgatttgcctaatttatatttatatcatataatttacattttaggtaaaaataccctttttttcatcttctttttcagatgggctatttatctggttttgtagttggtattgctattggactagctgtgctaatcacagggtgagctcaaaaattctacttacacataatgacaatttggttaaattattcttgctaatatttttgtattgtgacatgtgtatattacagacctgtttctggtgggtcga

SEQ ID NO: 31110 - DNA, 1275 bp, Cannabis sativa
  modified_base (709)..(709): a, c, t, g, unknown or other
attttgtaaaattgactcaagggaagaggacagtggccgagtatacactggaatttgaccatttatccaagtttgttggcgatctagtactaacggacttcactcggaaaatagaaacatgtaaggggagtgaatgccacaatcagtcgagacttgaaaattacaaccgatcatgatacattacacaagaaagtggtcgagttagcattgattgttaaaaaggctgaataacatgtgatcaaagaacaacctgctaaggatgccttcacggtatcgaaccctagtgttggtggtagtgtaagtaaggggaccaatagtggcaacccagaccacaagcggaagtttgaagctttcggaacaccggggaataataggaagttttatgggaactaaggcggccatcaaggtcgcaggtcttcgtttaaaacttacatggagtgtcccaaatgtaaaaagcaccatcagggtaagtgtcgagccaaaacgtgtttccagtgcggtatggtgggccattttattagagactgtctacaatccaagaacgaagaaccaaaaaagaactacaataaaaatttagggagttttttcactatgactcaggctgactctaatgctagtccatcagtggtaacaggtcagttgactataaacggttgttcttatttagtattatttaattcgagtgctactcattcttatgtatcaagtngagtaatagagagttttcataaactgtttaatctgtatgcttcgaggtttgggaccatgttaccttctggagacctaattgtatctactcagtggattaggtctttgtctttttggattgatggttgtgaattaaccgccaacttaattaagttacaattatctgattttgatataatcatgggaatagatttcttgtctaaatacggggcaacaatttattgcaagcggaagatggtaatgtttaaacttgatagtgctaacccaggggtgtttgtgggtaaggtacaaggatcacgcatacccagaattacaatcctgaaaggtagagatttaatgcgcagaggttgcatagaattcctagttatagcagtggatactagccagccggtttcatctagacttgaaaatatgagattggtgtgtgagttcctagatgtatttctagaggatttacctggattaccaccttcctaagagactgaatttgttatagaattagttctgggagcgtaaccagtatcgaaggcaccttatcgaatggttctagtggaattaagggaatta

SEQ ID NO: 31111 - DNA, 1743 bp, Cannabis sativa
aggttggtcacgacctactgaaaatgacgatgaaagtaatactaaggtaaaacctgaacttaattggactactgaagatgaaaaattatctggttacaataataacgctttacatgctatttttaatggtgttgatgaaggctttattaaattaataccatcttgtgaatctacaaatgacgagtgggaaatccttcaaactcagtttgagggtaccactgatgtaaaaagaccacgttttaccatgttgcaaactatttttgatgaattgagaatgttaaaaactgaaactttgtctgaattttatgaaagattatctgatatctctaatgagttttttttgccttgggagaaaaattagatgaatctgtgtaagttctgaaaattattcgtgtgcttcctgatagatttgacacaaaattacttattatggaggaggaaagattttagcaaaatgaaggttgaagaactcatgggttctttaagaacttttgagttaaatcaacaaatcaagaaaaagaataagcaaagcgtctcgagtgagaaaagcaaaggtattgcttttaaagtttctgaaattaatatttatgatgatgaaatgcccttgttgataaagaattttcaaaaatacatgaaatctgttggaaataaaaggatttattcaaaaactccaagaggtatcaacccttctaaaccttttgtctaacaataaaaaaggtattcaatgcagagaatgtgaagggtatggtcatatttaatcttattgtgctaatacgtaccttgaagaaaaataaaaaggattttaatgttacttggagtgatgattctgaaagtagtgaggatgaaaatgaaaaaaattactttaacaagtgttttgtcaagtggtttgtaggaaaaaggaatgttcatatgtttgaataacactttgactgatgacaaagggaaaaaagatggatcaaatttagatgagtcagaacttgatgaaaactctttggctgaatcttacaaggtaatgtttggtaagtggttaaaaatttgtgctgaaaatcgttcctcgattaagtgaataaagatttatgtcaacatcaatgatcttgaaaaagaaaaataaatgttgtgaatctgatttgattttaaaagattatgaaattatctctttcattgaggaactcgaaaatcttaaaagaaatatcaaaatgctaaatccaagttccaatatttttgaaaagattcaaaattcaagtcaaatgagtcatgctagtttaggttttgtttcgactcaatcaacatctaataccaaatttgttaaatctgatgtttttgtttttggaagttatgtctctaccttacaggaatcataccaaaatttgttaaatctgatctttttgtttttggaagttatgtctctaccttacaggaatctgttaattcaagaaaggacagtactgctgatatagaaaagaaatagcacggtatcagttttataattttaaagggaatagaagacgattcacttctatttgccatttttttagaataaaaggccacatttaacctgaatgtgttactatacaaaatatatttaaatctaattattttggaaataaatatgtttctcaaaaacaaaaatgagttgttaaaaataaatgcttagtaggggtgtgcagaaagtcatccaatccaattccaaccgaccgatccaatcctaaccgatccaatagaatcggatatccaatcataatt

SEQ ID NO: 31112 - DNA, 2212 bp, Cannabis sativa
  modified_base (2052)..(2053): a, c, t, g, unknown or other
atgtggagatgagaattatatatatagttgtatatatatatattcaaatgcgtgtaagtaaatagttataaacagaaactaagaagtacatattatattgaattgtgtcaacgaaagcaaactcacacatggagtttgtttgaatatatatatatatcatattaattgtttgttcctactatgatcgaagcttcttatgcaaatatagatatgatcatatgtagactaagtctataaaagaatatatgtgcataataattaatatgtatttatttgaattgtttttatttattatgattagttattaataatggggttaggttgttcattaatttgttgcatatttgcatgcatgctttcatcataattatgtgtgtataatattataatatgagaattactaaaaaaaggtgttattgttctcggtgttatatctttattggtgtaattaagtatcggtaaaaaaataatttataaaaaatataactaaccaatcgtgagacaccacctataaaagatgttaggttccattggtacccaataacaatactcatattataaatagagcattgctattaggcactagtggtgcctagcaccttctcgacatgtcgcattgcgattagttaacgatactccttaaaagttattatattaaattatatgggattcgatacttagttgaaccaatagcgatattaacacgtaggagggtgctaggcaccactgatgccctttaacatttctcttataaataagttattgtagataagttgtggcagaggtttattagaattacaaactccaactaggcaccttttgcatatgtatttttgtaattttttttttttgttatttttgtttatttgtgaaacaatcccctatatatatgatttccatcaatattaggattagaaggatataacatagcttttacaattagtcttctgaatttggtaaaatttcaagctaagttatatatgcttcaaaatgctcatcatatataatacacacatagattaattattttaaaagaaaaggaaaagaaaatgaaatcttagaagaaaagatataaatattatatatttatataatttctgaatttattgaaaatatttggacttaattaaagggaattataaatatattcttagattatatatatatagctatatggaaatatttacatttatttgatgaaatatatattcatttgtattaccaactcaagagaaaggtagaattgtgtctctaaaattagaagcatcattctaatgaaagtgtccttttgacattaatatataaacaactatatttacagttaatatataaattacatttcaacatcacacaccattttcaaaccaataaggtcagtttagataaatgtgattattactttttttttttttttttaaaaaaatcaatatatttttagtttaattttaagtacacatttaattactcatagatatattcctacctcatttaacaatgatttaatataggggaatcagtcaattgactattttttgatttcaaaagaaaaatcttggtataaatcttgtttaatttcaaaataaaatattcatatcactaattttatatatatacttgtggggaagtaataaatatcttacatttcaaattaggtggtaaaaatccaaaagataaatatatagtggtaaaattacataaattactattttttgtaagttttttagttttgtgtttacatttttacggtattctataaaaactgaagaaaacaaaataaaggtaacaggaaaataacatcaaaacaaccacaaaataacatcaaaataaatatacaaatagtaaaaaatcaacaaaaagataacaagagtacaacgtaaaaatacatcaaaagatcgtattttatgtaaataaaatcttaaaaattgtaaaatagttaaaattctgtacaattgtatttttgtaatttttttcgttgtttttgtatatatattttaagtaatcccaaagctaaagagaaatttacaaaaatactgaaatttgggttaacttttnnaaaaatactgtcacacgaaaaagttttccaaaatactgtaaaatacaaggcagaacaactcaaaacaatagtagaacaactaaaaaacaccagtaaaatactagtgaaaactgacagtatactgcagtatgaaagttataaaaaaatatagtaaaaaaa

SEQ ID NO: 31113 - DNA, 1977 bp, Cannabis sativa
  modified_base (49)..(49): a, c, t, g, unknown or other
ttacataaaaatattgtataaaatacaatttaatataatacaatacaanacaatacgacctaatacggcattccaaacgagcccttaaattgcaattttgtgaccaaacgattatcggtataaggaaaaacattttaaacttttgaataaaacaaaaaaacagaccacatgtccatgtattagctacaattgagtaagaaaaataagtgtaatagagagatatttacttttgttaaggaaagaaaatatccttaaattggtgtcatctgttctattaattattttataagtacacattatttatacctatttaacacataataaattccttaaaaaactctgttaaattaatacatgtaaaataagtataaataatgtgtcctaaaattattagtgaagacagaaaaagcacaccaatttaagacaacaattttttttgcagtgttaaattctaatatggtattttaaacaataaatacatttacgttttgagatattagaatataaaactatcatcttgcttatacactattttatatataaacatatctctcaaatttacttatggttctattgttgtttttttatttattttttaaatatattagttaatagtaccatgcaagttgtggtgcatacgcagcacaagttgcatatatatatatatatatatatgtgctatatatatgaatgtcatttccattaattttcccaaacacttgatcattactttctacaaattatgtcaaatattcaacatcaaatcttattatctttgtctcaaaataataataataataatgagaaaattattatacacaaaaatgttgttgttcgaccaacaacaaaatttcacccttctatttggggagatcgattcctccattacaatgcatcacaacaagacttggtaagaatatcatacatactatatctataatattattatttattgataatatatactaaccactttaattatatatatatatatttatatatatgattaggaatgcaaagaacaacgagtgaaggaattagttgaagttgtgaggaaagagatgatgatgatatcattattatcaaatgataataataatattaatgatattgatgagttgatgaagtcaattgatagtgttcaacgtttgggattatcacaccattttgagactgaaatagaacaaatgttggaaaggctttaccaatattattatcattattctactacaaaacatgatcatcatctacatcatcattctattatgtttagactattaagacaacatgggtttaaggtttcatcaagtaagtataaatttttatatataacattttcatatatactatatataactagtgtatgggtataagtgatgatcatgtgtattattattgcaaaaatgtattatatatttattattaaagaatgattctttttcttgttttttttttgttagttatcacttttctaaacaaataatttaaatattgtatgtttcattaatttactactattattattgtaagttgtgtcccaagacaaaaagaatattattgctttattgggagcaatctataattgatatttttattctaaatattacgtactattattatatagtgttcaacagcactataaatgatgcttttataaatagttaacctcattttattataatcattactaaagtaataaaataagtaaaatttgatatatattgaattactctaagagtaatatatgatactttatgctagtatatgatacgtaaaaacatattgctacataagtcgaggtttttttattcttttttttctgtaataattttaatagtgttttatatattaaatgtgcaggcatatttgaaaaattcaaagacgagaaaggtaattttaagaaaagcttgataaccgatgtttcgggtttgcttagtttgtatgaggcttcctacttgagttatgttggagaaagca

SEQ ID NO: 31114 - DNA, 908 bp, Cannabis sativa
aattttctccaaaagtcgtgggaatgttcattggaaaggcacattatgtgctttgatcagaggagacctaacacccatctatctgttaatgatttgcttgtaaacagatatcctacatcagggacccaaatgaacaccagacccaatatttggacaaaggtgatgaggcccatgtactacttttgagcccatgtgagtgtgttccttattaacttggattttgtgatccgaagaaaatatcgtgatacaacattgggaatagggagaaagtgagtgggcaaaagtatcaacatcggctgtcgaaactccgacagcagcaatgagacacacagtggcatcctttgtcagaattctaggcacatcttgttgtatccagcgtttgcaagatgaccattggaaagcaaaggcgacatctgtgtttcaatcccagcgagatattccaaggtctcaaaagcttggaaaccccttgaattatgactctgtttatcaataaaagattcatcctagttatttaatcttctagtgtgtatcaagcacattaaacatgacttggtgagtcgaaaagtgtgtgccacattgaagcacacagttagaggatagaacaataaaagttaaacattcaaggtaaccaaatgtcaaatcattaactgccatattaaaaactactttattgagagaaagttattacgctgcatcaggagccacaccataacttcctgcaccaccccctggtctctgatttggctcacgacaaagccttacattctttattgaactgcaagttttttcaatcaatttatcaaatgacgtcaacttcatttgtgagaaatcctctctgcaagctggaataggggatagaggaaatccagctcccacatgcttgttgttggtttctagactgaaatatt

SEQ ID NO: 31115 - DNA, 1251 bp, Cannabis sativa
aataatgtagctatcatctcttaacgcggttaaagaaagaaaaaaaaaagaaccaatattgccaagtagagatgtttagccgaaatccattattaatcactctatacttctaacagaggagtatcactataacactaattgcttgaggatgcccatctattctaataaatgtcaagagcaacctccaaaccaaatgacatgctaatggagatacaattaaaggaaatgccatacctccttgaaaagaacatcctctgactcctctgggctcaactctgcaagaatattgatatcaatattatactagtgctcacgatgtcaatcattataatactttgaaccattaaattcaaagataaaaaatagagaatgtaacctcccctactccctatgtgttgtgagagacagaaagaagaaacataagtattcgataataacaatatgacttaccaattgcctccataaattttggatcaccaggtgatttgaaatctgaaactaaatgagacaagagtattatgaaaaacatcaaagacctataacttgaagatctggacaaacaaaatggtaaaaagtccagtgtttcctaacagattttgcatacatcaaatagaagaattatcagtaaacaatggtctacataataaacagtataaaatatatttctgggtgtagttgatgaaagaataaataaccatttcagacttctttcccaccatttttttttaatttttcttttcttttgtttttttggccctggcagtttgacccggagaccacccagtggaaccaaggattttgagtctgtggagactcaaaccttggaacaaatgcttaccaacacttttcatcactccttaacactagaccacccaccaatattgacccacaaatgaagaacaacaattactagcaatacatcccattttaatatgtaaacaattgtctccacaacgtggtgtacataatttaatagttcagctgactgttttggaccattaatttttcattttgggagataaaattgtttcaataatttgacaagaattgaagacagccaaaagtaaccaagagactccacaaccagtaatgataagtatttgtcaatctctatttgttgtaaacataaagtgtctctaggtgacaaaatcaaacctgaaatggataatcgagcagaatttgggcgacgctgctgggccaatgcaagcacaatagcatcctcaaccttcaagttgcaaacataagatatat

SEQ ID NO: 31116 - DNA, 1004 bp, Cannabis sativa
ttatcctttgattcctcctataacgatattctctttgatgtgcattcaaatttcaccttcactcttcttcatccaaacaacatactcggcacttcgtaacgctttcacgctaacgggcttgcatgcacacgcacacacgcatgcttgcaagcacgctcacggatgcacacgtgcatgcatgcatgctcacattcaaggcccgatctcgcagccccttgcatcctcgtagcgtcgcactcattcacgcttgtatgcaagccctcgtctcaccgccttgcagcctcacagccttgcacttgcatgcatgcacgctcgcatctgagcctccgtctcgccgtcttgcagcctcacagctgcgcatgcaagcccctcacatagacgttaccatggcacgaacggatgcttcaccgtggctcgcacggatgctcctccacttgcataaaggctccacgactcacccaaatgctccccagcttgtccaacggctcatgggctcgcacaatgtctcatgaggtcgcacaatagctcatggactcgcacaatggctcaccgccttgcacattggcacatgggctctcacacccagttgtcacaatttagcggtcttagtatttttatcataaatatcttgatatattttgaaatcagacgattcaaaatgtgttggaaagatgagaaagagtctatgaattttatatttatgacaagatctaattctcaatgcatcattatgaaaattccccaataactataacttagtaagttaatcttactaactctgcttgtgagttattatgggattgacctcttcgagttgcgtggatataccctgagatttgcaagcattgattctcgagattaacgagccctggaccataagaattaattcagtcttttttcggccgactcataaagtcgatgtctctgtactaagtgtttacttaatcttaaaaatcacttccatcaattttcgggattaaaatttctcctctctctctctctct

SEQ ID NO: 31117 - DNA, 2417 bp, Cannabis sativa
ttttttgttgtttttgtatttgtgaaattatcccttatttttattttacaattgagttattgtctagttgtcattgttatttaattttttagcttaaaaaaataaatatatatttaatttttgtatgaatatacatattttataatttaaaatatattttgttttagatattcttttgtagatttcatttagtaatcttgctttattaattttttattaaatatttaaaataataaaagtgttggtcatataaataaaaaagtgttggttatatattgctattctattttttttttatgatcaacacacctcttgattaacagtatgttcgtatttttgaaaaaaaaaaagaatcttgtataaaagtttaaatatgcatgtgtccgtatatatataaacattaggtcttttttgtatatttaagaaaaaaattcctaaaaacaaatacagtaactttaataattttttttaacgattaacactgactataatcaaatagtcaaattctaccgcccatgccattatatatatccttaaacgattgaaaataaaactagtatatataaatatacatatgcgactggtatcggtaaatgattaaaaagtttgcagcatcacatatcacttatcagtcgcgcatatatatatataaacaattataattaataaaacatgtactcatcaaatacaaaaataatttaataaaagatcaatatcactataaattctcaagaattaatttagggatgctctgataccacatgttagaacactataaatctaaatttagccctaattaattcatgagaaatctaactatagaatcaaagataagcagaagcgtaccggagtccattgaatcgtttgtaaaaggtatgatcttccaatttgcatcaaaaacatttgaaaccttattttcctgatgatggggatttatggattctaaaaatacgatacgatgcaaatggggaccatcacctgttatattaccaactattaaaacagttagtaatgtttataacctatttataatttggcccctccaaattagaaattatctaattggaatccacatattaaaatcatgacaattatgcccttaagtcataaattttattttaaaataaaccacataaatttgacttatttatttgatgacccaatacacattttatatatacaattgtgacctaatgataataaatttctaacagacaaaactttataagagtacaaatcttaattattcttttttataataaaaagggggtttattaaaaaggaggggatagttgtttcagattttagtgtgaagtgttatcttcttctcttccccattttttctttcactatttttttttaaaaaaaaaaattggatcgttgagattgaagagatgctcttatttgacaaagaatttatagacaacgcagatcaagtttatttgaccaggtcaggttcataatcttattgtaaggtaaccaaatgatcaatgacttcacaagattttgttagaggtatgcagctgcttattttacaaatcgtgatttgttttcatttaggaaaaacaatttagacaaagccaaaaacagtgaacaaagcatataaatggcaaaagtgttgaaaatgtccacaatcttctagaccaactattaatttgcaaaattctattgctttaaagtcaatatcttttgtattattgcttgagaaattagattgcgacacaataacaaaaccattattctttcatttatttcataaacaatttgaaaagttcttcagaggtatacttcgctcccacatagatacatacatatacattaattttcctcttaattaaaaaactatacatatggttatcgtgtcacaatcacttcattatttattttaaatgatcacattactttcgttaagttagtataattgttattttatcaatttagaccgattataagaccatgaagatctaaaatttgtgtttggcacaaaaaaataaatttgtgctatatttagctcattatttataattgtgctcaatgaacaagatgtaagataaaggaaaaacaattgattatattgatggtcatttcatattttattaaaaatatacaaaattaattattttttattcttttattatttaaataatggtaatatgttaaataaagtttaataaaagtcaattaatcacaataattaatgacattatagtaaataaaaaagtagcatttactgtaggttaaatttgacacaatattatatcttgtggcacaacttttagtatatgtcaaatttagcacactttttaaaatactattagagtattagagtataatttttttaagtgtgctaaaatatagcaatacactattttttttaggtgtcctaaagtctataatttgtggtggtgtgtgtggcc

SEQ ID NO: 31118 - DNA, 4391 bp, Cannabis sativa
ctaagtagttctctgaaaccagtgtgaattcgagtccctcctgttcaacaaagaacataattcctgaatttctactcgaatcaagatcgagaaaaggaagttttccaatcattgactcaaacccattgtcaaaccccactcatcagaatatggaggtacttatggcagaacgggccggtctggtctttcacaataaagtgatagatggaactgccattaaacgacttattagtagattaatagatcatttcggaatggcatatacatcccacatcctggatcaagtaaagactctggggttccggcaagcgactgctacatctatttcattaggaattgatgatcttttaacaataccttctaagggatggctagttcaagatgctgaacaacaaagtttgattttggaaaaacaccatcattatggaaatgtacatgcggtcgaaaaattacgacaatctattgagatatggtatgctacaagtgaatatttgcgacaagaaatgaatcctaattttcggatgactgatccttttaatccagttcatatgatgtccttttcgggagctagaggaaatgcatctcaagtacaccaattagtaggtatgagaggattaatgtcggatccacaaggacaaatgattgatttacctattcaaagcaatttacgagaaggactgtctttaacagaatatatcatttcttgttacggagcccgcaaaggagttgtggatactgctgtacgaacatcggatgctggatatcttacacgcagacttgttgaagtagttcaacacattgttgtacgtagaacagactgtggcaacatccgagggatttctgtgagttctcgaaatgggatgatgtcggaaagaatttttatccaaacattgattggccgtgtattagcggacgatatatatataggaccacggtgcattgccgttcgaaatcaagatattggtattggacttgtcaatcgattcataacttttcaaacacaacccatctctatccgaactccctttacgtgtaaaagtacgtcttggatctgccgattatgttatggtcggagccctactcatggcgacctcgtcgaattgggagaagctgtaggtattattgcgggtcaatctattggggaaccgggcactcaactaacattaagaacttttcataccggtggagtattcaccggaggtactgccgaacatgtacgagccccttctaatggaaaaatcaaattcaatgaggatttggctcatcccacacgtacacgtcatgggcatcccgcttttctatgttctatagacttggatgtaattattgagagtgaagatattatccacaacgtgactattccaccaaaaagtttgattttagttcaaaacgatcaatatgtagaatcagaacaagtgattgctgagattcgcgcaagaacatccacttttaattttaaagagaaggttcgaaaacatatttattctgactccgagggagagatgcactggagtaccgatgtatatcatgcaccagattttacgtatagtaatgtgcatcttttaccaaaaacaagtcatttatggatattatcaggaagctcgtaccgatccagtgtagtccctttttcaatccataaagatcaagatcaacgaatgtttattttctttcggccgaaggaaaaaatatttctagtcgatcagtaaatacagtaaataatgatcaagggaaagggaaattctttagttcagatttttctggtaaaaaagaaagcactattcctgattattcagaatttaatcgaattatagatagggatcattggaatttaatattcccctctattctccataaaaattatgatttatttttattggcaaagaggagaagaaatagattcatcattccattccaatggattcaagaacgagagaacgaactaatgctccgttccagtatttcgattgaaataccgataaatggtgtttttcggaaaaatagtattcttgcttattttgatgatcctcaatacagaagaaagagttccggaattactaaatatggggctataggtttgcattcaatcttcaaaaaagaggatttaattgagtatgtaggaatcaaagaacttaagccaaaataccaaacgaaagtagatcgattttttttcattcccgaggaagtgcatattttacccgaatcttcttccataatggtacgaaacaatagtattattggaataaatacacaaatcactttaaatacaagaagccgagtaggcggattggtccgagtggagaaaaaaaaaaaaaggattgaacttaaaatcttttctggggagatccagtttcctgtagagatggataagatatttcgccacagtggcatcttgataccaccgggaagggtaaaaaaaaaaattaaggaatccaaaaaattgaaaaattggatctatgtccaatggatcacacctaccaagaaaaaatattttgttttggttcgacccgtaatcatatatgaaatagcggacggtataaatttagaaacactttttccacaggatttgttgcaggaaaaggataatctagaacttagagttgtaaattatattctttatggaaatggcaaacccattttgggaatttctggaactagtattcaattagttcggacttgtttaatgttgaactgggatcaagacaacaaaagttcttctagcgaagaagcccacgtttactttgttgaagtaagtacaactggtctgattcgcgatttcctaagaatcaacttagcgaaatccaatatttgctatatcagaaaaagaaatgatccgttaggttcaggattgatctctgataataggtcagattgtaccaatccattttattctatttattccaaggaaaagattcaacaatcacttagacaaaatcaaggaactattcatacgttgttgaatagaagtaaggaatctcaatctttgataattttgtcatcatctaattgttttcaaatgagtccattcaaggatgtacaatattccaatgggataaaagaatcaattaaagtagaacctctaattccaattaggaattcgttaggccctttaggaacatcctctcaaattgagaacttttattaccttttaaaaactcataatcagatctcggtaactaaatatttgcaacttgacaatttcacacagccttttcaagtacttcaatattatttaatggacgaaaacgggatagtttataattccgatccatgcagtaacactcgtttgaatccattcaacttgaattggcatttttttcataataattatgataataattattatcaaaaaaaatccccaataattagccttgggcggtttttttgtgaaaatgtatgtatagtcaaacatggaccgcacctaaaatcgggtcaagttataattgttcaaatcgactctgtagtaataagattggcgaagccctatttagccactccaggagcaactgttcatggccattatggagaaaaactttccgaaggagatacattagttacatttatatatgaaaaatcgagatctggtgatataacgcagggtcttccaaaagtggaacaagtgttagaagttcgttcgattgattcaatatcaatgaacctagaaaagagagttgagggttggaacgaccttctaacaagaattcttggaattccttgggggttcttgattggtgctgagctaactatagtgcaaagtcgtatctctttggttaataagatccaaaaggtttatcgatcccagggtgtgcagatccataatagacatatagaaattattgtccgtcaaataacatcaaaagtggtggtttcagaagatggaatgtctaatgtttttttacccggagaacttattggattgttgcgagcggaacgaacggggcgtgctttggaagaagcaatttgttaccgagctatattattgggaataacgaaagcatctctaaatactcaaagtttcatatccgaagcgagttttcaagaaactgctcgcgttttagcaaaagccgcgttacgcggtcgtatcgattggttgaaaggtctgaaagaaaatgttgttctaggggggatgatacccgttggtaccggattcaaaggattagtgcactgttcaaggaagcataataacattcctttggaacccaaaaataagaatttatttgagtgggaaatgagagatattttattccaccacagagaattattttctttttgtatttcaaagaatgtacaggatacatcagaacaatcatttataggatttaatgattcctaacagcagactcatcctttttgtctatttgtggttgcagtcatttgatttggtaatagtaata

SEQ ID NO: 31119 - DNA, 2965 bp, Cannabis sativa
tgtatttagaaattaccactttttggtgataaatttgagctttgggatcttttaattatcttttataaactttagaattttaccactttttttataataaaattaatctttgggatctttttattatcttttataactaaaaagatggtttggctgatattttaattatttattttaaaatttggaaaataataatttatcttttatgagatactatgccaaatttaaatttaaattggtcaaattaaaatttaagataatatctctgatatttattttataattcaattcctatttgaatcatatatttgaaacataatatataatatacgcggtttattttgtacactggtgaagcacgtatatacatattatatatattggtatatgtacgacttcagtatatatatatgagtttatttcacccattgaaaaaaccattggaaaaaaccttgaccttccttttcaaactgcagtgccatgattaagtaagtatttatcaattttttttcgtgtgtcactcgtatatatatatcctctctttttttacttcttgatttcgaggcatgctcttagaattttaagaaaacttataattttctttgaccacgtcagatccatgaactcatataaatatatatatgtatatcgcattcaacatatgtataataattaaagtataagagatatatattcgacaaaatgtaaacccatatagtatatataaaatattatactcatatatatatatttttcaggggttaatcaattcaacattactgactcatatatatacttaaaagtgttaatcgattcagcgatttcattgagttttttttatcgcaacttatttatgtatattcatcaactggcacaataaggtatagacaatatgaattgtgtaatatttttttaatcaaaatattaacctcgcttttagccaacgccaatgagtctaataataagcgacaaagaatatgatttacgaataatataagcaaataagtaaagaacacaagatttttaaagaggttcgaccccgttcagtttggtaatagcctactccccttgatttgtattaacttaagagcaaagaacacagtgtttcctctcttgaagctctcacaataaaatctctgagtatgctctcttagatctctctaaagtaattctttcaacccctttaccagtgagaattgataactatttatagggctacatggttgagggaaggtttcccttttgcttacaatatctataattggtaagaacatatattacatatttataataatacacagattgtgggatttggacagcttgccatatatctgtgatacgatccaataattatagggattgctcttgtgcttcgcgatccaaattcttgaattgtgaagtgttgatgcgctgctcggattatccactactagtctaggaagacaatgtccgtgcaggtgtatgatgtgccctgttcggaacatctctctcaaccaaatatggggaatcaggtccacgtgtcaccatcagatgctgccacatcatagtgcaaaaaatggaataacatttgccccccaagtctgcactggacttccgaagttacgcgtagacttcacttgagctgaccttacatcctaatgggtgacatgtgttgaatgcgtctattcgtgattcgatgagattttgaccaggagtcccttcagtttttggctaattaatgctctgatcaaatcgttcctcgagacgcgcctttcactcgcacgcttttgacggttactcttctctagtacttgattgcttttaattttgcaatatttgctttttggagggaaatggaagcgtttgagattttaattgattacaccctttcagaaacttgcttataaatagggtggaaaatcctcataaactattttttttaccatttttctcactaagtaaattcagagcaaaagtagttttctctcgacttcatcgttgaattttcgcaaaaagattcgaacagcttcatccgaacaacatcaaagcttcaaacagtgagtaagttttttatatttctctcctttaatttcgtatcttcaattttctgggtttccattgtagaaaattcaattgttgttgacttgttcgaggaaacatatagaaaatctacgctcaagacttcgtactttttactgtaatagatcatatgacttcgttgtttgtgacattctgactttaacctcacaatgtttgatcttcactttgcccattcaaggcttagtccgcaaccctaattcaaaaatttcaagctcctaggttacgaacttaacctttacatgtttttcatctttttaatttgtctagtagacctggtcggtatattttcaagtttctattcgatatcccagccaaatactcatctcgtgtattgtcttttgtagatgaaccctggtgagtttcggggaggcgtacacaatatcgactaggatcttcttctgcttttatatgaggaccaacctcgtcttcacgccagtccgtcctctttgagcgacgaactctctaactcaagtttcgaagattgggaagtgagtagtgaaagttcacctactccaaaactcgaggtccaacatcacttttactccgaacagatcacaagagaaggctacggaaaatttgtttgggagcttaggatgggttgaagatgttatctcccatccaactggacttatatcgtccgacttggtattgctgacactattcgtgtaggtcttccaagttttggtgccttcggcattccaattgctgctcctgccagaaaattaataaaattgaaaaagatgaggaggaagatgatggcccgcaccaaacagacgatgcagagaattaatgcaactaaccctcacgtggcccggcatgccacactaccgagtgtcgaacaggatctgtccactgcggaggaggaagactacgatggggatgttga

SEQ ID NO: 31120 - DNA, 1494 bp, Cannabis sativa
ttttttcggtggtggtggaggctgagggacgctgaagatgtcagaggaggctgatcgacgatggctatggcagactgtagattgcgtgcgtttagttgctatggtggaattcgaagtggctgcattggggactgaaaagaatttgatagatatgtgagggtatattgggtaattcaattataaaagaaagtatattttaagtaaatttattttgcaagtatttttagttaattcaattataaaaggggcacttatcaacttcccccaataaatgggcccaagacgaattaaattttggggccctaaaaaatatatatataaaaaaaaatataaaagaagagtattatcagatttgaacccatgaccttagacattatgtcatcaacctcaaccaactaaactatcaatatttattgtttataatacacttaaattttactcaaataaaagcctaataattttttttttattttgggcccccggaaagtgtgggtcctaggcacgggcctagcctgcctatgcctagggccgaccctgcacctagcaggtgtactattatatgtatatacacaaatactcaatattcagaataataacaaaattaataaaatctataagaaaaatagaaaaatcaataattaataagcaaataaacaacaaactctaataaaaactatcaaattgaaatttttattcttgtaatttcaagaagaagaagaagaagaagaagaagaagaagaaaatgatgaagacgatcttacaaatatcaattgaatgacaatggtggaaaggtaaggcttagagcttgagagttcggcttcaacagaaaaatcgtgagacttgaagggagggaagaaaacttttttttttttttgagggaaaatacttgttattattaaacaaataaagattcgtttacaacaacagagtatataggtggagagatagtctccaaccatgtacaagtctcatccacccctaatgcaaatttagcgagaccatgggccacattatttgcagaacgtttaacatgtgaaacaattacattaaggaaaaaggataaaagactaacaacatcaaatattaaatctgaaaattcagaatttgaactgaagggagcttgtaaagcattagccaccatgagtgcatccgtctcaatttgttgaatcgggaagttgttttgtatggcccaattgagactgtgaaagagagctttagcttccatttcatgggatttaaagttaccaacgatcgtcattgaaaggccagcaattacatgtccatttgaatcccaaaggacagctcccacaccagtaacataagaagaggcattgacagctgcatcaatgttgagtttgaaagctccaaccggcggtttggtccatggaataggagcaggtgtcacgtgagaggactggccaagattcacgattgcagaagcaccagcagcaggttgtttccgtttctgcgctgcactataattctgcaaaaaaa

SEQ ID NO: 31121 - DNA, 1796 bp, Cannabis sativa
ttaaatatacaaagaacattgggcaatctaaagaaacatggaaaaaaatgggttaaagtggaagaaaaaactatacaaaaaaaaacaaaataacaacaacgcttcacaagaaaaatgtaaaaaccataaaaatatgtattacaaaaagaaaaatcagaaaatactaaaagtatatataaacatataaaaactggttccatatattgtcaacataaaatcaaaatataaacataacataatgtattgttccaaaaaaaacactaaacaaaactataaacattgtatctgtccaaaaaataatacaaatatttaacaagaatctaacttcttcttcttggacttctttccctttggcctatcttcaatataatatcattcattaatcttcttctgggcatagttatacaatgtcacagcgaggtcatccctatagtgcgtaatcatctcatccatattaggagaaatctcattaatcttgccctagatgaatagattagcatacttaatcacaaatacaccacaatcactgaacacaaaacaaaaataattaacaaatacataaccagttttttaagcaaaaaaataaacaataaaaaatcacaaaagtcataagataaaaaataactagttatttaccttttgctttgagtggggagcttgtccacaaactcatatgcaattggagtatccttcggaatagcataagggcctgactccaaactaatgtcgttcctaccatcataaaaatttaagaaatcaaggaagtatggtagtaactcacagtacgcaaggagatcaggcaagatcttcttttgatttgtctttttattcttcatggaattgaatacgaagatcttcctccttaaaatgctgaagtgaagaaatatccaatgttgttgaagaccgacatgacacggaccgacaacatcatcaacactgatccaaggttggaaacaaaagttatattgccccagaatgtaatcggtgaccatgttgtcatacctgatgacattcagatcacgtttcgccttgataaaatcagcatacactcccttaatagttgcaacaaaatacgtgcatgtggtcatcactctcttattaacactggcatcgaataagatgcttttcctaagataatagagtgtcacattcagatgctacacaccataataaaaacaataaccagttaaaaaaaagcaaaaaaactaaacaaaataatatagagaaaaaaaataaccagttacgtaccagatcgaacaattcttcgccacaagtctgtaaaatcacaaaccaagacttgtcattgatctgagctatgctgaaatcaaagggaggatcaatgtcgccagctattttttcattgttcctgaaatcacaaagaaaaaaaaccagttaaaaaatatatatcagcaactattaaaaacaaaaataactaggacagaacaataaaacacatactgattcttcaaaaaccgagcaccttcgatccacttaacttattccccgcaatctttggtaccggtgttcatcacaatctctttaacaaaaggaaacaactccttagggtcaaattctaattcacaagatggctccatctccttcttattttgatcttttggttcagaagaaccaaactcgtttagaaaaggagatttataatgcaattcaggtttgcttgtctcttgacagcaacgctggattgcaaaggtagtacatctagtacctcaacgtcatcatccacagcaggggatgcaaactcaggaattgataccaaatcccattgatcattctttgca

SEQ ID NO: 31122 - DNA, 1185 bp, Cannabis sativa
atttagaaaagttaatgaaagaatatgtgactcatctctagatcctcttccggttccatattgttcgatccacttccaaattccaataatatcatatatgggtattgaattgaattagtataaaataaatttctaaacaattaaacatttatatttttaatcataatttcaatatgcctaacttagaacacttacaacaagtgaggtataataactaaaaggtaaaataaaatagctaagagtttaaaattgagttccatcaaatactttaaactccaagaaactcttctctacatatagttcaatgaattgtgaagaggtaaatatattttatattttttctttctattttttgtttctttaattaattttttattcatttgtgtattgtttttttttatttttattaataaaatatatgtaaagatataatatttaaatgatatagataaaaatataaagaagttgatgtaatataaagaagttaatgtatggtgtaatataaatgtgtgaggtaaaatagaaaaaatgaaattttagtgagatattttaaagaatagaatagaaaaaactgttgagattgctcttagcgtgtgatatataattatcactgtggatagcaattcgtattatcgtattatattttatgcagattaacatgtataagataactataattccattagtatatcgttcatgtagaaaaaaatcaattttaacccaacccatcgtaatcttatattgagatgtcaactatatacttatttaatatatgttgatcaatatgattagcatcaaatatttaatttatacatatgtatgttgttttaattatcaatttttgactcatttaaaaatatactaaataaaaatatatcaaattacaaataaataatattaattaattaagtaatttatcacattataatataatgagcaaaatttttaatatcaagtataaattttctatcttatattcttgtaagtaaattttttttaatttatatattttttgtgaaaatataaataataatttaactataaattaaaaaaaatttaataataaacagttggttcaattcgtattgatttcgtatacgttaattttgatccaattcagataattattgtgtcattcgggtttgatctaatttttatttggatttattttttatgactataatt

SEQ ID NO: 31123 - DNA, 1068 bp, Cannabis sativa
cctgctaattagaccccaatgaacatttctaaagcaacaaaacaaagcttcatgcacaaatacaaaaatcaccattgatgagcaagcgtgagttcaaaaactccaagcttgctcatccaactaattagcccttaaaactggcttaaatcacttcaaataatcataatataaatatagaaaacatcatttaatcacagtagcaagaacaacaagctaaacaacatttcaccataaaaaccaaagtttgagtttaaaactccaaacttgaataaaatccactaacaaccatcacaacttgttctaatccattcatctgaacataattaagcctaagaaaacaacaacaaacacatacagcaaccacaacatcaaaatcaccaagcgtgcaaaattttctttcttaaaactcaaggaaactagcaagaaagttacacaagggtcaccttagcttggattgaacttaaaatggatgcaaaacactgatttgaagcagcaaaaaccagaaccctagctggtactaagtggctcgaaaatgagagagagagaggagtgaaaatgcaatttttccttttctttgttttttgaaaaaatgatgaaataacatgtttttacttgaattaatttcagcataaaaatagttaataaaagtcgaaaaataaaaatgcaactaagtccattaaaggacaaaatacaaatgaggtaaaatgaccattttgcccctccacactaaaataacataaaaggggtactaagggtattttgggaaattctaaattttcgaccaatctcgacattcccaatgtccaactaaattgccccgctataataaaatactaagatgtgattctgctgaggcatacactgcgttccaatgttgccgggcactgaaaatgcaaaaatatgaaatttctaaatatgacatataaaatgcattctgaattcaaagaaatcatcataaatgattattttaatatcaataaataattttcatacttaaaccctaattatctgctaaattccaaatttaaactaagcggtctatacagtacgtatcacccagaccaaaag

SEQ ID NO: 31124 - DNA, 1362 bp, Cannabis sativa
  modified_base (1327)..(1336): a, c, t, g, unknown or other
aattgggaggcctccatgagcccattggctcttttccaagacagtgagtagtctcttcaggatgagtatcatcattttccttgttactagccatggggaaaagtttttctttttgtcaagagggattttttctgagcttatttcacgtaggctttcaatgaaagcaccaaactattaatgcagatttttgttaacgataattagcctattctgaaataggattagcacagaaattagttgaaatctaagaaaaaataataaagcaaaaataacaccatgtttttatgtggttttgcatttaactctgcatagtccacaagtcaatcttattcagattattctgatacaaactaggtttttttctctcaaggattttccgtcctttttcaatatattctgcccttatttatagtaacatagggtggtagttaattacaatcagattcaaatcccacaataatatttcttcgcaattgtgggatttaattacgtcccacgtaaataaatgaggttattatttgaaaatcacacagctgtgatttatccgcctttaatgggtcaatactgaggtggatttagatacgttacaaaccatatcttgctgggatatctcgctgggaacttagatggcaacaataaccctggcagcgagctggagcttttcccacatctttctgaggttgataatgtaaatcttatcgtttctacaattgaaaacataacgctccatctgacaatcgcagttcttggtgacaagatgaacttcagtagccaacatcatttgaatgtcagcttctttctgagagagctgactcgacagagtagtggatctcattgaaagatgtctgagctgattagtgaagatactaggagtaagacttcctataacaagatggatgtctcactattagttatctgggttctttaagttgttatacttagttagtataatgtatattatacgctaagtgtcctaacagtcgccacgtcttgttaacacgtttacacatagcgaggttgatgcctcggttatgcattattgatttcatcctttcgatcatgtcttctgacgcaaaatggtttctcgtcaacacgtgaattaatagttcgtacatccttgtctcactgaagactgtgcagtctccgagttattctatttaatattattttaatataattgccattatatttgttaatttgtaatctccaagagagacatgtgtcttcctttgaagtgccaaccagatttcgcgtataacattagtgcattcgatttacactaatatgataatcagcgataaaacttacttacaccttagataagtgnnnnnnnnnntccagaatattggcaaagtatgctag

SEQ ID NO: 31125 - DNA, 1391 bp, Cannabis sativa
tagtaaaatagccatacctcactcaatattgatccgatttacatgaatcaacttgcatttcgaagctatttcaatgatctatctcatgtctcacactttaatcacatttcttaagctatcgacatcaaatttcacccccaagaaagttacaaaaataagctttgaattacccgtagcgagtcccgctgcgctttgaaaaatgaccatcaccatcagaagctaattttcactgtgggatcatcatctatggttgaaaacatctaatttgtattttttttttcctattttttgggcccccatcacctataaaaggagagctccatgagctcatttctcacattcacaaaactacccataaggtcaaagcttctctttctagtttctctctctaaaaattggaccttctaacacttagcctatctctataataccatctcatgagaaataaaaactcgaagtaggtgtaggtccattacaatcgcgatacagggaatgaactactataaattaaattttctatgtctctcttacaattacttaacaactatttcattctagccaacctagagagtaggtgtggcttagaagtctagtcagaatttttgaatcaaaattttggtgctttcattgagagtcacaacttaagaaagttaccagcaggatggttgcaacacgttctacaagtgttgacagaagaattccaacaactggccaatcaactggggcatgccagttgatggagttggaactgagactactcctacgccccaggtgccaagagcatgccttggaactagctccttagctcttcttccaaggtcactgaatgctcccgagactggcaccaacgaccagatcccacctagggagcctcacgtagagactgatggccctgaggaggccaatcctcgagtcacccaactcatccaaaatgtggttgacttacaataatagctacgacactctattgataattaacacgaacaatttcaatactggttcatggataagtagaggaacattgaaagtcaacgagttgaccaaaaatagtggagagctaacctatcttagcatattagagaagcttaataatctaatcacagaactactccccgcagaggtctttctaagttggtgagagagactccccatcgatcaactggtcacgtggagactagttcttaaggggaaacccttaatgcttggaattccactaccactcctggtaaccaagtaggcactaagcaaacaccaggtgtggagaccactcagagggaaagcaccttcaagcaagagcccaaaaggactcaagctcatgggtgccaaccaatgggctatccacctgtgttgaacgactttgtaacaccgagagaaccaacagaactcctcca

SEQ ID NO: 31126 - DNA, 1622 bp, Cannabis sativa
ttttttttttatctaatagcaattttttagttgtttttttttttttttatttaagtgtatttttttatggtgtatatttttagtttcttcttgacaattatttttgattgtatgtgtgtttctttctagtttagatacatatatttagttttattttttttatgacacatttaattaaagtacaatcataagatttttttattgacacaatatgtattaataaatattgacataagctttgtttataaaccgtcaattagaaaaaatcatttcatatcatatcattttttttaaccatcaattaaaaaataatttcttttccatcaatcatttcatattatatcattttcaaatagcaaaatacatgttttatgtgaagtatttctgtgttaaactttggtttatttttggatgtaaagtaagaaaaaaggtatatattgtgttcaacccaacaaaaaaaaagaacaattatttatttaaactctatgagacgtaaggtaaggtaaacacgtgctttcaatttatcggaattggtaatccagatttattatttatttgaaaaagataactcacatttttgttttgcatttatttgtctattattatttttggaaaatgaagttttgttttactaaaaagcaaccgcctatccacgatgagaattttttggacatcttttttaatcagtaaataatttggaaattgaggtaacttagagcatctctaacggagaactataactctcgtaaattattatttttagaatattttgttaaaaattagctctaataatgatgtaaaaggtatgctaaatttgacccaagctaaaaattgtgtcaaatttagcacacaagataccatccaaattttagttcacaataaataccacaatttttaattaactatttaccactcattaatactattcattattaaaaaatatttttatatttataagttattaaaataatgtaaataaagttagttatttatatatttgggtgcactcttaatgggtattaccatgaataggtaatattagaaaattttgagtttttatgattaatttttctatttaattagaaaaatttatcatttttacataatatgggctgagattggtccatcagctgaaaaaaaaaaaaataataataaaaaaagtttttgacaaaaatgtgataaaaaagttaaattcgatttaaatattttacatataaacatattttttatatagtgtaaaaaagaagtattttttgatatatttttttaataaaatagctaattcgattcaaatttttcttttattattcgttatcgcaccaagatctaatgatttaatatttttaaaattaatattttcagttaaatttggttattacccattaataggtaatacccattaagaaatattccttatatattttcaatgagtattaatgatattattgacttttatagttaatttgtaccttgtgctttggagcacaaatacaaaaattggaccaaatatagttttgtggtatcttttggaccaaatttaacctaaaatatacaccatccattgaagatggtcttgcttctattagatttggagtgcccttaatttgttaagaaagagcaca

SEQ ID NO: 31127 - DNA, 2914 bp, Cannabis sativa
atttgttctggctttcaactacaaggctcctgcaaagattaatcctcgcatacttgacgtgaggcatctatttcaaggagccatagaaccccaaaagaagaaggtcatctcttatcaagtctactattattatgtatagattcatatgctaatatgattgcttgatgtaggtgttgcatgatcttggacgagtggcaaaaaaacgacattgtcatgggtaaatttcttctctgttttgtattaataatttaagacttagtaaatagtatatgtataagcaaaagttatgacaaatgaggtcttaatataggtatgaagatgtagacacaactttaaggaaggtgtcaacagctgcagaatttatatggcctgaaactcttcttgatatccttggttctattacttccatatcatttcatgatccaacatccttgctcatcaatcatcatgctgtaacaacacaagaagtagctaactatatatacatatatcatttggtttttctaattaagaagtttactcttgtggggtctcaacataagactcttaattaagtgtatgaaatattggtaggttaaaattctttgtgatgatcttggtgtcttgggaaaacaagattttaagcatcttttgaagtaagttgttatgttttttttttcttttttgccctctaatgctttttggtttgttatatgcatattttcaattttttttgcatgtaccgaaggtggagaatacatataagaaaggccttgataggatcagagaagactgaagttgcaaatgttgaaaatgaaaggaggatgaagatgatagagtagtcagagaaatgaggagttgactcatgtgttggagcgtaagaagaaacgtgtgaaaaagcttcatgcgaaaaggcaagctaaggtttgttcccttgttcatctcccaccctctgcaaaattcgattcagcatagattttattcgtttgtagaaattccaattctgatataatctgcataaagagtggtctagaataaaagactattttcagatatacaaattttgtatgactgaatttcaagtgattgatgctactacttgtaaattttccttttgtttctgaattttttttgtgctttatattttattttatataggagaaattgcgtaaggaaatgactatgcaaatggatggagtggatgatagttatgttgaccgcgaattgttttccctgtctaccaccaaggttcgctttaaatcaaacttcttgttcctctaagaacatatatacattcattcattattattaggcctaaattgaattcatttgcttaatctctaatttaaacataacatgggtgtcacattatgagtttttgatgaggttgtagatatacgatcagatatttcttcaataatttgccttaattaatagtcttttccttagtttgaaacttagtctagttgttggtttgattttaggacagttttacaacttaatgtagattagaaattggtctaaaaagtagtagtacaacaagcagaatgtcatcatatcatatgtcctaattaagcaacgttttattaatatatgaaagtctatttatggttgatactattcacgggaactttatgatttgccaactgaaatattgttcttggtacctgtcgattttgtgtttcagtttaaatttgtgaacaagttttgttattcccaaatcttgactttcatcaaacacccgacatttgtttccaagcacatcggaatgaccaaaaatcaatcctctgtgtccttacttttcactcggcctttcctccatgttgatgataatgtaaactatcaagttataactgccatatgatattaatgtgctttctaaatataacgagtggaaaaaagatagttttagggagaagagaatttatttaattctctgatatttcagatagagatgcccaagttaacaaatttaagtatcctccccagcttcaaaataggtaattgatgtttttatctaaataattttactgcattaattaattattttactgaattagttgattatattttcaggtggaataataacacttggcattagatcacggaagaaaaaaaaatctgattattcacaaaaaaagttgtgaatgagtttacacatcaaatctctcgggatgtgctggaagttatattttcaaaactcacagtcaagtctagaatagttgcagccgctgtttcaagagtgtggagaaaaactattttgtctttgggcctagaagatggaatgtggttgatgcgtgatgaatatttaagatgcaaagctgtttggaatgacagcttgcgagaaagattcacgataaattttgatatgtcagagctctaaaaagatgaataatattttcaaagatacatgttcgcaagtggctatgaaggagtgttctgttttcaaacgaatggtacacataaggtgcgcaaaattctaatcagcccttttctccagcaggttttaatactacctcctatcctcatgcacatgccatacgaaaggattagaacaacacttggtgttggtattagtggcaacaacataattaaagttgtttgtgtcatgagtaccttaatggcaactactattgctagcattgttaaagttttcacagaaggagctcaagaatggaggctagtaccctgcccaaacaacatgtttgtatgtacccacacaatacctgtatttgaacatggttttatatactagaaatttaggctaagagcacccaaacttctatgctttgatgtaagcatagaaatctttacatttgtggctgcactattaagaagtcctctaatagatttttttgaaaaagttggaacatcaaatgttgttgacgttttggggtttgtaataatagaaaatgatgtaaaaaaagatgatgat

SEQ ID NO: 31128 - DNA, 4809 bp, Cannabis sativa
  modified_base (653)..(654): a, c, t, g, unknown or other
aattaacaataaaattattaatttaatgactaattataatgtgcataagacactaaatataaataagagttctaatcttaaagctaggatttatatgcgcatgaggcaccttaaccattaaaccaaaattgatggctgagtaataattacaacatttaattataaatatatacagtaactaattaaatacatattttttagagaacgagtacctctcgtctctatgtgagtccacccctgtccatagtaattcaattatataaagagtgcaagacaccaatataacataattataagagcctccgagtagtttttctattttatctaataaaatacattacctaaattctactttatttattttaccttcaatttttatatgacgttatacattaactattctattttttctttatataatttaaatattatattttttaatatattttattcatctaatttaaatcttggctaaatatagagatgtagtatattgctatttatgagctaaaattttaagatattttaacttaggtggtgtttggtaatatttttttaatcagttttctgtttttaaaattgaaaaagtgaaaatattttttcaaaaacatgctctataaaactgttttcactttttcaattttttaattgannatcaaaattttaaaaataaaaaaagtcacttttaatttatttttaaaaagtttttttttaatcaatattttagacttcgaccagacccgaactcaaatcctccctccacgaccctaaccataatctcggtctctgacccgaacccgaattcgatcccagacttagatccgacttaaataaaatcaaaaaaataaaattgaaattttttatagaacacactttattttctgtttttaaaattaaaaaataaaagtggttagataacacatttttattttataaaaaaaaaatttttaaacacaaaaatttaattaaaaaataaaaatgttacaaacaacacctatttatttacagaatcattttaagagttttaaggtatttaatattataactattatacctcatctattaaaagtactctaagttgttagctaccctttacaagggtggtcatactcatggcttccaaatattaataaaacctttcacttatttttttaaaaaatttatatgttggcccctttaattattattattttttattattcttttgaattctatttttatatttgtagttggtttgtaattttttatataattaatttaggtacatttacatttacagtagtgcatgataccttaaaataattttaagcatatttcattaattaatattaaaaaagggtgaaagtggtaataggtaggaggtgatcacaattggacagacagggtcccagtcccaataataccaagagaaagcaatgggagcagaggtgagcctcaacagtaattaatatttgagcattgctaccaatagatacaactgccctttagcatttctcttattattgctatttgagacgaccacccccacctctccattgactacttttattaatgaagactcatattactatcctatatacaaaaaatattaaaaaaatcattacaaattgaaaattcggaagcaagaggacagaaccttctcttgtagattttgctgctgctgcttaatcaaagctctgtaactgcactttctctctcctatttcttcctttctctcactattgagttggtcagcttggcagccagctaacccttcttcctttacacagcttttgggattacctatcaaatcaaatcctctaaaaagtttctctacctttgattttctttttcttttttcccttcttaccatttttccaaatctggttcttcattttcatatcaccaaggtacttcttcttcttcttctttttcgatggggtatgtatttttttgttatttatatttgggcttttcgtaattttttattttcatttatgtatatagctattttcttttacgctagtatttctggaaattttgttgtttttggtttattaattctattattatttttcgagtttttgttcctgtttggttgcaggggaaaaaagtatggtgggaataggatttgagttgaagtttaatatttttattcgaaatagggaaagtgggattctttaaagtcggacaattgtgttttttcttaatatgaaattgaaatgttgcacaatttggaaggttttgtagttcaagcttatttccttctctttgattttttcatccaatgaaaagagggatcgaaatgggtcattaatataaaccatgcattatttgatttttaccatatattattcactttcctataacttgagtttcagatggctaattttttgggggtttatattgtgagggtggttaattggttggcttgaaacacttatagccatagctagacacgctttagttggttgtttaactttcactttctaaatgggtagcttttcctatggctaggataatgagattataaatgtgccataggttcaatgtcaatctttgacttcaagttcattagctgttaaaatgttactagatgttttgatgggaagacgtaagttgttttattatgcgttaatgcttcagaagctcttcaacttattttgagtttgagaaggctaattctgcggtttatggtgtgagggtgcttaatgggttggcttgaaatggcatagaaagtgaaatctagcagttatgacatatgaaatctatttgtacattcaatcgcttgctttttttgaacaaattcttttaagctttctgtattcaatattaaaaaaattaacatatataagggttgcgaaagaaaaaaaattgggaaaaagggaatatatgtaaaatattcttttggttgttgattatcccctgcccattcttttccttgaaagacaaatgtaacaaactggttttttatccactaattttctttttctggataaactttttgctaccatgactaaaggtctggtataatagtatccttcacttttgtatttgatgtattctgtgctatttatctgaagtattcatgttgcagatgctgggaattttaagtagaaatggtaacgtttcatacttttcttgataaattactgacttaattccaacaatctggagggatgtctttgaggatggaacttgcctttgcagttttgatattatctttcttggcctcttttgtgtcgcctgattctcaaggtaagtgatgtggctatttgttaagataatgaataccattttagactctctggtgtgcaatgccatcagagattttgtaagttgctctctgtgtctatctggttcgctctaatatctttcagttattctgacttgaaacttcttattcattctgttgaaaagaattgctgtttcacttgtatgttactttcagataatgaattaaaaatctatgctcagttctgatattcacttagaacaacataatatttttctttgataagactaggacaacataatagaatcatgcaaattagatcaaccatgttcgtcagtttgagttcaaagaatgagtatgttgtcgatactaccacttgggtagaactcatacctaagagaggagggtgcccaagtagttatataccaccacttagtcaaagtctggtcttaacaatgtaccccactttagaggagacatccacgacgatccactttggactttcaaatggttttgcaaccatttgatacaactacttgggtaaagctcactctcaaatgctagcctagtagaggagggtgcccaagtgtgttatatcaccaactaatcccgttcttgatcaatgtgggatcctaacagttgttaaataggtactctttgaacatgcaataatgtaccattatgatgagcataatatgtgaactagaaagccttttatgtctttatatggacagatctccctctgtgtttattctctctagctttctgcctgagattcaagataaatgggggaggtggggaagaaaaaggaaaaaggaagtcagttgtttagcgggtctgttgaggtttttctttagatgaaacggcgttcaattttagtttccaatgcttattataaagtacctaggtttctacatagctacttgagtgatgtaagtattttggaaagtattggctttgggacgttaaaaaaacccaccttaggctagggatgtgttttcagtattgaaaaatttgtaaattacttttctttggtaaaattgttcatctatctttttcaggagacgcacttaatgcattgaaaatttcactgaatgcttcaaacaatcagctcaaggactggaatcccaaccaagttaatccatgcacctggtccaatgttaattgtgatcctagtaataatgttgtcaccgtgtaagatattctttgttacttccccttcttcacagccattatacacggtgatacattactacttgctgagttcatgaaaactaatttatttactagcaaagtagaatgattgaatgcctaaaaaggagtatgttaaatgcaataatatttcagaggttgagccttctaagcaagttcaggagacttgtatagtattgagtaaacgtatgtttttaattttattgtttatttgcagaacattaccaaacatgggatttacaggaactttgtcccctaaagtgggagccttgaagaaccttaaagtgctgtaagtaaaaatgacctaaatgaaatgatctttatctttgattttctatattactggatggttcatttcctaattatctatggtatttattttg

SEQ ID NO: 31129 - DNA, 1509 bp, Cannabis sativa
  modified_base (785)..(794): a, c, t, g, unknown or other
  modified_base (929)..(943): a, c, t, g, unknown or other
gtttgcagttttttatcaatggaaaaaaaaaacttccattgaaaaaattagagttgaatacatcataaagaaaggaaaatattccatctaaactagctcaccatctatcctaagtgcgtacacagttaattcatgtgtagttatattgacggaataatttacatgagtaagggacactaaactaaaaaaaccattcaaagagagcctaaatcattaaataaagaaaatctcttataaaagacagagatcaaagttaaataatcatgctcaaaggaattgagaggaagtccaataccaacaacaaatgccaccattagagctacatgttctgcttgaataactgcgagactctttgagcttatcttaatccaactaaaaaagcaagaactgttgctagaaaagttgatacctagaccaaaaaaatacaaaagaagaaaaaaaaaatgtctacaattatgtgtaatatcacactcgtattactagtttcagactatctccgttggtgaactctttttctaataaaataaatgtctaatgagtatgatgttgttattaattatatttttcatgtttgaaagttattttctcatatttctatattggaaccgagctaataatgctcttgctaaaaatgtctctctatagaaacctctagtgtttggtggtcgagtcttctgctcaacttattttagatgaattttgattgtattgatcttaagattcctttcgctttgtgcctttaatagaattattctacctctaaaaagtaatttgcggcataaatnnnnnnnnnnaactctcagttgtaaataaatacctaagtttaatttttagcagtaataatacctaagttatatttttagaactctgtaggtacctcgttgttaaatgtcaaaatataatccatgtgtcattttcttattggtatnnnnnnnnnnnnnnnttttaaaaaaataaaaaatttaatgatttggaccaatcaagaattattgcatgacaatttacttaacacataaacataacaaaattttgtagcgcaatttttctttttctttttccatactagtctgaagatgttatgcatgaatttttcacacacatatattatatatataaaatggtagttaatttttggagacaataatccataattttaaaattataaatatgtgcatatgatatatttaggcatgtaaaagtgtaagtatatgcatgtgatataggtatgattttgtctcgttattgtactttacggcaaccgttagatgagggagttatttgatctgacggcttagattaatctaggggtaattaggcttaaaaagtagaaacgtaccctgacactcatttgatattccctgagacccatctaatgtaccacgaaatacatttcgtgaaagtacatcacatgacaaaatcatatccctatttatgtatgttgtatatatttttagttatatgtaaaatatttatatatatataaatggtaaaaataaataatgtacacta

SEQ ID NO: 31130 - DNA, 2051 bp, Cannabis sativa
aaccgatccaatatgcacttttgcagattggattggattaaagctattgcgcagattggattggatccaaaatttaaaatccacacttagtgcagatcggatgcattgtgagcacaatagtgcggattggattagataaacacccctagttagtagatattaaatttagggtcgaaaatggtcagatttatgttctaggcaaaaaactaatttttttgtcaggtctgatggtagtctgatggtggtctgatagtggtccaataccttcgtgttgttaaaatgagtaaaggttgaaaacgaaggtccgatagtggttcgatggtagcctgatgatatggtccgatgaggtctaatggtggtccaatagtggcccgataccttcctcacgagcttaatgaatggagtttaacatctataaatgcagatatggtctgatggtcaactggtgctaattttttttatatacaaaaatataaataaataaataaataaaaggtagcagatatggtccgatagtcacctgatgctacttttttttatgtacaaaaacatgaaagaaaaaaatttaaaaaaaaaaataggtaacatcgaaccactatcagtatagatgaaaatacaaagtatggattgtgaagttagaagagaagagaaaatagtataatgggtatgaatataaagtgtgcctatttttttaattttaataagcttgtgttcaaaaagttaatatatcccaaatgtatacatataaattcaaagttcccattatataacgaggggtgtaaaagtcattctaataatccaagctaaacgtttttttaggagaaaaatatcttcattaatgaagcaacagccaatacaacagaggcaaggcaacaagtagggaatcccaaccgcaataaacaagcagtttaggacaaaataagcaagctgaacactggctaagctcatatacattgaaagaacttaattgaaaataacaccacgaactgatgcataagtcttcaggtcaaaaaagaaacatgtatatgtccaccttacaatctgattccaagatgataacacaaaaggcttacataaaagagataatctcatactttaagaaagaaaaactctcaatttgcaaagttattactaaccaatgtgaaggcctaatagtcaaaatgaagaagacacaaaggtcttacaagttggtgaataaaaattggttatttggtgtaatagcaaactttgtagtatgtgtgttaaagctttactacaactacaaggtcttcctaaacttgaaatgcttttatctgttatccctgaaaatgagaaatacatttctggtcctaaaattaaaaagaactcaatgatattgccaaaagcttacaacagactataatatagcattctctagtctagacaaagactcaagcctacacatatttacctctgtatttgggcctcgcttctttacttaattttacttcactgcctgcattggaaatagaatcagcaggactaaatatagcagaatgaagtttaccatcttctaaccactttacatggttctccctgaactcgatatgttgtaacctagctgcttcggcaatttcttcggtgtatgggctaaccttaaccattgtcagtaaaactcgactatatcgcgaactaagaatctgctcagaagaagcaatcagtttgaaacatgggtgttcggggaaatggtcttcctctacaaactcatcttctctcagtactgggtagaagtagacaagcctgccgcccataacaatcatcctagctgcaaggtcaagcaaatcatgcacacactccgctaagctgtaaggtgcagttgatggtatatggcccaccctcttgtcatcaggaacaacatagggggccacagctcccttcagcaattttctgccaccagattttcgccccccagcacgaactccataaggagggtcacatattatggcatcaaatatctgtacgaaaaggtaaagattttaaattaacacatgttcttagcccataaaataaaataatttattaatcaatctagt

SEQ ID NO: 31131 - DNA, 3323 bp, Cannabis sativa
  modified_base (689)..(697): a, c, t, g, unknown or other
  modified_base (2045)..(2054): a, c, t, g, unknown or other
gatcataatctcacttattaccttattaacacataatataaatataaaccctaattatttaccattagacttatcgggatattacaatcatcccctccttataaaaaattcatcctcgaagtttatttaaactattcaggatattacccccatatttatgattctaattcttaaattgctgtttctatcttgctatttttctacagcactttcgtaactagtagaattgtctcatttcataatattttatttttctagtccaaaacctggacaagatgttttttttttccatataataaatttgtctaaactttaatatcgtcacagctcagaatatgggtcgagtctgatacatattttctcagaatggagacatgggacacattatatactccgaacaacgcaggagttaaggctagctaataggctacctggcctacttactccagtgaacagatatttaatatttttctcgtaccacacttattaaggtacctaactagtggtacatttaattttcacttttagacaagcactttgtcagggaaagagattattctaagataatctaatctttatcaaatatgctcacaacatgtttctaatattccattgattttctcaggttacccatatttcaagaatcaaacatcatactattttcgctttaacctccatggttctcaatnnnnnnnnntaattcttaacatcatagctaaagataccaaccttgcaatttcacaagattagattattccttcgtatgaattctgtatcctcatttattgtataaattgtctacactaatagacaacatattaacttggtatgtccaaccattactactcagtcaaaatcataagatcccatagtacataattcgtaattatgtctttctattccttctatgagatcttctaagctgatttactgacttaactcattaacaagttaagtatctgtttatgatagatattcaattagagcatttcttatttccacccactaatatgaactcatcttgataccttataaatctttatttgtcaacacattctttccttttggaaatctctagaacaactaccgattttgcattctaatatgaatctttctagcgtactttgtcctcactcatacgctttctgagatgaagtaagctcagggtgggttatcaaaaagtagatgcttctttgtcattcctaatagtatttcttgctttcattctttcgttaataaaattcaatttccatcactcccttcattaacctcttccaatcatcactatctttatacttggttaactgctttaaaacttattttacactcaattaaatagctcgctgtttaataaacaacctactttgtgattcaacattcaccaatcactcaaatacatttccattaaattgcatctcaattcataagcttttccccattctgggtaagtatgcctttctatgattgcttaataaagtaatcttttcccagaattttaatggtctccttatataccacattgactatccagtcaattatgatgtactttccatcattactgcatcacttgaagtaatttaggtaatcttctttaccttagtgataccactactcttcctgacgttcttttatacgttgccctagtaacgtccccacttcaagcctccattgagtccttattcctatggaatgatgactcttatacacgagtgcatcactctagctgcttcctagactgacgattggcccccacagaccaatctagtgtttctagtgtgcttttctctgactctgtaatgaccgcattagtaatttagattagagaagacaattagcactaatttctaatttttttatgattatttatgaatttaattaattgtgagccccattgctagaaatgggcattagagttataatttctcaattctggagattttattaaactctagggtattatttgacgtatatgtgaattatgtaatttttatattttttgctcggcgacaatgaaagatgagatggatggctagtttgatcacatnnnnnnnnnnagaaccttatttcttagtgagatatatattagagaaaataaaataccgaggttgtgcagggttatggtttttgaccattttacccctaggtttgaataggctaaaaattaagcattaacatcattttagtcttttgccaaaagaagagataggtggctgcctaggttcatgacacctagtaaatatcatttcagcaagattaaatcatttaatcttttatcacttaaggaaaaataaagaaattagaaagataagtcaagtgaaggaaaaccctctctttcccttctctctcttcgaaccagccagaaaaccagggggaaaccattcaaaatcctcatattttctggaatcaagctgagtatcaagtgttcttggggttgaggtaatccctagttccatgttctttgtgtttttaagctttgaatttggtttcatgttgtgattttaagtgttgatggctgttagggttagaaatttttagggtttggtttttatgttcaatttaagttgattgagggttctggtagctggttttattgcttggtgttatgatttcacaagtttgtgctttgaaacctaagctttgatctttaatggcataattttattcaatgactttttttgggattttctagttggaatatgttgtgtatacattgtttaaatactctggaaagtttggaggcaattggaaaaattttgagcaaattggaggttttttggggaggactggtagaaaccggttaaccggtttaccattatctgtaaaatcgattaactggttttggcaggatccccgagaaactggtttttctcaattctcgtccatttcagtgcattagttgggtgtttccatgtttcctaggttaatgtaatccttcgagagtataattgagccttgagttgtagactcgggtttcccggattagggtttcagacgtgatttacccagttttaatatgtgattagggcatccatctagcacaagaatttctattcaggttggccaactcatttgaatgtgaaaaggaggtaagaactgtatataatgtgtaatatgaatatgcgaatgtatgtatgtgttaatatatatgcgcttgttgtgattcatacactaccgacacttgtacggtagcagtacaaagtgcattggtaaagtgttaatttatgtatgtattttacttatatttagttcttttcctcctcttttgtgagaatatacgttattttgtatttttatgttcttttgggtaatttggagttgttagt

SEQ ID NO: 31132 - DNA, 3253 bp, Cannabis sativa
attaataaataaattaaataaaaatttatttgataatttattttaattattaaataaaattttttgacatttaaaggattgaaattggaaaatatagtacttttgaaagaaaggataaattattgaataaaatggtaaaattcaaactagtagggctcgtcacatggtcagccacttaaggataaaattagcaatttatttatcaattttttaatgccatataatttaaatctaatccttggagaaatcctatataaggaataggatggttctcattctcatcacccataagtttaccaagtttgtcaaacaactaaacttgagagcctccttctatagaatatgaatctccctctctttctcctcatatttttgagccttatagtgaaagagtacatgcctacccatagcaagttaagtactcaatagtgtgtaggaatgtgaagaatccaacactcgaaggagaatcgggctcaaatcttggtaatattgtgcgatagaaattaacaagaattagagctttgagtggaaggagacatattattctgcttccatcaatgtaaagtttcttaactttatatgtgcttaaattctattgttttagagaattcatgtttagggtgttaaacaacatacatattagtaaatctaaattctaataaaataatacccaacaactggtatcagaaccatgataatgatttactttcatgaaatatgaatttaaaacaatgattgtgatgatttggatgtgttcatgctagcttatatgcttatttgatgaaggtatgtaaattatgatttttcgataaaaatatttttagtttcctacttaaaatattttttttggaaagtagataacaaaattaatgaatttaggctcttacaaaacttaatttgaatttttattgaattagttatgattttttaaagtttgaaaataaaatatctaagggaaggtgcacgtgcgcgcgcagctatgggtgtcactcgatcatgaccgagcttcagacaagcccatgacaaagttttctcgaactagggctgtttgaatccccagttgaccgagaattgcccctcaagaaggctgcatgaagcctcattatatgccattttccccttgtgcgcgcgcggggagtatgcagtatgcatgtgccaaacttgattttgagatattttgagttttaaaaattatttttcaatgaaacaaaattcacattttagtagaattttgtgtagaatctaaattttcagaaaaaaaaaaatttaattatcataataaaattaatttttattaactttttaattaatttaaattagttttagatattagtagcctttgaatttgaaaaatcaatttttccacaaaattactttgatggttatttttggaatttgattattttttgtttattttattaattttaattataagatcaaatattttctaattatattaatacaatttgaagtgatcttattttgacactataatatttataaaacttaaagataatctagttagaattttaaattggtaaccatattagattttaaaaaatttgttatttttgttttattaatttaaattataagattcgaaaagtgttagttttgatatgttatcttattagatatttatcttaattaaaatttatatttttgttgaaataacatggaattttgaaaagttgttaatttttgtttgaatagatattttatgttttctaaccataaaattttcaaacttagaatattgtattttatttattttttttaataaagttgataatatcctaaccatcaaaatatcctattttcaaattatttatttttgtttaaatttaatttactaaattataagatttgaaatatgacagtagaaatatctaaattttcaaattaagatattatgttatattatctaattagatatttaaataattgaaattatttaatcaaactgaatatttagtaaattagttggatatttaaattttaaatttaagatattttacgttttgttagattttaaatatttttaaacaacttaatttgaattcaagttaagatattttttttaaaatattctattttaaaatagaaatattctattatttatagtctaattggcaatagatcaaataaataatttgtaacaggtaattttataattctttcatatgtgataaacctagtaacatgatacggccatccaaatcaattgtctatgtgagcctacatgttttccattgggcttagatgcatataagaatcccatttacttttagatatttaaatcgactaggttgctaaagtaaaataatcatcttgataattttatataggcccaattagtattgagcttattcaattaataaaaattatttatgtaagtagaaattacataatatatgggaaaattataagagtttacttttttatagcataaataaataatgctaaggggttatgggttttttattgttttacatttatatttatgccatatttttgtaaaaaaatatggaaatcccatatttgtaaacaataataagttttgtcgaaaaagtcactagcgccgaaaaagtcaccgaaaaagtgagtgtcgccggaaaagtcactgttgccggaaaaagtcactggaaaagtcaccaaaagtagatgtctcaaatataaacaaaaatagaaccggttctataacataataatttattgatttgtgtgattataatttgttaaactattttgaagactaatcatgcatttggagggattttaccacattttggcggaaaatagtattaaaaaagttatggccaaaacactaatctgaacacacgaccgaatttttacgccagcaagctgtcaccgcggcaagggaactcatggccacggtgagcacacgatttttgccaattttaaaatttttttatctttttttaaactgagatattttgggggtatttacatgatttttagggttcgcttttagcaacttttgaactacaaaattgaaaggaaaactcagagagagaggaagaagaagatgaatattgcggcatcgattgttctacatcatagttcttttcttctccttaaactcttactatttattgtgatttttattataatgtctacttcccggtagttttttagttaagtgttatttcaaaacccaagacatgagtttttaatttcattgacgaatgttaatttctagttttcattatattaaattgcttctattctt

SEQ ID NO: 31133 - DNA, 1553 bp, Cannabis sativa
tgatagaagcacacaccacgagttttgaagttctataaagtttgttgttctttattcattaaaaaaaacaataaaagagacatacatcatccttccttgggtcatggcaaataattatatattgaaagtgttatgtaaatagtaaatgacgtgatgatgtggtgtactacacggcatcgttttcctgcaattatttgttttatcttttcgactaaaattacccaaataaccttcttctctccaaatatcatgcaattctaccagcttgacatcgtattagttcgtattgtattgtattatatattatatttttgtataatactaagttaatatcttaatctatgctaaaatattatatatttaagtgtctataaaagttaataccacatataattttacataaaaaatactgtataagatacaatttaatataatgctatacaatacagtgtaccaaacgaaccctaacactattattgtaccttaaatcattaattatttttttcacaaaaaattaaataaattgttataatgatgttgtcaagtgttcgtttaaaatcttgctagttttcaataataagctataataatacttactcaatattatctaaccaaaattaggacattaaaatgtaattggttggattgaggtttcttcaataccaaataatattgtttataatgattataaggcctaatttgtttacatctatatgattacttctttttaagaaaaaaaaaatcaaaattaggacgatgtagatattattacatttgagtgttgttataaagttgaaaccttcatatttttcgatttagtcctttggatgtatattttagtatttatataaccactgtaaaattggattttctcgattattttaaacaattagtaacaattaaggaaagtattcttatcggtttctaaaattaatacatatttaatcgtcaagaaaattaaatagaatatgcgacagtggaaaactgttagaattttttttttcccgactatgcaaatctgttgaagatactaagcaatatagccgattgtttaaaatagtcacttatattatagatagttgtttaaaattatcacctataggtaattgttttaaacagtcatcaccaccatcgcaaaaaccactacccactatcactgcaagcacaccactacaataccaatcaaaatcaaatcatcttatatacagatctagatcacaaaagaaatacaaaaataattttagagtcagaccaaaatcaaacaaaataccaaaataagaaaatcaataaacaaaaacatagaaatgatgaacaaatatgaactcgtggtactcgtggaggagagggacgaagtcatggtggtgctcgtggtggctcatggtcgcccgagtatctccatacgagagaaagagatagtgacaagtgacggtggtggcagaggagaggggtggtcgtcgcggaggaaagagagtggaggagaaggacgaagcgacagagagcggaagagagggatggtggtggcttgtggtcggagagagagagagagtgagaga

SEQ ID NO: 31134 - DNA, 1164 bp, Cannabis sativa
tttcagcaaggattaacattcaactattttcaaggaccaaacaaaacttttgaagggccataaaagggacccaaagcctaggttgacatattgtcaacatggatagttttcaatcaagatctcaaaaaaatgttccagcctccaggcatttttttcgtcgccagaaataatgaagatgcaagaaactaagggagaaaaccacaaactctaggccttggaaggagagcctagcgcccaggttgacaatcatcctggtacgctagttttgatcattcaaatgttgaatccgattagaccattcaatttggaatggtcaaaatagggtaggagaccttgtcctcaagttctagaaccctagaagtatcaaaatgacatctcggaatctccaaaataagcacccaacgcccaggttagcaaatggtttggtgcgcttggttttgcttatccgattctgattctttttcgaccgtccctctacttttcacaataactaagatcaatgaagttatagaagtcaaattcacaacttcccaattcttatttccaacatgggaagaacactcgaaaatgaagagtttagagtctctcatttccgtagagcagcaacatcttcgagagctggtgaccagcttcaccagaggatagaaacaaactaagtgatgtcaaaatatcactgaggaatcataaaagtacatccttattttcacttacccagtgtccaggttgacgtcatatgtcgacctgggcactgggatgtcaacctaggcgctgggtcatgaataacctttagtaaaacgaccataactcactcaatattgatctgatatgattgatgcaatttaacttgaatttcaaagatatttcaattctctatcaacatatgtctcacacttcaatcacaattctaaagctatcgatcccaaatttcaccccaagagagttataaaaataagctctggcttaacctgagagggacccaacgtcgcgacccgggctccgaaaattgacgatcaaccacaaaagttaattttgatcactagatcatcatccatggtaaaaaataaccaacttgtatttttctctattttcaagggcctccttcacctattaaaggagaactcccttagctcatttttcaaattcataaaactacccacaaggtta

SEQ ID NO: 31135 - DNA, 1091 bp, Cannabis sativa
catcatattttggcttttgactctatttttttaagatatttaaaaaatgatcattttttatcacttattactaaactctctatatatatcttatgagtaatttacgtcataaatacataagtttaattcctagttgcaaataaatatttaagtttaacttttggcggtaataatgacttaacatttaacaattgagtagctacagagtttcgaaattataacataggtattattaccgccaaaaataaaacttatgtatttatttgcaactacgagtttaacttagatatttatagcgcaatttactctatattttaacttacattctcttttattctctggagtgttattttcttagcgacttatactgataagaagaatagaaaactaataagttttgatatgatttttattaatgagaaagtgattaatatttttattcatatttaattacgttcatttccaaaactttcagtgtattatgtttcttttcgggaaaaaaaaaaaaattaagaaaacatgtgttaattatattcatttgtgtgctgactgagcttgtactacaccaaattttgcttggttggatgagccaactagcaagttgtagcaaccacattagtattattatttttgctcaaaaagagaaaactccagatttattacagaatgaaccatttcccctctgaattgacacagtcaatcacttgctataattagagagactaataataaccggccagctttgtgaaagcaattgcgtttacttcattatgaccaatatttggtttgggttattcttggacctgatggctccaacggttgggctttcttttctctgtttgctctgtgtggataattaaggattattttattttattattttttttattttttagagtgatctgaattacaaaaaagtaaaatgatttatggacttccagctaacaagccaagtatacaaagtcagaaaataaattgctttaaacgaagagatttatagaaagagcattttacataaatgtatatattttcttaaataattacaaaaaatgtgcaaaaaaacacaattttaaaaatgtacacatttgaaa

SEQ ID NO: 31136 - DNA, 1812 bp, Cannabis sativa
gccccaaaagcccaattcgcaggctgagaagcatctagaatctaggggcattttggtcttatgtaaatatgtagctaactatcttattctcaagagatttaagttataaacctacagtttaggcctcctatataaaggccttaacctctagctgaaaacctaggttctctaagttttctaagcctcctataagctagaaacctcatattctctaagtgttaaactctctctctctctctcctcttcactctctcacacgcctaagcatagggcaatatagcactctatgctgtccagcacatgagtctgccaaacattaattcatacattgtaatcctaaatggcactatagcagatctcacctatagcgatctggatagtgattccctcggtataatacaaataaaaggagagtaagtcattactagctatcataagggggttgaatctctataacaaatttcgttgtctattgtttcttattcttatttgtgcatacacttagcaagcattagatctgtcgaccctgttgtcagttgatcacttttcaaggtttccattctggcctccttgtgcttgggtttggtcgtctttcacgtaacgatgtaggtggggattgttacgccttatcatgtactcaatctccctcttcagattttgacactcattagtttcatggacgaagttgttgtggtatctacagaacttcgccatgtccctcttgcccatctcccttctaattggaaatggctttcggtatgggaccgtctcctgagtggccatgaagatggtctcaagcttttctgtcaagagagtgaagcaagtatagttctcctccttattcttctgtggcatgggagaagtgttatacttctcctttttgcctctgttcctcccagagttgttggtgttgcgcttgtttctaatgttttttccactagaggtctgggcaacattgctactgcctacctgtgtgcttggtgggtcaagaggctattgggtgcctcgtgactgcctgctattgacatgccctgccctgggcttgtcgtatggcttcttctaatttaataaagtcgtatgctctatcgagaaattccttcttgttgttggtggatatccccttgatatctttctagaagttgattagtggaatgcccccaagttatggcccgtatattggccttcttcagtaaggcctttgacattggtagcctcggccataaatctcttaatatagtctttcagaggttccccttgtcgttgcttgacttcgagaaggtcttccagctacgatggtacaagtcttgaggacgagaattgtgtgtagaattcttgtgagaactcaatccaagagttgaacctcctcgaggtaagcttaaagtaccactgttgggccgtcttcgatagtgtggctaggaatatgcaatagagcacatcactagtgaccttctagaggtcaagttgcatctcgaagtatttaatgtgagcaagagggtcctctcgtcctgtatacatcttccataccgacatcttgaacttcagtagaggtagggcatttatatatgccgagaatggtgatcccctcgaccgatcgagtttgaggtctgaaggttttgggccaacaatgccctggatcatgtccctgagttggtccaattatgcttgcacagaaggatttgttgctgtggggacttgattgactggtcctccttggggacgctacaaattctaaagagacaaggtttggctggccataccctgggagagtgtatggtgaagatcagccatgccttgcagaccctggctagtcat

SEQ ID NO: 31137 - DNA, 2113 bp, Cannabis sativa
gcacactgatttaaggtgaagatgtagccagtttgtgaccttcgagtgtctgtgtctcctgcataatcagagtcgacaaaaccctgcacttcttgcttagatgacactgcattgtatttgagtcccatgcttgatgttcccctgagatatctcataacccatttaactgcattccagtgctcaaggcctggatttcccatgaacctactgatcacacttaggctgtgacaaaggtcaggcctagtacataccataatgtacattaaacttcccactagattagtgtatggaattgtttccatttgtttctgctcctcatctgtagtaggtgactgagtttgtgatagtttgaaatgttgtgccaagggtgcactgacaggtttagcatcagagaacccaaatcgatgcaaaacctttgagatgtaatcactttgagatagaattaggctcttattatttctatctcttagtatttcaatcccaagaattttcttggctggaccaagatctttcatatcaaactcagaactcagtaacccctttactttcttaatttcttcattgcttttgcttgctattagcatatcatccacatatagcaaaagaaacaccacagatctaacaccagcactcttgacatacacacagcaatcatagacacttttcttaaaaccagatttggtgatgtattcatcaaaccttttataccattgtctaggagattgcttgagaccatagagtgatttcttaagtaagcacacatgatcttccttcccttttacttcataaccctctggctgcttcatgtgaatttcctcatctaattctccatgcaagaaagctgtttttacatccatttgttccaattctaagtcatctatagctgtcaaagctaataacattcgaattgatgtgtgctttaccactggtgagaatatctcagtataatctataccctctctttgtgtaaatccccttgctaccaatctagccttaaatctggctgagtcacaccctggaatcatgtccttatgcctgtaaacccatttgcaactgataattctcccatcttttggtcttcttaccagaatccatgtcctattcttcactaatgaatccatttcattatccattgcagtgccccatttcttgctatttgaacaactcatagcttccttgtaagactttggctcattctcactcatctctgcaacatttagagcaaagtgaacaatgcttgcatagccaaatctggtaggtgcctttgaagttcttttggctctatccctagccaactggtaatgctgcaaccctgtgtcagcatctgtttcgatttcaccaactggttcatctagctgtgttccagattcatcatcatcttctatctcagactgatgatctagttgttgagaacttgaaccaagttccacctcaaatctggatctctctgaacagctttcattttcagatcttgttgcaggttttagtgtatccttgtaaacagaactttcatcaaacacaacatccctactaacaaaatatctctgatgatttcctggttcaatgctccacatcttataacccttaacaccctctggatagcccaagaaaacacactttctggctctttgttccaacttgtcaagtctgatatgggcatatgctatgcatccaaaagttttcaattgattgtagttagcagtatgccctgtccacacttcaattggtgtcttgaaatctattgcagatgatggacacctattgattaaatggcaagctgtcatgactgcctctgcccagaaatcctttggcaaaccagattgaattagcaagcatctaactctctccagaatggtcctgttcattctctcagcaagaccattctgttgagggtttctaggaacagttttatgccttgctattccattctttctgcaaaagttagtgaaatccatcctgcacaaaactcttaagccattgtcaagtccttaacttttttaatttttcttccagtttgtgtttcaagtaaagttctccaatctttaaaggtattgaaagcatcattcttatttttgagtatatgaacccaaacatacctagaatgatcatcaat

SEQ ID NO: 31138 - DNA, 1121 bp, Cannabis sativa
  modified_base (1021)..(1024): a, c, t, g, unknown or other
ccagccacactagtttctaaccttttgttcttcctgtggaggtcacttgtttcctcctcgcactactacaaaatatacttttcatgtcggttcgagtgacgtttttttttaaaaaaatcgacactaaagatcaccctaactctttggtctcagtttataactgacacctataatgactttaagtgtcagttagtagaccgacactaaaagtatagctgagacaaaaaaaaattaaaagaaaattatacattcagattcagtataagtgtttgtttataactggcactaaaagatcttttggtgtcagttataaactgagacttaaagacactgtttttttaaaaaaataataaaaaaaatttcagtattaaaaaagtataaatagaatatttgaaaaccttaattggaaaaccttctctcttcccttctcactctccctctataccctctctctctgctccctatgctccacgccggcagccacaaccaggcctcatctcggctacctgctcccaaaacaaccactacgacagtcgtttaaagccctaatttcatcacactttcattctctctctaccgactctgtcagtctctctcttcctaaacctcgcgactccctgctccctgctcctaccagagagaccaactttggtcgtccaccgcctaaatagaggcaatttcctgactacccgacccctaaaatctaggtaccccaatccgactctctctctctctctctctctctctctctctatctcgttactgtattaggtgaatacctttccttaatatttttgtggcattaatcctctactcttctgtggttctgttctctttttatattgattatgatctatatatatataggtggaagctttgttgttgttgtagttagttttgttaatggcgaagcgtgaaactgaggagatgaccaatggagctataatagaaaaagaggctcacccgtatgcatttcatgtgtccagaccttggagtatctttttgttgggttttatgcccnnnntaaaactcattacaatctgattagttatcaatttagaagtgaagcatgtttacatgtatgttacatgtttatggtttaatacatatatttgatatat

SEQ ID NO: 31139 - DNA, 1442 bp, Cannabis sativa
aattaagtattatactaaaaaaatgatataccataaagcaaaaaatatatataccattcaccaaaaaaatggtgtatcaatgagattcaattctttttcaattatacttaatttcctcaattctaatttataaagatcatatcattttcaatcgcctcaaaaatttattgagcattactattgggtgctagacactattattagtggtatctagcacctctagacatgttaccttgcgaaaattattatattaaactatatgagagttgatacttagttaaattaatagtgatattgacacataataatgtaataggccaaactattggtaccttttagtatttctcaaatctattttctcacctaattttttgcatgcatcattttgttatacacacaaataactcttatttttgtttttattttcaaagaattaatatttattaataaaaagagtaatttatagtgtaaatatttaagtttaactattgtttatagataaatatctaagtttaatatttgacgataataatacctaagttatatttttggaacttcagtaggtacatgaccgttaattgccaagtcaatatatactcttgctagtatatttaaacttaggtatttattagtaatcaaaaaaaaaaaaaaaaaaaaaaacttaggtatttattaacaatcgaaatttaaatttaagtatttataccgcaaattactttaataaaaatcgtttatagttagattatatgataaaataatgttctaatgtgtaaattaaactcattattttcaaaagaaaaaaaattactcattagtaggagtgccatatatcaagcaacattatctagaatttactatttagaacaagacaacaatttttaagttacataaaggataaagaaaagagaaatttatacaatacacttaaaaatatattttttttttttatatttttacaagtttttactatttttttttcaaaaataatattgttttgaaataatagaaaaataacatgttgttattgttttaaaaacaaatcaccttattttcttgtagcaacaacattaaaatattttttttgaaaacaacttaaaaaaacaacacttcttgtaaaaataaaaaataaaatctgtaagaaaaatacagcatatgcataaaaatgtaaaaaaaattatcatttttatatttttatgaaataatctcaaaacaaaaagtcttttaagtgtgttgataatatttggaagcaaaaggaaaatgcgttagtgtgaaaggcatctaaactaaagagaacctaattgaggttatggacataatacacgtgcgatccaacactatataagaggcacatcactgctaagtgagagagggcgggtttctacaaaaaggcgggaaacagcgtcatactcatccctaacctccaaattctacagaccatcctc

SEQ ID NO: 31140 - DNA, 5053 bp, Cannabis sativa
tatccagatccaaggccactttaggcttttgtatttatctaaaaacctatgtaaatatctaggatttaaacttgtaaaatagggtttaggcctcctatattaatgacttaaccctaacctaaaaacctaagtggtctctaagtcacttagcctctaaatccctctaagtttgaaagccatattctctcttctctcgctctctctggtacacgcccaataggactctccttttctcttctcacttcatctctcatacgcctatctaaggctgtccaacaccctaggctgtccaacacttgagatctaactacttattcatactttataatcgtaagggtgctatagcagatcccacctatagtgatctggagagtatttccatcggtataaatacaaccaaaaggggagtaggtcatcacctgctatcataagggggtcaaacctttataaaaaatctctatgtttattactttttattctttgtttgtgtaacatgtgggaagcatcatatccatatgaccctattgtcggttaatcactttttgaggtcaacccttttattaaaatatcagttgctgaatagttttttgctatgttagcccatattgttagtgattatagttaccgtgcttaacatctgtgtgtaaagtttagttgaagtataagtgtgagattctctagtttacagaagactttaagagcaagcctagtccaacaagggttatgtagctaagtcccctccctaactctataaatatatatcttgtctcatcacagttgtagacttttgataattagataactacttctaatagagatatctaggaaggtagacttagttgatagtattgcactatcaaattttggtaatttcttaggaaacagtttgtaaaacaaaaaaaaaaaaaaggcgggtggtcttggtttgaggaatgttgtaccttggaatacggctaccatgggaaactatgtttgggccattgcctctaaaaaggatgatctatgggtcaaataggtccatagtgtgtacataaaaagtgaggattggtggtcctgctctgcacctatacaaagtagttgatactagaggaaagtagtggctatcaatgatatatttcgagatctaatagagcaatatcatcattcgatagagcactacaacattcaggatggatattgtttgattcacctggagaatgaaagagtcagatggagcaatgaggtatggaatagatttaatagtccaaaacacgttgttattttgttggatggctgttcaaaataggctgaaaatgtgagatagattgattgaattcaatattgtgcatgaatctacatgtttattatgtgattcagaaacataaaccaccttttttttaattgcagtgtgagtatgtattttttaagggctgctatggagtgggtgaaatggcacactcgttctagccactcttattacactttataggtggataactttggtccaagatgagtaaatttagaaggacttgttactcaacaatcttggcgtctttagtttaccatctatggtgaacccgaaatgaagttttgtggtctcaaaagctaacaagatagaatatacttgtaaaaagaatcattgaaaattttaaaagtaaaatattattgatttggcctaaatatgttagtagagaagatagaatttggtttgattatcttatgtcaaagtaaggcgagtttgtatagattaacaggcctatttaaaaggcgttgccagttgtaattgatttggtttattgtaatatactttctaattttccaaaaaaaattggtaattgttatggatcaattaggtacgcatgccttattattatctattgtgattgtgttctaaattatatagaattttagttttaattatttaaatattgtaaatattaaaaaataaatttaaaatttaaaaataataaaaaataaattttttggatttgatttgatttctttccttttaatttttacctaacccaaattccttatactccttctctttggttccgtcaccacaccaccaccaataccattaccacaaccatgatctccacaccaccatctgaattgaggcaaaaatcaactcatggattgaataataggaaaatatatgtggccacatttaaaactaatagtgtttactgagatttttcagaaactaaataagtgagagcttcaagaatttaaataaagattaagtaaaagagattgaggagttttacgtgattcaggcattaattatccctagtctacgagttagtgtattggtcttttaggctttgaaatgtattacaaataatttttacaataaggaaccctaacccttactatacgatggtttctctaggtttctcttagagtaaaagaaagcttagaataaaaataagcagagctttggctaaatttccatcccttttgcatgaaggggtagtaaggtttatataggctagtgtttgggtctaggtatacatgtgacctattctcgggttttattataaaagtgagcttactaatagggtaaaatacacaaatacatgactatgaggtccactaaggatacccaactcgtggggcgacggttctgtactgatgagcagatcattttgtgcaagacgggtgttgcacggaggtcaaacctggtaaaaaaggtgtcaggggagctgtcaggcaaaaggggtgtatgcagttgtggtgcgcacactaccatgatctaacataagcacaagcgacaatatctgatcatgtgtcagagaagtgggtaagccattttaggggagatatctgcctctaattttgtggtggacatctgatactcatcatgtgatagacatccaactccttgtctgtggtaggcttctatgtgtcaccttgtggtaggtgtcctagagcatttcgtgtggcttacctttacatgtgcccttatcttcattaggaggttttcattccttccatgtcctggaaggctagggaggctttcgggccttggaatatcattatgtctctgaggcaaagttctgggtctttgttgggcttgggcatgttctaggtctatactagccttctaagagcgggaaggcttaggctcaactttaagtggtaattaccttcaaattatcccacgtgtctatcttccagaaacaaggataacaattaaaataggaacctatagaaacaaccttatagaaaggtttagggttccttattgtaaaactcatttgtaatacatttccaagcctaaaaggccaatacactgagtcatggactaggaataattaacgcctaaaccacgtaaaaatcctccctctcttttacttaatctttatttaatttcttgaagctctaacttttttagtttttgaaaatcttgacaaatattttggtactttcatttagagctagaggaagcttaaagctactatatgtttacaacaatgacacgccaaaccgtggaagaaaaaactcctagagtagatcctaatgtcatcatgggcaatgttaacccagtccctctagcgcacgcccaactgagccacgtggtggatgaggatgcattcgaagctagcggtagagtggttgagccagccctacatggtggaaaatttgaggttaaagatcttgatgctagaaacaaagaggaagaagatgatggagaaatcaaagacaactactaaaaaggtggatactactgtgaacatgacctagacatgttttgagtgtccaatgagctacttgaaactcaataaaagtgagcacgtcaggaagagttctctcaaaagatggaaaaaatgatggcccatctctgggctaaacttggcaacctggacaaagacgctaaggaggattccttggaggaacttaccgatagagaaaacagagcgaaccccaccaatgttggaaccttatttgctgcaaaggacaaggggaaggtgaaggtggtgagtctcaaaccaaaagttccctaagaccttctaagaaaaatgtgaacacgaccaatcagcccttacagacgttgaaggccaccaatgcctctagccttggatgccctctgctccacaaggcaaggttgtgccaaataaaaggtttggagcgaaagtaccaaaacctaagggatggaaaatctgccctcgtgactagttctgagacaatttgaatgatgagcaaggagaatagttactggttggtatttttcacgccaagtttgtcaagtaccttcttaaggtaattcccttgagataggtaggtggtatgaggtatgtttctctcgatctcaataaccaagattctttcagctggccctaagtccttcatctcaaattcaacattgagttgagacttgagtttgttaatttgattgctttctttcctaactagtagtgtgtcatcaacatatacaatagtaaatatagagataccccatcatgaaagtagacacaggtatcatagttgctcttggtgaagccaattttcatcataaattcatcaaatcttaggttccattgtctaggagcctattttaatccatagagagatttgttttgaaggcataccttgtttggttttttattttcatagccttcaggtctctccacgtagatttttcttctaggtttccatgaaggaatgcagttctaacatccatttgatccacctcaagatcaaattttgtagccatggaaataatgattctgacagttgtttatttaactactagggagaatatatcattgtaatcaatgctttcttgttgagtaaatcccttggcaacaagtcttgctttgtacattggacccttacctcctagtattccttctttctatttgaataaccatttgtatttgattacttttcggttttctggtttgttaaccactgtctaggttttgttctttttcagtgacaacttctcctcctcaatagcctgcagctaagttgtactatccttcccaataattgcatatgtgtaactagatggttcagcactgtctatgtcttttgcaatagtgagagctgttgggttttgtgccct

SEQ ID NO: 31141 - DNA, 1988 bp, Cannabis sativa
agaaagaggtttatgtgtgagaatttctggttttctgaacctgattttctcactgttgttaaggaaggttgggggaacaattcttctaatctttctaatgctgatcctctttccacctgttggcttaagcaggactcatgtattaagactgttcagtcttggagctctactaagcaaaactttagccattgaattaagtctttacaagatcgtcttgagactcttcactcttgtcaatcccattctgattttaatagtaatcaggccaaagagcttcaatctcaactcgattctcttcttttcaaagaagaggttttctggaagcagcgttctagaataaattggcttaaggctggggacaaaaatactaaatattttcattctaaagccaattctcgtcgtaggaataatctaattcgtgagattgtccttgattctggagagcgcattcattctcaacaagatattagtaaacattttcttaatttttatagtactttatttacctcgcaaggttcggatgcaagggctgtggatcatcttttacagtttatccctaaccgtctctgtgattctgctatacaacagcttgatgaatcttttcaaagtgatgaggttaaggatgctcttttccaaatggctgaggataaagccccaggtttggatggagttaatgccatgttttaccaaaaaactggtctacatttggccctaacttatgtagtgttgttctttctattcttaataatcaagctgatatttcttccattaatgaaattgttattgttgttatccctaagaagaaaaatgcttctcaaattcgagattatcggccaataaatttgtgttctactatttataaaattgtttccaaagttttagctaataggcttaagaatgtgcttaatgatatcatttctccaaatcaaagtgcttttattaaaaatagggtcatttttgataatgtcttcattacaaatgagatggtcaatgctattacacatagaaagttaggtaaagttggttgggcagcgcttaagttagatatggaaaaagcttttgatcgtgttgagtggggatttgtcaaggctattatgcatcatctttgttttcctgttaggttcgttaatctcattcttagttgtctttcttctgtttctttccgtctccttattaatggttccctcactgaaaaattctcttcctctaggggcattaggcagggagaccccctgtctccctacatttttcttcttgtctcggaagctttatctgctgccattagattgcaggagcatgataattctttccagggaatttctatatgccgttctgctccctctatatctcatcttctttttgctgatgatagccttctgttctccactaccactgctcgatcttgtcttgctattaaggctgctcttgatttataccatcaagctacgggtcagcttgttaattttactaagtcctctgttctttttcccctaatactggtgctttggaggctgagtttttccgtcatactttaggtcttgaaaataagcctttcatcagtaaatacttaggcattcctcagtgttttggtcggtctaaaaaagatcatttcaatttctttttgcaaaaagccagttctaaattgagtagttggactaataagttgttttcaagagctggtaaggaagttcttcttaaagcagttatccaagctattccctcatatggaatgtcttgtttcaggatccctgttgctgtttgtaaaaaaattgagcgacttatggcccaattttggtggggttcttttgggaatcaagggaaggttcattggaagtcttgggataaactctgtcaatccaaattttcggggggcatgggttttagatcatttgtgtgtcataatcaggccctacttgctaaacaagcttggagggtcttcactgtacctaattcgcttcttgctcagcttttaaaggctaaatatttta

SEQ ID NO: 31142 - DNA, 1440 bp, Cannabis sativa
acatgtggtagaaatcgattggtccatgtggcatcaattgattggtccatgttgcatcaattgattaatccacgtggcataagttgaatggtccacgtagtataatgagtccacatggcaccattttattagtctacataatcgttgaaatttttgtctatattaatgattatgtgtatgtaaaaataaaaaatagtaatttctaaatgttcttaaaaagaaagaaagtaaaagaaaaatacattaacaaaatagtaatgctgaaattgttcataatttttaatactaaaaattttcataatattcaaaaataaaatactacataaagtttattacttagttaatttatatgaagaaactaagaatcatcttgggactcccaatttgaaaagatggcgactctctcaaattcgcatttgaagcttgatctattggaggtggtggagatggtggcatcaaattgttttgacgaagtatatccacaacaatattaagttgttcattagtagcattaagccaagaagttgtatcattaagtttttcaactaactctttataagttagttgattattcacaatattttcatgaatatttccacgatctgaagtacgagttgttacactaggagaccacccccaacctcgcaagtttaccgaatgacgtccaagtacacgctccataatatctttatcagataattcttctggaggatgttacgcccttaactccaacattttattctaataatatatttaattaattattagtaagaataaaaaatataataacatgtgaaataaaaattcaaattacatacatgtaaggggagctctattccagtccatcctttctcggaatcataatgctttagacgccatgtctcaatttgaccggtagaagaagttaataccattccacgttgaatgtgatgtcgcgctgtagagactgaaccattttttgactcccatttcctctttgatcgattggtagtattctttaatgctctttcctaaagaaataaaataagaataaattattagtgaaattcttccaacactgtaataataaaatttaagagaaatcaataaaaaataaaaataaaaataaaacatatatttccaatcttcagctgaaccaatttgtatttatacctatgaacagataaacaatgataaaacatgtaaatattattgaaactcaagagaaattatatatggtaagtactataagtattttataaaatgaaccttaagtactatgatcactcatgatcgatgatacataatacgtatatgggttattaggtatatatcctagagtttcattattaagaaattgattatgaacttaaagttaaaattagatagaataaaagaaaataaatttgatctacactgaatagggataaatttactgttttacccttaaatgtattttat

SEQ ID NO: 31143 - DNA, 2634 bp, Cannabis sativa
atatgctaaatcctcactttttcactaaatcctgatgaccctatataaataacatcatttaaaatcaatctatcgtaatgcatgcaacatgcatacgtgagaacatcatcaaattaataaaattccaattacacaattcataatatagtcaaaattaaccctaatggcctccaaaaagtatttacaatattcaaacactttactctatatttattaatcctttaattttgttattattaaaagcaagtcaagaattttctttttcttatacatatgttcttttctttttctctttttcttttcttttcttttcgtctttgtaagttcagtcattttcgtgctttattattcatgtacaatatattacaagtttcacacatcttactcaaataaatagtcatgacatcaccatattagtcttaattatcaaaattcaacaacttaggtcttgtctcatttacaataattacaatttttatataaatgatttatttgttaattttgttgaaagatatgtagatgtgaaggaatttcaacatcaattttcatttggaaaaaaaataaaagaacaaagaaaagtgaatgaaacttcactattaaaaaaagtgtgctagtaatcatttgaatattggattttttccatcaccatatgaaaacttttaagatacttactctaagaaccgaatatatcactactacaaaacaagcctttagaggtgtttttttcagcataataattaataaccgacgctataggattggaaaattttttggaagagagaatttgacgctataaggccgggtccagtgtcaggtgttcaggtttcggggtcccaagggtcggcgtcctgagaatcaaggtctggatccccaacgttagaccctttgtaaatattataatacaaactaatacagatcattttgtatgtattaattaaataaagtgatggacatcatataaaattttttagttataataatttatacaattatttttttgatcatacattgttttttttttgtgagagattcatacatacatagtgtttcttgttatttaatacagtacacctcttatattatttttaagttacaacatttttatattttattttcaatttcattttttttactatattctgatctttcaatgcctataaattaaacccaacaatgtcttctcatttcatgtctcaaatttcttaatcttaactccctttcttcttgtctaatatctctctactccattctcatatgctgtggtgatttctcaggctgtgaaggttttcttttctttctctctaattaatattatatataaaaacttcattgagagtatcattcatcattttgttgttacaattaatgattttatcatatatttgcaggtgtattgtaacaagatgtacttttgtccaaacaaccacctattgttcacaaaatattatgattatacctttccttgcaatatatgtggtctttctaatattacacctccattttatgcttgcgaattgtgtgtgtatttcgtccacaaatcatgtggagaattgccacaccatttgttatttcactctaaacatccttcccacactcttaccttgtcttcggaagaaaattacaagtgtaacgcttgtaatagtaatttttctttttctcctactttcaaatgcgactctacctgtaatttttacttagatttaaaatgtgctatgatggcccccataacattcaaaaaacttgatctcgatcaaactacgaccattattcaacattctactcatccacatccaatgaaatatttccatgttgactatgatcaaaccgctcattgttttggttgtcgatcactaattaaatctggttgtcaagtttatgtttgtggagaagatttcgattatgttcttcacaaatgtgtagaacttccaaaagaaattcagtatccttttcacttgaaccatggtcctcttactccaaacataaaatatttcaaatggttcaatgataaatgcaatttgtgtaacaaaatctacacaactatattcattttcaaatgcaatgagtgtagtttttggttatgtttgaaatgtaatgaaattgcaatgagagcgaaaaggagtatcaagtataagtatcatgagcatcttctttgctttgcttctgatggtgatatgtttattgacaataataatcagtgtgacagtatgattcttattgcaagcaaacaccaattatacttcacaataaagaattttttgacacttctccttatacattttattgtttggaatgtgatttcaaatcacatttgttgtgtggaccactgccatctagaattgaatatgagtatcacattcatcctctgattctttcggagttgttcatcaatgaagaaggttttgaagactattattgtgatatctgtgaaatgagaagagatccacgaatacgcatatactattgtgcagattgcaaatacgctgcacatgtgcattgtctcattaatgaggtattagattctatcttaatcaatctaaatacatttttttattgctatttgtatgtttttatttaaaaatattacttaatatttactattctacttcttagttgaagatatcatatatgattatt

SEQ ID NO: 31144 - DNA, 1966 bp, Cannabis sativa
aacaaaacctaaaagttgtgcatccctattatataaaatataataaaataaacagtcccaagttatatacttgtgaccaatatggtggtgccacgttgttcaagaaggtgctcctttcttgtatggtatgtataggattggtcttgtaaattttttaaaaaatggtaggaggcattttaaggtgcaaagatgctatgtataattaattaatatggagttttaaatattttaattaaataaatattgaaaaacttcggttactattagtattttttttttgctggataacgctgctattattttgagaatattgagaatcatagtgttccaactcaaaactaattggtgatgagtggagtagctcagtttttatatataactcaattttctaccatttattaattctatgtgggataatatttacaatattctccctcaagatggtggatcacttgcctgcaagggatatggctctgatactgtgttgagaatcattgtgttctatctcaaaacgaattgatgataagtgaagtagctcatgttcttatatatggctcagtactttaccatttatttcatgtgggacaatgtttacaatagagaaagtgtctttcaagagagtaatgttaagggacactttcaggtaaggcgacacattaaaggcttcaagtttgagtttcaagtgtgtagaaattgtatcccgaaccaagccgttgtggcctataggttttcaagtttcgggagtaggtggattggacgcgggttgggacggggtacagatttgggtgggctattattcaaatttttcttttagaaaagcaataaataattaaataaataaaaaatgggagagtacttataatataaaaagaaagtaaaaaaaaaaaaaaaaactctaatggaatttaaattttaggaccctcacttttagaaatatttaaaaaaaaatatattaaaaaagagtgtcatgagactcgaatacacaccattgtataatgtgtacacctcacaaatcaagctatgaatatttgttgtttataatacacttaattttgcttaaataaatgtcaaataatgccttttattttttattttgggctccccaaaagtgtaagcacgggccaaattcacttatgcctagggtcaaccttgaaaagagaaagaaagagggaaaaaggtaaggagacttggagaggatgtttgtgttgagaccataagattatttttttagttttaggaaattgaaaagaatatatatatacataaatatctttccttattattttaattaggtatcggacaggttcgagttacactcgaactccaatacttgtatttttctacactggaacacgactcccgaactcacccaataatttttaaaacctattcattcgggtttttccaagttaggctcggcgagtttctcaaaagggcaagttttcaagtacaaatgtgtcgtcctaccatcaggggctaagtatcacaaaagatagcgtattaatattgtttgtgctattcattatcgagtgctgttagaaatcaataaacttaagatgcaaaattgtatataatttagaatataataataattagataataattaggtatacatgattaatttatagtaattacctcgatttgatagtacaatactatcaattaagtttttcttcctataactctaaattagaagcaatttaatttatctggttatcaaaagtctacaattgtaatgagacaatatgtatatataacgttagggaagagacttagctacataaacataattagactgagtctgctcatcaaatgcttcagtgaactagaaaagctcacttctgtttcaactaaacattacacacataaatgttaatcctattatctatatagatcactaacaatatcgactaacaccagggctgaccctaaaaatatatgggcccaagacgaattaaattttggg

SEQ ID NO: 31145 - DNA, 1512 bp, Cannabis sativa
gagagagagagagagaagggaaaagagggtaattctattttggcatttttcctttgtttttctttaatttttctttaaatgaaaactaggattaactatattattctaggctgaaaataacagctaggtgtcagcacttaaggaagccaccaaaccatccattaaacaaattactaaaatgcccctaatttctaacttatgcattttgaagactaggggtaaaatggtcaaaatccgtaaccctgctcaaactattctatttcctccaacatacatcccactaagaaatatgattctagacctacccatgtgatcaaactagccatccattgcattttccgttgtcaccgagtaaaaattataaaaattgcaaaattcacatataacacaaataatacacctagagtttaataaaatctctaaaattaagaaattataactctaatgcccatttctaacaatgggacccacaaaacaaattaaattcacaaataattataaaataccaataattagtactaattgtctttgctaatccaaattactaaagcggtcattatagaacttaccttagttacttctaggttgggcttaggtacaagaatctgctctaaaagcaaataaaaatagtgaggaaggtctctcttgctggctggtttggcttgcacgaacgggaagaagaaaatgaagcttgtagttccttagcttctaagttatctcgaataataagtttcttttctttattttctttctctttttaaaatggtcagcccacaaagttaaaagggacaaataaatataatttgcaaaagactaatctacccctcagaaaacttaagcattaaaaataatctaggggcattttggtaatttaactaagccatcaaactgacattccaaaatactaaaatagtctcaaatatttccaaaataattcatcccttattgtcgtgacatcacaaaccactctgtccagtttccacgatcactgggcccaaaaatattttctttcaaaaatggtatccacgacacccacatattccaataaaatcttcgtaattgataaattacgctataattaaatcatttaataaatccatactaattaatctacgtaagatcataatcttacttcattaccaaaattaaatatttaataaaatatgtctaattatttaccataatattttttgggatattacaacagtatttattatagttgtcataaggttatttttttggttaattattgttgttttatagtttatttagtttatttatagttgtcgtgaggttgttttcatttttagttgttttcttactttttatcgagaaaaatgtactttttaactttaaaagcgtatttttgtaaataaaaattttacgttgtaaaattattaataaaaattaaaaataatatttttaaaaatttctctttaaaaaataaataaaaataacacgcaaataaaaaaaaaatatgtatatatttatattcatttctattgaataaac

SEQ ID NO: 31146 - DNA, 2312 bp, Cannabis sativa
tctccaaattatacaacttacaaattgtattaggtatctcttcaatataattacaatctaacctcaaatatcttagatacttcaaattgcctattgaatcaggaaacttgttgatcacaccattctgtatagatagtactcttaagcgtgggaatgattcatgcaacttagacaacaattcttcaccaaattcatggaacaataataaggtgcgcaagaagcatttctctttagaaaactcctgaaatttcttaagcatactcgcttcttcacaatgtaaatggcgaaccttgagagaacatttcatactgttattcatcattacacaaaactcgccagagataaacatagctaaatcatgtataagatcatgcataaggaaagtttcttcactgtccgatgatgaaggttggaaaaatgacatagaaagaagataatcgaaatactcttctccaactttttcaattctctctccatttgtagactgaaaaagaccttcggccatccataacaagaccatctcttcttttttaaaatgataatcttttggaaataaagagcaataagcaaaacattgctttaatgcagaaggtaaatgaaaataactcaaccacaatgctggaagaatttcaactcttttcctttcgtacaactcccatatatcattgtttaggatgctctcccattcctccttgctgcgtattcctcttaacaaatcaccaattgactttattgctaaaggaagacccttacacttatcgactattttttctccaacttctttgagatcaaagtaatcatttgagtctacaacaagtaaagcatgttctgcaaataatcgccaaccagcagcctcattcattcttcctagttgataagttgaccctgttttcataatcgatgcaacaactgtgctccgtgttgtcacaacaatcttacttccatgttttcccgatttgaaacaattgttcaagacatcccacttggcacgattctcatcccaaacatcatcaacaacaaaaagaaacttcttcacactcaaagccttctttacttcttcttgaagatcatacggctcctcaatttcacatctttcagaagtgaccttctcaacaattagtctcatcactttcatgcagtcaactttgtcatctcccacagtaatccatactttcacatcaaacattttgttgactctttcgtccttgaaaacaagttgagcaagagtagtctttccaatcccgcccatccccactatagaaatcacagataatttatcaccaccggttgtttcatccaacaaaagcaacttaataatctcttctttctcacaatcccttccataaatttcagactcttctaacgatggagcacataccctctctggcttcttatgatttctcacaagtcccaaaccaagatctttattgtctagaagaagcttcaatttcccaagtgtctcttctatgtcaaattttatgtctttatcaaaagaagttaaaggatttgatgatgagatgagtttcatgagtaccttactacaaccactgtcatgagattcatgatgaccttccatttcttttcgcaatgcttcagtgtcaatcttgtaaaccaaatcgtctgcatcataaatggtgtccttgagatcatcaagccacttccttactcttgggtctttgatgagcttttcctcagcatcaatgagcagcatatcagcagaggacagcaaagtttccaactccttgagcagcttgagaatggtctcttttcgtttgaagaagtgtttgacatcagaagctaactttttcaccaagggatcaagaaaagcagagagaagtgctcctccaaccatttcagcagccatgattatcaacctttttgagggttttcgaaggacagagctcctggctggtcttatcaaattaagtagtatataattaagtacaaataatgacacttataaagagtactacaataacacttttctaaaactttatataccttttgacttattagttagatgtcccttcaagtttgtgttttttgtgattcagatcccacttccaatatatacatatgtattctttttttcttaattttttttttcttaaaattaattattttcacttaattataattctatataaagctaacttacaaaataagttgatattttcaattaaaatgctaagaagaaaatcatgactttatgtaaaagacactttttgttggtggcttgtcttgaactttgctgcatatttgttttatcagtttgactattatttattaagctgccatcactgactcagtag

SEQ ID NO: 31147 - DNA, 2457 bp, Cannabis sativa
  modified_base (858)..(858): a, c, t, g, unknown or other
  modified_base (1016)..(1025): a, c, t, g, unknown or other
  modified_base (2086)..(2092): a, c, t, g, unknown or other
tgacgacacagtaaacaagaacatcaatgcgataaggatttgtatgaatttataaatcaaataaacatataaatgatcacatgaaccaaaagtcatacaatataagtaatgagaataaatctatttctttattgataattgaatagaaaagattacattaaatagagttttatttagggcacaaagcccaacagataaaatgtcccaacaagatgtctctaagtatcaatactaagaggttaaatgcacacttgtgtatgcattaaactagactcttactgttgagtgagagccatcaaagatgtaatcaagcaaggaaaatagggagacaatcaagtgagaatctctaaaagtgacatatatgttagatgataggggtgtatattagaattcttgtatctacactaagtcagaacttattagagatggtagttacattgagggtggaggaattagtctagaaggatgtaaaaatccatctataataatttagttccaccagtaaaactaaataacttagtttctttcaaaatgcaccagaaagttattcaaattgaagaaagttcttaactggtttttatctctatttcattttggatagaattagagatgtctcttctatacattcagatgcacttaataagctctaaagaattcagtatctctacaagagtaatacatacaaaaaagtgatgttgcatagcattttttgaacatataggaagtaatggtggagaaagcagttgcttaccacagccttacagttcctggtatttgggtttagtcaaacacactacacttgatatggatatcaagataatggattgattgaaatgcacttctagttttatgttagtncaagtgggagtttgttgggatttgatgtactaaataaaacccatttcaatagaatcttacttgctatcaataaatgattagaagtcatttaagttaacatgtattttccatgcttatggtttaatataaattttttattaaatccagaacatatagtnnnnnnnnnntacagtgatgtcaacacagtggaaggtaattgtgattatatgtttcaaagcttatgtcccatgattcattagtacactggatttacaccgatgtgataattagcgataaagtttacttacaccttggataagtgttatgtccttggtattggtaaagtatgccactattgatagtatggagtatacattggactggacggatattgaacttggtaaagatattataatcttatcattgtatctttctcagttaatatcaccaagttgatcttagatcaaaagatcttaatcctcatatggttaggttcaatctcaagattgttatttatattcttataagtgttcgttaaagctaaccaattagttcagtaacacataaatcctgagaacatgataatacaattgagttagagcgctaatcatagatacaaaatctatagcttctatctagacgtagaagtgacatgacgaaaagagattttagggtttgtttgttaattgagagattttgttaagtctaattaataaaataagttaaatgaaatttttatttgataattaattttaattattaaataaatagtattggcatttaaaggattaaaattggaaactatggtattagtgaaagaacggataaattgttaaataaaatggcaaaattttaactagtggggcccatcctatggcgagccacttaagagaatttttagcaaattttgtctttttttttattcaatattatttaaatctaattatagaagaaatcctatataagcaataatatggctcttattctcatccaacctaacattctagttttctaactttgtcagacaactagaaacttgacagcctccttccatagaatttgaatctccttctctttctcttcataaatttcgagccctatagtgaaagagtatatacctacctatagcaagtcaagtacttaattcttgtgcggaagattgggaagaattcaacacctaaaggagaaccatacttagatcttgttattactctacgacagaaaggaaagggttagagatctgagtggnnnnnnncatattattctgctgccattaatgtaaggttttctaaattttatatgtgtttaattatatttttttggagaattcatatttagattgttaaacaacatacatgttagtaaatctagaacctgataaaataatttccaacccttggtatgcctaatttttataattttactctttaaattatacttttttgtgatggattttgtctaatttacttataaatatttcggttttcttaacactataaaaaattttacttttaattacaacaaaatttgagacttaagataaaaaagttgtggctaaatataaattatcattattgtcttgtgactaaaatgtccggggctaaaagtattagtcacaaa

SEQ ID NO: 31148 - DNA, 5980 bp, Cannabis sativa
ttagttaaataaaaaattagtaatattaaaatataaaatttcaattggtatcagagtaagtcattaaactcttagtgagatcttgagtttattttattacatttgaattgttttatgtgagatgtcgttgtttgtagaaggaagctccattactcgaccacccatgttcaatgactcgaattatccatattcgaaggtcagaatcagatcatttattaagtcacaagataagaaggcatggagagctatactttcaagttggtctcgacctattaaaaatgatgatgaaggtaatgctaaggtaaaacttgaacttaattgaactactaaagatgaaaattatctgattataataataaagctttgcatggtatttttaatggtattagtgaaggctttattgaattgatataatcttgtgaatctttaaaggagacatgagaaatccttcaaacttagtttgaagataccgctgatgtaaagagatcacgttttaccatgttgcaaactagattcaatgaattaagaacgtcaaaaattgaaacttaatatgaattttatgaaagattatttgatattgctaatgaatttttttccttgggaaaaaaattagataaatttgtgttggttcgaaaaatcattcgtgtgcttcttgatagatttgacacgaaatactagcaatggaataggcaaaattttttggcaaattaagaaaaagggtaagtcaaactcttcaaatgagaaaagcaaaggtattctctttaaagtttttgaaaaatatgtttctgattatgaggatgatgatgaattggctaattttcaaaagcacatgataaatgttggaaataaaaagaatttctcaaaaactccaaaaggtaattatgtatctgattattttgtccccaataataaaaagggtatttaatgcagaaaatacaaagggcatggtcatattcaatctgaatgtgtcaataccttgaaaaagaataaaaaggattttaatgttacttggagtttcgatgattttaaaaatagtgaagatgaaaatattatttgaacaagtgttttgtcaagtaatttatagaaaaaataaaagaaaagaaaagttttgtgtttaaacaatacattgactgatgacaatgataaatgagctctttcatattcaaatgagtcagaacttgatgaaggatcattgacagaatcttacaaggtaatgtttggtaagttgatgtaaatttgtgatgaaaactgttccttagtaaaatttaataaagagttatctcacaacatcaaagatcttgaagagaaaaatacatgttgtgaatctgaattgatttcaaaaaattctaaaattgtatatttaactaagaaacttgaaaaattgaaaagaaatgttaaaatgctaaatctaggttctaacatttttaagaggttcaaaagtcaggacaaacgagtcatgctggtttgggttttattaaggctcaatttaaataaaatactaaatttaaaaatttaatttctggatgttctgacattactttgcagggttttgatttctggatgctaaaaatgtattgttattacagaagtagtttggtaagtttggcaatcccaaaggaaataaaaatcgattcattcctatatgccatttttgtagaataaaatattacattcgacctaaatgtattaccatgtaaaatatttttaattctaaatcttttggaaataaatatgtttctcaaaaataaaaatagattgtcaaaaataaatatgtagttggttcttcttgctttaaatctattgcttctcaaatgtgatatttcgacaatgattgttccaggcatatgacaggtgttgacgctgaaaagtggccaacaacagctcgctagattggtgagatgaataataaatgtaagtatataatttagagagacacaaaaaatttatagtatttcactccccatgtcgtgatggtaatgaagctacttctacttcgagtttttatttctcacgagatgggtaattatagaaaaaggcgaagtgcttaagctctggtttctagagagagatgctctgaccttgtgggtagttttgtgaatatgaaaaatgaactaagagagctctccttttatcgttgaaggaagcccacaaaaataggaaaaattaattcaaaatataaaaaatcttaattggctaattttgaccatcgataatgatccaacggtcaaaattaatttttgaagctcatagtcatttttcgaagcccggcgggacctgctgcgggtaacttggagcttatttttgtaactcccttgggatgaaatttgaggctgataaatttagaattgagattgaagtgtgagacatgacttgatagatcattaacttagcttcaaaatttaagttgaattgcgtcaatcagatcaatattgagtaagttgtggctgttttactgaactcagtttataacctagtgtccaggttgacatcctagcgcctatgttgacatatgatgtcaacctggacgctgggtaagtggaaaaacatttgtgggtataatttatggtgcctaagtgatattttgacatcacttagtctgttatgtattttggcaaagctgttcaccaattctcaaagatgttattgttctgcagaaatgagagtctcaaaattctttatttttgagtgagtttctcatgtttgaaatgagaaatgagaagttgtgaattttacttatctgaattcataaatcttagtcattgtgaaaaactagacagacagtcaaattggaatcagaatcaaataagcagaacttagcgcatcaggccatttgttaacctgggcgcttggtacaccaattccaagctctcagaatgtcgttttgatacttctaaggttcttgaacttgaggacgaggtctcttaccttggttttgaccattttggattcaatggtcggatcagatttgacatttgagtgatccaaaccagtgcaccaagttgattgtcaacttgggcgctgggcccaacactaggtcaacttgggagctgggccctgtgtctaaggtctcagggttgtggttttctcctcaagtttgcttgaatctttattatttctaatggtagaaaaaaaaaatacctgaaacacttttttgagaacttgtttggaatagcccaggttgataatatgtcaacctaggcattgggtcccccttttggcccttcagaagttctgtttggtcatgagaaatatttgaatcttaatattttctaaaaacggaaaatatgctcaaaagagttctcggaaaccaccatcaaaatacttgggcgctgggccttgtctttggcacccaagaagtgttgtttcttccctaaaagtacctatatccccgtttttgatgaagtcgaagatgatgtaaaagtcagatcattgatttgatacttggaaggtgtgcaaattgacaaattgtccacctgggcactgggttctctgggtactaaaaaataaacttgcttcgaatttgattctaatacctcaaatatgtctgtggtatgtctagtttatgtcccaatgtaaattttgacccatttacactaagacggtcccaaaaactgaaaccttagttgggaatgtcaacctggacactgggtgaaaccctaggtgcccaggttggcttttggggtgcaggttcatgtaattttaactctcggggcctagatttgacttcttcatgtcttcatgctatagaacactgaaagatagtgagttgaattcaagttattgaagtccaaacttccattccagagctctcgaagttaacgtgggcacagggctaaggacccctcccaagccaacttgctatgactcgggactacttaactttgagatgtcatctttcttgctatgtgtcaaacattgatgtccacgtcatcaagattacttttggtgtaaacattttcccccaagtaagtgtgaggttgacttaataaggtgaactaagcctgattctcttgaaactaccaggtggacatcagttttgacaatcttggacaatcgcttatgttattcaagcgttcccactaagagtaggagtttgaattcgcatttcttgttaaatagtagggttcaaaattttaagtaaaaaaagagaagagaaaagatgatcaaaaaaaaaaaagatgatcatctttttttatcatttatcttttcatttttaacttaaaatttagatgatttcttgagtgatttctattgatttgagcaactgtgaaatcatgccgccattggaatattaacatttactttgatctttgcctattgtcttagcattgaatctcttgtcacactgtgtgtttatgtaaacatagatgtaatctttgtcttctcttaagttgtagccttgaagtcctttagcattccatcagatgcagccttttgtcttctcttgttcatctccgatcgatttgatagcaaatgaggcatttgtcaactccttagctttacagtgttggaggccttcatcatctccctggatttacagtgcaggaggccttcatcatctcctcagcttcagagtagaagaggtcttcttggcgattgtcaatgatttgttgatgcagtcactagctgttctttggtcaattaatgatgtgaccaactctcgaattaatatacccaagatgggggcgatgtcttctccatctcaagttcaccttagagtgattgtaggtgcggtctctattttttccttggtctttaaccttataggttttcatcgtctaagccttcttcatccccttggctgtcttgacaacaaaagaggtcttcctcatcccttggttgttagcacaatcaaggaagtcttcttggcaaatatcgttgatgtgttgtaacattcacatactactctttaattgccaaggaaatggtcgatactagctgttatcgagaactggacaaacatatggtagatatgtgagatggctcaaaggtcgttcggtgttgaccttccaaagagacttggtgccgatcactatgaaagtagtcatagtgatgtttgtcacggggtagttttgactatgagtggtaatctaattttaccacagggagcgatgttggctcactcgaaaccatacatgagctacttgcatggctccgaatctcttagggagtgacccactctttttagggtctgttttgattagagtatttagtaatgtttgattattaaccatcatctttgtcgccttgatgtttgaaattttgtcgacactgtctgagcttgattgctcttgtcctcccaatttatttaactagggtaaagctttaaaatcaatggatatagactaatttaggcaataaattaatgaagcatataatacctttgacaatattaaaaactacaatttatcacaaacactatagtaatcctaagatgataatagattaaagtaaaacttaatttagtaataatctaaataagattaaaacaataatcatggtattgaatatagaaaatagaaacaattcgttataatggaaactaagaaattaatattcatcataaaaattaaagattcatgtcttgggttttgaaataatccttcactaaaagaaaccactctgaattagacattataataaaaatcataataaaaagtatgagtttaggaagaagaaaaagagcaatgatgtagaacaattggtgccacaatctccttcttcttctttctctctaaaaaatacaattcaaaggtccccaaaaacaaccttaaatgtcctataaatacccttgaaaatcctataatttcaaaaatatcaaattcgaaaaaattggaatcgtgctcttgccgcagggaagggaagtgctcgccgcgcgaccatgatccttactgtcgaaatttttttgtgacgtgttcagattagtattttggccataacttccttaatacaacttgaaattgaacgattcaagatattt

SEQ ID NO: 31149 - DNA, 2348 bp, Cannabis sativa
gctattcaagttctcagcgagatgccccagtgagatacgctttgcagcgtatctaaatccacgtcagcattgacccagtaaaagaggataaattacacctggatgattttcagataataactgcatttatttacgtggtgcgtaattaaggcccacgattttaggaaaatgtgattgtgggatttgaatctgattgtaattaactgtcaccctatgttactataaataggggcagaatgtattgaaaaaaaagggaaaatccttgagagaaaagaaccctagtttgtatcagaataatctgaataagattgattcgtggactatgcagaattttaactgcaaaaccacgtaaaaagctttgtgctacattttcttctttaactttctattatttctgtgcaaaatttatcacgaaataggcttattatcattaacgaaaatctgcgttaacatttttttatttcaattctcatatatatttttttttctattttctctaaaattcacccaaataagaatatattatggacaaaaaaatattctaactaaataaattattctgcaatattacaacctataatatttattaaaataatctaaaatatcttcaattatataatacacttcaaaaaaaaaaaaaaaaatctaacctctgaaattaatcgaaaactacaattcaaaattatttaataaaaaataaaaaatattttgtacaacaaatatgaaatacatataactcaaataaactattttatatgtctatttttattttacaaatagtatgatatctatttgtttctttttttgaaagaaagaaaaaaaacaatttgactaaattaattattatgatttctctgaatttgtgggaagatatttttcttttcaattattattgttttttgaagggtttatttatttttacactttaaaatagtttttttttatttttttttattttacagaattctacataaaaacttctattgtaactagcgctgcaacttaaattgcaacaaaaaaatcgtatagcaacccacatagaaaccaccagaaaaaccattttagaaactcaaaccgtaaatttaaaaaaaaaaaagttaaaaaaacagtatatggggtattttttttttaatagtatgatttaattaaataattcatatatatatatatttttaagaaaaatattataatctgttttatatttatttaattttaaatttgaagagttgaataattatgttctaattattattacattttagagatgataaatagtttgaatgattaagatataaatatgacatattacggggtataaaaataaataagactaataataaattagaggtagtgctaaaagaaggaaagatgatctaactttaattatttattttatttgatttttagttaattagatctaaagatttaaaattaatgtatgcaagagtgttaataaacaatacatatattttgattttttttttgttttatcattaatgagtaattttagtggactatatatctgtataattatatataatacattatataatgtatgtatctttatattaaggatttagacaattttattgtttaattattattatataatttttatcatactttaaaatatatcattttaaattataattttaaaatatatttttaattttagtaatattaaaagcatatattttttttattattttttagttaaattatatgagacacgatatttattacattaatatatctatacaattaatataatatattatataatgtatgcatttttatattaaggattagacaattttattgtttaattattattatataatttttatcatactttaaaatagagaaatgctaaaaggtactaatggtgcctagtactctcttatgtgtcaaaatcgctattggtataactaaatatcgggtctcatataatttaatataataacttttagagagtatcgctagcataacgcgatatgtcgagaagatgctagtagcggtgggcatccgatccaatccaactgttttttccttatccgatcaaatccaattagtaattggatttggaaaatcatcatccgatccaatccaatcagatctcaaaatttaatccaattactaattggattggatcggttttttaattggatatccaattatcacccaaatttcaatattaacttaaatatatgaagaaaaaaaaaagtacgtaaaaactaagtatcaccttctatttaagtataatacttcatatacatactatttttacaagtgtatgtagctaaaaattttaaataattaaaataataacatttctaagtaataaaata

SEQ ID NO: 31150 - DNA, 2183 bp, Cannabis sativa
gacgagagaggagcagtcggaggtaaggcgagcgaagcttcgacgtcagcgataatggcttcggcggaggagatgtcgtggccagagatggtggtgggctcggtgacagaagcggcagccatggagttccaggttcttggagccatggaacatgaagatgataaaggaagggaggctagggtttattgctatttgataccataatagaagatgaaaagctctctttatttatcagctatatcacacggcagtaatgccaaaatgtgtttattgtaaatacaaatggtctatttatagagaaagaaataactgtaacccaagagtaatgggccgaaaataaggcccagtggccacagaaactaatattccatactttttgtatttgaaatattaccacggctggtcctatgcataagcgggttaggcccgtgcttaaacccacactttttgtagcccaaaataaaaaatagaaagtttcattaggcttttatttaagtaaaattaagtgtatttgtaaacaacaaatatttttagtttagttggttaaggtatatggcacattacataatgttgtgggttcgagttctataatagttcctatatatacatacttaaagactttgtccattttttgttggtttgtaagttattttaggttggcgcaaatgagaatactaatgtcatgtggtttttgagttatctgttggttgtttcatattgtaatgtttcaatatcagggtttatgctgtgttatttttatgttatttacatggtatatattttaaattttgatattgcagttattattcaattgtttgttagttgttcaactaaaatatcttatatattaaaagtgactatgtaatgtcaattcttgatttaacaaatttttttttactgttaatttttttttttaaatctatatctgttaactttcacgatactatataacagaactgtgaattaatattattttcttattcttattacaatgaaattgttatcgtgttgtttattcgttgttattaagttatttgattgagagaaaaataagtatatgtttagctttttatggatacatatattactgagttgctatacatgtgttttgtaattgctcttaaagttttatacattagtagcattttttacttttttggagttattttcatgcctctgtaatttgcatattaaaataaagttgttatgcagttttttttttttgttatttagttgtttaaccaagagaaataaatatatgtacatgttttatttaatttgtgtgttgtttattttattttttttaagttgatgctcaattaattttcatattaaaatagaattgttattctgttatttattcgttgttattaggttgtttaaactaagaaaaaaaatgagtatatatttatttattaaatgtgtagatatttttttgagttgatgtacaaatattaagtagttattttaaaaaaaaattatatcgtttatttgtgtatttttttctttgatttgatgcaatttgtggagttattttcatgcctatttaatttgcatattatagtaaattgtttatttattgtttttttagttattcaaccaagtgaaaatgaatatatatatatatatacatgtttattttattttatatattagtagtgtttttttactttcttagagttattttcatggttatgtaatttgcatattgtagtggagttcatgcacttttttttttttttgttatttagtggttcaactaagagaaatgaatgtatatttacttgtttttttttatttgtgtattttttatattttattttttaagttgacgtaagtgttgatgcccaattaatatttatattaaaatggaattgttattatgttgtttattcgttgctattaagttattttggtatagtattttttaggtttttgtcttataaatttatttttgtttgcataatatgatgaactttaatttatttatatgttatagtttagttgttttttagttatttttgtgttgtcatttagtcgttttgcattgagaaaacaagttgtgcacgttaaaatctactttgtctgaattcaccatgtggcaactactgatatgctctgacactacagtttgtaagtggcgccgttgccggggagtgatagttaatattattaaaaattaa

SEQ ID NO: 31151 - DNA, 2744 bp, Cannabis sativa
aagtcaaaacttatagaaaacacacaaaaaatacgtaaacagtaaaacacattacctgtaaacagtaatactgtaaacagttacatgtaaacaaatttttatataaaaacacaaaatcaaatagaaaataaaaacattaccacagtaaagcagtgtgtccttctttttaaccaaaccaccatctccaacattttgtaaaccttcaccctaattaaacatattgaaaataataatgatataaataaaaataattaaacataacaaataataaatcatattaattagtcttttaataaatcatatccatatacaaaataatttcttttaacaataaaatacaaaactgtaaacaacaaaatatttataaaggaaacatgaacaaaacctctacaacagtgtctccctcattaaccaacacaccaccactttcagcaagatttaaaacaggatcctgttacaaacaaataattaaaaagaatatgagaaaaactaagtaatcataaaaaagataaaactacttaatattgcaaaaaaaaaaaataaagctcattaaaataaaaaactatttacaaacatacaatagaataatctttaacattttcagtaaccaaatctacatcatcaacctctttcataactagatcctgaaaaaacaaacaaacacatcaattataaaaataagaactttaaaactataaaataaaaataaacaagtaaaaaaaaataaataatcatatttacatccttcactgccaaatcaacattaacaccatctttcaaaccagattcctgcattaaaacaaatattaataaacatacaaacgaataatagtaagacaactaaacaattaacaaatggataaacactcacatcatcactatcaccaccactatcatcacggatatccacgacactctgagaagcttttaaatcatcaaacttttctttcaagtcattaaatttcaaatccaagtaaaattgcaaactttcatcaatcttagaatctatgtgggaaatcatattgagttccaactccttgaatctacacttaatatctgatgtaaaaccctcaaaagacccatcaaaatgtaattgcttttgaattacttttttaacgtccctccttaactcatttaaaatagaagattgtaaaccaatcgcaccaactcgatcaacatcaacatctgaatcttccttctcaataaactcaagaccagatagattaagcattgatctctcttcatctgtaggaaatatatattcacctttcagctatcacgaaacaaaacaaaaaaaaaataaacacaattagtaaccaataaacttcaaaaaataaaaaaaaatgtaaactacataatatcaaaaaaataaataaaaatgtaccttaggagatgaaaaaactttcctctcaacagcactattattaggaagacccacattcaaccatctacaaatcctatattctggatcactatcatattcacaaaaaccagccttctgacaaagaggaatagtttcgtaaatccaaacaagaaatgcataaggaaaacaaggcaacttgtaagtcctcgaagattctttatcagcagcctttgctttccctttacgcttatcaatatgcttggaaccaatatctttccctgtttttttctttggtacacccctcaaaccaatcctcaagttgtgtaaagttttcttaaaaactaattttccccaaggaaaactctcataatcaccaatcccaacaatattgagtatttcattaggaaccttcttggaattagggcttgtgaacaagcaattagaaacgaaatacaacaccgccatcttaacagcgtattcgtccaacttaaaatcactatacctaaacctctcctccacagcactgactgttacttgttgatcactaaaatacttatccacaaatgcattctccttctttgcataaccactcatatcagaatcaccaacacataataaaccagtcacaacagcaaactcagccaaactaaacctgaaattttgagaaccaaatttgaaccacatttcataaggatttttctggtgtacctccctgtgcaaagcactgtgaatcaactgagtttgcattgcaattggattcatgtccaaaaaatgtccaaaacatgtctcacgaaacagctttgcttgagaaggagtcaatttactattgataatggcaataacattgttttcatggttaggaaaaaaaattattcttccaccaaccctatcctcatgcttgaaatataactcccactcctaaaaaattaaaatagtaatcacataaaaaaattaaaataaaaaattacaaataaacaaaactatgtaaacaaaacagtcaacatgccaacaataatgaaaaaacataacattattgtttactcctgaaaatagcaaagtatacaaaaatacataaatattaaaaaattaaactaaatcatatacaaaaatattaaccacctaagaataacggcaatcatttgtaattgaaaaataaacaaaaacaaacacaatggacccaatgtccccaacaactaaataacaaagaaaactatgtaaacaaaacagttgacataccaacaataataaaaaaaaaaaacagaacattactgtttactcgtgaaaatagtaaagtatataaaaaaggttagttagtttaacaataacaataacaataataaaaagaggtgttctaaaatctaaatggttagttagtttaaca

SEQ ID NO: 31152 - DNA, 2659 bp, Cannabis sativa
  modified_base (1677)..(1680): a, c, t, g, unknown or other
atgtaagcaatgaaaatctagataaaatgacaagttcattaaaaatatatttgaatgtgcttaaactgagatcattaccgatgatcgcgagatggaattgatgatggctcgtagattgaggagcgggcaggtaagctactcgcacgtaaagtaggaaattaactacttaacatcagaagaaaggacgatcaatggatacccctaacaaactttatgcatgtgatagtttatattgtgaatgaaacgcaagcaaacgtccgcataataaagtttatacacaagagtacgaggcattaaaaagcaaagttggtcgtccaaccttgcaaatttgtctttgcaagaaaaaagggggtgccactaggtctcagccaatgggccaattcctaaaaaaaagggagataaataaactaagtctacatgctgggagacttggatagaacttcttcttcttcctcgacctcgtcgtcttcttcttccatattggtcttctcgtagagagcgaaagtttcctcttccctctcctccaagaagccggtatccttgttagggttccaaaaccaggcccagcagacagcgcgaattatcacactattctgcgatctcaatttctttctcggcaagtctttcagcaagcttctcctcaaactcatctacttggactttgagggccttctcggcctcctcttttgccttctcggcttctttctttgctttctttgcttcctcctttgctttctcggcttcaagcttgaggcaggtaatctcctattgggcgttgtctcgttgctcacacacatccttgcattggaatactaatttgtgagtctcgccctccaaatactcaagtcgctcagagagtagttcattggaagcaaaagaagcaaaggaagcctggagaattgcagagatatgagtttaaaagaggtataaaaagatagtataatcatattaacaacgtcgacgtaccatgaagtgacagaccaaggtccttgaaagcatctcctttggactcctaagattgagaaaaccccaatctggaggaaggagagtttgaagtttgcgccaacaaaagaccccgtatgcctgggcaaactcagagccagcttctccagctgcgaccgacagggtcttgatggcctgactcagagaagcggtagcggtggtcgccttaggatgtggggtattggtgttaggaacaacaggaggaggaacttgatctaggatctcgttgtccgaaacctcaagatcaataggctcggccagtaacttcttcttttgagcggtggttttcctttgcttcttgggaggaaccacctcggcagcaatggggactccagagttggatgatcttttcttccccttacgatccaggatgtcttcataacacatgtctgcaaaacaaaatgaggtgttacaatcattataagagtcgattaaaaaggggaggagtataaatttccacctaagggatttaccaaaatcactagaagatgagctatcactagatgaaggggtagaaggaccataatattcgctaaaatccatgcagcctgtaattttgaatataccataaaatgtctcgtgatagcggatctggacatggaatctagggtaccaactattaaacttatgagcaatgcggtccacaagaatggaattccaagtataaaaattaannnngcagtcttggaaggtaactaatgtattaccctcaaccctaagtacagtaggtgaccaaccacattgattacctcaagatgcttcttcaccggattcttgaggggcagtgctttgaaggtattgtgcttgggccaagcgatcccaggcctggtctttgggtggaacaattatttgctgccaagaagtatacttaggaatcttataataacaagtgtattctttgtcagcgagaaggcccaccgatcgcaagtttacttcgtttaaaaggaatttgcatgattaaagaccgtaagggagagtcatcaagcacctgtgcctactaaccatgtaggtctcgtcagaagagctgtcaaaacaaacaacacattagtcaagtacttgagaaaggagaactgatgtaaataagaaagtagagaacaatcacttatggagtttgcgaaaagtggttgtgccaatgggggagagaccagacgtccagaagaagtcgtccttgaaggacaccttattttgcaagtctacgataatttttggctcgctagcatgagtaccaagatagaaaaagcccccgcagcgttcttcctcgatggaacggctttaactgagtaaagatattcaatctctacgggcgtgggacaatcctataagagatgggattcagctgaaatggggcaaccccaatgtgatttatataatccttgaaatagtcccgaagagggagaatggcccctgcacaaatatgctcaaggctctaagcatccatactagttgaacaactagtactagtctcaccactagttcctgggttactactggcaaaggtgcagggggtagcaattgaattcaccctctcgtactgacctaacctggcatgattgcccaagtgcaattccacaggtcttcagcttgtcgcctgtatagcccgagatagattgcaccttcgattctattaacttagcctcaaaggtgacgctgggatcct

SEQ ID NO: 31153 - DNA, 2134 bp, Cannabis sativa
gaaaaagacaacgcatccaagtctcaagtaaagtcttttatcaaatttgagtcaatgaacaagagaatgcaaagaactttaaattttaaaacatagcatacttatacattttaacaacatgtcaattgtttaataaaaatttcaacggcagattgtcaagtaattacaagatcatatcaaaatagagcaaatgatgagagaatcagcacaacaacaagaagctttgttatcaaaaaaataagcagcaacataaagcttattttctaatatataaagaaagcaacaagcttttaatatcacaacttactggtttccttggtgaggagcatcaatccaaactaacttgaattcttcatgaccaacagcgtattgtttacgtttttgatgaaatcccaaatgctcaagaatgaatggaagaactttgcagtagtttctcacataattttttatagcttcatcattggccttataaaatgagtcatagatatagataattctttcatctattcctaaaacacctaggaaccaatgagctaaagaaatacctccttgaagacacaatggcataaaaacatgattaagatccacccatggcttcgaaaactctatacaatctcctttaatcatattaatcaagatttttattgaatggcacggatgcttcataatctcaccttggtcaaacttttttatatctgaaaatatcttccttaaatgaatttcatccaatgaactaacatccctacaaacttgacccatgtagaaatcaaaaagacaacttgttgtagtgcatttcaaaaatgaagggcaacatctatggtataatgctttctttcgcaaataatacagagatgtatcaacatgctgaaaaaggaaaaaaaaatagtaaccaacaagatttaaacataacccatcgatttagaaagataaaacaattataaataacacttacttcatctgataaaagacctttagcatcatatatatcgaagaaccacctcttccttgtaacacgtgttgtacccaatttgaacttctttccactttgaaaagtgataatgtcattttttccaacaaatggaggagaagatggagaattcttgctaaaaagaaaacaattgcaattagtttttttttaaaaaatgaactaaaaatatatacatataataaatacgcaaacaatttaccgtttcatgttcatgccttttgaataccactctaagaaagcatcagctacttcctttgaaggcatagcttcaaaatcactatcaaatggaaagttgcctgagaaacaatttatcttcttttctggtgtcaaaaatgttggagaaatatcaacataatttggatgggagtcgactggaggatcacgattgggatgtatatcatttcctttgattacagttgtttcaacaagtgttgaaaacgaaggtggtgaagcaataattgttggtggaatttctgcacttgaagaatgatagacggaagtcatgtcctccttgctcgctaccgaaaaatacgacttttgtacttttttatcttcattagatctttttctcttgggaattttcggtcgcttttgataaaagtatttattgtcatcctacataggtaaaatttatgttagtcatatatcattaaaaaaaggaaatagaaaaaaaaaattgaaaacacataaaagatgcataaaggtaaatgaaaattaatagtttatacttgtatgacagcttttaaaattgatggagaaggagcaacacaatctggactgctaagaacgattctcccggattttaaatcattgatgcactcctccaagtccttttgtgcagccaattttttctcttccactttagttctttctatgtccttctctcgttgattacacaatgctcggagaagatcttcgacacgtttggcatcatctttcattccaacgagatcattaatattttcacgaatctcatctaatttttttccaagaataagaaattttcctttcctacgcttcaagaatactctatcttgttctcagaaagctccttcctattctcagaaagctcctttctttctattattcattctcagaaagctcttttctattatcagcgacttcctttatattctcagtaatttc

SEQ ID NO: 31154 - DNA, 2186 bp, Cannabis sativa
tgataagcatttccttactgagcttttagctcaccccccttactttccccttgcaggtattagacagggaagtatgtatagtgagcagggtgtgttctgatatgtatacagtgagtggctatggacgggcaaacgatctagagcgccggtggtgcctattttattttaagcaattgataaatctaaacacaatggaaatgtattatttaaaatcatatacttatcgtattttgttttacaaatgaaggatccttctctattgcattttgatttctaacacccattattgtattttaaagattttttatttatcttttcaaattatgcatttaaaatggtatttttgtgtaaagtaaggcaaaatatcagggcgttacaaaatcctccaaagctatatatggaagagtaacaagtgggtaaaaaatccccactaagaacacgatcagccttaaacagagaagtttgcgccaaagcatgcgcaagcccattagcagaccatttaacaaaacaacaatcaatagaaaataaagaggctaacaaccctctacaatcttgtaaaacaaagccataaggagaagctaaagttttaacattctcaatatcattgataagcgtaaggcagtcagactcaataatgacatggtgccaatcctttctctttatccaacttagagcttccttaagtcccattgcttccaccattaacgggctccaagctccatttctacaaatttatactgcttccaatacattgccgaagctatctctagccactaatccaaacccgtcacaaacctcatctgaaaaattggtaccatcaacattaactttgatgaaagttgtattcagtttagtccaatgctcaataaatctcccttgttgaacgtgggcagtaggagagattgaggacttcttctgagcattattccaagacacaaagttaagagatgctgttcacaccacttcttcaattgaagactgttaagagttccaaacagtgttgtttctattattccaaatagacttacacaacattgcagctccaagttgatcctcatttttccatacttttaaaccatcatcgaaccacccagcaaagcttgttgcagcagaagcaatatgttgggaattgcagcagcccatcaacagttgtaggaaaaaggacattcaacgagaatgtacagtatggtttcaatcaagccatgacagatcggacaagtgacatctagagggactttttttaatgacagttgaaagcaagtgcggagccagtttgtacacgcacaccataggaggtaacattttagtttcttttctatttaattaaccatatatgttaaaaacaaaaaaaaatttaaaaaattattaaactttaaattttagcaaaatttaataaacaaatcaattcgatgagttagtaaaaaattattttataatttcatatttaaaaattattaaaatgtatttttcttaagcttgtgttatagatcaatttcaataaatttctaaaataatttataaacgtattaacactacaagaagtgtcacttttaccagcacatttttgtattggcaaaaatttggtattgcgctggtaaaatagaatttacttctgatatattagcaaaaggaattggcaaatcagctttggtattagaacttttgccagtacaaaatgaaaagcgctggcgaaaatgacttttcatagcgcgtgctggtaaaagttagattttaaacactgctaatgtacgctggtaaaactttgacctttttgccagcatagtttgcgaaatgtgctagtaaaagttaattttactagtgcagtagcgaactctgccggtaaaaagggcatttttatagtgtaaatagtatcttaaacattataaaataaatcacatttcaaaataataaataaatattattatactaattttcataataaacttaaaagtaacatttttatatatgtagtactgctcaatggtatttttttttttttaaaaaaaattttactttttaaaatttgtttacttatctcttaatgaagaataaaagaatttccatttacctagcttttaaaaaaaataaaataaactaggagaattattctatatactattttttaacttttttttttcttttcaaatttacgatttgggttgctacggtggtttctatgtgggttg

SEQ ID NO: 31155 - DNA, 4773 bp, Cannabis sativa
ttcaagaagcaacaagacgatggtcaattccagagatttcttgatgttctaaagcagctccacatcaatatacaagtattggaagctttggagcaaatgccaacatatgtaaagtttttgaaggaaattttgacaaagaaaaagaggcttggtgagtttgaaacaattgctttgacagagggttgtagtgctatattgaagagaaaaattccacataaattgaaagatccgggcagctttacaattctagtttctattgggggtcgagatgttggtagagctctttgtgatttgagagctagtattaatctcatgcctatgtctatttttaggaagttgggaattggagaagcaaggccaaccaccatcactttgcaattagcggatcgttccatggctcatccggaaggaaaaattgaagatgtgttggtgaaagtggataagttcattttttcggctgatttcattatccttgactatgaggctgatagagaagttcctattatttgtgggcgaccattccttgctactgaaagaaccttgattgatgtgcaaaatggggacctcactatgagagtgaatgatcaaaaagtcacttttaatgtgtttaatgctatgagattcccaaatgagattgaagaatgctcgcgtttgagtgtaatcaattctattgtggcttgaagcgtagactgacgatgataaaacccatgttgcatgggtagagccaatgcaacctttccctaaatttaagagtccttttgagtctttagaatttaaggaaagcaatgtcaagcctccaaaaccttccatccaaaaaccaccaaagctagagctaaaacctttgccaactcacctaaaatacgcctattatggggagaatgaaatgctgccagtaattattttagcgtggttagaagctgaagctgaaggtttactgctggaagtattgaagaaacataaaagagcaattgggtggactatggcagacataaaaggcattagtccaacgatttgcacacacaagattctcttagaatctggttgtagtaactccattgagcatcaatggaggttgaatcttgtcatgaaggaagttgttcaaaaagaggtgataaagtggttggattatggtattgtgtacctaatttcagatagttcatgggtcagccttgttcaatgtgtgcctaagaaaggaggaatcacggtgatggctaacaagaacaatgaattgatccctactacaatcgtgactggttggagggtgtgcatggactatcgaaagctaaataatgccactaggaatgatcatttcccgctgccatttattggtcaaatgttggatcgtttggcgggtaaagagttttattgatttcttaatggttattcgggctacaatcaaatttctatagcgtcgaaggaccaagataaaacatccttcacttgtccatatggcatctttgcctttaggaggatgccatttgggctatgcaatgctcctaccactttccaaaggtgcatgatgacaattttttcaaatatggcggaaagcattcttgagatcttcatggatgatttttcagtatttggggaatcttttggaacttgtttagctaacttggagaaagggttgaagaggtgtgaagaaacaaatttggtactcaattgggagaaatgccattttatggtaaaagaaggcttcgttttgggtcacaaggtttctcacaatggtattgaggtggacaaggctaagttggaagtcattgaaaagctaccacctcctaccacggtcaagggtattataagctttcttggacatgccggattctatagaaggttcatcaaggatttttcaaagatttcaaagcctctttgtttgttgttggaacaaaaccgactatttgagttcaccaaggagtgtcatgaggcttttgtgactttgaaaaaggcattggtgacaaccccaattattgtagctccggattggactttgccatttgagttgatgtgtaatgctagtgatttggccattggtgtagtacttgggcagcgaagagaaaagattttccattctatttactattcaagaaagactctcatcgatgcttaaattcattactcaaccaccgaaaaggagttgttggctgtagtatttccttttgacaagttccggtcttatcttgtgggaacgaaggtgattgtctacaccgaccattcagccatcaaatatctaattgccaagaaagatgtgaagctaagactcatttgttgggtgttacttcctcaagagtttaatttagaaattcgagatagaaaagggacggagaaccaagtggcctaccacttatctcggttggaaacaggtggtgaaaaggaagccgaaataaaaattcaagaaacttttctgaatgagcagctgctttagcccaagcaaatactccttagtatgctgattttgtaaattacttagtgagtggattgcagcctcctgatttgaataggcagcagcaactaaaaaaattctttcatgatgtaagattctactattgggatgagcctttcttgtacaggcagtgtgctgatcgaatgatgcggcgttgtgtgtcggaagaggaggttgcaagcatcctagagcattgtcattcatctcaatatggtggacactttggtggacaaagaacagcggagaaagtgttccaatcggggtactattggccttccattttcaaggatgctcatgattttgcaagaagttgtgatcgttgccaaagagatggcattatttccaccatcttatggaaatctatacatcttgttggcggtggattatgtctctaaatgggttaaagcagtagcaagccccactaatgattcaaaagtggtgctgaagttcctccaaaagcaagttttcactcgctttggaacaccacgggctttaataagcgatgaagggactcattatgtgaataaaattcttgctgccttgttagctaaatacaatatcaaacacaagatttctactgcgtatcatcctcaaaccaaggacaagctgaactttctaaccgagagatcaagggtgtacttgaaaaagtcgttaatcctagtcgcaaggattggtctcaaaggctagatgactctctttgggcctaatggacatcataaaaaacacttttgggtatgtccccatatcgattggtgtatgggaaggcttgtcacttgccggtagagctggaacacaaggccttttgggctataaagaagctgaattttaatctccaagctgttggagaagcccgaatgctgcaactaaatgagcttgaggagatgagatttttctcctatgaaaattccaagttgtacaaggagaaaaccaagagatggcatgacaagaggattcaacacagagtatttgaagaagggcagcaaattctgttattcaattcaaggctgaagttgttttcgggaaagttaaagtctcgttggtcgggaccattcaccattgtcaaggtgtatcattttggagctgtagatgtcaagaatgaatagtccaagaggatatttaaagtgaatgggtagtgattaaaacactatatcataggggaggttgatcgagcaaagacctccatcactttggaaggcttgaggaagaatgacttcaggtttccatggccttattgtatcacatttgggcaacccgagagcagaagaacaagattagatttagttatatatattatataataagtttataatgtgccactctttgaaaaaaaaaagagaatagtgtgattaaaattgagtttggcttgagaaaaaagagaaaaagaagaaaaaatattatatatacttatactattatatatatatatatgaatatatctttatgtttcaattgttattaatgtgttttaaatggtagtggcaattttgttgcaggtacaagacataaattgcagaaaagggagtgagttcaatggtgtaaagcatgatttatttttgaagcagtaagtcccagttgttacagcaaagtgtcaacattgtttcagcattttgaagcagggaccccagtggtggagagcccgattattgtgggagttatctttttcctcattttaattaatctagtttaattgctattgttggttgtgtgtgctgaactaatgatgttagtttaattgttgccactgcttgtgtttgcttgtttagttagtttacctttgttgctgtctttagttttgtgtgtaataaacattatgtggattagatctgtattagttatgttattttctcatgtttgttctgctttgttttagcttgtaactgagaagtatatttcatttgctttagcttgggttaacataccgctcgatgaataaaaaacttatcatccatttccctccatttgtgccttgaatttgtgtgttgaaaatgccaagtttaaatgctattttgtctaaatgctagtttaggaggacttctttcaaatatgtgtacttgtgctatgccattatgctttgagtttttagaatgattaacaccttgagagagtttaggcttctagaattggttagtgtacccgttgaggcaaaatcctagctaggtttacaacttggaaatgatcagggcaatttttggacgattgaaccttttaagctaacccgagaatatttacttatcaatagcgaccctatttgagataatagcctatttttttgttaggttttatgccctaaataaaactccatttgaatgtaatctattttattcaacatcaat

SEQ ID NO: 31156 - DNA, 3271 bp, Cannabis sativa
taaatccagtgcactaataaatcagggacattatcttttgaagcatataatcacaattacatcagtgtaagtatactttacccaaatgctcgttctcgagctccatcaccaacctggaggcctcagcagcaagcctagtcacttcttggtttctcataccaagtagtcagttctagacaattatttaggtcctgggatttttcaggcgagtttgtgtctggacatgcacgtcttttttcatcttaagcttgcctccttggcctccaacttcttccaatgaacactagtagagccctttaacccttgcatgagtgaggctaaccatcaacatggcctaaaattaaaagaaaaactggttagaaacaaaacaaacctagccgaccaaaggagtttactggctggctgaccctttagtggtgcagcgttagccaaccaaaactcactataggcaagacatcccctgtcaactcaacattttgagtaaaatcaaatatacaacttatagaggagatgtccctaagggcattggatgtcaagcactccaactcctcgtcctctagctctaggagctacccatcaacgctaggtaaagtcctaccaatatagttctgagcggcctcaacaatcctttactagttgatgaacaagctccccgaccagacctctgagcccctttgtccaaaggtctacgtgggggtggatttctccttgaaggagggtccatactcactggctgatcaggttgagcaggcctaaaggagggggaggcagtggagactgagtggcatcggaagatctggtagtccaggccaccttgacctaaggatgacccaaagaagcaccaccataagactctcctcctaaatccctcatcctagaagccatgtctgcaaaaaataaaataacaaagtctgaatacaagttatcagtattgaatgtaagaaaaagtaaaaaattggtactatcaactaccatctaagagacaatcatcctcgaaggaggaatcatctgtaccactatcattgacagttgccttgcctttgcctctagaggcaggtgatgggtgagcaggccttacaaaaccttggcctctgggcctaatcaacaaagaggcatcactagtagtacctccgcgtgccaaacgttgtcaaaaggcactatccctcttgtccatggtcttggcaagcttcgagaggggaacgtcatcatctgacttaggtgcgtaccttcccccaagcaagcctcctctatcactggggtatcatttgggcctctaaaggggcccgtagctccctcaacaccaaacacaggagggtataaaccatacctccgaatgttggcctcacaagccaacctgagtacgaaccttctctcgacagggatggacaagatatgattggctctatccctcagctgaagagtaggaatagagcgagtgtaagtcgacaccctttgaaatcgctgattgacttgctggatgtcccatgcaatgaagtaattctaagaataccgtccaatcttcgacaaagcattgttattggtgctacccagccactggtagcccagctggctaaaatagaagtatccagactggccttgcctcagaacagacttaaaatcaaagaaatatccaatctcatagagtaagggctgatgtcaacccaactctgtataaagcacaaacaatgatgaaacatactttatgccctgagtgatctgagttggacacagcttgaagtagttggctatatactgaaagtaggggtgcaggggcaacatcgctccctacctaatatgacgatcaaactaggccatccacttgaaggctaggcaatgcgctagctggtctctggtgggcctatcacaccgagctcctcccaccagtcctcctaccttgatctcatcaagtttcttggtggatatagaaaacgggggagatatccatcgttgtagctggtccccgtactgaaggacttgggggtcaaaagcctcctccaaaacatggtctatcccgacctcaaacagacaaccaagattgttcaaaggctgaccggcctcatcgtaagaacccaaagggttgttcaaaaatacggtacaggttttatgccgcttcccggttggcatagcctctttaaccttagatgcactgtctgccctagtcgaggcctattcttcttggctaggcaagggctgtccaaccacaagttccttaacttggacgacccttggttccttatcatgctgaggctatgcaacctcatcagcaacactgaccctccctcttgtcatcaccatagcaatgtgagggctgtgagggggtgccctatggcgcgtttgcttggtcctttccataacagactctgagtttctggcaacagtaactatagtctttgtgacaggaagatctcttactaatggagtttcccaaccagtgggcaatgtgtcaggcacatcgtcttagataatgtaggaccacgaactagggaggaactaactccacccttaatttagttcccagacaagtcgatcgtacaattcactgcctattcgccctaaatagtagtgatgctgaacctcaagttctgaagaactactgctgacctcgagatcactcgaggaactactagaaaaattagttgggtggtggtcttcaaaaagaagactgagtaaatcttcgtgtattcggttgtcacctccccaatagtcacttcggatcatctgcatataaaagacaaggggaggtgagcaaccagacaaagtgacaagatttagataagacactggtcaactatacctaagggtactagccaaatagttccatcgtacaaaactggaaatcagcaaaatacgggttccaagtgtaagaacttagacgcatgttgagtcttaagttgattatttgactacgatagaatcaccctaagaaatgccatacagagttccaaagggaatcaaatattggataagggttgaacaggctcacaaggccatacagtgtattttgttttcacatcgacccaggttgcgcccctatggccggcgctgattgtggtctcaattgagcaacaatcagcccatatatacatgaaattggtcttgaaagttatacatggtaagaccactttatgggcaaccgccgatgaatatgctcttagttaccattgggttgtgttcatcgtatcagtattaaaaagattatttcagtgtgatatttcttgtaaacttttggactcttttcattatttgtgtaagttaaaaataacccataaaa

SEQ ID NO: 31157 - DNA, 1190 bp, Cannabis sativa
ataccaaacttttgccagcacattttgtgacatttcttatagtgtattttagaagcctaatgtatgcctaagtgcatgaataagactttgcattgtatttgtttcaggatcgttaagtagtaactgaagttaagaccactttattttttatacaaagtgacgaggtatctttaagatactaaatattatattcatgcatattttgttgagatgaattgaccatctggaaatatagttaactaattaaattccaacgtacttcactggttatattaatttacgtaaatcaatgtttgattatgcccttaagattgccagtaagttgtgttgtggagaaacttaattgttatttccactatagaagataggttcatttattgttttgagaatacatctcgtatggtgtattatagagtttcatagtaagcttagagttcagaattatattttaggccactaaattttttttgcgacaagttcagttacaatatttgtggctaataaatataagagtactgctagcatatcgacattaattatttagtcataaagagacgtgataagtggtcattaagcacacaaacagaattggatgatcgtatatccttgactaaaggtatcgtaaagtaaatgtgggattcagttacccaatatacaattttgtttgtacaactaaaattatttaatgaaattctaatttcgatattttctcatatttatgtgcaccttaattttatctgagaatattatcataagaggaccagaataaacataaggtttagggtttgtttgcttaagtacattaccacattaagtatattgttatataataaatatatatatcgtaatacatggaagataatagtcgacatataattaggacatatcgctataattcatatgtttattatataatgaggagcgttgaattttaagtggtaaattaatttaaatactgaccaagtgggagaatattagaataatttttatatggtaataaataaaataatttatttgatttgctctataaaatataatgaattaaaattctaattatagtcagatttaactaccaaatatttcagttatccgatttaatttttaaaattaattgtcaaaatattctgacaattaattgtggcagaaactttgatggaaggtctcacctatataaatatagggtctcgatc

SEQ ID NO: 31158 - DNA, 1818 bp, Cannabis sativa
gtaagccctagaaactcttaacttatgaattccttaagttttggttggttttggtatgaaattttgaagtttagtttagggtttgattatagtgttgtttgatttctaagttttattacagtttgttttgatgtttgttgctggttttgaggttcggtggcatggatgcacaagtttgagtttgaaaacacaagcttggttcatcaatggcactttttgattttgtatgaatttctaggtttcgttgcttggaatatgttggttgatgttattataggtgttctagaaagtttggtgaaatttggaaatgttttggataggttttgaattgtttggggaaacctggtgcaaactggttaaccggtttgctaggtcctgtaaaactgtttaactagttctaggacttgtctctcgaacaattctttttgtcgatttgtgtccatttcaaagcctttgttgggtgattccctatttcttagggtattgtagtttcagttgtctatggcagaacctttagttagaggattgggtttcccaaattagggtttcgggcgtgttatttacctgattatgttatgtgattagggcatccatccagcatgaggttttctgttcaggtcggccaactcacttgaatttagaaacgaggtaagaataaggtagagcatgtgatttatatatgtgaatgtatgtatgtatgtgtgaaatatatatatgcacgattattatgcttagtacactaccaacacttgtacggaggtggtatagagtgcattggtatagtgtacaatgtttaagagtacattactgtgttaccagcacaagtgcggcaaagtatagggtgtgtgtggtatatcacttagtgatactcagggtatgaaactaaccctaccaacactcgtacaatgccggtacgtagtgtatatggtacagtggctgtacactagtaaagaatgttctagctcatttgttaagccttgtaaataggtgtatcggcgcctagatacgaatcggtattatattatttgttatatgcttttcctactcagtctctcaactcacagttctacttttgtgtgtaggtaaaggaaaggcgaaggctgaacaagagtgagcctcgagctaggttgatgttgtacatgccatggcagcgcaacctggagtgttcggtgtcgggacatcaagggttttattttgtagtcgttgtgcgacctaactaaatatgttttgaatattctataaaagtttaattatgggatcctagcttttgtaattatatctataaaagtttataaagtttaataattaaatctaaaattttaattacacacaatttttaaggaaacttctttgattagcaatgattgcactttagttaaaaaaaatcttgtggcgtgcctaagtatcagggcattacactcgtaactctagactcagggggatataggccatatctccaataattggccacgtaggccagcctcagtctattcctcctcttgactaggaggcatagaatatggttcgctctatccctcatttgaagggtaggaatggagtatttgtaagtgggcactctctaaacgtggtggtggcgaacctactacatattgtagccaatgaaatagttcctgacatatccccccaccttcgacaaaggcatactgttggtgtcaccaaaccacttatagccaatctgggtatagtagaagtaccccacccaattatacttcggagaagacttcaagtcaaaatagtatccaatctcataaggagtaggttgaggttagccttgctctgcataacgaacaaacattg

SEQ ID NO: 31159 - DNA, 1997 bp, Cannabis sativa
tggttcgggcattaataagtcgtagtccacgagtctctgttattaatgagagtatttcttacagagaatattttttgtgatccttactcttcttttctccccttctcaattgtttatcagggttatttatagagattcgtgggtagaagaaaaggagaaacttgtctttaaaagccaactatgggcaagcacaagttcccaaaaggtacaaaatagggcatgcattaactacgtagtaggcagcgtagatgttaggtgagattggccttcatgccatcttgatcgatgtgattcttcatgatggagtcgtcactagctcctttgattatcgtgtaatcgccctaaatcaggtttatgaagtctaacacgtcatcttataggcgttcccagaatgcattaaatgcaaagtgactattcaactcaagcctttctggcctggagacgcctatctatatcttgactcccagaggagaaggtaggtcttttgttcaagtccgggagctagtatcatgagccatacttgttgtttctttagtccaacttccaactcatctccgggtgaccagcctatattgatcacatgtcacacacgacagctgccacatatattgggaataaaccgggacaacaaatacaattaccctaattatttacaactaatatatagcaaatattctaacacaagaatatggataagcagatttctcataggaagttgctgggaagaaaaactaatgtgagatggcgcacaggacgtcaacttggttgcccaacattgtttccggtcctaggtagagccctgggatgtccacgtgacatcctcaacttcatgtctcatcattttagggtcatggcgacctatttgttgaaagatagcagttagaactgacttcactagatcttaatgcttacatgggtgctcccaatgtgttatattatatagttataatgtaagatagattaaaatattaaaatgtgacacattatatattaatatgagattaatgtatataatgtgattgagagttacatacatctaatattcacataagttctaacatagaggtggagttacttacattttataacctccataattatcaccaatactaagtgtgtaaaaggtcttacacattttaatttgtaattcttaatgctataggagttatggtgtttgcatgagttacataacatctataggggttatgagtttcaatttcaaagtgtgtgagcttaaacactataagtagagctctttggttcacttgtgaagacatattttttttgtgagtttctatcgaagagagcaccttgccagaaactataagcttgataaattaagaaagttatttacattctttcctttttcctaagtgcttgtggtaggagaactaaacttttggacaaaggtgtaaccttgttcaagtttagtgattattctattatacaattgtggtgtatgtggtgttgagattgctctcacatctcttatatatatatatatgctatttatatagtgttttatgtgtagcttattgcattgagttataatttttctcttcatctctattctctattttatgtgtatgttttgtttagtgttgtaacattatttaatttatgattttgtcctttgtattatttatcatagatttgtaatcttgttggtttggtatttctattggagcacaataatttccaacaatcaaaagcttatcatttcctactttgtttcaatggatggtaagaaattagcttgtgataatacaagggtgagcattgtgatattatgtggtttactattttttatatagtaaattatatatattaacatatttttctatgttgatatatagattttttatgctattatatgtgagatatacataatatataacatgtatatgagttatatatattaaatatgttgaacttatgataaaatatatttatgatgagaatatttatgcatgttaaaatacatataatatatatat

SEQ ID NO: 31160 - DNA, 1081 bp, Cannabis sativa
ctattaaagatgctcttaggtactagaactacttttatgaagaatgattattaatatttattaaaattattatattaaattatgttggatctcatatttatttatactaataacaatatatcttcgatgatactaggcatttatcttagctaaattatattctttaataaacttattaaaattcaatatctaatttgtgtattgagagatactaatattactatgtaaaagtaatttggtaaatattttttttgaaccctatattctacaaaatttactgattaaaccatttattttattttgttaaatgacagcttgaatcctgtaatttccaaaataacaataaaatattctcaactcatttttcgtcaaatttgttttttaatataactatcatgaagccaatttttataacacctttaagttaggttattattaagttttattctgatgaaaattaagctcatgatactattttaaaaaatacaagattagaaatattatttaataaaataaaaagttcaattaattatttttataaaaaataacatttatctaaaatagtatttatctaaaataatttgtatagattaatgatatattaattttttatatgtataattaaattcaacaaatttgtatttatcatatagttttggaattcaaaggaccaaaattaattaatttcactaaaactaaggactaaatttagaattttaagtagtttaggggctagcaggataacggaaatcaaaattagtaaaatttgaactatgtggtataaggtaaacaatgttctatggtctgtaattttgaaaatatatattgaaacaacactataagatgactcgtcgtaatctcttagataacacaccagattttaacgatcaaaattctgcaagttcaaaaggaatattcagaattttaaattctgaacataagtttggattgtttctagaatgttgccaaaaaaattaataatgtgatatttcaaaatcccttttttcactatagtgtaaaaataataatgaaaaactatcttaattggtgtcactttctggctacttctgaaaaatgcaga

SEQ ID NO: 31161 - DNA, 2283 bp, Cannabis sativa
  modified_base (2241)..(2247): a, c, t, g, unknown or other
aggcttgtgtgtttataaagcttctagcttgttcgtactgaaagcgtgtttttcaagatgatgtgtattatttttgctggtgatgagttggatcatttaaggcgctgtaaatgtgccattatgatttgggatataattttagcaacaatgcaaatctataaataactttaaatctttgtaacctatgcgtgaatcaggcaagatttgcttgagtgaaaatcgtgatagtgtaaggttgagaaagagagtctaaactagagagagaaacttctcctcgtaatctctgagagtttgtgaggattcttgtaaccttgtaaatactgatatcaataaagatatggctactactattccgatcgagatgtagagcattgcacattgctcaaactcgttaaacccgatgttattctttttctattttacaacttaattctttacttgaatcttgagatctcttggtatatagtttttagattgtgttgcgtgtttgttagttcggtaaactgaatcgtaagtcattgattgtttccttttgcacaacacatacatatgacaataacaacaagaagtgactacaatatctttatgcatattcaaagcacaaatcataagaattccacacaaaatactagcatgtttaatacataataacaaaactcccactgagctccatgctctaaaaacacacatgagtaagcctttcattagtgggtctgcaaacatgccaatagtaggtgtgtactcaatggaaatgagagtctcaaaaatttcatctttaagtaaataatactttatgttaatgtgtttcgagtgggaagtacttatagcattcttaaagaaagctactgctatggaactgtcacaatacaatatcagcatccttgagatagagtccataacacccaatgttgaaataaagttatgtagccatattgcttgacaagtagcctcataacatgctcgtttgacctttttccacaaaatagcccctctccccatcataaaaatgtagcctaatgtggatttcttggcatccgcgcattctgcataattgacatcactaaacctaaatatatcaagagtgacaactcttcgatataagtcaacatatgatcctcagtaccctgaagataccacatgaatttcttagccgctttccaatatctaagtctagggtcactcaagtatctactcaacacgtcaacaacaaaagcaatatcaaggcgtgtgcatacttgatcatacatcagactacccacaagtgacgcataaagaaccgctttcatttcatctatttctttatcattttgtggacattgagcttttgagaaattgtcacctttcactattggtgcctttctaggagaaccagcatttatattgaatctttttaagatccgatcaatgtaagtttttgagacaactcaagaataccattagttccattccaagaaatctgtattccaagtacatatgaggcctcaccaacgtctttcatatcaaaatggtcagacaataatatttttgtcttagataacaaaactttattattaaaagcaagcaaaatatcatcaacatataataccagaaaaatgaaactgctcccactgaactttatatatatacattgatcaactttgttctcgttgaaaccatttgcagtgacaactgcatcaaatttaagatatcattgacttaatgcttgtttaagtccataaatagacttgttgagcttgcaaatcatatgttccttttcaggctcctcaaaaccaacaggttgagtcatgtaaacatcttcatacaaatctccaattaagaaggcagtcttcacatctatttgttcaagtttaaaatcaaaatgagcaaccacaaccatgatgatttataaagaatcattggtagaaataggtgagaaggtttctttgaaatcaataccttctctctggctatatcgctcaacaactaatctagccttatatcttactattttcccattttagtcaagttcgatcttatagacccacttgcacccaatggattggcaacctttcggtaggacaaccaaatcccaaactttgtttcacgacatggaactcagctcatccatcacttcttttagccatagcttagattgaggacttttcatggcttcttgataagtaaatttttctcttgtcgctaaattcagatctgttcaattgttcatttctatggcaactatgttggaaatattttaccagnnnnnnnatttactaacaagtacgtttcattaacatcctaata

SEQ ID NO: 31162 - DNA, 4265 bp, Cannabis sativa
tttttgaaaatactacgacatgtcgtttttttgtacactatttttttaactttattttttatttttatggtttaagatgcttcagtgattgttttggtagtttctatgtgggttgctatgtaaatttgaattgcgatttaagtttagaatagaatgtacatttgatctattaagttttgaaatataattgtattagatttttaaattattattttctttacattaaaatattacttatatgtatattttttaattttttttataaagatgcgtggattggattggatcggttacttttacatatcaatcaatatctaatccgcacaagtgtggatatctgcattttgcagattgaattggattggatcgtgcagattgaattgaatcgactattttatgaacacccctaattggaggcaatatgattgaagaaaaaacaaaagaagagtagcactactagttgatatggaatcttgtatcttattacttgtgaaagaaactctgagaaattaccaataattgaatacctcatataatattcacaagaaaaaaaaaaagtttacaaccaaagagaatctattctatttgttttacaatttacaagtaaatatgcttaagaaaaaagtatagacaagagtgtaattaaaacattttgcagcaactttttccagcttcatagtgcttgcttggtaaccagttactaatttcgaaaaagatagtcacctcttctaccagtaatctttacaagaacacaacccatttttaaaatggtgaaatcgatttctatcccttacaattatctcgcgattaaaaacttttgagatcagtttacttgcattgtgacagtctttgcacactcgcaagttctttgagatccgaattgtctcccctggtttagtcttcagtaacccaaaggcaattgcaagcttctcactgtgatgatagactggattctccatttcctcctcttcaacatcatgcaatagtcctccatcagactcgggaacatagccgacacatcttatggcttccaacatctcattaactttaccatatatggctttagactcgggatgagttctttctcctgcaatgaactcatgaacatcaccctccaattcaatcatggaaaaaccagcaactttcttcactcccctgtcattcatcaacttccttactttggctacatcttctgatctaccagctctggcatatagattagctaatagcacatagcgtccgctgttttcagggtccagtcttattacttcttcccaaatttcctcacccaatttgatgtttccatggattttacatgccccaagaagagcacccaacacaccagcatctgggcttataggcatctcgtgtataagctctcttgcttcgtcaagcatcccagctcttccaagcagatccaccatgcagccaaaatgctcccttctgggctcaataccataaacccgagtcatgcattgaaagtattgacgacccttctccacaagccctgaatgagcacaagcactaagaaggttgacaaaagtgatatggtcaggtgctaccatcctcctttgcatctcttcaaaaagttcaatggcagcctctccttttccatgaatagcaaaccctccaatcatgcagttccacgcagaaatttctttatcgggccacttgttaaaaacttgaaaagccttgtccagacaaccacatttacaatacatgtcaatgattgttgtaacaagtttggagtctaattcaatgcagcttttctcgatgtagtcatgtatccacttcccttgatggagagcacctattcctgtgcaggcttttaacatactagcagccaaatatttatctaaggtcaccttttcttcctgcatcctacaaaacaaagcaaaggcttcgtggaaacgattattctgaacataagatgcaatcatggcattccaagaaacagcattcctctcaggcatcaactcgaagagttgaaatgcctcatcaacaaatccacactgagagtagccagcaatcaacatggtccaagatatcacatcccgcaatggcatgctatcgaagaccctccttgcttcctctggagattgaaaattgagatacatatgaattagactgttctgacaaaatccatcaactagaaatccaaatttgacaacatgggcatgtacttgtttgccttctcgaacaccattattgaggccacaagctctaacaagagaagggaaagtatacctattggggatgacagagtcgtgcaacatctgggagtagaaaagaaaagaatttataggtgactcagactggaagtagcctctgattatggtattgtaaatgaaggcatctggatgaggaagagtgttgtacaggtggatggcgtaagtgatatcgccaaaatcagacagtgcacaaaacttgataaggcgacccattgtgtagttgtctgtagagaggccacaacgaatgatttgagagtgaaactgcttgagctcagacatggaagagcaggaattgaggcggtgcaatggggaagctagagatggagacgaagatgcaccactaatagggttggtcatgccaaggactccgaggcttaccattctgctcctcctaatagaaatcccttcaaccattacttgaaaatatcatttttatatgaaatataaaactgtatgaaaaacgtttttacaacaattaaggaacaaacatttaactaaaattataacattaaccttactaatcataagcatcaaatttccaatattcaacacagaaagtttctaactacattttaaaaattccatttgtcaatgccatatagtaagtgtattccttatcagtattccccccataaaatgatcaaaatctcttattagcagacattgtcaatagtaccctaccagccattatctaagcctataaatacaaacaaaaatccagaatatataataatctcaatacataatcacaaaaaatgtaaaagattgacaattatagttctagcagattaaaatttttctttttatccataattaatttatataggatcattagaaaaatatttggttgtttcaaattaagagaacttattttcagcgtaaatgtagtaatattatcatcataatgttgtaaggcttttgaaatttgactcttggaattgcatttcggtgtctgaaactttaactgctttaacttagcttttggaacaacaagtttttatggttcagtcaaagaagtttttatgagtctaagtatcctatcacaaatttcaacaaacactttgaaagcatttcaattagtaataatttgcgagtttcaaaacaataaaacgcaagcaaacaaagggagccaagcacaagagaaagctccaaaaaataacaaaaaccacaaacaactaatagtgagacaaggagtgctgttttttcttcatgtattttcctattcaaattaaatccaaatcaaatcacaaaataacccaagtttaaagaaccaccatcttttacatggattctagactggtcaaaggacattggttcttcgaaaatgggcaccagcactagtttgcacttgcatcttggaagtctcaaaaaaggtaaagctttgaaacttgagattgtgaagactaaagagacaattaactgaattccttcaagcaagaagaagagaatccacagaaacaccacttgatatggtggttccattcatcatgattgacccaaaacaaaagctcactttaaaacttttctctaaggaaatttctttccttgttgtgacctagaaagagacacatttgtaatgacaatctataatagctcagctactctaatggtttccctaagttcctcttagcactctatattgataatttctatacggtcacagagtttcagaagtagtaatatgagaagttcaataaaagaaaagaatgattgtgaaattttgttttacagttaataatcaaacttttcatacacaaacacacaagtaatatgaacatttatcagaggaaaatgcagtaaatggtaggaagcatacaaacaaatatgataaataccttacaactcttcatataataaaggctcatgcaacattcaattcaatacagcacaaacaagtttagtttattgtgtatataatgaaaatgaagaacaaacagaaaattcaaactaggaaactcacctggccggtgttgaggaagaaaggggtcgatcaaatttctcccggcgacggcgtgagcaggggagaggtttccg

SEQ ID NO: 31163 - DNA, 1717 bp, Cannabis sativa
tgtaaacattggagatctacttcaggtaaatattcttaagttactgaagtagttttttctaaattttattttttttattttacttcaaacttttacattataccatatacacgtactatgaataaaatattaattaaatattattagaagaatgaatagtaaaaaaacactatagcattctttaaagtttgaactaataaaataacttatatgattgagtgctatagtgctcttaagataaacttttattcattatattatttaaatggtcatacctatgtactaatacatgacaagttttttttttctttttcatcatatatatatatataataattgtttttgttttttgatcagcttttaacaaatgataaattgaaaagtgttgagcatagagtattggctagtgatatgggtccaagagtatctattgcagccttcttctgcacaggtctattgtcaaactcaaaattgtatggaccaatcaaagaattgttatcacaaaataatcccccaaagtatagagaaacaactgtgaaggactatattgtttattccactaataatataggtcttgatgggaataaaccctcatatcattttaaggttgatccctaaatagaatgatgaacattattaattgttacttattattgttacaactgtgtcaccaaataaattataacatatatcaataataatatggtctttttttgttttgtcattattgccccttcattgcttattaattattattaaatatttattacagcagattcattaattatcaaatgatttatgttaatatgaaattttgagtaaacaaggtgtaatattgattgtttgtcacgtaattatacaatcattgtgtaattagagaaaattaagagaatttaattacataacaaaaataattttaattatcaatatgatttttaattgtctttttttatttaattttccaatttcactcaatcaaagttatttggaaatatcccaatatatatatatatgatatttgtatattatatgccacatgtagtactattttataccaaaatcacttttcatttcagttttccaatttatattcatcacctctagacaatttttttttctatttatgttaaatattattaaaaggtaaaattattttaaatattttttgcaaaataatagacattattacacgatgtattttattgtgtaattaccaaccttctagccaaacatgacaatatatatgaagatgaggaagggaaaaaaagtgctaaaaaaagaatcctagggtttctctctagggtttctctctagggtttcctattctctgttaccatgcatttacattttctttgtgctccctctctggccagggctcaccgacctatccgtgcgggctcgggtgtggccatggttgaggggaaggggtgttgagtttgatatataagatgatttttaatggttattattttacttgttttcttcattgcttttatggatctaataagggcttgcttgcaagttttgtttcttctttattttggctcaccatcatttgagtactgtcgtgctttggtggttcatttgttggagattgttgcttcctatttgggaaggttataagatctatcgatagttgtgttttattaattttctcaagtcgaatgtgtgaggttgtcatggtctctattgtgtgtcagatctgtgagattttttt

SEQ ID NO: 31164 - DNA, 3070 bp, Cannabis sativa
gtataaaatctgaaacattaagtatttatgccgcaatttatcctattttaaaacattaatgaaaatattattattattatatttttttttttcatgtatatgtttatttaaaataaaataatcataacaatgattaatgagataaagatatccaatctttctatattccaaacattggattaaataatttgtctagtccgataattttatcccgttaaccaaacactcatacaacttatgtcgacaagatattttatcgctacttttcaaagataagattgctgactgtaattgttatctagtcacgttaaaattgcaatagtcaaatttatatgactggcggtttcattactgtatttaattttgaaggctaaattaggtatatgcgtttttaaaatgaaagaataacagcaagacatttgatttctttcctcagaaaagaccgttttctattatttcttccgatttatactaagagaatcctcatattaaatacatactatatatttccttatgccttaatgattttttctttctaaaatatctaattaagtttggcctcttattaactaatatttgcaaaataagcctaaaaaattaataatttgtcaattaggttagacccactaatccaaatcttttttagtatttagcccaaaacaactatgcaaagaccatgttatgaatggtgtgccctacccactcttcaaagactatttttgcccataaaactcatcttgaaaaggacaaagaaaaaagtattacaacaatgggaacaagacaacacttgcaataatcaacccaatattgtcattaaaaagttattcaatagaaaagtaaaaaactttgtcacacaattacttaactacctaaaaaaatggtttactaaatgaactatgactcaaaattgttccttgatatcttagtactacatagctttgaaaattgaaatattgcatttacttgaagtattaacatagtaacacaaaataattacaaaaataatgttcctaaaaaaagccaccaaaccaaagtgtacaacattgttacatccttttaatgttaattttagacattaacattttcttacacacaaagtcaatatgttgatacaataacaagaattgttagaacaaagttaatttaattcaataaaaataagaaaaaacattcgaaataaaaatttatttctatttttagcaaatatttttattatttcacataaaaatctaatcttttttatttaacaacataaaaatccaatctttattcacaacataaaattgaaaaaataaatatataaaattcaacaattttgtccaatttagagcaaaagggtcaacagttttagttcctaaaaatttttccataaccaaaaaaacagtgttcatattcaatctttacatatgttgtttgtatatattttagtataaaggtcagatttttaattattacatttctcttaaactctcttctctctcttctttctctctcttcttacacacaaacatactctcttctctccttttcttcttcattttcttcttacagaacacaagtatgagcagtagcagcggcgttggtggttctagggtttcaatcccaaccaatgtgaagaaaacaatcaatgacataagggagatcactgggaagcagcacagcgatgatgaaatctatgctgtcctcagagagtgctctatggatcccaacgaaactgctcaaaggctcttatacttaggtataatcaacatgtgtatatatatatgtgtatgtgtgtgtttatgtatgtatgtatgtatctttcatttggggtttttttttctaaggattatgagtcatttctttgattttttaggggtttttgattgatggggtttctgggtttttcttatttgttaattgggtttttgttttgattaacatcatgagctaagttaagagcttttgagtttgttttgaaaaaaaagctttaatgggttttgttgtttgaagggtttattcttggttggtgggaaaaattgtttcaaaatcatataaaaggttgagattttttttttttggttttttgttatgggacaaaaagaatccattgatgttgagttttgttctttcaaaagctttcaattcttttactctgtcttctctaaaggtttggaaaagctttgtttttttatttaatttctttgatatgtcatttcattcaaatttcttggaagttttgtaggaatttgtttatgtaattcaagattgtacccattatatttttcttgatcttgaagtaactgggcattgcttggtttacagatacatttcatgaggttaaaagcaggcgtgagaggaaaaaggatgttgtaagattgaactaatgattaagaatttgattttgttgaaagtaatttggttttcttttttcattaataatttggtgttgtaatgatttgtagaactttaatactagaggctctgaagagagatcaccaacaggtgtgcagaggagagttaaggggagtgttcaggggaactatggctctaatttttcatcaggtaaatattttctttatcgaaattttaagttaacttcaaagtgggatcttcttccccatttcgagtagattgagttatcttattgttttcagatgtgggtggagggaggaatggcggtcgaagagaaaatgggaatactcatttcaccgatagaggtcctatgtctcctacggggccatactcgcagagaatgaaaaataacgcctcttctcgagtcacaaagtaaattccttttcctgctgttggatttgctgatttagaggtgttttgttagttgcttatatcattcttttttgttttctttctacagggcagtgactggtttgcccaatggcaccacaaatatgccaaatggggtttcttcggctgatgcaaacaaattggagccagcagctcctccacctgcttttgcttcttcccctcctaccgttgcttcactggtcgatgagcaaggaaagtcaacaacttcagattctccttctgctcctgactcgggggattcttgtgttgtaagtatagtagaaaa

SEQ ID NO: 31165 - DNA, 1112 bp, Cannabis sativa
atgtttggccaactagagggcttcggcaaggtgacccattatcaccttatctttttttaatctgttcggaaggactttcaaggttgctgcaccacgaggagcaagtagggaacttattgggcttaaaactcacaaggcaagctctccgtcagtatctctcacacttttattatttttgctgatgatagtctcctattttgccatgcaaatcacagttcagctttagcaatcaaaaagattttggaaatctatcatcaagcttcaggacagtaccttaacaccaacaagtcaatcatgtctttctcacccaacacctctgatgatgcaaagaattttttcagtcgcactctggggatgccaatatgtgaatgtcatgagacttatctcggtcttcctgcatactcaagtcataacaagaaggagttgtttagtaatgttaaagaaaaaatctggaaactccttcatacttggaatgacaaactgttctctattggagggaaggaggttctgttgaaagctgtggtgcaatcaattcctacatacgcaatgagctgttttcgcttgcctttgggattctgtaatcaaattgaatctatgatggcaaacttttggtggggtactaacaaggactggtctaagatacattggaaaaggtggaaattgctctgtaaatccaagttcgaaggtggaatgggattcagatcgttcgttgattttaatcaagcaatgcttgccaagcaagcttggagattatttgaaaatccttcctcacttttagctcgacttttgaagcacagatacttccccagaaactcttttttggaagctcacaagggtcactctccatctctaacgtggcaaggaattcactggggtcgcgaactccttattaaaggcctacgttataagattggcaatggtttcaatgtaaaatgtggatttgatccttggatcccagggcatgatgagttcaagccaatctgctattcaggggaaccatctacgcctgtatcatcttacatactggatactatggaatggaatgtgcctcacttacaagaggattttgctcaaatagatattgaacggattcttactattcctttgagctt

SEQ ID NO: 31166 - DNA, 1220 bp, Cannabis sativa
cttcgaagtattcttcatcatagttcttttcttcttcttaaactcttactatttattatgattatcgttataatgtctaggtctgagtagttttgtaacgtcctgaccctcagggacgctatgtgtgtgcttttacaaagttatttctcgtaatctattagtttagaaaacaaagtgtggtttaattaaaaacttttgattaagttaaaacaaaactttcatactaaataccataatacggggttcccctgtttataaaattcttttacagtaggttacaaaattactattataaaaataaggttacatttcccaacatagaaaataggttgatcctgcttcccagaagccaagacaccacggctgatatgtacactattggaagaactcaagctcatggctgaacacaatttttaacctttttacttgcaccatgaagcacctgtgagtcacaatgactcaggaagaaaagttatttaatcaaaagcaataaaaatgcaactattcttatcataacataacatacatactcgtaattcattatctattcagcatgcatttatagtataacgtctatacgaactgtatattacccaatataaaaatatcatagcatcttaccgtgaatatctttatcattacactaatcaaatattcattcaatacacaatcacatattttcagtgccttatataacactcacatccctacaaacacgtattcttacatcccttgagtcactaaggctctgcaagaaaagaaactaaattcttaagcaatataaaattcattcagtcacattataacaaagatgtatctgattacaactcatcaaataataacatgcttaattcatttcacaacttcgtaatcacacaatcctagtactttataaagtacccttacaacttgttaaccacgagctacatatgtcactatcgttaccagatacagcaaacgataagtaagaaacctatccgcagtttcaaaaataattactcataatggtaatgagcgttaccaaccttcaccactcgttatccacgagctacgtatgtcactatcgttgcccgatacaacaaacgataagtaagaaacctatccgcagtttcaagaataattactcataacggtaatgaccgttaccaaccctcaccactcgtgatccacgagttgcatatgtcactatcgttgcctggtaaagcaaacgataagtaaga

SEQ ID NO: 31167 - DNA, 2185 bp, Cannabis sativa
  modified_base (1540)..(1549): a, c, t, g, unknown or other
  modified_base (1628)..(1632): a, c, t, g, unknown or other
  modified_base (2122)..(2124): a, c, t, g, unknown or other
aaacttcttatattgattactaatcagattgtagagagttttatttagggcataaaacccaacagtttttgggttttcaacctaagcgccgcgacccgctcgcgtagacaaattgcatgttgcacttgttttattcataacttttgacttgggacttcgtttggaacgttctttatatcgttggaaagctcgttccgagctctatatgtttatctgtattttgaatgccaattttatattatgttgaagtggatttagggattaaacctatgtttgtaaatcccaaaaattgtgactaggattaccggcacttggtcagaagcacccgtggatttggaatctctacgtttgcgggacatcaggtaagacagtagtttgcacatagaattaagcgtggtggtgctcacgttttataatatgattgtgattaattgagaaccaggattagggctaccctaaaatgagtggttatatggtctaggattattaccctagtaattaaaagatgttgaatgttatgccatgcttaatatgttggaataaaaaattatgcacctagggtgtaataaagctagactcggtaaattagtaccttgagtttaattttaatgcggtctagggttatttccctagaatattatggagataagaaagtaatgatgtatggtaatattgctaatcaagtggaagcatgaattagggttattacccttaataggtgttattttgagcatgttgtaatatgttatatgagcagttattttagtaggcaagttagggctattaccctaagagtttaaatatgatagtatttattgaatgcatgcttatatgccaagagttatgtgtataaggcataactgggttagacctggtatatatcatcagagtaaatcacataaagaacgtaatgtataggtacgtgtatacatcaatagggttatgcgagcaaggcataaccaagttagactcggtaactatagctaagataaaccctactaaggccttattgtaaacagacgtgtgagcgtaacacgtaggtctatgctacatagacataaatagatgtgtgagcgtaacacgtgagtctatgccacatagacatatataggtgtgtgagcgtaacacgcaggtctatatcaaatagataaaaagtgtggtggcaccattaattatgtgttatatatattgagattaaagattatgcattcaatgcataatcaggttggactcggtaaccagaactgagatgaaccgttctaaggccttattgtatctagacgtgtgagcgtaacacgtgggtctacgtcacgtagatataattgggcatgtgagcgtaacacgcgggtctatgttaaatagacaaatatgaatggcattattatatatgtgatatgttaattataattgctgatattatttattgtcttgctaggcttggttgacgggtgctctactgtgcaggaaagggtaaatcggtttgtgatcagccatgagtgtgggggcttggcgattcttgtacatgttcgggccacactannnnnnnnnngttggggtctaccagtgatgaacttttgtaactctgcttttgtcgcttaggttggctagtgaaaagacttgtaatattnnnnnaaatatttttgggatcccgaaacatgtaattttttattgtaaagttaaagttattacaagtttcattttcattctgttttcgattaaatgttagatttctcgcacttatcttttagtaattctgtttaggggattagggtttcttaataaccttgggtagcgtgcctatttgttagggcgttacatgtaatatcttagaaaataatattgtatttaattagacatagtttattaaatatataattattccaataatgaagtaagattatgatcttactagggttaattagtgtcaatttagtaaatgattaaataaagtgtaatttattaatgacggagattttattagaatatgtgggtatcgtaatactatttctggaataaaatattttcgagcccagtgaccgtggaaactggacggagtggtcaaaaatgtcacgacattaaaggatggattgtagtcatggtattgttgggattttatgccctnnntaaaacccattacaatctaatttgatttgttatcaataaaagattagaagtcatttatgtt

SEQ ID NO: 31168 - DNA, 3521 bp, Cannabis sativa
tgatattctgaatcctcatttaaagaaatggataacaatcaaaattattcacattcaaaaagtttgataaatcggacgagaataaagacctcgcccgattatccattaattaatacataatgttgtattataatatggacgccttcggctgtatttaaatgcttcttctattcttttccttggcgcagctgggccatcctggacttgaaccagagacctcgcccgtgaagtaaatcatcgcacctacggtccaaccaattgggagagaatcaatagattccttttctggagcgattcatccttcccgaacgcagcatacaactctccgttgtactgcgctctccaagtgtgcttgttcctcccttcttccctaccatggcaagtttttgtgaaataactccgatgagaagaaaaaagaaggcgttaagagaccctcctggcccaaccctagacactctaagatcctttttcaaacctgctcccatttcgagtcaagagatagataaatagacacatcccattgcactgatcgggggcgctcgtagtgactgagggggtcgaagaccaagaagtgagttatttatcagccaagcattcttcttacggctagatccaatctcctggtccctgcggaaaggaaaaagaatttcacgttcttcctttcggaaagggaggttttttttcctattgattgcaactttctccagaccttcgggaaaagcatgaaaataaaggctcgaatggtacgatccctccgtcaccccagaatgaaaggggtgatctcgtagttcttggtctgtgaagatacgttgttaggtgctccgttttattttcccattgaggccgaacctaaacctgtgctcgagagatagctgtccatatactgataagggatgtatggattctcgagaagagaggagccgtggtggtccctcccggaccgcccggatcccactagtgaatagaaagttggatctacattggatctcacctgaatcgccccatctatcctcctgaggagaagtttggtttcaaaccccggttcgaacaggagaagtacgccatgctaatgtgccttggatgatccacatctcagggtcaggcgctgatgagcacattgaactatccatgtggcttagagccctcacagcccaggcacaacgacgcaattatcaggggcgcgctctaccactgagctaatagcccgtcgtgcgggcctcccgctgggggcccactatgccaaaagcgagagaaaccccatccctctctttccttttttacgcccccacgtcgccacacgggagggacatggggacgtaaaaaaggggatcctatcaacttgttccgacctaggataataagctcatgagcttagtcttacttcaccgtcgagaaacgaaagaagacttccatatccaagtttaactcagacgtagctcgcttctttttgggtgtgaagcagtgtcaaaccaaaatacccaacaagcattagctctccctgaaaaggaggtgatccagccgcaccttccagtacggctaccttgttacgacttcactccagtcactagccctgccttcggcatccccctccttgcggttaaggtaacgacttcgggcatggccagctcccatagtgtgacgggcggtgtgtacaaggcccgggaacgaattcaccgccgtatggctgaccggcgattactagcgattccggcttcatgtaggcgagttgcagcctacaatccgaactgaggacgggtttttggagttagcgcaccctcgcgggatcgcgaccctttgtcccggccattgtagcacgtgtgtcgcccagggcataaggggcatgatgacttgacgtcatcctcaccttcctccggcttatcaccggcagtctgttcagggttccaaactcaatggtggcaactaaacacgagggttgcgctcgttgcgggacttaacccaacaccttacggcacgagctgacgacagccatgcaccacctgtgtccgcgttcccgaaggcacccctctctttcaagaggattcgcggcatgtcaagccctggtaaggttcttcgctttgcatcgaattaaaccacatgctccaccgcttgtgcgggcccccgtcaattcctttgagtttcattcttgcgaacgtactccccaggcgggatacttaacgcgttagctacagcactgcacgggtcgatacgcacagcgcctagtatccatcgtttacggctaggactactggggtatctaatcccattcgctcccctagctttcgtctctcagtgtcagtgtcggcccagcagagtgctttcgccgttggtgttctttccgatctctacgcatttcaccgctccaccggaaattccctctgcccctaccgtactccagcttggtagtttccaccgcctgtccagggttgagccctgggatttgacggcggacttaaaaagccacctacagacgctttacgcccaatcattccggataacgcttgcatcctctgtattaccgcggctgctggcacagagttagccgatgcttattccccagataccgtcattgcttcttctccgggaaaagaagttcatgacccgtaggccttctacctccacgcggcattgctccgtcaggctttcgcccattgcggaaaattccccactgctgcctcccgtaggagtctgggccgtgtctcagtcccagtgtggctgatcatcctctcggaccagctactgatcatcgccttggtaagctattgcctcaccaactagctaatcagacgcgagcccctcctcgggcggattcctccttttgctcctcagcttacggggtattagcagccgtttccagctgttgttcccctcccaagggcaggttcttacgcgttactcacccgtccgccactggaaacaccacttcccgtccgacttgcatgtgttaagcatgccgccagcgttcatcctgagccaggatcgaactctccatgagattcatagttgcattacgtatagcttccttgttcgtagacaaagcggattcggaattgtctttcattccaaggcataacttgtatccatgcgcttcatattcgcctggagttcgctcccagaaatatagccatccctaccccctcacgtcaatcccacgagcctcttatccattctcattcgatcacggcgggggagcaagtaaaaatagaaaaactcacattgggtttagggataatcaggctcgaactgatgacttccaccacgtcaaggtgacactctaccgctgagttatatcccttcccttgtcccccatcgagaaatagaactgactaatcctaaggcaaagggtcgagaaactcaacgccactattcttgaacaacttggagtcgggccttcttttcgcactattacggatacgaaaataatgggaaaaattggattcaattgtcaactgttcctatcggaaataggatcgactacggattcgagccatagcacatggtttcataaaaccgtacgattttcc

SEQ ID NO: 31169 - DNA, 2474 bp, Cannabis sativa
tttcaactccaacttcggtggttcttggatggagggttttggaggcttaaaattactttccttcaactctaaagattcaaagggcctcttgaatttagggacaggttgtactagctccacccaagaaacttgggtttcttcatcttcactcaagtcttcaagctcataaagagaacttatcaacttctcatcttcccaaacttccttgtaaattctttcagtcacaatagagtcgatcacacttagacggaaacattcttctatctcattcagaaatctcatattattgaacacattaaaggtgactttttggtcattcaccctcatagtgagctccccattttgcacatcaatcagagttctcccggtagcaaggaatggccgaccaattataataggcacttctctatcagcttcatagtctaggatgatgaagtcgactggaaaaatgaacttgtcaacctgtactagtacatcttctatatttccttcgggatgggccattgacctatcagcaagctgcaatgtaacagttgtaggtcgtgtttcaccaatacccaacttcttaaagatcgacataggcatgaggctgatgcttgaacccaaatcacataaggttcttccaacatcccatcccccaatagaacaaggaatttcaaaactaccaggatctttcaacttcggtggaatctcgctttttaacatggcattgcatccatcggtgagagctacagtttcaaagtctcctaacctccttttcttcgtcaaaatatcttttaagaacttgacataattaggcatttgctccaacgcttttaccaaggaaatattgatatggagctgcttcaacacatctaaaaagttcatgaattgcccatcttgctgctattttcgaaatctctggagaaatggaaggggtggttttggacctgaatttactggtgcagattactgacttgcaggttgctggccctttcctgtatcaactgggctagtttcagcaacttcctgggcagttttgttactcaatttttcgtcgatttggattgaagtgggctccccactaccctttatttcctccttataatttttcagatgcttgccacttcttagataaatggctttgcattgttccttcccatccctccttggattttccctgtcactaggcaaggaaccttgcggcctagcttttaattcattggccaaatgtcccagctgcaactcaaggtttcgaagagaggctgcctggctttgtatcactgcatcatttttggccatataatctggcattaaactctcaaaagaactcagttgggagttttgagcatgttgtgaatgtcgcgactgttgttaaaaacctagtggatatgcttgtcttccttgggctggtgtggtacttgagcttactccttgacccccctaagaaaaattaggatgattcttccatgcttgattataagaatttgataatgccccattgtttctgttaaaattctaatttcccatgtaacaaacagactccaaattagaaggacacttctcaaacacatgtccttctccacaaaacacacataagacatcctcactttcaatggcagccgctggctgattattcttagagtttccaatgctcaaattcttcaaaacattcgtcatggaagccatttgagctgtcaaagccgttagtgcatctacttcaaggaccccctccacttttctacttgttggagctcttgtgttggaccattggtagttgttacttgcaatggtctccaaaatctcaaatgcttcgtagtaagacttggacaaaatagcaccattggctgatgcatctaacaccattcaagaagctacatttgagccattataaaaagtctccatctgtatacaatgtgaaatgccatgatgtggacactttcgcaaaagttccttaaacctctcacacgcatcacttgtagattcatctttaaccttctgaaaagacatgatctcacttctaaattttgcatttctagtaggaggaaaatattttcggagaaactttttagcaagatcattccaattagtgacagaatcaggaggcaaagtgttgagccatgacctagctcggtctcgtagcgagaatgggaataactttagccttagcacctcttcactcactccttggatcttaaaataattgttcacctcctagaatgaatagagatggaggttaggatcctcagttggcatcccgttgaactgccccacggtttggagcatttgaaacatcactggcttgagcttaaattgttgtgcttgtatttcaagcctcacaatacctgggttgagctcattaaacatggggcaacatattttcgtatagcccttgctcggtcgtctgctaatatgatgggattaaccatctgttgggcaatcccatcatcatcaagatttttagccatgatgtctcggcccttagccttttgaac

SEQ ID NO: 31170 - DNA, 1775 bp, Cannabis sativa
acatattacaaatattgattccgattatttttcatttatttcattatatttatccattaatttattctgattatgaatattgtataataatagtgttataagtttacatatactatacatttgtatataatacatctccaatagtgactggtgactggtgactggtgagtgctcattgtcacaacatacaacatgtacattttaacatttcaaattaattatatgaatattattatctaatattattttaaaaattattttatatattattttttattttttttaaaaaaaattacgatttaaatttcttaagtggttttttcagtagtttctatgtggatgactataaagattttggctgcgatttaggttgctccgttagttgcaatataaatttttatatggaattccgtaaaagtgtaaaaaaaactgtttttaagcgtaaaaataaaagagcccttattatttaatatgagtaatgattatgtgatattatttaatgggtaaatagcggtataagtacccaaagttttaagtttgtaagtggcataattccaatgttcattttttagcggcataagtacgcagtgtttgtaaaactgtaatttttctctaattttcgtccgtagaaaccctgatattttcttaaataggccacatataaggtctagattcttgatcattagatctagacagaaacatgtagtattagttagttccaaatgttcttttaataaatttaaaacggagtctgtactgacaaaactgaataaaaattacagttttacaaacattgggtacttatgctgctaaaaataaacattgagtttatgtcgcttacaaacttaaaactttaggtacttatgccattatttacccttatttaatttttcttttaaaaaaattactttatcacctattaatatgttgagagaatataaaattataaaatttaattaaaaagtagtacgggagactattgtgagtaatttttaaagttttttactatgagagtaatttttataaaaaaaatgtatcaaatctaaagtgaatgaaaaagaaaataaaaaaaaaaaatattttaaaatcttgtgtttattttagcaactcacaattatgggtgttatccacattggccactgtcttataaagcacgcaccacgtttttattattattatattatattatattagattgattaacagaaaaaagtagtcatttcttgaaatttctctaagaatacgacaataggtgaagaggacattaatatcaaagtcccgaccagtattttatgaagaaaaaaaaaataaggaaaaattgaaagcagtatgaggttgtccaactccaagtggtggtagatgagatatgatatgccatcttattttcaattatttatttatttatcagtggacaagacaagaattgaattgacatctatgttgtttttgagtccattacacaactatgattttgagattcatattacactattgtttgtgtccttcctcatactgtatgagtcatacataatacccattatgtagatagagacacaacctcatacctcatttctaattaattctagctagattggttaacttattatatttttcttataataaaaaaagttattatattttatttgacaaaacttattatatatcattttttgacatgttattatataacatttaatataacagattataataataataataaaaaaaaccatataatataccagaaactcaataaagaattttttttttttttt

SEQ ID NO: 31171 - DNA, 2016 bp, Cannabis sativa
agagcattcaaaaataagatgttaatagagctaccgttatcgatcagtatacgtttagtaaaacaattcgaaataaataaagaaatgactaaagcatcatggtgaggattaagaaaatttcaagcttcgtcatccatgaagttgatggtttggccgttataggttgttggttgtttctttggtctaccctctatccgactatttcgcgtgcatgcctcttagcggctgagtatgttatgccgctgacctctgatcctccagagatgacattacatgtccaggtgtgctgaggtggctctggtggtgttatcagcctcttgtctgcttccgtcacgatcgtctttcccttgtctgataaaaaatctcgcaattgacctttgcacaagagtccatccacttcataccttaatgctacgcactctggagtggtatgtctgtggtcattatgaaattcacaccactttgtcgtgtcgcgcattgctgctggttttttaatcctttcaggccacttgacttggtttcccattcccttcattactacaactacttcgacaaggctaatgtttaggttgtattgaggaatcggtcccttgtcagattccctcatccgtcgaggtagtgttgtcttggcaatgtaatcccttggtctgtgtgattgggtggagttctcgctatctctgtatgaccgtgatttgttggttggataaggttttgaataatggtaggactggcgtcgctctaccctctttggtactctactgtcgcgagagtaagagtaggatgttgtcgattgtctattggattcgtcttcctcccacttgatttgcgcccaagctttggcaagcatgtcctccattgtcttgcatggatattttgtcaattctttgtaaaggttaaattctatcagcatgcctttacggaaggcagtaatggttgtgtccacgttgcatgttgtgatggaaactttttcagcattgaatcttgccacatagtctcgtaaggattcgcctctcctttgtttgatgcggtataggtcatctaacagtgtctccaatttcctgctgctcgcaaattgttctccaaaaacatccgttaattgagcaaaaaaagaaatcaaattattgggtaaattcatataccattggagggctgggctagccaagctagacccaaaccccttacacatgcatgcctcgcgcaactcacgagggatggcggcagtgaacatcctttgcttataactagctatatgatcatttggatcggttgttccgtcgtacatcctcattaatgggaagacaagcttctttggcatctcgaccaatgcaatggcatcaacaaaaggtgagtcggcaaaactgctaggcaaacttttctttattggtgttggaacccctgggatacgttggatcattgcttccatcccttcgaacgtctgagcgattgctcattcaatcaaatcctcctaagctagagtatgaatggtggtatgacatgcatcaacagaagatggaatcagattggagtttagcataacctgtgtggcagttacctgtgatggtgggattccttcaagaggagacgttgttgaagaatcagatgttgtagtgctaacccccaagttgctagtcgttgggaggctgactgtaggcaggccagttgtaggaaggctgaccataggcagaccagttgtaggaaggctgactgtaggcaagccagttgtaggaaggctgaccgtaggtaggccagttttagggagactgatcgtaggcaggtcataggccacgttgctggtcgttagacctccagtgtttgtcccatctgtttgcatatcagtatgttcagattgctgaggttgagaacctcctacgacagaatgacttcctaacattagagtcgatgtccctctgagtgtttactgatcagagacttgggtctctgttcttataggagttaagtctagtgatgccattggtgtaattggaactcggtaacgactttgagcaacaccaggag

SEQ ID NO: 31172 - DNA, 2034 bp, Cannabis sativa
atgatggacatgatctacaataatggaatcctgacttttttaacggatcgaattttggttccctttatgtgtaaattttagtactgaaaagttgtgtacaaattcagatgggatttgaattatacttccactagtgagttaatggtactgaagaatagtaattagaagggtaaaacggtagtttgaccaaaactaattacgaagtaatgcaaggaggactaatcactggaattgattatatcaatggataatgtagtaaaactcactaaatataattctataattactaagagttcgattccatatttatagtggagtaatcatggaattaataaacaaagattatttggttgatgagactcaacaaataatctagtttattggagcttaaaattataggtccatggtccccaaattgccaccttgaaatacaatcaagggtagggaaaaaaagttgtataatgttgttcggaaaaatctattttgaattagtaaaatagtaattatttatttttgtaacaaataaataattttttaaattaattaaatagagaaaagataaaagttgttaagacaatatttgttgagacaaaattttttaggacaaaagacaacatccttcttaattcgacaaggtaggcgcctaccctatatttgggtgtccctattggttttgtctttttgggttaattacatatttaagtaagtcaattagctaaatattttcatttaaaaagtggttaaagatatttcagatttgttgagatgttccgtcatctaaaatatcagtaacgaattcaattattgaaatttatttaaataattaaatatgatttaatgccttttttgttagtctttatgactcacagatgctttatggtgtagataaatgtaagataacttagtgctgccatgagttggagagcgaggcaactaatgtacaaattctagtctactcagcctatggggttgagttaattattagcaacagatgttaaggctctgtcgtattttatttaacaattcatttaaatattttttatataaataaaagtgtttagttttgaatggggatccccggtaaagaaagtctgcaatttaaagtataaaataaaggtgtaatttatttgtattaattgttttatttttaattaaacgtatttttagagtctaaagttgagcttattattataagattatttataaaagcacacacgtgacgctcctaaaagttagggcgttgtaggtaagctgataacgaacaagtcaaagaacttaagcaatataattaggttaaagcttaatctcaagattgagatgaattgatctatgatcaactaagtgatattgacttaaaaagatataacggtaagtttatgatatctttttttactgtcaatatcggtctagtctaatgtatagccaatacatctgatacaagcttactttgctaatgccctaaaaaagaaatttcacctatccaagtatatgtaaaccatcgttgattatcatgtcagtgtaagtttactgcactgataaatctcgggactaaatagtttgaagcatataatcacaattatcctctattgtgatgacatcactataattgtgaagaactacatgtttaagatttaatagaacttatatatcaaatataaaatcatgaaatagacatgtgaacaaagataatgattaggtcaatatatgattttgatctttattgatagtaaataatattacattgaaattgagttttatttagggcataaaactccaacattatatgcttagctaatttacctcaaacaatattccttagctacaactattcatgtttgttaactcaaaatttcgttgatataaatgagacttgataattaatacaccaaaaatatttacgtgataagaatgactaaattaaataaaagtaaggattttttacgtagtttaatagttaaaatctatgtagtacacaagtcaatattatttctctgagggtttgtatacaaatttttgtagggattcgacatacaa

SEQ ID NO: 31173 - DNA, 1163 bp, Cannabis sativa
aatattccagcattcaagaatctaattagctccttctgaagggcaccaccttgtttggttctcctatgtgaggtggcaccaaaaccagtggtgacaccatagctgtctgtgcctttgctcatactctccataacccaatcactactagccttaactccagcccttgacgactctgaaagttctaccttaactccgtcgacgtcaccgccagcagcaatggcagccacctgagcaatggtgagagtctcacccccaagacggacgaccggtttccgatactccgcaaccattctcttgacttcgtccaagtggctgccagtcatggactctgcggcagcaccccaattaagtgggtcattactagagacgattggtgttggcttaatagtcttgcacaaactctccatttgaagtaataataagttttgtatgtataatatatattgattggatggtgtgtttagagttggagaggttattaattgtatgaagaaatgaaatggaatttggtttgaagtgtaaggagaagttatgaggatgttatatagaagctattagagtaagatgaagagatagagaagtatataggttttttcaaagtgggtggctgaagagaaagagaaagtgtttggtgagtgcgttggtttggtatgcatgagaaatttgaccaaaggaaggcagtgagaaagagtttggttttggttgctattactattattattttatcttttgagtggaagtggactatacaaacaagtttttgggtccctccctatattaaatatttattcaattaaaaaaactaattgatattaaaagactaattaatatatagttacaggaattaatacaccacaccactaccttttctttgtctcattgtaattattaattgtttaattggtttgctattattttatctgcatgcatgagaaaaattattttctttcttgtttggtcaagtcaatgggtgtggtttttattctagtactaattgaactcacaaatgagcccataattttaactaaactttacaaattgattgagagtttatccattttcataaatttattttaatgcagtattcttcatccatatttgatgttactattttaatatgtaaaatacattattttgctacttaagatttaaataattttgaa

SEQ ID NO: 31174 - DNA, 2616 bp, Cannabis sativa
ttttttttaatttactaaaccgtcttgggcccattttttttaggaccggccctggttgtggcgtctacaagcttatcaattatgggaagtttgaagcagtcctttggacatgctttgttcaagttggtgaagttgatgcacactctccacttcttgttggggttgggcaccagtaccggattggacacccatagtggatagaatgcctcttttatgaagtcatgggcttatagcccctcaatttcatctttgagcgcttgggcgcattctttgtccaacaaccaacttttttattgaataggccagatactgggatcaatgttgagtgtgtgggtcatcattgaggggtcaattctgacgatatcttcgtgtgaccatgcaaaaaaggtgaaggttttccctaataaatttaacagtattgatttaatttctagcgctaaacctttcccaatcttcaatcttcttgttggaaaagtgggatggacctccacttcttccaactcttctataggcatgaagcttcctgtaggatccccaaagcgaggatctatgtatgtgtcctcgctttaggctagaattcattgccttttgttgggcttgtcttatgggcccttggtgggcatcttctctttcttagctttggacagagccaagttgtaatagtgatgggcaaactcttggtctcccctcacacacgccaccccatgccttgttggaaaatcaaggcataggtggtagatggaagttaccacctttaggtcattgagggttggtcggcctatcatgccattgaaggccaagggaacgtcgatcatgacaaactacgccatcagggttctggtggttggagtttctccaactgtgaggggtaatctgatatacccgacaggggcgatgccatggccaaagaagccatacatcacttgattgcatggttctaggtcaatgagctagagccccatcttttcataagttgatttgaaaagaatgttggaagaggctttgtcgtccaccatgcatcttactacaatcatgttcctaatttgtacaataatgactaggggtcattgtgtgggaaactgacctgagcagtgtcttcttccatgaaagagatcatcggctctatgggtttttgttttttagagcttctatcttcgacagctaggatatcgcttttaggcttgtgacagagtgtccaagcataatgctccctagccttgttggtctcacctacaatgtggggttcaccaatgatgacccctagatgtcctgccactggcggtggtattgcatctccattctaggcaccgtgtgcccgagtttggtcgtcttacacataacaatgcaagtggggattattatgccttatgaggtattaaatctccatcttcaaattttgacactcattggtgtcatggccgaagtcattgtgataccggtagaactttgacatgtacctcttgcccatctctcttttaataggaaagggctttcggtatgggattgttccctgagtagccatgaagatggcctcaagtttctctatcaggaggggtgaagtaggtgtacttctccaccttgttcttatgtggcatgggaaaagtgttaaacttcctttttttaccattgttcctccaagagttgttggtgttgcacttgtttctagtgtatttgccactagatgtctggacagagttcttggtttctacctgtgcgcctagtagttcatgagactgtcagatgtcccgtggctgcctgttgttgacatgccttgattgagcttgtcgtatggccttctcaagcttgataaagccatcaactctattaaggaattccttcatgttgttggtagagatcctccatatatctttccagaagttgctcaacgggagtacgccccccagtatggccgtaaatcggccctcttctgtaaggcctttgactttggctgcctcgaccatgaacatctggatgtaatccttcaaaggttctcattgtcgttgttttatttgacagggtcttcaagctgggatgggacaagtctcaaagacgagaattgtgtgtagaattctcgagagaactcagcccaagagttgaatcttcctgtgatgagtttgaagtaccattgttgagctatctctgacaaagtggctgggaatatgcggcaccacacatcaccatcaaccttatggagatcaagttgcatctcgaagtatttgatgtgagccaacgagtcttctcacccatatacatcttccataccgacatcttgaacttaggcaagggcaaggcatttatgtatgccgagaatggtaatcccctcaactgatcaagttctaggtgcgaaggttttgggccagctatgccttgaatcatgtccctaagttggtcaaactgtgcttgcacagaaggatctgttctgactggccctcctaggagaggttgcaggttttgaagagaaaagggctggctggccataccctgggagaatgcacggtgaaggttagccagatttgggtgttggctttagccagccaggcccacacttggcttttgtccttggccaggcagacctgcattcggcagggcctagccgcccatagctcctccatggct

SEQ ID NO: 31175 - DNA, 1892 bp, Cannabis sativa
  modified_base (373)..(375): a, c, t, g, unknown or other
cctaccctcagggccggccctgcaagtttaccaggctagctcaactttatgtagacaatatagttcgacttcaaggagtgcctagtgattttgtgtcctaaataaaactcatttcaatataatcagatttattacatgaaagtgcttattttcgaccatcgcagctaattttctcgaccctaacttgtaaattccatatcgtgttcgtattcgtgtagtcgtgtcgacagatgatatatatatatttatatatatatattacactcactacaaaaaacagctacctttagtgataattttttagttgtaacataatttttatgtgattaaatttgacttttagtaacaacaaaaaactacttgtgactaaaannnagtatttaaatacaagttgtcactaatttcgatttaacatattgtgactaaaaatttatttagtcacatgaaattgtgatttttgtgattaatatatttagtcacagattttttagtcacaatataagagtgataatttataattagtcacaattctattttactttttgtcacaaatttcattatgattaaaaacctatatttcgtatatatacgacgtatactcattgtgaaaacaaatattcttcaatattgtaagcattgttgagaattgaattaagaaaaaaaaaattataaaaggaaaaaatagaatgtggtgactttatgaaattggcatgatggcgcattttagttgactttcatttccaactccttttgtattggacataatatttagggacataaaaagggtatttttctagtccaacataattggactagaaaaatatttatagtccaacaataatagacatgatttttgaaaccctcaataggaactcctttctagtccaactttactggagattaatctatatatatatttttttaaaaaaataaattataaataatttaaatagataatataaaataatttacatatataaatttataaaatattatttttgattttaccattattattattattatttttattatttttattattattatttagtggaaataaaactgttcaactcaagtgattaacgaggtttattttgggatattataagcacaaaaattataatatctatgaataaatctaaaattacagcaaagtatacttagtaaatcaaaacacaatattatcacttaaaaaaacatatacagaacaaactacaaaattttaaattaaaaaaaaaaaattacatatccaaatataccaaaaatatatacaaattaattacacaaaacccctaaaataataataatataatataattacaaaaattatatcgcctcccttctgctaatttatttgctttcaagatttcttcgatcaatgatttgaggaattcagccaatcctccaatgtctagtttctgcaaatagcaaacaaaacacatttgagacaacaaactaggactgataattatttgatcaataaagctcatacctaaaattatagcaaaacaacaaactggagccgataattgtttgatcaataaattcattaacatacaagtttttaaagaaaaatagacccatatatatcagatattttctgatccaagcacaaaccctcaccatagaccactatcccgcaccatagatcttgaacaaatcagagagaaagggagagatagaggaaagtcgtgataacaaaaaataaaaggagagagaactgacttccaaggtctgcgagcaccacggtggtgcaagattcctcgtttctcatgcatcatcaccgtcatcgtcgtggccatctcgctagtcggagctagaacgagaaaaggttagagaggcggtgcagatctacgcagctccgctgagaccccagatctgggccacgg

SEQ ID NO: 31176 - DNA, 1207 bp, Cannabis sativa
accttgaaaacaaggtttgcaaatactctcacggctgcagaaatcatgaaccagttgactgaactatttgggatggcatcagatcaagctcaatttgagatgaccaagaatttcatcaatgcacggatgaagcctcattaaaaagttcttgatcacctactctacatgacaagttacttcgaagaagttgagagccatagagctattatagatcaggaaactcaagtgagtttgatcttaaatagtttgactccagcttttctgtcctttacatcaaactatgtcatgaacaagttgacttttgacttccacgagttaatcaaaaaccttctgatatttgagaatttgattggaggaccagagaaaggaggaaataaagctcctagtttcggcactgctaatggtacggccaagcctgaggcaaacattgactctactacgaaatccggcaaaaaaaagaagtggaagaatagcaagaagcctcttaaagctattaacacaggtaataagaataaaaaggttgttgattcaaaggaaaagcaaaaaggaaagtacttctattgcaacaaaaagggtcactggaaaccccagtgtcctaagtttttggcaaagaaacaaggtacttctacttttgttttaattccatgtgtttagagaattattatccccttcagttattaattctggatctactaaccatgtttattttcttcttatttcaactccagctgcttaaacttggattgctatcgtaatgagttttgtcgaatggttggacaaaagggtggagattgtccaatgtgaagatgaagctcgttatcttctttaattttgaattaattgttttatttaatgaacaatttaatttcaagtattagtttgggattttattccctatttcctattttgcagacaattcattatgacttttttgagattgttaataaaattttctctttaagaggttttcattatgaattacttttatgaaattgagcttcatatttactttaacttatatgccaataccgtattatatttatatgtttatcatattttttgcgttttgtattttattattgatataaaatctatagtatgttattctctgcaaagagattataccacaaaatatatagaatttaaattcagtgtttataaataattgttaattcttaagaaattattaagattttgtttagtaaaa

SEQ ID NO: 31177 - DNA, 2060 bp, Cannabis sativa
ttggagatgaaggcagccccaagatagaagaactatgctactggtgcgaaatggttgaggttgggaagcatgaacaggtgcggtgctgactctagctcctgtaatacaactgtatccaatcccacgaattttggaactgggacaactcagactagcgtgagatcaggggacggccaattagcgacatcctatacaaaaaatcaggtatcgaattcagcaataaatgtgatcaatcaagctacaagaaacatgaaagaaatctccactaagacaattgaagggataaataaggaaggtcatgggagagaacatataggtgatactgatgtggagattgaccacacgttattagttaatgctgatgagcctttagaggtgcaaaatatgggaattactaaaaatgacataaacccaaatgggccagtcaatgtagtagatgtcgagatggacactgagatgggtaataacataaaaaacttgtttggggcgcgctctgtttcacagactcgccgagaatatgaatgtgttgagttggaattgcaggaggcttgggaaccaacgggcttttcaattccttaaggagatcgtgtatctcaaaagaaacctaatttcattttcctttgtgaaactaaaagtgataaaaacaagatatgcaaagagtgggtcgtgctttgggctttgaaggtttgtttattgtagaggcccaacggagtgctaggggcctagccttattgtggagaaaccaacatgatggacgaattctgggttatacacataaccatattgattttcttgtgaactcgactgaaagagaagaatggaggctaacgggcgtgtatggggaaccaatgcgtaatcgtcgacaactcacatgggatttactccggtacctagctcgagattccaacctaccgtggtgcgtaattagtgatctgaacaacgtgatgcggtaggaagacaagaagggcggccggtgatacccacaacaactaattaatggcttccttcaggcattgaacgactgccacttacatgacctcgaattgacgagctacccattcacctgggagaagggccgtggtaccaacgattgggtcgaagtaagacttgatagagcactcataaatcagcaattcactcaggtttttcctcttgctgcactttttaatttggaaattacctcctctgatcactgtccaatttttttggaacctgaaatcactcaagccttcacacttgcttttaaatttgagaatgcttggttcaaagaaccaatttgttgtgaaattatcaaggatcgttggagtagatcgggagatagtaatctgtccaaaaaactgaagctgtgtgcagagaagcttgggccatggggaaaagagataactggaaattttaagcaaagaattcggaagtgcaaaactgaattatcaaaccttaagaataggagggatgcacattcggttcagcggtatagtgaagtcaaaaaacagttgtttaaagtgattgatcaacgagaagctttttggaaacaacgatcaaagctgttatggttgaaagaaggcgatcaaaacagcagttattttcacaagactgctacaactcggaaaagacataatcaaattgatcggttgcaaaacagtcaaggagattgggtagattgggataatggattatcaatggtcattaccaattattttaatggcctttttgaatcgacggggggatcaaagcaagctgttattgactgtgttgatacttccattcctgaactagctcatgatgaatttaggcagccaattactgaaaaagaggtcaagaaagctgtgttccaaatgcatcttgacaaaagtccggggccagacggaatgacaccagccttttatcagaaatgcttgtcaattgtgggtaaagatgtggttcaaatggtccataattttggtttgtttgaagagggttgtgctgatacaaatattttcttaattccgaagataaaaaagcctgtgaacatgacacaattacgcccaattgctttgtgtaatgtctcatacaaaatcataact

SEQ ID NO: 31178 - DNA, 1594 bp, Cannabis sativa
tatattcagtgcctcgctacacgatagtagaaggcaaattgtatagaagggactattctatgcctctcctacaatgtgttcttcttgaagaagcaagcaagatcatcaaagaaatccatgaaggcttttgtggggatcatgtaggttggtaaagtctacaaaaaagattattcgacaaggatattactggccaactataaacaaggacacccatgaatttctcaagatgtgtgataaatgtcagagattctcgcatataccacgcataccaccagcggaactaagaatgatgacctctccttatccataagtaatatggggaattgatttaattggggcactacccatagggtgcggaggagcaaagtatgcagtcatgtctgtcaatttctttgcaaaatggacggaggctgaacctccagtgtccataacctggaaaaaagttcttgactttgtagtcagaaacataatttgtaggtttggaatacccattaagatagtatcagataacgggactcaatttgatgctgaattattcactgagttctgtgagaggaataaaattaataaaagcttctcgtcagtatccaggcctcaagcgaatgagcaagtaaaagctgttaataagaccttgaaggatactatcaagagaaactagacgctgctaaaggtagatgggtcgatgaactacctcaattactttgggctcataggtcaactgaactgagaagacaacaacaagacaactccattctcgctagcatttggctcggagacaatgctgccggtagaagtaaatatcgtgactcacagacaagattttataattaagaagaaaactaagaagtcttaaaattttccttggatctacttgatgaaaaacgtattgagtcgcaaattactaatgcagcataccaacacagactgacaagatacttcaacaagaaagtaaagaaaaggctcttcaacattggagacttcgtgctaaggcgaatatttgccaaaatgagagatgcatcagcaggaatatttaacccaaactaggaaggtctttatgtgatcgaatcgctagtaggaaccgcggtttacttattggcttggctgaatggctcgctgataaagaactactggaatgcggaatatttgcgaccctactactagtaaattgatgttgtaactcatatttctgatgtaatatttcaagttattacaaagtgtcattctttaaaattacttgaggggcatatgtgtatgattaactaaaatctatctggaaatacatgatatattgcaaatccatttactttataattttttaaaatttttaaagtttttgattaaagaacctttcccacgagaaaggaaaatcaaaagttgtaaaagagatataactttaagctacatgcgaagctgaatactaatggctcgcattttctgggaaagtattaaacgagacaccaagatgcctttaagaaatacctaaacctaatatatgaatagagggcttaacaattcatataagcaatcaaaaatatacaaagtgatgaatcattaaaagtatattcaagtttgcttaaaacagattataattgtt

SEQ ID NO: 31179 - DNA, 1785 bp, Cannabis sativa
aaataaataaatgatcacatgaaccaaataatatattatataagtaatgaaaataaatttttttctttatataaatgaatataaaagattacaatgaaatagagtcttatttaacagtttgaccctcgagcttgttactcactgagaatctagttaataactagctgtgaatcactgtagatctcgagtgacttgactttgattggtagtgccaatcgttgtcctgctaggagtgccttatattctgcttcattgtttgttgcggtgaactcaaaccgcaatgcactgtgtgttcaaaatcccttgggagtaactaagatgagcccaacactagaaccgtgttcgttgaaggatccatctatagtttctaagaaggtccattgtcctcttgcgctgcagtcttaggcgtgtggacctggtcttcacaaatcatgtgattgtcttcttcgaggccattacattcatcaatgtagtctgctaattccttccctttgattgatgttcgagattggtaggtgctctcaaactaacctagctcaactgcccacttgagtaggccccctgatgcttctggcttcattagaacttgcctaagtggcttgttgatttatgttactacatatcctatatatgatgttataaataaaatattttaatcctttatttaaataaaagaaaatatcttttttgatttgaattagaactcaaattcaaatataaatatctaataatcgaatgacaaatatcaaatagatcttttattttaattattatttttttaattaaataaatatccaataatttatttaattactaattaaaagataattagttaatttaatttaaattattttaactaataaaataattatactaaattaatcatgggcctttatatgtcactctacacatggggattgggcctacatgtgtgggttatattttaaggtccaaaaataattttttaattttttcataaataggatttattatttattttaccaataaataataattgactaattctcattaatctcttatttcacaatgattgaaagaaatataattttttctaaaataatatatttctctctttaatattatatatgaataatattatatttaactaattaatatagttttatccaataaaacaaaacatctaaatactattaattatacagttcataatttccataattaatcaaaataataatttcacaaattactattttacccttaagaatttatttgtcatagaaattgttatcctattttttacacattgacgtggcaataaggatagatgatacatgccttacctttcccatacttgggcgaggtaaagtatccctagcagtccataaatgactacttaacatgtgtaacactcaaatatctgagtaggatggttgaaaagatattcgaccaagatgtagacatgtttataccgagcgaaacatgaaagatggaaattctcgagatcaatctcgttatttttagaacgtaaagactatccctgtaattacgggattgagttagagaataaagacgacacattttagtttcctatttcttgcattgtaattaaagaatttatttagtttcttattttactcattataggcaaaagggaaatcattcctcatgtattaagtccttataaatagtggcctaatctcactatgaaggagatcgagaaaattgctacaaaaatacattcaagagagaaaagagcgatctaagagagaaagttgctcagagatcaattgtaagagcttccaa

SEQ ID NO: 31180 - DNA, 2705 bp, Cannabis sativa
aagcaaaaaccattctacaaaatatagaactgccaacttaacaacatcctcatcagaatcaccccacctctttgtggtaaaacattccctaacagattctttagtaatagagaatgaagttggtcaatatttcaaacaaagactattaacgtcttgcttaaaatccaacacactacaatcaccttcacaatctaaaccagttatcaatgcaaactccttaatgttaaacctaatcctaacaccacgaatcataacccacaatttagcatcattaggctgctgaacctcccgcaacaacaaccatgaaaaacttgcggttaaactttgaactcaagaagctgaatgaaatgcccaaaacaggttttgaaaacatttcaagctagttaggcgaaaggaaagtcttaatatttttttttatgaatcaggaattgtattagcacaagaacatttgattacactcaaatagcacccataaagggcctataataaagaacaactatacattgacaatgtatttacaatttttgaaaccattgtgtgtctatatttgagactttttttggccaaaacatctcaattcttagttttaagttagctttcaactcattgagtagggctgtagctgattgctcctctttggtccataggaccctgttcgtccgccaaatgctataaaccagtccggctccggcagctgtaaaaaccagcagtttaaattttatctcctttgatctccctagccatttgatgatgttagggaggcttgtgtgcatagtttcccatcctaaccacttcttgacttcctgcaaacaaactatagatttcgggcaagtcataatattatctataaccttgtatgaagcagtggagacggctttcacaagaaataaatttttctggtcatatatgtaatcccattcctgcaatagttccaacaaaaaacatgaggaaaacaacaaaagactaaaaaactaaaatacaaaacaagaaaaaaaaaacaaaaatgtactataaaaaaaatagacaacttacgagaattttttttgggtatgtcaaagtcttcaagcttctctcaactcttaggatggacctgaaagtaggtataacaataaaaatcataagcaacaaatttgaacaactaaataaataatttgcaagcaataagtaaaagacaaacaaaaattaagcaaccaggaaaaaaccaaaaaacaacatttaaaaaataactccaacatggtcaacctaaaagatgaacaacttccaagaaacatatgaacaacactatgcaaaacatgaaattaaaatagtaattgtcaaccgtgaaattatattaagcatcatgaaaacaactaaaaataaacatttaagcaactgttgagaaataatgctataaactgtttaatagcagaaacaaaaccaaaaataattgaaaaacaacacaaaaacaacatcaacaaaaataaataaaagaaacaaacaaaaaatgagacaaaacataaaaccgtcattataaacaggtaaaacaaaaacaaaaagaaaacaaagggtgattaagaattttcaacttaagaaaatcaaaaaattcaaggtaaacataccttggatttaacttcaagcttcacttcaaaatcagggacttcatcctcaaaatcagaatcgaagataacctaaaacaacaagggggaaaaatttaaaacacaaaacatcatacgaaaaacctaacaacaagagaaaaacttaaaaaaaaattgaaacacaacataacccaacttacatcattggcagatttcgaagattttgttctctttgccttgcgagactcaatcttatctggaagaggtctttttttagaaccaaatggctctccaacatcacccattcccttcttcgcaatgcgcttcaaacccatgttaggatcaactttagaagacttcgaaggaggattcttagtattttttgaacttttttgctggggaaggtgacttcgaacccgacctagtggtggccatttatagaagaagagaagaaaatgtgggaggaaaaactaatagaagttatggaagatagtggtgatagtggcatagatgggaggttgaaaaatcgtggattagggcttcgaacgggatgatcgtgggttgtggcaacagaaaaaccaaggaaagagtaacagaaaataaaaaaaattcaaaaaaataagaaaggagaagtaatgggaggggtggcgtgtaagaagagggaaaatctagaacataagcatgaataggcatatttgtaattatgaaacttttgaaaatataaaattgaaaaataaaacttttataaatgtttaaataaccgaatattgataaaaatctaaaaaattagcaaaaagtggcaccaagtgtaaaaatcccaatttattaattgttaacaatttttaacaattttttaattattttttctcatttttaacaaaaatagagtaaaggttaaactttggaattttttctataataaactaaaaatggaacaaatttacatttacgacccaaaaaagggaaataaacaaaaatagaaactaaaagttgttaattgcaaaattaccggccaaggaaaacggaagcctccatcttcttcgtgacccagccgtcgaaccccaacaacccattctcaaccattttccttccaaaaccagaaaaattaaatctaaaaaaaatgtagatctc

SEQ ID NO: 31181 - DNA, 2228 bp, Cannabis sativa
  modified_base (28)..(48): a, c, t, g, unknown or other
aacttctaaaatgatataaaataaacannnnnnnnnnnnnnnnnnnnntacattggttgcagtggaattaaatgactcctttcgcttagatctctaacctgtgtatcatttctatagcagagtattaccaagatctgagctcgaaactccttttgttgtttggattcttcaagttcttacacactatggttgaggactaacttgctatgtgtgggcatacactcaatcactatagctcgaatttgatagtcaagaaagctataggaatttgaaattagaagaagaaaggaagaagaaaaagtctcattaacctagttgtcaaagagaaagaaaactaggtttaaagctttttaagcattagttggataatgagactataactttctttttatactaatttcacatagggttaaagttgatttatttggaataaaaaaattataaaaatagagcaaaaatacccttcagtggccagccatgaagtgggccctacactagttagatattacagtaagtttatcatatctagttcaagttcaatatctgtaataccctaagattatgaaaatatattagcaaaccctaactagttaaatgtgtattattgtggaattatattattatataatctattatatgtgaattattatgatatatgacatgttaagaccctgttggtgagttaggggcatttttgtaatctttacccgagaagggtaaaactgtgaatttaatttaattacgtgcttgtggaatatattattatatagtatgcttgttttgtttttttcaggtgtgttctgacaagtcagcgcggtatagtcacaaccgattatttcgggctgaactgggttcgggggcaaaatacaattatgggatgacctattggcattttatttatgtgtggataatctgaatttatctgagtatatttgtgatgggaatgattatttttccttgaatttgtacttatgtgtgtgtatggccctaagggcatttttggaattttctactatttgttatttgcaacaaaaagaaattttaagtaaaataaagttttatttcctccattgtttcctcagtcatattcgccaaccctctccctctctctaaactcatttctaattcttgaattttgattgtgaattgcttggattcaagcttagtcttggtggcttttggtgctagagattggaaggaattgtggtggccctttatactaagttttatttggaattcttgctgaaatttattgttcaaaatcatgaaattagggtatgatgttcttggtatgcatgtttgataatattattgtaatctttacaccttatgcttgattgagttagaaagttaaagtaggatgcttatgtggtattttttagatgatttgtaaggattttaatgatatttttattctattatacaacccttatttaatgttgtgtttgagtttatgttttgggattttaagattcatggtgtgagcttgaatttgttcatattgtgctaaagtttggagcctatgttgtttgttgtttaaatctgagtttacatgcatttgagctgtgatttttgagctttaatatgtgtttttaccctctattttggttgaggttcaaaatttaggaaatgtggcatttttagaccttaaaatctggttttctaggtttttcgaaccaagttgccgcggccgaaaatccagctgagagccatcccttttcccctttttgttttggccataacttttgactggggactccatgttggacattctttctatcgttggaaagctcgttctgagccctatatgtttatctctattttgaaagccaatctaatattatgtggaagtggatttagggattaaccttgtacttgtgaatctttgaattgtgactaggattaccgacacttcgttaggagcacccgaggatttggaatctccacgtttgtaggacataaggtaagaaagttgttaacacgtagagttatgcatagtggcgcttatattgaatatgatatatgtgagcaattaaaaatttggattagagttataaccctaaagtgagagatttattggcctatgattattaccttagtgaattgtaaatgtgtaattgttatgccatgatgtatatgtatattgagattaagggttatgctttcaaggcataatcgagttggactcggtaattagaacttatatgaaccgttttaaggccttattg

SEQ ID NO: 31182 - DNA, 1852 bp, Cannabis sativa
tatatatatagaaggaacatttgtccatggtacaatttctaaaaaaatttatttataaatatttattttaaaaaatattaaatcataagagtttgattcactggcaaataatagaagaaaaatttaaatttctatacttaatttagctatttaattacaaaatataaaaaaaaaaaatatctatttttatactatatcaaaaaatatgtttatatacaaattattttagtcaaattcaacttttttttaaaagttttttttttttggaagaaaactttttttttttttcagtggactcacaatctcaacacataaaatgtaaaaaaaataaagactttctaaatagctagaaaaattaagtataagaattaaaattttcctaatactatccaatcatgaataatattaattaatagtgtacccatatatataaatataaatttatagtaagttatgtaggtattgcatttaggtgatgtttggttcaccataatagataagtccattgcattgtttgtttttctaattttacttttgtaatttcaatataatggttattacattaagtattataatgatgattacatgccaaaactaatgtaatcctcctcattgcaattacaatccataataaaaaaagtaaaataatattttaataaaatatagtaaaaaaaagtcaaagttctgtattaccctttcttttgaaaattttattgaaaaaaaacaatagagttattttagtctatatatattttactctattacattctcataccaaaccaaatataataattctcacataattaatgttcattccaactacaatagattcctattactattttttattttattgcatacattattattactattaccattatcatttcattataccaaaccaaacaccaccactaattattaaataatcttaatataatatctttgtgtaaatatagttttttttacaatttttttaatataataatttttagaaattttttatttttatattttaaaataatatttttttttgtatttttatggaatttcacatatagaaaacctcatagtaactaacgaagcaacttaaatcactacaaaaaatcttacttttaatcacaataaaatttgtgacaaaaagtaagaaagttgtgactaattataaattgtcattcttacattgtcactaaaaagtctgtggccaaaagtattagtcacaaaaattacaatttattatagttacaatatttgttatgactaaaattaaattagtggcgcaacttgtaactaaatattatgtttagtcacaaataacttttttgttgtgactaaaagtcatatttaatttttgtgaataaaaagttgtcactaaaaatagttttttttgtagtgaatcgcaactaaaatccacttatataggaaccaatataaaaactaccggtgtaacccaaactgtaaattttaaaaaaaaaaatagtatatgaaataatttccctaatttttattgtacagtgtacactaataaaaaaaaaaacttcttagagtaatctgtggcataaatacctaagtttaataataactaagttataattctataacttttgtaggtacccgactattataagtgaagtaaatttccactagcttggcaatttctaattagtccaagtcattaattttttttcaaaaaaaaattaatttaaatacaccaatataaaaaataatatgtggataataacttattatttaacaattaaatacttaaaaataaacttaaatatttatgccacaaattactcaacttcttaattctatcgtataattcacttcaattaatttaagatatata

SEQ ID NO: 31183 - DNA, 2574 bp, Cannabis sativa
tatgcagatttttacaaaatttaaaaattaatgcagggaaaaaattgcagaaattttgttttttttccctatttttcaaatgtaacaaccgaaaaaaaaaccgtcgctaaacaaattcaaaaacgtaaccagactataaggcaccatcgcctatagtattaggcacggttctaaaccgtcgcctatacccagttataggcgacgattttaaaccgtcgggaatcctagattagcgacggttttaaaccgtcgcctattttgcccaatttacgatgaccgaataggcgacggttatagaaaccgacgagaatactttaaacgactgtttaaaaacgtcgggaaaacccatttttgtagtagtgttactatgttggttgttcctcactgggtatgagttatctttctttactgtctttgtagaaaaaaaatactaagtatagagatacaatacttctttctcttttactattttggaaggtattagcgaggtggttacttcaaccgtataaagaggggaataaatgaatgtagttattctttccacataccaatatgtgggtcaattagttacaagctcttattcccgagtatgtggatcaatgagctgcaagctcttattcccaagtatgtaggtcaatgagttgtaagctcttggcttactcatctcaaacagcttttattatgtactatgtttatcctgagatgagcttattgtctcgccagtcttacctgttaattattatcctcatcttgcatttgcctacgtggtagtgagtttgaatatttatatcaaccgtaattcttgaggcgagttatttaaattgtatttaataatataattattaagctgattcatattccttctctggtacatgtgtcagcttctggttgttagctaaaatttgggtataacaatggactttaagtattttgagaatcttaatattcttgagatgcttgataatattggtgagttctttttgtatacttctttttttgctaattttgaaaaatagatgcatatattagaatcaactatagaacttcaataagattttttattttaaaaaaatattttgtgtttaattgatttaataaatatttattttactaaattattttaagattttaaactcttactagtagccatgatacaattcttactaattatttcataaattagctatttttggcttatgtaaataatataaaatgtgagatgtttcaagtaaaatatatttatttggtagagtatttggtgtgaatcattagagttgttacaccaaaaataaaagattttaaaactctattggtgtacgttccacaccaaatttgtgtaactattggagatagtctaattatctagaatttggtgcacactaatttagtatgttattggagtaaaatagtgtgaacattctacactaatttggtgaattggtgaattgtgccaaattagtgaagtaatattatattggaaattttataaaaatattagattttgggtaaatattacatttatactgccacatggaaaaatttatatttttactgccttcgccaaattttttttactgtaaacactaaaagtaaaaaatgaggcctccatcttccacacccacgaacagaactaccacaacaatatcacaacagccagaaaataaccattaatttcagcaagatgaaggagaaacattaaaaccattaatattggggctatcatggttattctaatgttgttttttgggttgtttcactattatctcgtatgcttaataaatgttagtatcaaattacacagattaaaccaaccactgaatatttgtttgaggtaaccagaatgaaaaaatcatggacagtgaacctcaaagagagaacacacacgtgtaataggttactacacaagctctgttcagattactacagtaagaaaaattggctagcaacttattaaggaatattgtacccaataggacaccaaaatgagtgggatgtagcacaaaatgtgaacgatgtaatagtcttacctcccattgaaaggctaaaatctagaagataaaaaaaaaaaaggatggaagctggttgagaaaagaaacaacataacaaatgcagcaaatgtggggagctatggcacaataagagaacatacacgagaatgcatcataaatgaaaagaatcagaacaactaaaaaataacaatgaaacaatggaggaaatttgaatatataatagagcatagaatactgaaagaaataacttacatacaaattttattatttttttattattattaaaaatagagcagtataataaaatttagaaaatgtgataaataaatgaaataaaacaacagtaaaacaaccttaaagcaatgataaaaaaaaaaaataacaaattaaacgagtaacaaaaaatatatatattcaatcctaaaaatctaatagaaacatatgtaacatgaagaactaaagaacatttatataaaaaactacatattacccagaatgataagagggagaagagagagagagagaagataaaagaaaaggggagggatgagagagagagagagag

SEQ ID NO: 31184 - DNA, 1972 bp, Cannabis sativa
  modified_base (1445)..(1450): a, c, t, g, unknown or other
agagagagagagagaagaaagaatagggcttttagacttaatgcaatttggaggctaagtgacctagatttctaggctagggttaaggcctttatttaggaggcctaaaccctagatcatagtttaaattcctagatatttacataggttgttagataattaccaaagactaaagtgcccttgaatctagatattattcaaccattatgttgggcttttagggcccaattgctgtccacgttttgggctatacatagagtcctgccaggttaatcgtggccacccatagacctacaggggaggtcttggcgcccaaggcctgcatgatctggcaggtcaaggcctgcaggacctagcaggccactatagctctaccaagaggagtccgacctttgggtgtggaggctagccttttgtaagttgaggacaactttgtacactgtttctttgtagaggacaggttcccttggtcgaacggaaactcccttggtctggaagttatttcttggtcggccagcttgtgcacagattcaggttggcctataggctcaccctggccggcctataggcttctcttggccggccagggattttggtacaactccttaagagcttgcttcactttattcagttgttgcttgatggattttctatatcttgcatggagactctgttctgctactggtagggttgtgctccacctgtactctagctttggcttacgtggatattccacgtcaggtggacaaaatttgggataacgaacctaaaagtcaaagtcaactcttgggaaagtcaacttttggatctaaacatggaaatcaagcttggaagctcatctacatcaagactacacacaatcaaatgctatacatttactttagttttgttaaagtgatttgcatagtagattagggtttataagtttaaagtttggctcactaacttgtgtgacaagttatttcaaaaaaatgatatctaaattttctaaattgatttttaagatcacatattatttaactaaaagaacacaactggaatttttgaaaccggataaacaagtaaggagttatgcacgttttaagtcgaaaaaattataaaaatgttcactactccctcaaccgaaattctaattgggaatcggactttaagatgtggctaatctggaattttgggtcacaactagacttctgatttgtagaaaaaaaaaaaggcctaaaaaaccgtgttaacagctataaacaactagttttcattcccgcactatataaactcatttttcactcaaaaattgaggttggttgagttagtattgatcatattacatctctaaaagagttctagatttacttcgcatcattctttcataaacactccaactacacactcttgagccaaatttgttcttatcttctcaggtgtgcttgcaattctctctaggattnnnnnntgtatttcatcttattagagagagttttctttgtatttcaaaatcaaatatcaattgtattggtggagttgaggttggcaccggtagaaaaacaactcggttgtaggtgaggttgacaccaattttgtaaacaacccgagaagagtgagattgtccctacaaccatccgagagtgagattggcacttcaacaatctgaagaggttgatagtcctttggaaaactattgatttaagtacaggttgcactggtagaaaaacaactcggttagtgagattgacatttcaataatttggtgagcttgatagtccttagaagaaaactattatgagaggttcgggaaacgccttggtgaaaaagtctttgattgtaattagtcaagcccgttaacttggctcgatagttgaactcaatgctaggtctatagttttgaagaccaaggacgtaggtggcttagttctactgaaccttgtaaaaatcgagagtttgcaatttttatccttaaactgtttacatttcaagt

SEQ ID NO: 31185 - DNA, 1483 bp, Cannabis sativa
aggaacacctcatcagaattgaggcctttatttttgagatcccatatgaacttgacccaatcccatatccggataccagaaccacaaataggatagatgccccggggagaggatcttcaaagatgaatagccacatcacaagataagaacagatgctcacttgattctgtctgtaatccacacaaggggcacacatcctcctcaataggaaatttcttacagatctcagcccgaacagaaagagcctttgctaaaatgcaccaccatagggtctttagcctttcagaaattctgctatttcacaatttgttccacatagacggggctacttcacagtgaggcgctctatcaagagcttggacgagataggccgatttgcaagagaaccgcccattactttccagagtccaaatccatttatccttaccctggccagaagggttaccccctttcaagatagctgaaatagtgtctttgtcaaaaaggttgtttagcttggggacattccaggttccattttccaacaaaagctcagctactttattcacctcacccatgggggtaccattaggacgagggatgaactccttcttatgagtaatccaaggatcattccaaacgttagtgtctttaccatccttcaccatcttacaagctcctttcttcaaaatggcttcggatttcaccacgtttttccagaaccaggagtttgaatttttgaaagtacaattaagaaatgtctttccttttagatatttcgcttccaagatcttacaacaaagggattggctaccaatcaacaggttccatccccatcttcctaaaaaggcaagattcatttctctggtcttgcggaaacccagacccccctgagacttagggaggcagagtttgtcccaagctttaagatacaacccatggttacctttctcagacccccaccagaagtcgcgaaccataccatcaatcttcccaacaagccagttagagagcttggtcgtttgcatggcatacatcggcagggataaccccacagacttgatgagagtagcacgtccagctttagacaacgtcttagccttccatccttagagctttgacgacagtttttcaataatgaaattgaaatcggcgtccttttgtctggagcaaaaaagaggcaaacctaaatatttgatgttaccttcaggggacccaattcccagctccgactttataccacttctcataccaatgagagtattgctactaaagaagattgaggttttttgtttattgacttttggcctgaccaagcacaaaacttctcaatgcattgccaataacccttcacttcttccaagttcgcctttccaaccaggattaaatcattcgcaaaaaaaatatgagtaattatgggaccacctctactgagctttctgcctttaatatcgcccttacctcgagcgtcattcaaaattctggacagaatttccgccgccca

SEQ ID NO: 31186 - DNA, 1515 bp, Cannabis sativa
  modified_base (668)..(668): a, c, t, g, unknown or other
tatacacgtttatatttatcgatttcaacaaaagattttgagccttaaattcaaataatatttatatatatagagggtttgtttgtatatgtgaccccattaattaattaagcaacttgtgtatgataatttattcatgtatgatgtaaaagatgaccaaattaaaatagtttgattgtgacatttaattttccaaaccatgaacctatatatacactatatttatgtattgcatattaattggggaagatttatttgaattataattaaaaaaccaactccaactagctaatctactacaaacaaagaatttgaattgaatattctaaatacttaattatatatatattactaaactttttaattgcaataaattaatttgatataaattagtttgtacaattttttcagtgtgtcattaaattattatgtttttaatttgattaaaattatgattttcttagaaccaaatatatataaatatattttttatatatacaagatacctaatatataatgaataataccagaaactttgttagatacataggtgaatcaatgatcctatatagtacgttgtttattaatttgatcttgttagttattatttaatgctgtattttgggttacaaaataacctactttattaattttcatatatatatatntatatatatatatatattgcacagcagccattgtcgttttctaattctaacattatatatatatatatatatatatataaatatatatctaattaaatataaatattctcttccaaaataatctcattttgtttgttgacttaattattcttcaatctttttttatagtctaatagctacatccaccttttgtttaaattcacaaccttgattatataggcattgctatatgttagaatttcggataaggtgaatggggttttatctcaaaatcaattggcaataggagtagttcatttctcttatatattctattatctttccacacattagcaatgtggactctctaacatcctccctcaagatggtggctattttatatgctcactatcttggctcactatccctgatcacaagtggctcttttgctctattgctagacattttttttgtttatttatttttgctctgataccatgttagaatttggggaataaggtgaatggggttccatcttaaaaccaattggcaatgggaggagtagcaaattcatcttatgtatcacaatttatttccacacattagcaatgtgggactctctaacactataaggcctcaatgattgatgcttagttagcaccgtaagggtgtgcataaatcgatcaaatccaatcacaactgatcgattcaattacaactgaccatcaaatatagatatccaattataatgagattagattggatgctaataattttaaatatctaattagatcagatcaaatgttggataggaagtctaaaaatttaatacatccaacatctaatcgaattaattagtattttcatt

SEQ ID NO: 31187 - DNA, 2482 bp, Cannabis sativa
  modified_base (459)..(464): a, c, t, g, unknown or other
  modified_base (1312)..(1315): a, c, t, g, unknown or other
tttagggtttagagtttaagggtccaattccagttccggctccaatttttggtcacagggtacgatttatggttcgggtgtgggtctgggtaagagtcatggtctggctctaggttcatgtttgggttcagaaccgagtctcggtcccaaatccaaacaccaacctcatgtcgagtcaagttcgagttttgattcgggttcaggttctagtctgggtctgggtccaggtcgaggtccgattcctagatttagacactgaccatgggtcgggtccaagcctcgtgtcttgggtcctaggtcccgggtccaaatctagatcctggtccaagtcaaggtcttggtccttagtttgagtcctggttcgggtttcaggtccaggtttgggtcttgggtcctgagtgatgggtcaaggtccccaattaaggtcagggtcctaggtcccagtcttggttatcatcnnnnnncgagtgcaggtccaagtccttgttcggtacttgtccttgtctcgagtcttggcattgtttgggtctggctcacaattcggttctcaggtctcaggtctgaatattgggtcccttatcctagtctcggtcctgggtcccagtccatgtttaggtcatagtcgttgtcttggtctgggtcccagtcctgatctcggtcctggtccaagtctcagattccagtccgagttcgtgtacgagtctgggtttggatctgggtctcggtctgggtcccggtttcagtccggtttagggtccgggtcttggtctggatctaggtctggatctgggttcttgtatgggtctcggttctggtcaaggtctcaagtcatgggtcctgggttctgggttctcggtcgtaggtcctaacgcaagtatgggtccagctatcgatcccagttggggttcggacctgtgttcggttctgcatctagatccgtttttgggtcaatgtccaattcctgttccaaggtcttcattccggttcttgttccaatttcgggtcgcgagtctgagtcttggtttgggtcctagcctaaaaattactccaggtttgggtcttggtacaattccaagatctagacaccgactacgggtttagtcaaggccccggtcgtgagtcatgatctatatcccaatctttggtcctagtctaatttctattcggatactaaatcctggtctgtgttcgtgtccaggtctgggtttaggactgagaccggggtcgggtcttggataccagtcccagttgggtcccgattctggttctaattttgagtttgggcccccaatctttgtcgggctcctgggtnnnngtcttagtcaccaatctcggtccgggtcttgggttttggattgggtccaagtccgtgtctgagttcgggtttgtgtcccaagtcgttatttgagttttaattcgggtccgcgtcccggtccagatctgggtctgggtcctagtcagattccggttcctggactcaaacctagacttggactcggacccaggtctggggtacgggtctgggttagggtcagggtcttggtccgagtttgggtctgggtttgagtttgggtatgggtccttgatccaaacactgactacgggttaggtccaagccccgggtccagatttgggtcacgatctcgggtccctatctagttccacttcatgtcccaggtctcggttcgggtcctaggtcaaggtccgggtctggggtcgggtcatgggtctcaatcctagttctcatgcccgtgtcccgggtccaagtcccccatccatgtctgggttctaggtctcgatctgagtccaggacctagtcggggttcaagtcttggtccgagttcaggttcgggatccgatcttggtcttggtccagatctgggtttgagtctagctccaagttcgggtccgagtctcgagttttgagttctgatctgggtttgggttctgaggaggcccatttctaagtccccaatccaggtccgggtcctaggtctcgatttgggtccatcttcgggtttgggtcctagtcccaattttgatttcaattcagtgtctgggttcgggttatggtccgggtctaggttttggtcgaagtcctggttcgagtatgggtccgggtttgggtccaggttcgaatccttgtctgggtctgcattcgagtccaggtttgagttcggatcccgggtgtggatccaagtctgggtctgggtcagggtctcggtccagatctaggttctgagttttgatcccgatgtgggtccgagtctgggttcgagtccaggttcgtatctggatccctatctaggtccgcgtctgggtcttggatcaggtcctaagtctaggtctgggtccgggtcttggtcccgttctgtgtatatgaccgtgcatgggccagagttccggtttcgatttgggtctagggctaggtccaagtttggttcaaggtctaggttttggtcctgatcacggtcctagtctt

SEQ ID NO: 31188 - DNA, 1846 bp, Cannabis sativa
  modified_base (526)..(528): a, c, t, g, unknown or other
ctcaatttttgtccctaatgattgttgatttaaaaagtatcaaaagggtccattatataaggtttaaaccttaatttttgccatttaaaataggcgggttgcgacactaccttgtagtgtcgcgatgcttgaagcttaatttttggcaacgagcttccttgtacgatgaatgacaatgttttagccataactctttcaatattactcgaaattgaataattcaagatgttttggaaagaaaaaagagagatctagaacctttattcataatattttttctcaaagtgaacgcatcatagtaaaaaaatttcttgaaggttcagacttgattttcgatcacaaacaaaacgtgttgagtatccaaaatttagaatttttcaccacttatatcctagaaactcaaattgcatgataatttgtcatattcatctcatttaatacacttcttctcattttcaattcacattatgaatttaaccatttaaacctgaaagaaatagcaaaacaagcgtaattctgcacaaannnaatataatcaattgaaacactcctctaaaatactttataaaatgcaactaaaataagcctatcaacaaacaatgcgagtgaggatgccatcagatatggaggatagcagccaagagtttaggagttgatcctgaacctcccaattagtgaatcttggattgatttggcgacaaacttcatattcctaagtgagaaatttgcacggaggttaaaaggaattagaggtaaaatcctaaaaatgatgacctctgattgtagagaggatctgaagacgccatagaaggaagttgttatcatcatgtttcataaaaactttttgagaaaatacaacatgagtgaatgttagagccgtcagagcagctatgaaagaagtcgaagaacaacaactaaaaaaatagagaaagcgattggagaagacaagaatggcaggagcaaaattgtttttattgctctgatatcatgttaaatattgaaacgagagaaagaagagattgaatgaagtgtattctcattactaaatttgtgagcttcaactctataaatacaagatgaaaataatgtaagttttgctaacctataactaaaacagtaagaattaacaaatgtacatagtctaattcctaactaactctaacaaacaaccaatctacttaatattatatttaacaatttttaaatatatattaggaaaattgtatggtacatcccttaaagggatgcaacaatacacccatatcgttttcggtatctaaaagaatattttagtcaatttttttatgattgtgtatgttgtagttatttaagacatcctgtaaaactttgataaatttagattaattcaacacaccaaaaatatagttcaaactgtcggttgcatgtgttaggcgtgaaaggtaaaatcatcaaatcgtaatcgaccatcaaaaaactaaaaattcagtgccatatcatcaccaaattcggtggtcgattttggttttctaaatcaaggcagtcgattttggttttacaatttagaaaatggttaaccgtaaccgaacatatgtactatataaatatacatcaagaatatttgtttagttcaatggtgggacacttcctttgtaattgtatgtaagagaacataagtttgaattccatatgctacaccttaatatattttaaaaatttacaacattaaaaatgttggtatttaagaatcaaactcaagactcaatacaatgtaaaagtaggggtgtacgtcagtcgatttatgctacatttgattcaacccaatgtaaagattgggttataaaaatctaagtgcaactcgcccaat

SEQ ID NO: 31189 - DNA, 2339 bp, Cannabis sativa
atgagcgggaattgattggtcaggaattcttggattttttcaaagatgttttctctggatctaattatgaccggcaggtagattgtggtcatttattcaaggaaaagatttctcttgcgaaccaggtcgaggttgtcgggtgcccatctcgtgaagaaataagaaatactctgtttgccatgagtaatcataaagccccaggacctgatggaatgtccgttttattctttaaacactattgggagtcagttggagaggatttctgtgacgcagttgctgatttcttcgtcaaaggaagaatgcataagggtgtgaattctactaatgtggtgctgataccaaaagtgcaaaactcgaagagaccaaaccagtttaggcccatttctctttgtaatgtgatgtacaaggtcatttctaaaatcattgcaatagaattaagcctatcctcccgtctcttatctgtcctactcaagccgcattcgttccaggaaggagtattcaagataataatgttttggtgcaagagatcatccactccttcaatcggaagcaaggaaaagaggggttctttccgatcaagatagaccttgtgaaagcctatgacaggctgagttggacttttatagagcatgttcttggttgtttcggattccctcaaaagttttgtagttgggtctctcagtgcatatccaccacctccctcaacatttgtctcaatggtggtccggtcggcaaaatcataccttcctgtggcattaggcaaggtgacccgttatccccctaccttttcatttgtgcagcggaagtgttttctagactcttggaagaggagattggaaagggtattattaaagggatacaactaagtagggggggactggtgctctcccatattttctttgctgatgacctcatcttggttggtcgggctaacataaatgaagctaaatctttttggaattgtcttgagaagttctgctcgtggtctggacagaaggttaataaacttaaaacatcaattttctttagcaaaaatacctcagcaggaatgaggagaggaattaaagaagctctgggtatagacactcctgagggagttattaagtatttggggttgcctctctttagatcaagacaaaaagatgctgactttaatttcattcttgaaaatctcagttctaaacttcagggtggaaggctaaaactttatcaaaagcgggtagggctaccctcatcaagtccgtggggctgtctttgcccgtctatgccatgcagactaccaaattttctaaccgccttgtgaataggattgatggtatgattcgtgacttctggtggggttttgagaaagggaaccatggtctttaccttaaagcatgggataagctttgccttcccaagtccatgggaggtctgggttttcggaaaacaaaggaaatgaaccttgcctttttggctaagtgggggtggaatttattgactgggagtcagtcgttatgtagtaagatcctggaggctaaataccttaagggaagggatttccttgagtgcaagtacaaagattctgattcctggttttggaagaatgtcataaaagccaatgcaatccttcgaaaaggggcttgcaagagggtagccgatggaagagacactagcatctggagggacccttggatccctcatttgaaaggtttcgtcccgaaaccaaacagaagtgtagtaacggacaacaactgtgtggcagatctcttgtctcctaggggtgggtgggatttgcataagttaaatagtcttttcgatcatgagactgtttctgctattctaaaagatggtcccccccatggtaatggaaaagatagttggatttggacgttggagagtaatgggcggttctcttgtaaatcggcttatctgtctcaggctttggagagagcacctcctagtaatgtcgccccagctctttggaacaaactttggaatagtaaaatagtggagcgacataaagtcctttggtggtgcatactctctcaagctctcccggttcgtgcagtgattaaaagaagagtgcagattgaggatactagctgtccgttatgtggtttgagtgaggaaactatggaacatctgtttatttcatgtgatgtagctatgcacctgtggcgttcatcaccatggggaatatttcctgtgtgtaattccggtattcgagtttgggattgggttaatttcatttggagtctcaataagaggggtatccgagttgaagatgtctttctttatgcttctattgttgtggacaatatatggagaatgtgtaatgaggtgatacacaataatgg

SEQ ID NO: 31190 - DNA, 5633 bp, Cannabis sativa
aagaatattttacaatgcgtgctgcagtattatggacgattaatgattttccagcatatggtactgtgtctgggtatagcactcaagggtataaggcttgtcctgtttgtgaggaagacacatcttcatttcgagtaagaggaaaaacatgtttcatgggtcatcgtcgatatttgagtctgaaccaccaatggcgcaatgataaagagtacgatggcacaattgaaagacgttcggctccaagaattttaacaggagatgaaatcttggacaaagtaaaaggtttatggaaatgtaggccagggaaaaatgataagatcattaaggaagataagcaacaaatgaaggatgcatcttatgaaaacaaaacaaactggaggcgaaaaagtattttgtgggagttagaatactggcctaagttaaaactaagacataatttggatgtgatgcatattgaaaaaaatatatgtgagagtgtggtcggtacaatatttagtatcgatgggaagtctaaggatactgaaaaggcaagacttgatttacaagacttaaatattcggaagcagctacacatgaaaaagaaagggaataaatggttgaaaccagtagcatgttatacactatcggcaaaggaacgacaagaattttgtacgttcataaaatctgtaaaatttcctgatggatatgcaggaaatatttctcgaaatgttaacatgaaagatggaaaattatttgggttgaaaagccatgattgtcatatcttactgcaaaggttgttacctattggtttaaggccatatttgaataaaaaggtgatggatgcaattgctgagttatcattgttctttagaaaactatgtgcgaggacattaaatgtgaaagacttagatgaattggaagagggcattgtacttaccttatgtaaattggaaagtatttttcctcctgctttctttgatgtgatgattcatcttgcggtgcatttgccattagaagctaagttgggaggtccagtacaaatgcgatggatgtattcaatcgaaaggtatcataaattgtattttagttaaatttgtattattcgataattgttgagtacaatattttaaaattatacattgaaaacataataaatttcagggaattaggtcatttaaagaaatatgtaaagaacaaagctcgacctgaaggttgtattgctcaaggatacattattaccgaggcattaaatttttgttccatgtatcttcgtggaatagagacacgatttaatcgccctgatcgtaattctgaaaaccttggcgtcagaaaagaatctaccttgtctatattcaacatgcctacaagaccatttggcaaacaatcatctttcacactaactcaagaggaacgaaaccaagttcaatggtacattttgaataattgtcctgagttagacacatacttaacgtaagttaatttgtttttccttcccaaatattataatatttatgttttagcataaaattaatatttcatagtacttgttatgaaaacagagaacatagattattcttacaatctcaaggattttccgacattgaccaagtacaaaaaaatgaattttcaagatggtttgaaaataaagtaagtataaaatataaattaaaatatcttataacataaatttgtgtttgcatcataaaatgacaatatgaaatttgaaatattcacagataaaaaaaatgaacgaaacaacttctggtcaagcagtagaagatttgtatgcaattgcagtgcaacctgatttgttggtttgttcatatgatggttgtatggttaatggagttcgatatcatacaaaaagtcgagatgaaaaacgtacaactcaaaatcatggtgttttggttgaagcagaatatgaaggaaaaatgtgtaatttttacggcgtcattgatgaaatttgggaagtacactacctctattggaatacagttgtattgttcaaatgttcttggtacaataccaatgggaataaaatgtatactgagtatcattttactagtataaacattagctcaaaatggtttgaagatgaaccatttgttcttgctaatcaagtatgttcagtcttttatttagatgatattaaaaaaaataaagattggaaagtagtgcagaaagtgaatcatcgccacatttgggatataccaccaaagccagatcatggtgaagatgatgatgaagatcccactatcatcggttctgaagcatatcaagaagaattttcgaataatattgatttaaattttgattcaacaataagtaatatcaatcttattcgggatgatatcgaagatatagaatgtgatgatggagtatttagtgatattccaataaatcacaatgatgatacagaagaagaaccgtaacttgatgattctgaagatataatattgagtgataaaactaattaagtataaagtgcgtcaattttttgtttttttaatttttcaatataaaaatttgttacatgcaatactaattaattttgtatttttcagctttacagtcatgtcaaataagaagtcacgtgatctaccattaagccgtacaaggtcatttggtccaaagaagacacataataatgattcaacatctacaaaatctccacctcctgtgccttgttctccaaatgaagattcaacaacaccatctgatgaatgaaaattcaagaattgttaggtacaaccgttcatacatgcatgacttaattaagataatatatacataaatatagttatatcacaaattatattgtaattatggacagaatcaaagaagaacacccgtggccctactcgtggggatggagttagacgttcatcaaaaaatgatacaagtaagaaaataatttcttataggaaaggtgaacttagagtgtatgggccaaatgcaactatatttggaaacactgttggtgtaaaagtacgtcatcatgctccacttcagtatagtggttgggccaaaattcctccagaagataagaaagcagtatatgctcgcatcatggtatacatatttatagtacaatttttatgtacataaagctataattttataattcatttaataattatcttttttttaggacatctttgacatagattttaaaaaagatccatacctcgaaactatttgcaatcactattgtcaagagagatataggggctaccgtaacaaatgccacagtaaatacaaatctcttatcgaggaaggtaaaaatccattagaaaatcgacctaaaaagttggtgctaacagacgaagactgggaatggatgtgtaaaaactgtttttctaatgaagaatggaaggtatcataatatttcttcaatttgtacacatttaatacttttaaattcttaatactgacatgaaatatgttatgtagaaaaagtcagctgcaggttctaaaaatagagcaaaagtttcttttatgcattctggtggaacaaaatcctttattcaatacttacatgaagaggtagtattttttttcgtataatagcattaaaatattattatattttaattttatttattatttaaatgtattacagaaatcaaaacaaagcataggtgatgaagtacaacaacaaactatgaagtgtggagagatcgaaatgtttcgaaaaactcattatacgattgagaatggatggatcaacgaaatagccaaggaaaaatatgtatgttaactttaaaagttagtaattttatttaatcgtttttgtaaaagtaataattcattattttattgttattgtagaatgaaatggttgagttgcgacgagataaacttattcaatttgaagatggcttgctactagtagttgatgaggctgctatatataggcaggtgttaggtgaaggaaaatacggttggttacgaggtttaggtcctacacctggaaaaaagatctcagtggaattatcatccaaacataaagagattgaagaagaacgtttggacaaattagagaaaatcattgaagatctaaggaaggaccaagataataatgttgcaagaatcgttcaagagaatatgaaaatattctatgaatcacaacaaggcagattattagaggaacgatcatcagagtcaccaatcagaattccatcaatggttttattagaacataaatttactctcacatatttttttttcatgtctttaaaataaattataacaattttttttttgattcaggataaacaaaatagttttttcacgcaactggagccaagtaaagaaaaagatcaaccctcatcttcacaaaaacccactaaatcgtcctcaaatttagaagaagtgcgagattctccaattaaatttgagattcctaaggacactccaaagggtgtaaaagctgcattactagctgttcgatttataaaagcttcacacactttttccatggtcatggacccagaaattttggataatgatgaatatttacatatttcacctattgatgtaattcatctaggcactatgaaacggattggagctgcttgcatagtattttacattaggtaaaaaatttatctttaaattacacttaatgcactaaataatattttttccttattaatctaattgtaatatttaggatcttacatgaaaagttggtgaaggcaaatcgagcacaatattttcgtttctttcatccaattttagctttggattcatgtcaagcacaaaatgcaatgacaatggcagatcgcatggaaggaacagaagcgggacaattttggttgctttctgttaatactgggtaagaattatttagttaactatttatgttatcaatatatttgacttacatataatatcttactttggtggtcaacagagaccattggatgctagcaattattgatgtattgcgtgaaacatgttattggcttgactcaattggattacccccgcctaataaaattaaatctctaatggcaatgtaagttaaataattatggttagtaatttttattttttaaattattttaatatttcttttgtttattaggacttttgattactacaatgcttccagtaataggcagccaaaaaagtctggcattacatggaaatctataaaagtaagttgtaaaataaaattacattaatataacaatatagtaattattctataaattttaaaatatttatgtgtttttatttcataaatatgtgcagtgtcctcaacaaatatcggattttgagtgtggatattatgtaatgagatacatgcgtgaattttgcatgaattctagacctatcaattggctaaccactcaagtaagttatatatatatatatttggggtatatacactatgataaaatatttttctattttattataaatactactatatgaactaatacttaccttactcattgcagtggaatgggaaaaaaacttatacaaaacaagaaattgatgaaattcgtttggaatgggctgaccaatttttagaagaaattacagaagatggagtgctttaattgagtgatcacaataaaagaaacattgttattgtgttatgcaaacctttcagtttattaatttgttttaaggtagtaagt

SEQ ID NO: 31191 - DNA, 3111 bp, Cannabis sativa
aaacactgcgtttcaatgttgccgggtacaaaacatgcaaaaatatgaaattccatacacgacgtagatcatgcattctgagttcaaataaatctccttaaactaataattcataactaatatgtaagtttcataattaaatcctatttatctgctaatttccaaattaaagttaagcggtctttacagtttagcttctagccacttagtgaaatagtcaactatgactacagcatatttctcattttcctttaggaagttgtctgatcaagtctatctcccatatagtaaaaggccaaggagattgcatttgtgtgagcttgtttggtggagctcttgggatcttcgtgaatctttggcacttgtcacatttttttacatagttgattgaatcctcaatcaaggtagtccaaaagtacccttgtctaagtatctttttggataggctttgccccctagtgtgatttccacagacaccttcatgcacttcaattaatagcagttccgctgcttctttagtgacacatctcagaagtggcattgagaagccacgtatgtacataacctcgcgctgaatgacgtatcaggtagctttcctcgtgatttttcttatttgtttcctatcctctaggaggactcctatttgaatgtatgtttctattggtgtcattcatgtagcactatcatcctgaatgtctatttcttctgaaatattaatgcttgggtctttcaagaactaaatgggcaccgaatttgtcttgtatatcaaggtgttgctagctagtttggcaagtgtgttggttgttgcattttcttctctaaggacatgtcaaattgtgtactccttgagttaacttaaaatgtcttgaatcttgctcaagtaggccatcatctttctcctcaagtagtgtactcacccaggacatgtttgaagaccaactcagagtcactatatatgtccaggtaatctgcccgaacttcatgtgcaagctttatttcgacaattagagcttcatacttagccttattattaaaggctttgaaaccaaacttgattgttgctcctaggtgtagtgagggaaatgcctgcactagacaggtgatccgtttattgcctcttcttttcctcttacttttctcctgaatctcgagaaattttaggagatatgattgtgcatttagcaataatgttagcgagagcttggccttttattgccactctttgctggtaaatgagttcatattggccaagttctattcctcacttgagtaactagccagatgcttcaggtttcaaatgtacttgtcgcaagggttggtcggtgtacactcttattggatgagcttggaagtaaggtcttagctttctcgaagctaggagcaagttgaatgttagttcttcaatgagtgggtatcgacttttaacttcaataagtctcttattgacataatatactcggtgctgaaagccattttcttctctaatgaaagtttatagaaaactctttgacttcctggtatatgcctaaattcttcattttctagaggcttttacaggataggaggttgagccaattgtttctttagctcttggaaggtagcttcacactcctctattcattcaagtttttttatttcctctaagtattataaagaaagggacacacttgttcgtggactttgacacaaatcttcttagagccgctatgcgaccagttaacctttgcacttttttatctttgtgggcgacttcatgtccaaaacgtcttggatcttctctgggatttcttttattccccaaacattcactatgaagccaaggaacttgcttaagcctactctaaaagaacacttaagggggttgagtttcatgttgtactctcataggatcttgaagcattcattcagatcctctaagtgccccatcctttttggacttgtcaagcatgtcgtccacataaacttccatgttctgagcgattaggtctttgaaaattttgtttataagcctttgatatgtttgtcaagaagtttgtatgttcttggtcgatgcattttgatttgattttaacctgaataggcatctatgaagctgaggatctcatgaccagctttaacatctactagttggtcgatcctcgacattgggaaatattcttttggacaagccttattcaagtcagtaaaatctatgcgcactcaccacttgttgttttgtttgggcaccaagacaggcttggatacccatagcagatagaaagcttcaatgataaagtcattggcacacaaccttgtgactttatcttttagagcttctgcttgctctttatccaacaacctcattttctactacacatgtcaaatgtttggatctacattcacaacatgagaaattattaatgggtcgatccccaccatgtctttatgcgacaaggtgaagacatcaaggtttacccttacaaatttgatcagtatgaattttatttctggtgctaaacattttccaaccttcaatttccttgtaggaagggtgggatcgatttttacatcttctaagtctgcctcctcactttgggctaaactttacagcccttggccagacactcagttagagctcttggaaggcatcttttctttcttggtattggacagagcgatgttgaagcagtgtcaggcaaattgttgatttcccttaggcaccctaccccatgccttgttggtaagtttaggcataggtggtaaattgaagtcactgccttcaagtcctacaaggatggctggcctatcattgtattgaacgctgatgcgcatcgatcactatgaactgagccattagtgtccttttgtgggactttctccaactgtcaaaggtagtcgaatgtatcccaagggtgcaagaccatagccaaataacccttacatcagttgtgtacaaggtactagatatgttgattggagcaccatattttcataggttaagtatgtttgaagaggctccattttcaaccatgcacctgacaactgtcatgttccctatttgctctggtatgaccaaggggtcattatgagggcaccttacctgggtagcattgttgagttttatgccctaaa

SEQ ID NO: 31192 - DNA, 2321 bp, Cannabis sativa
ttgtgtgtaatataaatatataaatcttatatttggtattgtaaattttatatataaaattaattaaaataaaataaataattaagattgtaatagtaaaaaagaatgtaaatttcagtagtagactccttgaaaggtcattctagtaaaaagaaaattaatttttttttatgtattgtagctatttagaatgatttgtaaatttttttaaaaaattaaatagtgtacagttctaaaaattagatttaaacagttacataacacgcgtataaaaaaaataatcgtgtatgcgacaaaatatgtaaattttatttttggtattgtaaattattcaaattgttttaaaatttataagttttcctaaatgattaaattttgactaaaaagctattatgttaaaacattacttttaagagttttgtgtaaatttatcaaaaaagaaaactttttttggactatagaagaagaaaataatgtcgttttacattgtttgggacctaataatgatcaaaacgacatgatcattgtgtcgaatatgggatatgaataagaatgcataatatactattattttattttacgtatgtaaataaatattggaattttttttttatgttgagctgtttttatttttggtacgtgattttttttaatttacttgtgttatttttatttttttattattttgaaaaattataaataatattgtggtgaaaataaaattcaagaaattatttatatatgtatatatttattattattattattatttattatgtgaaactaattattttaaatttattttcgattcaataaattctatggtaacatattaaaaaataaacacttgttttctttattaaaaaaaaaaatctttgtttcttcctatgaaaaaaaaaacactcaaatatacttttttattaaatttaaaaacagtataagtatagtgacccaatctcttatatctttatgaatggaaaaaatcattaaaattgaaatgaagtaaaccttaattttttaggtgcacatgtagtgttcttttttctattttccaaattacaaaaatacccttctcattcttactcttcctcatgactcaactcaatagtcatagtcatcatagtagtatattattagtgttattaataataaaaaaaatgtgttaattaataataataataataataatgaatagatggggcgtgttatgtgtgttttggtggttgggttgagtaatattttatctattattaatattaatagtaataataataataatcaaactatatattttctaaattcatatatactaaagtaaatatattgtatttaattactaaaaaattataatatttggtcttagactctagtggactttgaacaatggaaaataactcccatctttgtggaacattttacttgctcattattttataatattttacttttcattttctttgttataaattataaaacaatttcacctaaataattattgaatatttttctgaaaattttattattggaatctttgcttgattaataaggttgaataattctcacacctcaagttgaccaaccacaaccccaattaattcttatttctatttttttccatctatatattatttcaattattcacaacatatttccatttctttcaatatataatatgttatataataataataattattattattattatataaaagaaaatcttattattataaatttcttatagtgaaatgagtctaattggaattatttttagaccattgcaatacaggtgttttttaaccataaatgttattatcttcacttttttagtaaattaataattttggtaagtaagattcattagcacctgattctttaaaatatatctctttataaatttatttcaaaggaaaaaagcaattaatgtttggatatttttttttgggttcatttttacaatttggtagaaatggatttttttttttttttttgtgtaaactaagaaataaaataaatttgtgaaattaattagaatgaagttaattttgtcatggataatactttcatttcatccaaatccaaatgattttttttgtagtttggattacttttttcattttaaaaaaaaaatgatttttcataaatccccaaaaaaaaattacaattttttcttttttacggaatattattatttattttactaaaatatacaacattatattttgacggttctaaaaagagttatttgcacattatttttatgttgtagtaacataaaaacaacgttattttcctctaaaagaacaacataccataaaaat

SEQ ID NO: 31193 - DNA, 1995 bp, Cannabis sativa
  modified_base (26)..(33): a, c, t, g, unknown or other
actttatatgtgtttattttataatnnnnnnnnaagttcatatttaggttgttaataaacatacttgtgagtaaatctaagatcatggtaaaataatttccaacgcacgagtactcgcattttgtattttgaaaaatttcactttgctttctttatgttttgaacagtatatatcccttcagggatacctatttatctgtttgctttccgcggtactcgcatattttacagaattaattttaatttgtgttttcaattacaggttggtgtaataactaaaaaatgctaagacttgtaaaaaaaattgaaatgtcgagaaactaataacttttattatagcaaaaactaaatagtacaaagtagatctatggtaggctctacccctatacttagaacatttatacagataaattgactaagtatatttacagtgcgagtactattgataataatacttgagacttttgccatttcaagcacttcgaatcgcagtatcgagttctgcaagccgataggtcgcgtggccaattttttcagcgataaggtatggtccttcccaattatcaccaaaaactccatgcactgggtgttttgtgttcagcatgactttttgcagaaccaaatcccctactcgtagagttcgctctcttaccttcgaattgaaatagcgagcaatttgtcgctgataggccgaatttttcagatgagcctggttgtgctttacctctaaaagatcaagttgaagtagttgattttctatattttcactaaggttaaacacatctctttgcagggaccctaccccaacctcgactggtaccatggcttcacacatataggagagcgagaagggggtttcaccagtcgtggatcggggagttgtattatacgaccataaaacttgtgtaagttcttctcgccatacacctttacgttcttcgagcttacccttgatggtatgcttgattatcttatttactgcctctatttgattggttctctgcgggtaagcaactgcggaaaatgcttttttaatacccaactcatcgcacagctggcgcatctccttacagtcgaactgtattccgttatctgagattaacttgtaaggtatgctgaatctatagatgatggaattgtatacaaactctcgcaatttaacagccgtaatagtcgcaagggcttttgcttcggcccacttggtgaaataatcgattgggactatgttgtattttactcctcctttcccttttggtaattctccaattaggtctatgccctagaccgtaaaaggccaatgacttgttatggaatttaactgacttggtggttggttgacatacgtggctatccgttgatatttgttgcatttctttgcaaagtttgaggcgtctattcgcaatgtcggccaatagtacccttgtcgcattagttttaaagcaagggaatttccccctatctggttaccgtagcttgggtggtagtggtataatcgaggacccttggatccaagttttgtttttcttcatacgctatctcctcgatctgaatactgcttatcgaggaagtggtgcttctaacgtgtatatcatgttgactgatttcttctctgcgattttaatgctacattgtaacattctcacgagtccgacttgactcctcgcacagatcctactctagtaggagtagggaacttcatggtaagatggtagattgatgtcacattcttcatttcttttaggataggacggccaatcactgcattatatgatgagtactggtcgataacggcaaagtcagacatcaacttgaccacgacaggtgcagttcctaaagtgactgggagttttatctttccctttaaagtaatgatatcctcgataaaactgtagatacttaaaaccactggtcgcagatccttctcctgtagtcccatctgcttaaaagcttgaaagttaaggagattcacaaaactcccgttgtccactaatatgt

SEQ ID NO: 31194 - DNA, 2508 bp, Cannabis sativa
tacatgtcgtgacaatcttcagaatacaacctagcaactctgaaaccgaattgtaacaccccactagtttaggcgtgtgatcgtaattttgtattaattgtgcaatccattgttaattaacagttttcttgaaaatcgtgattaattaaagctttacttaagtactctttaatttgaaagtaaatattaactgggatcccgtatttaaaatatttacaactgtgatacaaaatatacgttacaaaagttatcgtctagcgactatataaaatacagcctgctgtcccaaagatcgtacgctctaggtctaaccgctcccagcatgtacaattttcatccgctcgcactcattgttgttcacccttagctttgtccttacctacatatgcatacaatagctgtgagtcgacaaactcagtaagcaaagtataatcataacataaatatatataacccgaattacaattaggcacccttacaccttatcatacccttatcctcgtgtcccaggcggttaagtctagaacgttcgtacgactatactattaaccataatatgagcctatactcggtactctagtcgtaccaatatgataacgccaatcagtacttgagccaaatataaatttaccggtatccaacataactctacgtatattgatatcgctatttcaatgtaatctaacaggcattcataaacatgcacgaaaaaaatgtaatcatatatgcatatcattatactaatcttaccttgactctgaattcaggtgtgccgatcaacctgagtcaaattgatgctcgacaatttacaggctcctaactcacaatattcgtaaaactggtgagtgatatgctaaatgacttttcaaggacttaacattaaaactaaaaatttccctatcgatggataacatggaaataccctaaatatcttaaaacaggaaaatctagggtaccctaaactgccccaaccgttagacccattcccaaccagaaaactagttctgtagggtcagcttggggacgaatcggtagactggttctacaagaccatattgaaccgatcgaccagttcagtataggaacccccaaaaacttcctaaacacctcaaatcaatcccaaaatgtacaaaaacttcaagagtacctaaaaagtacagaataaacttaatccaagcaataaaaccaagcaatgcacgtagaaactaaaaataccatggtagagtgaagtttgagctcttatgctacaaaaatcacaaaagagaagaaggaaacttgtttaccttgaattgattcttatagatgctactaaaccagctagaacatcatgaaattgaacaatcaaaaccctagcttctactgggttcaagagaagtcgagagagagagagaggctaggagtgagaaggcttgattttgttgtttctaattttggataatagaaaataaacttaatgtttatcaacaaaatgccaaataaaatcatgttactaattcaaccctaatccactagtggacaaaacaaattaacatatggcaaaagaccatttttttcttgcttaatcaaaaagtaaccttaccacctaagggaatttcggtaaaatctaaaactccaaatattcttgacattgtcagtgtctatataagttgtctcgttatttctaaaatactaaaccataagaaaaagtgactctatctaccaaatatctcgttccactattaccggacataaaatacaaaaaatataaaattttatatataacataaataacacgcccagaattcaaatatatctccataaattcataaattataattaaaattctaattctaaattaaacactaattatttgctatttctcatactaaaattaagcggtcattacatcgcacattcaagatattaagaagcaagtacattttgtgagtttcccttcttctttaccactgaccaatctttactcatttctttgggctcatgagataatattctttaagttgaaataaaaattctgatggtgttgctttggagaatctagtaccgtaggaaccaatgggtgcatatataagaaaaaagtgtttgatcctgaaggggtgttgggatgggcctactttctttttgaattttttatatgaaaaacaaggtcgtgcctcgtgttggagcttttccagcttctccctctctcattccgattgtgtttcctttggttttgctggtcaactcttttttgaagttgaacgttgatgcatggctatggggtattaatcgtagactggggtacagggttcttatgcatgatcagttgggtaattaccttgcttctacgagtgttccaatgattgggtcccttttaccgtcagtggctgaggccatggtggctattctccatgagttgtttctttgttcaagccttggctttttgaatgtggaaatcaaattgagctgtcaacaagtcatctaatttctaaagaaaaaagagttatttatagttgaatttggttcgattct

SEQ ID NO: 31195 - DNA, 886 bp, Cannabis sativa
  modified_base (144)..(153): a, c, t, g, unknown or other
atgacaaaaatagttaatttttttgcatttttttcgtgttaaggtgtattttttttaattaagtagctaatttaagcgtaaaaattcaaatttctcttttattattcgccatcggatcgaaatctaatagtttaatatttttannnnnnnnnnttatagttaaatttatttagtacctatcaatgagtaatactctttaagaagtgttccatatatatatgtatatagttgcaatgatgttgcaaaaggtgtgcccaaatttgcacacaataaatgttcttattttgtttattttctttgtcaaaaagtattatttcatattaattgaaagttttttaaaccatttatttagtagttatttttgtgtataattttatgaaaatttaatgacatatattgatgttttagattttgtaccttctccattagagcacaatgttaaaaatcaacataaaatttacactatgcaatagtgattaattatttttaatttaaaaaaaatcaattttttttttttttgagtataaaaaaaaattcaatttttttgttaaaaagaaaagaatgatcaaattgattgaaaaagaacctttataattattttgaattaataagagaattcttataatattaaattattaatgccatagtactaaaatacatttataatatgttgttggctcttgagtgtcttcatgaggtattgattggtactatggcttctcaaatttattgtataatcaaatcaattgtattgattggtaggtactattacatacatttatagaaatgtatacaatttaaattgatcctttgttgtatgcaatttcccaagccatagtaccaatcaatacctcatgaagacactcacgagccaacaatagtggcc

SEQ ID NO: 31196 - DNA, 2105 bp, Cannabis sativa
  modified_base (773)..(774): a, c, t, g, unknown or other
ccagtctggctatctgggtgagcttgaatgttatgtccctgtctcaaaccaccgagcctcaaaccctaagaagaggatgtgtgcctggtcgggtgctcatacttaacaaggggcaatgctgcctttgcagtactttaggaatgtggcagattactttcgcctctgcccgacccagtttactccaaagggcattaagtatatgtctgcccttttcgtcctctaagccatccaaaagtggggtgtgccttctctgcatgaggtcagttggttttttgacctgaagtctacccccaagtaaggcaggttgggatacttctgcttctcccaaccagacttcaagtggttgattagcaccacggacaaggttgtgagcaatattgggaattttgttgacgagtaatacatggtggagggaatgggcaccacttatcctcggtttcagcagatccctatatattgatgtccacccctcacgcttgctcttagggacagagctcaaaggattattcagctatcggatgacgctcggaatatcaccttgttgacttcagaggccaactttgtggagtacggactttatccaatagattttgcacctggtcggtgaaggagaagaagaggaagttcagggctggccaggctaagggagctgagcaagagaaggagctgattcaactgaaacgtgaggctaaattgaagggaggtgcgggagccaaccagtatgctcatgagcattctgagcaggagaaggagctcattcaacttaagcgtgnngctaagttgaagggaggagctgggaccgaacaacatgctcaagaatattccgagcacgaggatgaggctgaagaaaagcaggaaagatcgctcaagagaaagaagaacaacatgctcaagaatattatctatacatctattttttatatatataaaaaaatctaaaccattaaccacatataacactttcaaatatctattattatatattttttattttaataatcacaacaactttaatctaaatatacaatatactaatatttaatcatcataacattcctaaacttaaatgcataataatctccctctctccagccgctctcttcatttcctatcgcttcatctctattctctctacttattaaaaataccatacaatacatatcgcatctaatattttattatttttttactattattattattgatttcaattaatgactttataagagaaaaatttacctataaaaaatgagtagctaactcaatatttaatttattttatgtacagggcaaacttaataggaagaatagtgataattacaagtgagaaacggtgataacatcgattttgaatacactaataactactacaagtgagatatggtgataacatctactttgaatatagtggcgactactacaaatgaaatacggtgatgacaatagtttttatatgatgaattttctatagatttatcaattgttttttagatctccaggattctttaattatctttgtttaatttattatagtgtttgaagatatctctttgttttctttttttttaaataaaaattgtataataattacccttattatgaaacgaaaaattacatcaaaaatttcaaaatttaaaatttgatatataattctaatataaaatatcaaattatatcaaacatctaatgtaaaattatatcaaattttaaattttaatatttttgatgtaatttttttaaatacattttggttttaatattggtaaaaaattatataaaaataataaattttgattcaatttttattattttgttatcattttataaaatatataatttgttttatatatatcatttaaaaaattttaaatatccgctgcgaagtacagcctatttacttttataaaacaaatattcaaataataatatgaatttagttaccaaaataaaaaaaaaaaacaaaaccttaaataaaactaacactatctaattatttattctacctaatttactaagggaaatttcactatttgcccttaataatatacctcatatcaaaatttatacctttccttaatttgtacaaatttagtccattaattaca

SEQ ID NO: 31197 - DNA, 1417 bp, Cannabis sativa
aaaaaaatagtatatggagtaattctccttataaaaaaggggagctaaagagtgaaaatactgacctagttcaaactagacatttagagacggttttttggtaaaaaaacgtaggtattgaaactaactataccctttacagtgggttctgggttagaaaattttcagtaatatttacataccttatgccgtcagttattaggaaataaccgatgatataaatgcacacctttattgacacgtgtgcacctatgtcatgggttatttcctaataaccgatgccatagggtatataaatataaccctcatacttcatcttccccacttcctcttcttcttcaccacgataaccagccaccccataggagaagctaaaaaaaaacccacgaaaccctcgccaaccacttcctaaaactcccttatatctcaattttcaatacctaaatcatatacactaaaaaagttttacattaaaaaaaggtgatggtataactccagtgaccgatttgtgtatagaaaacgttgactcaacgtctattaatgtataaatataatttctattaattttagttatgtacattgctttatttttgtttttgtaaattttttaggatttttgtatttattaacattatgctgttgtgtgtgcatggtggtcgtatttttgtcgtaattggtcatcggattgtgcttataaggttaatatttattagcttgatccataatatatatgtatatattttgtgttttattagatatgtgtttatatatatgtattgtgtatatgtattgtgtaggttatttatgtaaattttgtaattgtattgtataaatgctaagtaatatatatatgtatatatatttattgggaatgagaatgagatatgagagatttaattagttaaataataatgtttttaaaattgtgttagtgtgagatataatatattatatatgtatgtatatatgtaattttttcaaaaacttagtaatatatataattttgtaattagtaatttgttatttttttaataacttgtaattaattaaataattaaaattctcattttgttgtatttcattatattgtaggttgtgagctaattttgaaggttcaaaataaattggtgttgatcggatttttgcctataggtatatacatttactaacattttgttattataattaattatcaatgcatatttagtggagtttgaatatcttaaatattcgttcatagtgaagtacgttctgtggtatactgtacagcggtcgaataggtgtaataatatgcatgttagctgagtttgaatatcttaaatattcaaccatattgaggtaggttatgcgaatacatgtactgcggtcggatggatagataaattttgtatggataatgttattttatttgttttgt

SEQ ID NO: 31198 - DNA, 1813 bp, Cannabis sativa
  modified_base (1432)..(1433): a, c, t, g, unknown or other
taaagtctaatcctggtaaaatattaccaacaggtgtcccacaccagtagagattgagtatctttactcagttaaggtcaatctatcaaggaagaacgccgcagggggctttttctatcttggtactcattctagcgagcctaaaattattgtagacttgccaaataaagtatcctttaagaacaacttcttctggacatctggtctttcccccatcggcacaaccacgttttgcaaactttgtaagtgattgttctcttctttctcatttacatcaatctttgtttttcaagtttatgaccaatgttttgtttttttttttttgacactcttgacgaggcgtactcctactcctgagatggttagtaggcacatgcgcctgttaactcttcccaacagtcttcggtcatgcgattccatttgagcaaggccaacttgcaatcggcgggccttcttgctgataaggaatatacttatgattacaagattccaattattcttcttggtagcagattactgtttttcctgaggacaaggcttgggatcgcttggctcaagcaaaataccttcgaaacactgccacttgggaatcagcattcccggaggtaatcaatatggttggtctcctactgtacttagggctaaacataatacatttgttaccttcctagactcccgccttaatttttatatttggaattcccttctcgtggaacgtattgctcataagtttgacagctggtatcctagattccacgtccaggttaactgtcacgagtcatattatggtatagccgagcaatacggtactatggaagatagggaaggtcacattgatgcaagctgggatttagaaccgattgagccttttgatatattcaagattacaggctgtagggattttagtggatattatggtccctatactccttcatctagtgatagctcgccttctactgaccttggtaaatcccttaggtggaaaattatattcctccctttttcttcagccttttaataattgaaacgccctgtcttgttttccagacatgggttatgaagatatcatggaccggaaggggaagaaaaggacaaccaaccttggagtccctacaactgccaaagtggttcctcctaagaggcaaaggaaaaccactgctcataagaagaaatcactggccgagcccatcgatctcaaggtttctgacaacgagatccaagaacaagttccccctctagtcgtttttgacaccaatgctccccgtcctgaggtaacccccgctactgcttcttcgaacaaagccattgagaccttgtcggccgcaacaggagaggctgggtctgtattttctcaagcatatggagttgcctgttggcgcaaacttcaaactcttcttccccctaattgggattttctcaatcttaggagtcnnaaagagatgctttcaaggagcttggactataactttttgtacctctttgttattataattgtattattctttttatacctctttcatattaattagtttgcaattctttaggcttctttttcttctttttcttccaatagactactctctgagcggctcgaatacttggagggcaaggtccacaaattactatcccagtgcaaggttttgagtaagcattaggacgacgcccaacaggacaatacccaccttaagcaagaagtcaagaaagcaaaggaggaagccgagaaggtaaaagaggaagccgagaaggcaaaagaggaagccaataaggcaaaagaggaggccgagaaaagcgtcaaagcctaagctgatgagtt

SEQ ID NO: 31199 - DNA, 2539 bp, Cannabis sativa
  modified_base (441)..(457): a, c, t, g, unknown or other
  modified_base (529)..(531): a, c, t, g, unknown or other
  modified_base (1539)..(1539): a, c, t, g, unknown or other
cacatctatgtacttatagatggtataaattccatatctatgattagcgctcccactcaattacactatcacgttcccaagatgtatgtatttagccgtacgagctttaaggaacatatcttagaacgtaaataatgcaattgagatcaaacctaaccatctcaggattaagatctatagacctaagatcaactcgtgatattgaattagaaatatataacggtaattttatgatatcttatccaagttcaatatcagtccagtccgatatactccatacattcaatactgacatactttaccaatgctccagaaaagacataacacttatccaaggtgtaagtataccttatcgtgattatcatgaaagtctaaatgaagcgtattgataaatcacgggacttaagcttttgaacatataataatgattatattccactnnnnnnnnnnnnnnnnnatcatgaataaatatatgttctggatttcatagaatttatacattaaacatataatcattaaataaatcatnnnaaccatgcaacataaaataatttttgatcttttattaatattattaatctgattataatgaaataggttttatttagggcacaaaacataacaaactcccacttgcactaacataaaactaaagtgcattttaaataatttcaacaccttgatatccatatcaaatgtagtatgtagtattatctttgcaatatgatctgacagattacattcaatacaacctttcctccaccattacatatccttagtcataaaatcctagatattgtgaaatttctctctatatgtctactcctcctgggatactggattctttactatttggcaactacatctgtgttattcaggaagtaacactagtagataattcattattggtacaataataaaaattgtatagaactttccataggctaaataagtatccttcctacaaccttaacattcaatctccctggtacagttagagactagattgggttttacacttctccaaaaatcactgctccaccccagagtaatcaccatcgcataagtagactttctagcaatgatgtaagtctagaaagttgatttggtgtagtctatgagtattaaaataccacccttatcgactaacatatagttcctcttttgatcttaagactcatttgtttatcttccaatgttcctttctttgattaaactaatacctactcataactcccactcaacagtaggtgtctggtctaatacataccaaagcatacatgagacatctcactgttgatccttatgaattcttttcatgacttttatcttttctggaatagttgaaacttttccttagataaataaagctctaagtctaggacttcctatagagttagccatttgaaataattgctccagcatcttactaaagtaagttgcttgcacttgagtaagtaaatttacaggataccacaactcataggtttagataatcttaaacctattatacaaggatcaggaagttttgttaagtcnattgaatagacttattttcaaaatatcctttcttgttcttgtaatagaaaacttttggttattccatacgaatggttttaaccattggtctcttggctttgcttcttagctccttattctgactatcctttacttgttcaaacttacaatggattttatcacaagtatctcccaaatcataacagggtgggctccttaaaatcttcccactaagacaaggtaccctgacttttggtctaggaacaataatggtattgtcctcatcagttgtatcaagacaagagaggtagtgggaccatcttatatagaataagatgatagaaaattttgaaatatctcctctactttgctattttattctcaaatttagtcatattctcagaaaagtagtatttgttgaaacaagcactttcttatcttaatgaccacaggatggtccacccctaatcactttagagtagctatcaaacatgtaaacctaagttaaaagttctagcttttcttatgttcatgatcaggacatgcatgaatctagtaatggtgtatactaagtatacgaccatttcatcattctgaagttttcctatcactagtgtatatccttagaaggactttggaaactgctagtaagtaatcacagaccttttactttcatcaatatgcaatataaatttctagggaggtaagtttgaatacaaattcaaagttcaacttaatgttctttgaactgcataactaaatatgtctccacctctatcagtttttaagatctttaaccacttaccttaatatttttcaacattgctagaaattgatgaaatttctcaaacatttcaaatttctttacataaggtaaaatctagagtgattttcttaagaatttaacaataactcatatccaccccagaatgtacatcgatatgtttgaatatagatgatcttactttcaagtggatataagcatatgtttctcttttacaaagaatgatcttgtcaaaac

SEQ ID NO: 31200 - DNA, 2882 bp, Cannabis sativa
taaaataatttccaacagacacctggtgctgggcctagtgcctaggttgacattttgtcaacttgggctgtttccaatcatgttttcaaaaaagtgttccaggaatttttttcttcatcaaaaataacaaaaaatacaagtaaaataggggagaaaataagaattctaggggcatgaaagctgagccaatcgcccaagctgacttggtgctgggccaagtgcccaagttgacaatcaacctggtgcactcaaatgcaaattattctctaataattctttatggcatggtaaaaaatggggtaggagacctcatcctcgatttcaagaactttggaagtgtcaaaacggcccaaaagctccagaaagagcacctagagcccaagttgacaagtgacctagtgtgctaggttttgcttatctgattctgatattatcttgagcattcatctagttttttatagtaactgagagctattaagtcgtacaagctaaatttacaacttcatattttcacttttttggcaaagcgacttactcgtaaattggggtagtttcggaggtctcccaattctgtgaaacaacatcatctccgagaactggtgaaaggcttcaccagaatacaaaaactagctagtgatatcaaaatattgcttaggcatcaaaaaatacatccccaacatgttttcctactcatctagcgtccaagttgaagtcatatgtcaacctgggctttatggtcccagaacaaccttcagtaaaatggtcataattcactcaatattgatctaattgatgctatttaatttgcattttgaagctatttcaatgctccatcaagtcatgtatcacactccaataacaattctgaagttataaactccaaattttgtcctcaagagagttacgaatttaagctacaacttcccgaagtgggactcgcggacgcgactcaagtttcaaaaattggcgacagatctctagagtcaatatcatcgttagatcatcatcaatggtgaaaaatagactaaatgtatttttttttatatatttttagaatattttattattattttaataggaccgcattctctactttcactggcactttatgtccctggcagtggtcgtctatgttgacgaggtatgaaatgcacggacaaatgtaactttttcgagtaagaaaacttttactagtgtagttagtcaccattaatagtttgccaacacaattagttgacctttgccgagcaaatttgtgctagcaaaccattttgttttagtgaggtatattgttagggttgtatgtgaaacttaacaaattttttatgttgtcagattgtgctaatgttgtttcggttatatctaattctctattgattattgtggggacctagaaggaatcatttggagcataagaaatgtgatcaagacttctgtttttagttcttgtttcacttttaaagaagctatctgtgtagtttatagtttggctaaattcactcttgataatgtagttagtgtcttttggaatagagaacttttctcttttccttgggttgcccttttaattgttttctctagctattagtttttagaaaaagaaaagatggcgcacattaaaatataaattaattaatttatcctaagtaaacataaatataaggtaataatgtatatagtactttgaagttaaagatatatgcaaatagaaatttaaaggtaatctcatgaatattgtatgttgagggtacgacaaatgaaacctaatctaaagtttaagtattcatttataatatatggtatacttttatgcaattaaatatgtcttttatttaatatataaatatttatgtttttggacggaagtgttaaaacaaaatataaatgttattcactaatctttaaggaaagtgtcattagtttattagtgacaagacaagcaagttccaacaggagtcacctgaaagacgccagcttcgatgatctaattaataattgtagttataaataaattaggcactgtgattgtgagtcaccacactatcatcaacttgtttattatttttgtcttttcaaacaaatttcagattaaattaaactgtatataaagaagagaatccaaccatcttatcacgtgactaccacgagccaatgttatttgtttttgtctatgtaattaatgtattcagtgaaatatacaataatactcgagtattgggtccataccttgtagatgagaaacaaagagttgaagatacgaattaagaatattgtaaagttattcctctattatgtttgctatgaaatgtagaaggagatgtaaaaattatatgaaatgtagaaggagatgtaaaaattaagggcctgttttcatattaatatttgtcttttctgtgtaatgacacttataatttattttgtatattttttttggaaatgtatatttaaactatgctacaatatttaatacacatcataacacataacatatcaaagattagttggtacacccacattagttttacctattttgatactattgaaagagaatatatataaaatacgatagaattaggatcatttgaatgatcctacacctccatttaaataaaatcacagtttactttgaaaaatactccacacttcttgttttgcttttattgaatgacctcatataaagataatttttacataacaatactcatctttataggccacatacacaactaaaagcaacaactaatcttcactaattcaactcttactcatttacttaataatactttgaataaaatgttggaacttattttaccatgatttagatttactaacatatatatattgattataaaactataatctaacaccctaaatgtaaattt

SEQ ID NO: 31201 - DNA, 1353 bp, Cannabis sativa
tcaccaggtcgtgtctaatttttacatttagacttgctagatatttctccttcttgctggagtctgtaggcacaatacttgaagctaacttggccaaagaatcaaattttgtcccgtattcagttactaacatacccttactctacaccaattcagtaaattctttctgcttagcactgcggactgccttgttataatacttggagttgaataaatctcgaaactcttcccaggttataatagtgacgtctcgggagagggacactaactcccaccacacgagcgcatcttcctagaactaaaaagtagcacaagtcacccgatcatttcaaacaacccccatgaaattaaaaattccttctatcactgtgagccactgctcaaccttcattacattcggacctcccaagaacactagaggtgcttgcttgcgaaacctctcttacaacggctccatacggttgccagcaacaggttgttttgctggcaccgcaggaactaaaacaggccgagcttgaggtggaggcactatagaaggaccctgctgccttagtctcaaaatttcttcatcttgttggcggatacgatcttgcatctctacgaatatttactcacgacctggaggagattgaggtgggttcacaggtcgaccattaccctgacctgaccgcctccagtcttgaccccattaccctgactcctcgtattttgttgggcatccatttaataggacttagcctacgaacccataagccaggcaggtgagatagcgatcacaaaaattaataccgctcttatggattttaaggcaatgcactaaaacaaataactataaactaatatgcttcctaacatgctttaataaacacatacaatactaaacaagtacaggcttattgaatcgtgagccgagcttttctctgatgatgattgtacatgtcttggcaatctttggtagacaaacttggcggctctgatgccgaaattgtaacgccctaatactaaggcacgctacagtgatttttttcaatcgaagtgctatctttgctaatcaaagtaattttcttgaaaattatgtcaaattaaaattttagaattaactatgaaacttaataaactttatatatatatatttatagaagtcgggatcgcgttgttaaacttttttcagaatattccaaaatacatttaatcaggtcgcacatcgactacaaaattgtgagaccaaacactcatgttcagccttcacctttcctttacatacacatgaaagtaccatctgtaagtcaacagactcagtaagaaaagtatataacaaatcatataatatcgacttgtatctaggcgcccata

SEQ ID NO: 31202 - DNA, 1754 bp, Cannabis sativa
ctagccaagcatatgaattgggtgtaagcctggtcggcctaagccaactccaatactcgagaatggtcggctagggtttggccagccagcccctatctctttagaatttttagcctccccaaggaagaccattcaaccgagtgcccatagcaatagatccatctgtgcaagcacaattggaccaactcagggacatgatctagggtatagcctgaagacttcaaaccttaaacttgattggtcgaggagatcaccattctcaacatatataaataccttacccttgccaaagttcaaaatgtcggcatggaagatgtatactgaacgagaggacccactgactcatattaaatacttcgagatgcagctcgaactccagaaggtcactggtgatgtgcgttgttgcatatttctagccacactatcaaagatagcccaacaatagtactttaaactcaccctgaggagattcaactctagggccgagttctcaagagaattctatacacaattctcatcctcaagacttgtatcatcatagctagaagaccttatcaaagtcaaacaatgacaaggggaacttctgaaggattatattcagagatttatggccaagactacccaagtgaaaggccttactaaagaaggtcgatatacgaccatacttgggggcatactcccgctaagcgacttctggaaagatatctagaggatatccaccaacaacatgaaggagttcctctttaaaatagacatatgtatcaaacttgaagaagtcatacaacaagcctaggtggggcatgtcaataacatacagtcatgaggcactcagtagcgtcatgacccaccaggcgcataggtagacaaccgcagctctgccaaaacttctagtggtaaaagcactagaaacaagcatggcaccaatagctctgggaggaaaatggcaaaaaggggaagttaaacacttctcccatgccacaaaagaacaaggaggagaagtacacttgcctcaccctcctaacagagaagcatgagaccaacttcatggccactcagggaatggtcccataccgaaagccttttcctatcagaagggagatgggcaagagggacatgttgaagctctgcagatatcacaatgacttcgggcacgacactaatgagtgtcaaaatgttaagagggagattgagtacctgataaggcattacaatccccacctgtgtcgttatgtgtaagatagccaaccccaagtgcacggaagccaaaatggagattcgatgccaccacacgtagctggacatctaggggtcataataggcgaaccccacattgctagcaaaattagcaaagttagggagtgctatgctcagacactgcgtcatgaacccaaaggcaaagtcttagctatcaaagaccggagctctaagcaagagaagcctatagatcccatgatctcctttatcgaggaaggtttagcactagtcagtttctcgcataatgatcccctagttattactataaaaatcaggaatatgaccgtggcaagatgtatggtggacaatggagcctcctctaatattctcttcaaatcaaaatttgaaaagatagagctctaactcaccgacctggcaccttgcaaccaagtgatgtatggattttttggcaaaggcatcgcacctgttgggtatattagataacccctcatagatggagaaagtctaacaacatgaacattggtggtgcagttcttcgt

SEQ ID NO: 31203 - DNA, 1605 bp, Cannabis sativa
  modified_base (591)..(592): a, c, t, g, unknown or other
gaggatgaaaggtcgtgctaaactctaagttagttcccatggccttctacaaactcacccagaattttgaagtaaatttagggtctctatctgaaacaatagactttggtaccccatgaaggcgaacaatttctttcacatacaagtcagcatactaatctactgtataggttaccttaacaggcaagaaatgtgctgactttataaagcgatccaccacgacccaaactgagtcgtgcattcctgtggttctgggcaaaccaaccacaaaatccattgcaatgtcttcccatttccattctacaagtgataatggttgaagtagtcctgcaggtcgctgatgttctgctttaatttgtcgacaggttaagcacttaatgacataatctaccacatccctcttcatcccataccaccagaaatatggcttcagatcttgatacattttggtggttcctagatgcaatgagtaaggggtaatatgagcttcatctaaaatttcttaagcttagacttatcagggacacatacacgtgctttaaaaagcaacattccactgtcaaagatcgaaaagtccttagctttgcctgnnaagacatcttctcgaatcttaaccagttcaggatcttctaattgagccgctttgattctttccaacaagtccgactgaagtgtcagattatataatttcccaatcacaaactcaatattttccttagacatattcgaggctaattgaggagaaatcatgactatattgaatatctgatgaggtccttttcggcttaaggcatctgccacaacatttgcctttccaggatgatacaggatttcacagtcatagtccttgactagctctaaccatctctgttgtctcatgttcaaatccttctgagtgaaaaagtacttgagacttttgtggtcagtataaatctcacaccttttaccatataagtagtgtcgccaaattttcacggcaaacaccactgctccaagttccaggtcgtgagttgggtaacgctgctcataatctttcaattgtcgtgaagcataagctatgactttatctgctttcattaatacatagcctaaaccctgtcttaatgcatcacaatacaccacaaatttctcttgttccgatggcaaagctaaaacaggagctgtaatgagtcgttgtttcaacacttggaaatttttctcacacttatctgaccatatgaaccgttggtttttcctagttaactcggataacggcattgcaatcttaaaaaaaccttccacgaaacgccgatagtaacccgctaaaccaagaaaacttcgaacttcagtgaccgtttttggtttaggccaattcttcactgcttcaaccttccctgggtctaccataatcccatcttttccaacaatatgccccagaaaagatacttgtgacagccaaaactcacactttttgaactttgcatagagtttatgatctctgagtcattgcagaaccatttgaagatgttgttcgtgttctgcttctgaccgagagtacacaagtatatcgtcgatatatacaattacaaaattatcgagaaaaatccttgaataccctattcatga

SEQ ID NO: 31204 - DNA, 1138 bp, Cannabis sativa
aaaaaaaaattgtttttgctatgttctatattctaaaattgaatcaataaaaaacaaaacaaaaaatgtgtatagaagtgttcaaataatcatatatgacattgacaattacttttcacaaataaaataaaaaataaaattttaactttcgaacaaataacaattaagaaaaattaatttagttgtaacaaattaattttaacttaaacaaatagaaatataagaatattgaatagtatagatataattcttaaaataaaattattttcataaacatttataaaaatttattataaaaataattattaataaaatacttattgggtaagacattagttaatcacccataaaatatgagaaaacactactacaaaaatagttttttctgacatttttaattagtcgtttaaagtattcctgttggtttctataactgtcgcctatatgaccatcgcaaaacgggcagagtaggtgacggttcaaaaccgtcgctaatgtggacttcccaacggttttacaccgtgccttataggctggttacgttttttaatttttttagtgacgaattttttcagtcgttacattagaaaaataggaaaaaaatagattttttgtaatttttttcctacattaattttaattttttttacaaatctgtatagtcacaataattaaaccaacgctattatcgtctaaatatatttaaaattatgtatagtcacaataattaaactaacgctaatatcatttaaatatatttaaaaatctataattaagttaacgctaattataataatttaaatatatttacaaatctatatagtaacgataaatcgagatatatacacactgattaacacgacaactattgttgctccgcttccgctttcacgtaatgaatccaccaatcacgcataatatttatctcatcattagtgtacggagtagagaacctatcttttcgggtcaacagttgtattggatcttctacggtcatgaaactttcaatgaatttcatgacgtagtatccacactgttggtcgtcgggttgttcaggacagataggagtcatccactggataggtcgatcaggtcatcctatcatttggttatatatggtgaacaatctacacaaaaa

SEQ ID NO: 31205 - DNA, 2780 bp, Cannabis sativa
  modified_base (806)..(821): a, c, t, g, unknown or other
  modified_base (1074)..(1082): a, c, t, g, unknown or other
  modified_base (1596)..(1603): a, c, t, g, unknown or other
  modified_base (1783)..(1793): a, c, t, g, unknown or other
tgataccaagttgtaacgctctaatctatagggacaccacgtgtatgattttataaactagtttaatactaatagattaattaattataaaaaaatgtgataatatataaaaacttgactaaaataaaacacaaaaaatggacattataacgacataaatgcgtgtttcgggaatccctgttataaaaagttttacaaaaaaaactatatacgacgatgcctcaaaaataataaactaaaatacacaatagatacagcccaaaacaactcttggcaacccagcacacaggccggcgaggtcaatatgtacattgttggagaagactatcacctcgtggttgatctagcttttctttgtctttacttgcaccacatagcacacgtgagtcacaaggattcagcaagaaatgtaataatattaatcatatagtttattatttgaatattgtcatttatacacaatcagaatcaaaccaccacgaattgttcataagataaaatctaaatcactactaacatctgccacgaataaacatcagtatacaaatatttgataatacaaaactattataccaataatagaattcatattcatttaatcatataaattatatatatgtgttacctcataaagtaaccatcttcattacatcacgtcgcgtaatcaagcaagtcgatactttaatcagataatcaagtattgcattgcctaatcaggcaaagcttgtgccatagcgtggcaccatatatggcataattgtatcacctaatcaggtgagctcatgccaaaaacctgcacccatatnnnnnnnnnnnnnnnnacctaatcaggtgagcccgtgcctcaatctggcaccaatatatcgcatcatctaatcagacgagcatgtacctatccctggtacttatcatatgtcactgacgcctgtacttatgcctagtatgtccctaggaaaattgcatcacctaatcaggtgagcccatacctacgctcagtactcatcatatatcactaacgcccgtacttacgcccaatacgttgccaagaaaatagcatcacctaatcaggtgagnnnnnnnnnacgctcggtactcatcatatatcactgatgcccgtacttacacccagtacgtcgtcagaaaatcacatcacctaatcaggtgagcccgtacctacgcttggtactcatcatatatcactgacgtctgtacttacgcccagtatgtcgccagaaaattgtatcacctaatcaggtgagcccatatatcacatgcataatatcatcacattatcgatactcaaccaatcaatcattcattatataaaaagattaactatatctcaatattaatcaattcataacaatactaattatattacatacaacgtactatgtagtacaatatacttttcttacctttaatctaggttcatacatgtcagcctatccaagtggagaactatccccgataatcttggccctatgtcacagcaacggtaaaccaataagtgtttatccccaaacactgctaaatattcacataaaacaatctagggttttctaccaaaccctgcggtataaatacactaaaatnnnnnnnntattttggctctaaaatatacaccatattatagagctcatcgcaagcttcgaaacggtatatagaacgtccaaaacggacacccgagtcaaaagttataaaaaatacaatttttgatctcctaggaatttctaaaaactatgaaacttgaaaatcccaaattttgcactcaccgaaacannnnnnnnnnntatccaaatcactccaaacttcaaaggacacatatataccataaatattaccatccttgcataacaaaaattaaaatcgagcccttaaatgaaaaatgacattaacgttcgaactaagctttaaaaagttcaaaacttgatttctaacttaaaatcacctataattcaacaagtaaacatcgatactagtcccataggtaccaaagaacaattctacgaagtcggaatctctataactattctaattcatgaaacccttatataaaactaattgtttttaaacttaaaacgaaattaaaccatagcttaagctttccctcttcaaggatttgctatcctgctactactggagcttagatcgctaagtttcgtgttgaaaatcaaagaaaatgaatagaaaggaagaaggttttgtcgaaagaaggagaacgagagttcgttcgttcgtacttttactgatatgtaaaacttacaatatatttatatataaaataaaacgaatgaaacttatcagtttcattttatatataataataataataataatataatataataataataataataaaaaatttaatattaatagttatttaattatttttgaaccactaaagaatttctatttttagggtatttagttaactttgagtaccctaaaatattctgctatttctaaaattaacttatcctaataatctcatcaatatttctaactaaaactattgtgaagtttttggccctccaatcgggtctccaaggtcgtcaaacctgaaatattattatttcacaaataactcatattttattcacgtatttcaaataaatctctgtaattaacaaattacactcatatatccacttatctagtcttaaatgtccccaaacctgaaaatattttattcaacatatagctcatattacattcacacatgctatataaatctccataattaacaaattacgcttatttactcacttatagca

SEQ ID NO: 31206 - DNA, 1349 bp, Cannabis sativa
tattttgggccaagcttcaaatagcaatacactaatatacatatgagcccatattgaggattttaatccaacatgaatactcccaaacatagctttgtaagttggcttgcaatccaaaaaaggctgaaatcaaaggataggctatttcgattcaatattgtagcagatatgcagtgtcttctatgtaacacaggtgctgaaacaagtgaccacctcttctttgattgcacctttgccgtgatctgcctacaacaaacaaaagtgtagctggggtggaaaaccacagcaacacggctggacagcctggtgagagttattgggcgaaggaagtgctctggcttccgaaagaaggttttggctgctgcaattgcagccttggtataccttatttggaaggctagaaataggaaatattggcatcaaagtgatgagaacccgaataccattgtacagcaactaaaaaatacttgtaaaagcagaatacatagtgtatggcctaataaagtatctttagaagattcagcttggtttaatacattgtaaatacatagagttatgctcaggcccgatttgggtgctgttagatttgtatctttcaaaaatttattggagtaatgaagaacacttgctgatttctcaaaaaaaaaaaattaataaattgtgttcatttatctacttataactaaattaagatttatgctaaaataaattaataggattacaatccaactcattacctgattaactcataatatatataaactctaattatttagcattaagtttagcatcgggatattataaataatgttattttaataaaaacagtaatttaacttcattgaagataaaattataatattaaaaaatattttgataaactagagtactctttttcttttttgaatacttgattcaagcaatttttgtatgaaccctaatttatgtgagaaatttggttaatgcatattttatcaaagattttgtttttattataggttcattaattaaaatgtaaggtgaaaagtacaagttagattacttaaattagaattaagatccagcgggtccaataaactatcattatatcactgtttaatcactgttttgcaccatcgcaatataataatgagtatagtactatctttttattttttttcagtatttttatatatttttatataaaaataatataagttgtaattatttaaaattaagatatatatattttaaaaaaaaataaatataatttattgtaaaaaaatatgaataccacgattatttattaaataattaagttaataaataatcaaatagtatataaacataattaatgtaaattataacta

SEQ ID NO: 31207 - DNA, 4106 bp, Cannabis sativa
aaacaatacaaagaaataagagttattaaatgagagctgacatgtaacaactgaggggttagcttctgcatcagcccgagtaagagcaaacacccttgttggagcgggctttgcttctatcttttgctcttatttcttaagttacgggcagtctcttttataaggtctaggcataccacactgaaaatatcctcgccctttacactcacctagatagtgcttcttacagttgggacactctaaataagtgtattaggtttcagaactaccctgttggttaccacaaccttggttccctcgaaacctcttcttctgacttgagccaccaggtgtagatggtgcctttcttttttgatcagaggtcgagtcactaccacccctaccataactagaggtaggaggagtagtggatccaccaacaacctgtatcccccgagactcttgaatgcacccaattgcaccctccgctcgcagtgattttcccaccatgttagcataggtggtactatcatctgttgtgatcagttggtcgtgtttgattttgggattcaacccatccagatacttttctttcttgctaaaatctgttggtacaattctcgaggtcgacctagccaacctataaatttgggttgcatactctgtaacagtcatattctctttctaagttagctgagtaaattcttttctctttgcactaaggactacctcattataatactttgcattaaacaactcctgaaaatcttcccaggtaataatagtgacatcctgagtaagggccaccatatcccaccagatcagggatcttcctagaattagaatgttgcacaagacaccctgtcattgccgataactcccataaaatttagattttatgtaataacagtcagccactgttcaactctcatcacatctggacctctcagaaagactcaacgtgcctgcttgcagaacctttcgtacagtggttccatctggttcacaacagcaaccaatcatgcctacacaataggggcaggagccacctgcaccacatgagcaggcattgcaggagcaccctactatctcagacctctgatctcttcatcttgttcatcaattctagcttgtatggctgcaaacctattctcccaatcctaggcagcctgcggtgagttaacatctcccaaccgcgtgacctacctcttgggtctctacctctgccacgaatatttaggggaaattgaactccctgaccaccactggatccgaccaaatttccctcgcttctcgtgttttgcctgacgtccattctaattgaacagcctgcgaaaccaagaactatcctagtcaaatcacgatcaagaataattttctaattaccgcttacttcaaaaattaaaatatgtgtctattcagatgtcaagctactaacatacttcctattaagcttttcttgtaacatactaataaaataaactacacaaataataaaggcttactgaattgtaagtcaagcttgtctctgatgatgattacatatgtcgtgacgatctttagatcacaacctagcggctctgataccaaattgtaacaccctactagtttaggcgtgttatcttgattttatattaattctgcaattcgttgctaatcaacgggtttgttgaaaatcgtgaataattaaaattttacttagttactcttaaaattgaaagtaaataacttttatacaatgggaacccgtatttaaaatatttacaactgtgatacaaaatattcgatacaaaatttgtcgcctaacgactatacaaaatacaacttactgtcccaaagatcgtacacttcaggtctaaccaccccaacctgtacagtcttcatcctctcgcactcactgctgttcagccttagctttgcccttacctacacatacaaacaatatttgtgagtcgacaaactcagcaagaaaagcataatcataacataaatataaaccagattacaattaggcacccatacacctaatcataacctatccccgcgtcctacgcgatactgagtctagaacgtttgtatgacaatactattgaccataatatcaacctatacttataatctagtcgtactaatgtgatagcatcaatcaatacttatgccaaatatacattcatcgatatccaatatacttttacgtatactgatactgttatttcaatataatctaataagcaatcataaacatgcatactaaacatgtaatcacatatgcatataattatactaatcttacatcgattccaaatttaggtgtgccagtcaacttgagtggaactgctgctcgacgatttacaggcccctaagtcacaacatttgtaaatctaatgagtgatactttaaatcactttttggggacttaaaataaaaactaaaagtttccctatcgatggataacataacaataccctaaatattgctaaaacatgaaaatctagtgtaccccaaactgcctcaacataaaacccagtttctaagtgtgttgtcaggggaaccggtcactgtgcaaaagtgaactgcttgaccaattcaatacgggaactaccaaaaaaaattcacacacaacacaattcaaccttaattagtaccaaacgttccagagtacctaaaaataccataataaacttatatcatgcaataaaaccaagcaatacactcagaaaacacaatctaccattaaagagcaaagtttgagttcttaagctcaaactttgatctaaaaccacacaagcatccaattaagtccaaactagctccaacaactttaatttaaccttagaaaatagaaaccaactcaatttaaacctatagtaacctaactccaagttatgtatgaaaatctaaactttaaaggtttaaatttataggaacaaggagggggaagctcaccttggattacaatcactaagatcttgataaaaccctactttaattgaaaagaaccagctgctaatctctgaaaccctagctgatttgaagcaagaagaaggagaagccaaaatccccaaatttctaatttttcttttctttgaaattatccactaataactaaggttatttttatttagttaattcattaaataaaacaatggccagctgcccaaaagagagggtgccacctagccaagccatctgaaaaagactaaaatacccccactaaggtatttaaatggcaaagtggcctaagggtaaaatagttcaaaattataaccctgtcaaacctcaaaattctaaatgtctatctaaaattccctgctatttcaataatactaaaccctaagaaaagtgactctattggtcaaatgtcgcattcctctgttaccggggataaaatataaaaaacaaattttacacattgcataattaacacacttagaatttaaatatattttcataattacgtaaatcataattaaaagtctaattctaaattaaactctaattatctgttaattctcatattaaaattaaacggtcattatataagccttatggataggtctatggccgcctagacacaagtcagtaatatattgtatgttatatacttttcttactaagtctgttgactcacatatattattttcgtgtataagtaaaagaaaggcaaaggttgaacatgagtgagttctgagctcgggggatgattgtacatgtcgagacagtgcgacctggaatgttcggtctcaggatgacttgggctgtattttgtagtcgatgtgcgacatgtctgtaaaagttattttgattatgattgtaaaagtttaaacatcccaatttatgtaaatatatatgtttataaagttaaatagtttaaatcaaaaatttatttttacacgatttttaaggaaaaaccctttgattagcaaatgtggcacaataattaaaaatcactgtagcgcgcctaagtatcagggcattacacaccgttatttattgtattatgattaacatgttgggcttttttcaattttaattaaaaaggtaacaatattacaaaaatacttctagctggccaaataaacaaatgtatagcccaaataaaaaaaaaattacacaaatacctctta

SEQ ID NO: 31208 - DNA, 1659 bp, Cannabis sativa
  modified_base (116)..(120): a, c, t, g, unknown or other
gtaattgtgggtcattgggtattaaagtgtcgtgggctaaatttgtagataccctaagtgatatttctaatatattgagggggctaaattagaaatatttaaaattaataacctannnnngaggttataaattggtagtggtccccaagaaacaagagccaatttttattctcatctttccccatcaagagagaaaattagaaaaccctaagtcttgttttcttagaagatcattatccaaaatcaccacaaagattatctctacaagatagattaagatcatcactctctatggattaaggtacgcttccgctatttggcttcttctctttgaatcaacaaaggtattctttagatctacggttgtatacttataattatatctaatatgtttatctataaaattgaatattgttattgcatattttatgattgataaaaaaactaaccaaaaaaaaaatataatagagcaataatttttagttttgtttggttaattagagaataacgtgtttatttttttgtaaataatatatgtatcatgtttattttttctgtcaaaatatcaaaaatatttcaagaagtcaatatatagtatccttataaaaattagtaaaattagatataaaaacattattacaaaaattgcgttgatttgttactatttattattgagcattgctatagggcaccaatagtacctagcactcctaaatatgtcgctttgcgattggctagcaatacttcttaaaatttattttattagattatatgggacccgatacttatttgttgtaccaatggcgatgttggcacataggagagtttcagacaccactggtgccttttagcatttctctttatgagcattgctattgggcaccagtggtgcctagcacccttagacatgtcgccttgcgattggctagcgatactccctaaaagtttttatattaaattatatgggacccgatacttatttggaccaataatgatattgacacataaaagtgtgccagacaccactaataccttttagcatttctctttattattatacacgtaaaattttaggttatgtagtgacatagagttcgacaaatgttttattgtggtttattattttgaaaagttctatgtgcactaaaaaaagtgaactaatgtacctcctatttattttgatatttaattagaagaattaaaacatcttgcaatattttgagaaattcaagaaagttaaatacatcaaaaataaaatttaaatagtatgttgtgcttgtgtctcatttactttgtacgagtgtgaaatagaattattttaaatttcttaaaatttacaaaatatcttaaataattatatcgtatacaaccatgaagaatatcatattagaaaattcttgtagatggtgaaataataataatgcattgttacactctttttcggagcaagtgaaataataagaatatcttttgtcattctattctagaaatctttcattaacttccctgcaagggtcagacaatcatgtttgaaatcatctcgcactataaacccgtctagttttagagaaaacaaacatgattagagttaacaaccatcgaacaggggtttatctgcatcattaagaaattcctcctgtgcttcattaagcaagtcca

SEQ ID NO: 31209 - DNA, 1746 bp, Cannabis sativa
  modified_base (1325)..(1325): a, c, t, g, unknown or other
  modified_base (1358)..(1361): a, c, t, g, unknown or other
attatatattaaagaaaatttaatttgtaattagtttctactttttctacaataaaataaatttgaaagttacttaaatgtattttaaataataaaatattatcatataatatgaaaataattaacttattattaagatgtatacaaataaattttagagaaaactaaaaatgtatctcaaattatatactgattagttaccattctgtaacttttatttagttaacaaatcaaatttatttttaaaattaaaaatgcttatataataataataaaaaagtatatgagtgactaaatgtatattacataattttatttgaatattattatgaagtatactaaataaaattgtttcatatatatacttacttgttatattatatgaaaactaattagtttctactataaacttaaaaggtaattaaaaatataattttcaaacaatttagcaatttatatatttaaatattttactattaagttatgtgagtttttttttctactttattgtgacttattaatttattaaatatacttgaaggtaatataaatattgttataaaagaaaaagtaatgtaaaagtatttaaacaacaaaataatataatataatctaaaaataaatacataagtttcaaagtaacaaaaatgtatataaagtaaatggtatataaaattgtagcttattatgacaactcattagtttcgaaaatgaattttaaggttacccaaatgtattttacataataagatatcataatacaacttaaaataaatatttgattatttagatgtttacaaataagttttagaagtaaccaaattgtatctcaaactatatgatataaaaatattttttttaatgtaaaagtaactaattagtttcttatcgatattataagtgaccaaaatgttacttttaaaaacgcaggaaaattaaaaataaaaaacagaatttgggattattttcgtttcaggcatattagtttagaattgaggtattttttgatgacatgtcaagatattattgtaattgagatttgttaaggatttttgtgaatagtttatattttaagtatattattgaaaaaatcctttttttttaacaataaacaaacttttattaaaaaaaatcgtcattaagtaccatcctaagtacatgcacatataatttatgagcagttttataggttgagagacgaacatgaacatgaattagagactgttaggaatattttagaaaatcttacattgattgcagctgaatataatgactctttctgctcagatctctaacccttgttcctttttgtcgcagagtattancaagatctgagtctggatctctttctctccttnnnnttggttaccactatcttacccactatcattgagtacttgacttgctatgtgtgggcatggcactctatgactataggccgactatgaagaacaatgaaggaggcttgaaaattgtataaaatgtgtcttctatcatctactagttgtgtaacggagaaaattaggtttgatttggttgaaggcaatagttcagttcagttggatgagatgagagcatcatgttcttttatagtgtttcaactagagcttatgtttgaattatatggattaaaaagaataaaatattaggtaaaattggccacataatggaccaatctctagttactttatttcagccacttatttatttatttatttttcaataatactatattttccaattcaa

SEQ ID NO: 31210 - DNA, 994 bp, Cannabis sativa
tcacggtggtcggtggtctgggtaggcggtgatttggtgctcggtggtggtgatttggtgagggtgagacggtgagagaaaaacgagagagatagaggaagagtgagagctgaggttttttgaaaaatgagaggggtattttcgggtttaatgtaaagtggtcatattttaaaaattttgaaatgcaaaagtttagggaattaatttcccccattagtatgcatatataatcaaatttcctattttcaattaccaagttaactctaaattaagcttaacaagtttacatgctttcagtttcaaacacagtaaatacataaacacataacacaattctaatatatcatgtttctactatgagatgcttgataatataactgtgtgggatttctatgtatgacatgttattcactaatgcatgagcatgttaataatcaattatcaacaaacatttatttaaaaagtaataaataaacaatgaagatgaccctggtaataattgggtaattctaattttataacctttgaaaattaaaaaaaataaattataaaactaatctccatcgctgcaaaggtatttttgtaattttgtagaatcgtcgtaagcctcaaaattaattaaaataattttaattaattattcttaaataaatcttttatttaagacatcttttaaacttttttaattaactaaaataattttaattaatttaatcttaaataaactctttatttaagacaattttattatcgtattaattttgttttaaaataataatatttattattttaatttgagttaagacaacttttgtcttaatatggttattgatttgtatttgaatttctaactaaaaattaattatatttatttaactcagaattgaattttaaaaaaattaatatcccacaaaattttattattttgtcttaattattaaaaaaaaatatatgttattatttaatattaaataattaagatagttatcaattt

SEQ ID NO: 31211 - DNA, 1919 bp, Cannabis sativa
  modified_base (1875)..(1883): a, c, t, g, unknown or other
atattttcaggtttggcgaccctgaagactcgataagtggatatataagtgtaatttgtcaattacggagatttatttgaaataagtgggtataatatgagttattggtgaaataaaaatatttttaggttcggcaaccctggagacccgattaggggtcaaaaatgtcacaacagttttagttagaaatattgatggaattattgggataagttgctttagaaataccaagatattttggggtactcggaattggccaaataccctaaaagtagaagtttcttaatgactaaaaaataataagataactattaataataaattttttattaatattgtattattattatattattattaatattatattattattatattactattaatatattagtataatattacttatatataagttaacgttaagttaatttatatattaagttatcaatgaaacagaaagaacgaacgaactaacgaaactcgttttatccctttgataaaacgttttcctcttatatctatttttttcgattttcaacccgaaacctagtgatttaagctcttgtagcagcaggatagcaaatctttgaaaagagaaagcttaaggtatggtttaattttgttttaagtttaaaaacaattagtttcatatagtggttttgtgaattagaatagttataaaagttctgagcttataggattattctcgggtagtcatgggactagttctgatgtttacttgttgagtttgaggtgattttgagttagaaatcgagttttgaacttttttttgggggaaattagccattcattgcacaaactacatttctatacaagctaagagcactacacccaataagggaggcctcagtgtgtatccatacaaatttacaaattattaaaccacattacatcttccttactaactttctttggccaaataagaaagagtctttgtttgacacttcttttaatctgaatcaccacctgatcaggattgggggttttattttgccatatcaattcattcctacttctcgaaatattgtaaactaggctggcaatggcagctgccatcactttccttttgaatctactcattcgcaccctcttactccacttagttatacttgctaagtcaagaaccaaattcctccattgcagccagtgtgccacacctgtaaaagactgtgatgtccagctacaattgaaaaataaatgctcatttgattcctcatgattgcagcatagaacacacccgacattatcaataatgcaaaatctatgcaatcgttcttttgttctcaattttccatgcatagcaatccagagtatgacactatgtttaggtagattaaatctaccccaaaccagttcactccacctcaatatctcctgaacaggacaaaataaagcataaccagttgctatgctataagtacttgcctcaaattggtgaatgtccactaagagctaagttgattcttcagtgccactaatttcctccagtaccagctcccatgtatgggaattgaatagcaccaccaattttttttctttgatatagactgtgtgcacccatttaacccataagctatcttcttttttagctacagcccaaatgtacttcaccattgcagccatgttccactctctcactcttttaaagccaatacctcgagctgtcttgctttggcacactctgtcccaagcaatggcaccatgcccttgaaacatgtgttgccctttccatagaaaagacttgtagatatattctatttccttgatcacttttttaggtagcagcatcacttgactccagtaagaatgaatagacattagaataagtttgtaacaccctaactaacnnnnnnnnnttacgtgatttttaaacgtactatgcagctcgttgc

SEQ ID NO: 31212 - DNA, 1766 bp, Cannabis sativa
tcctaccttgtttaggggtggacaagatccacataaattcaatctaattgaaacgaactaatccaatctaactacaaaaaattggatatccaattacaattcgattagattggatcaattattggatgtcaatctcaaaatttaattaaaaactgatctaatccaattacttttgatatgtattaaaaatgatttatatttatttatatataaaaaaaaaaataaatatatatattttaattatatttatgctagttgtttattttttgtgtgttaaagttgtaatacttggttattttgtatatttattttcgtgatattttattccattttaatacttggtagtgttgttttacttattgcaaatttttagttgggttaaatttataaggataatatctttatagagcattaaaccaaaataaatggtgatatttagtttatatatatatatattttatatttttaagttaatattaaaattatcaggcgtataattgaatatctaattgaaaaactaatccaatcaaattaataatcgaattggattagattagaatgaattttgaagtctaacttgattagattttgagatctaattagataagattagatgatgattttctaaattcaattactaattagattgaatccaatcaggagaaaaatattgaattgaatgtttgagtgatatatcatcatctaattaattattatgtgatttgtcaaataatagaaatttatttgtgccaatctttttttttaagaaaaaaaaagtaatttgttataatattttaaagggtatttgcatgttttagtaagactgcaatcaattttttcttgaagtaaaggagtcagtttttttcttacagtcctaccaaaatattacaatgcatagaatcagttttttaatgttatgttcataaatagattttacataatattaaaagacccatatatgttatgttatgtttataagtatatatgtattattggcagatttttgataaagagagttaaggagaaggagaagaactagttgtgtattagtgcaattaatatcaactcttttcagaaggctgaaattcgtggggagattggctttgacgtaaataacatgtatggttctttttagtgttttgcttgaattcttttagtttttagtggggagattggttccattatttaggccatttttggtttgttgatcttatggttaataatatgttattatgggtggtattgtgagtgtaatattttaatctacgagttttttttggttttggatgcagttgggcagacacctaattatgtttggcggagcataatttggggaaggtctcttttaattaaagggttgcgtaagcgagttagaacgggtgacacgattctagtttttaaagacccttggctgccgcggccagtcacttttaggccttactgttctaatcaagaaaatcctaatttgttggtacgtgatttgattgacgagtcaatgagtggttggaatatgcaaatgtaatgtggttgatcaacaaagtatttgttctttaccaattagtaaattttcgaaagcagattcttggatgtggcactatacagttgacgggaattattctgtgaaaagtggatattttgcggcatcgcagttggctcagtttgatccttccccttctaagagttggttgtcagtatggtggaaagagttttggaaaacttctttgcctgagaaagttttaatctttgcttggcgtgggtttcatgat

SEQ ID NO: 31213 - DNA, 2302 bp, Cannabis sativa
  modified_base (752)..(756): a, c, t, g, unknown or other
aatattagggtaataaccctaacttgcatactaagtaatcactcatataatacattactatatactcagataacatttactaagtgtgttaaccctaactcatgcttacattggattcataatattaccatatattaatgctttcctaccttcataatattctagggtaataaccctagatcgcattaaaattaaactcaaggtactagtttaccgagtctagcttaattatgccttagacgcattactctttattccaacatatttaacatggcataacattcaacatcttttaaccactagcgtaataaccctagaccaaataaccgctcattttagggtaataaccctaatcctagttcttaattgatcacaatcacaacatacaatatgagcgccactgcgcttaactctacgtgcatactactgtcttacttgatgtcccgcaaatatggagattccaaatccccgggtgctcctgaccaagtaccggtaatcctagtcacgaattccgggattcacacatatagggttaatccctaattccacatttacaaaatatatacttcaaattcaaaacacaaatattcacatagagctcgaaacaagattttcaacggtctatagaactcccaaaacggagtccggatcacaaagttatggttattcaaagtttgcaaaaggatttacccagaaagaaaagggcgggacgcgacatgcaaaagccatgccgcggcacctgggttccaaannnnnaaaaaccagtaaaaacttcgaatttcagcccctagatcacctccaaacaacctaaaacttaaccaaaacttccaaatcatcaaatagatttttaatcgtcatacagagagtttaaaacccaatttcaaacattaaaaaccaacaataaatctcatattttagattgcacaacaacacaaaatcatgctttaaattagtaagaactcaagaacttgagcttcaaaccattcaaccttatattttccagcagcaacactaccaataatctgaattcaagatatgagaaaaccctaaaattccatctagagctcaatcaaacaccacatcaaggattcaagcataaacatactcaaattaacaaaagaacaccatcatgcaacatatcatcatcatattcatgctttacaaccataaaattcagcaagagaaattcaataaaaactgtaattactacctcaaagcttagcaagaataacctccaaatccctaactccaagagttagctccaaattacaccaatttccaacaagattcaaagttgtaaaagaaaataggtttggaaaaagagggagagggggaggtcggctgaagcaagaacaaacaagaaaattccattttctttttcttcaaatattacttttatcaaataaagcttaatggtcaaaatgtccattttgcccttagggccacttaacaccatcttactcacacaagggtaatcaagtcatttcatacacatttaaatataaataaatttaaggttattcacacataaatataatggcaataattaatcctagaattgtatttcggccccgaacccaattcggcccgaaatacccagttgtgactataccgcgccaacctatcaaaacacacctgaaaaagacaacacaggcatactatataataatatagtcccataagcacggtaataaattaatttcattattttacccttctgggtcaaaattactaaaatgcccctagctccccaacagggtcttaacatatcataaaccatataaatttacatatattaaattataaattaatataattcctcaataattcttaattatctaattagggttttactaattcatttcttaatcctagggtattacaatgttggtcacacacatttatttttttattaaaagaaaaaaaaataaccttgataattttaccaacaaaaagtacagaatgtccgattgtttttatacctgatgaaaaaatcaaactcatatgaataatcaagaattattttatcaagctaatgaactagtagaatgaggtcataccagttacgcaggaaaaatgttaacttagtcatcaagaatataaaaagaaaatcaaacagtatgtagcagctttataagacaatttttgaatttatgaaaaatttaccacaaactgtgtcaagcataagtgtgtgaaagtgaagcaaggaacattgcccaatttgtcaaaaagactttttctgatagattgtaaccctaggagacgctttcacactatctcaatggtagtgtatcctctacat

SEQ ID NO: 31214 - DNA, 2597 bp, Cannabis sativa
tcaagagtgtttattgtgtaattgtttaattttacttgatcaccattattaagttacacactaatcttaattttgtaaaacgtagggctagttagtagaattacttgaatgatgcatgattatcatattggttaaatgtgatttgtaaataacataggaatatgttatttaccttatataacttagaggaattgtgcttaaattaagattcttaaaattaattgaacataggaatatgttaattaatttatagaaacacaacataaatactttggaaaaaagattatgacatgttaaattcttagttgacattgtcaatttacaataatacttatttgtaccattattaactttacaattttaggtcaatttaataattctaacttgtttcttctactaatttgtgtttaattgttaattaatttttacatattctcatcattttattttatttttgttgaaatcaatctctctgtgtaattagttttataaattaatttttaatttttgatccaagactactccatttatcacattatcaattgtttgacaattgtgtacacttacacatctaattttcacaacagtagctgtctccaaaaaataatagtcaattttattcccatctttaccatccctatcaagagagaaaattaaagaacactaaattttattttcttagaaaattattacttaaaattatcacaaagatcattacccaaaaatctattctacccataagatcatcattaaattaattatctctatcaaagaattaaggtacgtttcactattcatgttcttcccccttcttgaatcaagggcttttgatttattgttatacatttttaataatatgtaatatttttgtgtatagaatttaatcttgatattacatattttttatgagtgataaaaagaattttaacatataaaatgttttcaattgggtttcaacctacttagctgattatgaacaagctcaagcaaaaaaaatacaccgaaagacggaaagtttgaaatcaagtgttgaaaagcactgggtaaaggtcgattgaaacttagtgttgatgatgataagaagttaagggtttgtgttggagctgttattagaaatcataaatgtgacatcatagcaggttgtgccattcccataccaagttgatttagctcttcttatgctgaagctatggctttgccacaagctctttcatgggttacaacggtgaagcttccaatcagttattttcagacaaattcaattaagcacaactaattgatcaattcatagagttttatttgctctttcagattcaaagggcatgagggctagatacatagatatagtatggaataactctgttccatcagaattgtgttgtaagttgaactaaattgttttttttttcatgaaattacatttagaaaaaataaaaaagaaaaaaaaaagtaaggcaaataccatctgctgatgatatttctagtcaacagcctccctttttgagctatttctaaacctacttttcttttggaaaagaaataattaaaaacagaaaaagcaaacttcatgcgttcttatcatatatctacagcccgtcaaatatgcaacaagcttcatgcctctcaattgtagtggaaattaccatacatcattttataacaaaccacatttacaattatgtgtgcctcatgcattgtacagatatgcaaaatggaccaaaatatatggggttaaagtataatattcatataatataagatttcaagtcccttattagaaaaaaaaaataaataattattcgcggttaaatcctttcaactattattttattagtacttaaccatttaaactcaaattttagtagatttaaggtgacatctattttttacagttaacttttaacatggactacttatgtgtacacttatatacacgtgacacgtgtatattggtacacctaatattattatttaaaaattataaaataatatttcaaaatttataatgttttgtatttttttaatattctatcttttattttataattttatttaattttaaaatgaattttgaaataataatattaggtggactaatataaatgtgtcatgtgtacaagagtgtacacataagtagttcatggcggcagttagccgaataacacctaaaatttgctaacagttttgtagtttggaagattttaccatcaaaatttgagtttagaaaattaagtgcaagtgaagcaataattaaaaaagtttagctgccaaaaactaaaaaaaaaattgataaataagattgaaaaaagaaactattacgtatactagctaattaaaatattaatgaaaatttccaaccacaaattcaattatgcagtcaccaggaattattattattattaatattatttaatgtttacacatatactacataaatgacaattaataattattagtgatcactcaagatttactaatgagtgtaaacagccacggtagttaataccgttatgtgtgtctgttaagttgttagcttccttttctgtttgttttctgttatgttgtaacaactttgagtgcctatataataaagactt

SEQ ID NO: 31215 - DNA, 3578 bp, Cannabis sativa
atggtattaagtttttccaactccatctttgccatttggaatgttgcttctgagtgtgatgcaaagaaattcattgagtttgaataagcattgagcgctccaaacctgaacaatcatatgaatcataattaaaacactaatagaataagaataaaagaattttatttgctaatttaattttaatttaccttgacaattgggtcatcttttgatgctcggatgagtgttcaccaacttgtgtagaggaagaagtcttgacatcctttcgccaacgagttaatattaaggattctggtataactcgaatgtcaagacttttcattacacaccatatatgcttgcatggaataccatcggactcaaacaacaaacacgaacaatttaactcattcttctctttgttatataagactcggtgtcttatcgtaccgtattggaatctagctaaagagaagaggtatgaatccccttgatcttcccgatgagaaattgaatagggttgctcttcctcaatctgttcttttactttataatatatgtttctggtgaaaattgcggcggcctgtttgtaatatgtttgcaagaaatctgtcttaccagcgggaatatgagggacggtatgcatgcttttgaaatctttagcggcttcattatggcgcattgtgccaatagcatgggtaatttgtgaaacaaactctcgtaaactgtaattagcaagtaagaatctcttgagtacattgttcatagactcacatctttgggttgttcgcatgcctccatagaaaacccctcttaagaacgtctctgcccattgaccacgtgtgttgtatttagtacgacaccaagaattttcttcaaggccgaactgtgccaacaaagcggcccatttttcttcaaactcttccactgtgtagtagttgtatattaagtcaaagaagcctttgttgaaatctggaatcttaatattctttgtggcattgttccctagatgccatgcacaaagtcgatgggtagagtctcgtaacaaatgtctgattgcgaatcccatcctttcatcattatcagtgaggactacttttggttttttgttgcccatgcaatcaaggaacaccctcaagaaccaaatataagcgtcttccgtctcatcaagtaaaactgcgcaaccgaacacacaagtttcaaaatggtgattgacgccaacaactacagtcaatggcttattatacttattggtgcggtatgttgtatcaaaagcaatagcttccccgaataacatgtagtctcttctactcataccatcagcccaaaaaaggaatgctaatcgattttcgtcatcaatcttgtactcgacgtaaaattcaggatccattgatgataagccgtctaagaaacccaatgtaccttctgcatcacttgatatgttctcttgctttcttaaactagccactttgttgtacacatctcttagttggaaaggaagattgtcataccctccagattgtagggcaatatgtgctacaacggaagaagttttgataccacatctattcatgctaattacttgtgcagctactgcttcaggaacctcgcggtttgcccgagtgaattgcatttgtgatggtattaccaaatcatgattatgaaatggtacaaattcttgacaccgccaaagatttgttttttgtaaccgaaggattcgtaacgcagcttgacacccacaacgtgttatttcttttggtcgcttcttcctgtctggcatgttcaaaaatttctcgttccgaaaaccttctttgttacaaacccatcgtcgaatgtatatttctccatcacttttcctggattttgtatcgtcaattctaggactgaaacctttccatcttgcataagtataatagaatgcctcccacatttttagacttaccatctctttcccttcaatatcatgagtatctatttctgcaactgatttggatagttgaagtgtgtccaaaatttcttgccagtgagagttggaggcaatatctacgtccgtcatacttttcctaataattcaataaaatgaatattagtcattcaagtgtatgatgaaaacacattaacttacatattaaagttaatgaagttgatgactttccttaaatatttgacacaaaatttaagcttttctgttttgactactaacagtaatctttattgttgtactaactcatagtcaatggtattgcaaacagtgaagaacaaatttacctaaaaaaacatactattttcatatacgttctattgtaatttcatgcactttcattaattaaccaattgaaatattaaaaaaatactctcatatgtacaaaaaaaaaaaacaaaagtaatgctcttacctaaaaaaaaatcctacatttataaaaatatatattatgtaataaccatagaatgaacatgctttgaatccatgactcaatatagttggactccatttatgtggtaagtaaaagatttattgttttcaaggcccaatatcaaggcccaataccaagatttattgttctcttttacagcaacatctatgtttacataaatgaaacatggttttgtaatagtctctagtgaactcaaacatagtatcacatcttattggtcataaagattttatgaaaaataaattttatattagttaacacgttcaactattgtgacggtaattaaatattcatcagtaaatattctatctattttcataaattagataaataatgcaatcttttaatcttgtgatgttatcatttttttttagtattatagtttttttttttagaaacaacacaatcacttcttttagtttaacacttcttttgttatgaagattgtctcttggataatatatacttatctatgttattgtatcatatgtaataaccatagaatgaacatgctttgaatccatgactcaatattagactctatttatatggtaagtaaaagataagcacatgctgtcaaaataagatattgtgttaataagacatacctttataattgtaataggagacttacaagactatccaagtgagtgagagtgagattgattcatccaccaaaactctaccaaatgacactatagaaagaagttgaatgagagtgagatcaataactttttataagtacttacttttagttgtttaattttgccattgtgaggtcctcatatttgtacacttgtaggtggtgtggttggtgtagttatttatgaaactaacacaagaatttaatttaatatataggctgtagttaaatataaatgtatataggctagtcaattggttggcctattttgggccataatctaactatgtatctaggcccaatatcaagatttattgttttcttttaaagcaacatctatgtttaccataaatcaaacatagttttgtaatagtctttagtgaactcaaacatagtatcacatcctattagtcataaagattttagaaaaataaatattgtgatgataattagataaataatgtaatcttttaatcttgtgatgttgtcaattttttttgagtattataggtttttttttt

SEQ ID NO: 31216 - DNA, 1494 bp, Cannabis sativa
tgaaataggaaggaggatcgaagaagagagggaccctggccatcatgaagaagtcgaagaagaagagaggactcaagagctaggaagggtgtcaggttgcgagaaggaagaagccgcctgttcgctagaagtcgaaccagaaccagtggagttggctggcagcgatgagtttcctggaggagtcgacctcgaggctgttggctgggtcacgaacgtcgtcgacagctacagagaagctgaaacgaatctccttgagaaatcattggtggcgaaatcggtggctgctatggtgaccggagttggtgtggagaactcagtcattccaggaatcacggtgaccggtgctctgatagggaaggactcaacgggcagagaggagtttgtggttatcgatactgatgtacacgcgaaaattaatggtatggaggcggttagtatttccaaaatgaaatcacaggaatctagggatgtgatatttattcagaaggtgtttaggcggctgatgagggacctagaagggccacgtgtgaggttatttttaatacctagtacttttatcaatttaaagtacatgtggcagatttttgaagaagatattgttaataaaatgggccaggaaagtaatttatttaaggtgggccgaatttatgaaggggagaggtccaaaattaattacttggagtgtgaggggtcaaaggacaggttggaccagactttaagtgggccggttgtgaagtttgccccttcattgggtgtggagatgctgagaagtgacatgggccatcttaagtataaacatttgggcccatatactattctattggaccaaaaggctgcttgggtaccctcatattgtcaaacaacagctgccttgaataaattaaatttaatttttgaaggcatcctcaaggcagtcagaccgaagagaagagaagactttaaaaaagcagctattagtttgtgggaagacttcaatgttaaagagagaattattgcaaactcagtattacaagcaacggaacatggtctacttggggaggaaactattagcaaaaagaagctgaaagtttacattagaaaaagaaaattcttttcttatggcagcgatgctggaagtgagcagattttcggggaagatcaccttgatgagttggataaggatgaagacccaagagtggaagaagttaatgaattcagttcagaagatgacaattcggaggaggaagatgattcgggtactgaagaagaaaatgatgaagaagaagaagatgaagatactttatgtcatatcaaggaactttggcaagaggaggatcgattcaaaggtgacttagagcctcatgagctagttgctgaacaagatagaatggaagtggctgatccagaagagaggaatactttgttgttttcgaaatcagagctagttgaatccatggcggaaatgggcatgaatctaatacttaaagagaatgaagagcatcaaaagagtcagtg

SEQ ID NO: 31217 - DNA, 1130 bp, Cannabis sativa
gttgacatccatccttaactagggtttaagtttagtttccgggactgtcttagtgcaaagggatcaaaacttccattgggacatcaactagacataccacaaaaatatttgagtcattagaatcagaatcagaacaagctgatttttgagtacctagggccccgagcacccagcacctaagttgacaatctgtcaatcggggcaccttccaagtatccaatcaaagatccaaattttgcatcttgtttttcttcataaaaaatgggaaaataggtgcttccaaagaagaaacaacaatttttgggtgacaaaaacagagcttagcgcccaggttgacacctagggctggccctatgaccaggttcacattttgtcaacctgggccatttcaattggagtttttcaagaacactttcaagcatcttctttgttttcaaataatattgagatttaactatttatgaggaccaaacagaatttttgaaggggcaaaagagggacccagcacctaggttgatatattgtcaacctaagtagttttcgatcaagttcagcaaaaattatccttggcattttttctgtcattagaaataatgaagattcaagcaaactcggggagaaaaccacaaactcaagactctggaaatagggcccagcatcccggttgacctagtgttgggccctgcgcagaggttgacaatcaacctgggatgctgcctccaattgctcaaatgtaaaaattgacgcaataattgaattcgaaatggtaaaaatagaataggagacctcgtcttcaagtttagaagccttggaagtatgaaaaacaagatcttgggagctcgggagctcgggagtaagtacctagcgcccaggttgacaaatggcttggtgcgctgggttctacttatttgaatttgatgcattttcaaccgtccatctagtttttcacaatgacaaagatccatgaagtcagaaaaatcaaattcacagctttgcattttttttcgtttcaagttcactcaaaaatgaagagtttcgagtctgtcatttccacaaaacagcaacatctccgagaactggtgaccaactttgccagaacacagaatcaggctaagtgatgtcaaaatatc

SEQ ID NO: 31218 - DNA, 7093 bp, Cannabis sativa
  modified_base (60)..(67): a, c, t, g, unknown or other
  modified_base (182)..(183): a, c, t, g, unknown or other
  modified_base (641)..(643): a, c, t, g, unknown or other
  modified_base (748)..(761): a, c, t, g, unknown or other
  modified_base (7028)..(7031): a, c, t, g, unknown or other
ttggtatatagattttgttatacaatatatttctgtttgttgtatagtatattattattnnnnnnnnatatttattttttattttgctatgaataatagcggcatataattttgttaacataatgcaaacattttaatatatgtatataattttattggcatgctacatatatttaattatnntttttatatattttaattgtataatatatatttattttaaataatatttaattagtttctatttcttatatacaatggtggcatataattttgttatcatagtatatatattttaattgtggtatataatttgattagtgtgtacatatatatatatattagtgatatatatttttattattagtagtatatatattttggtgaatgatatatgtattttttgttatacggtgtatcattttttttaaataatatttaagttctatttttaattgtacttccgttgacatgatatataattttattagcatcctatatatttttatttttatttttatttattgttattatatatattcaattgtaaggtatatgttttttgttatatagtgtataagttttattgtatagtatagtatattattttattttagatcatgtttaatttttattttatnnnatataaaggtgatatataattttacaagtatggtatacttattttatagttgtatataattttattaatatagtatatatatatttttttaataatattatattnnnnnnnnnnnnnntttattgtaggtatatatgttttgtttgtatggtatataatttttgttgtctatagtatatcatttacttgagatgatatttagttttaactttattatgtataaattttttagtatgtatacatattttaatagttgtatatatagctttgttagcatgatatatatattttttagtattaatttagtattgttataatttctttgtgatatataattttattactacgatatattaattttcgttgatacgatatatcaaatatcgttgtatatatttaataatctaatatatttattcgtttttgttacaatataataatatgcaatattaaaaaaattatataacttaatttaattattatatattttttaaaaaaattatatgtaataaatgtatttttataatttttattagctaatttattaaatttagtcattttcttaattttttttaaaatgagacatttactaacttagttttcaaatttatagtcattttgcatcttagcccattttttaagatctaaattatttttttaagatttactaaaaaaaatgttgaatttttctcatttttattttgaaagggtatgatctaataattgttaaagtttaagaatcaaaattactaatttacaaagacatgtcaggatttaaacgaaataataagacgaaatctaacagaaagactaaatatttataaatataaaagttcagaaaattttttaacaagccatatattttaagaaataaaatcagttgaaaattcaaaggtaaaatttctaattattcttattttattattgtttacctttaaactatgaacatagcctctttaacggttcattgcccaccttatgagcttataaatagattgccaggctcatttattcttcacattctgaattttgaagcaaattgctcttgaggctttgtatttctttctaacttgcttagcaaattaattagtatactacagtcgaaaagggatgaacaagaagaatattgttaaattatttatatacaatttcacagttaaattcttgagaagttcacaataatatatcggatttacaataataataatgatacttctatgatatgtcacgtcagttgaatttgacgtttttgatattttttgacgttttttgacgtttctatttttttttgtctcttacgttttcaaaagtaattttttagttactaataataatgttgataagaaaacaattagttacctttatataaaaaaactttattcttataccatagaatttaacatacatttcggttactctctaaaaatttatttgtataaatcttaataactaattagttatttttaagttatattatggtaaattataattttaaatacatctagataactttaaaaattatttttaaaattaatgagttgtcatttaatataacaaactaccatatttatataccgattattttatatattttttttgttattttgaatattaattagttattatataatataatataattcaattaacttaattctaaaatgaatgttatctaagattaaaaaaaattataaaacagtaagtaatcactatattagtaactaaataattttttttttcggaaatagcaaaaaaaaaaaaatataggtttctcacatattgaaatattcatattgaaaagtagattgcaatggtatttttttaggctcatccgagtaacaacatgattataaattatttttaaagtttaaaagaaaagagggaataaatagaaaagagagaaagagtaacataagagaagggaaaaaagagaaaaataaagatagaaaagtataagtaaatgtattaaaacataccaaaacaaataaaaaacttgaccaaatcatttttaacaatttaatcaaaaacaagtcatttttgaacaattttcgtaaattctttatataaaaatatcctctaactttgaggccacatagccaattaacataattcatctttcattttgaaagtgatagattttgtgactgaaaaagctattgagtcaaggagtagtatcattattgttttaaagtataagtttgtttgcaaacttatatttctaaggatttattcttatgaaagcttgctagtttagaaaatgacccttttttgatttagggacagaagaagataaatcaaatcctgatgtaaacaatatcattgtttaaaattccatatgcaagaacgcatcatcataagaactatccataatgacagcattatttagtttatcataaataatcaattgtagattaacataaaattctccttacttggagattaaccccatgttccgattcaatgactaccccgaaaacagcagaatggcggtaagccggtgagactgagaagctaaacttggacagaataagagataatactactttcagctcggtcatggccatgttctgtccaatacaaattctagtccctacaccaaagggcatgtaagcttgaggaaacttaagctccaagaactccatgctcaaatcttcctggattgaattgttgggcatcaggaccccacagatcagtgtcttgttgcattatagagattgggatttgaatatttactccttttggaactagaatgtctttaaattgaatatcgtgcaaggcgtgccttgtgataaaaactccaggcgggtaaaggcgcaaagtctcttgaatcaccatagtgagctgacaagaaaaaaaaaagcattcattgtactgaattaagcaggggtttttagtaacataaaagtgagtgactgaacattgtgtgaacttacaactttcaagttccggagagtattggcataaaaaacgccattcttgcaaacttcttgcacttcttcacgaaacacaagtttcccaagctggatatgcagccagcagcaacaaggtctaagatgctgtagtagcagtggtctcatagccagcaaaatatatattcttgcagttatctacaatgcatttttcctgtcccgagtaatgccaagagacgggctatctataccgccataagcttttgccccctcgaatatcatctgcacaagatccttttcatcagcagcctcagttctctgcttcacaacctctaaaatcatagcattgatttgtttctctagtctccacacatgaatgttgttcattgttggaatgaatctgatatataaataaatacatttgtatattaacaacaattatgattgttgctgctcacataaaactaaacattgacaacataacatgaaaatattaaacaatgataacatgttttcgcggctcttcccgaagtgtgcacggcagtctagcaaccatggcgtccccaggataaaacagcctctgtataagtacgatacattctgcacaggaagaaagaaaaaaaaatttaatgttggaaaagatgtgttcttacgttgttcggatacgacttatatagaagtcgatccaagaaaaaacggtaagaaaacggtaatgttatcgttcgtggaggagttggatcttgggagtaaaaggcggatcatcacgtttttaccacttctgatcacttgttaaaattaattaataaataaaaaaataaatctttatttaataaaataatttttctttaaaaaattaagtgacatcatacccgccaacccagcccggatggacggtggtggcgggcgcatgtggtgatccagtgtgtgagtcctcacccatgcgcacaaaattgggtacccataagttcaccatacccttgacaaaagacacacaacagaaattaagtttaattggagttaatacaaatctctttttccaaatctaacttcaaactaaaaatattttgtatagaaacatcgttactcaaaagtcaaatctttaccaatcagtaataaacagagaacaaattgtactagtgtttcttttctctagtatcaaaatttgagaaaaacctgagttggtaaaactaattaacagtggtataataccttgaccttgtcattgtagaattcaggagcaagaatctttttttgatgagcccaaatttgaccactagaggatataataccctggccaaacagtggtccataattcctggagagataaggaggtcttccaagattcaaagaagtgcttattagactaacttcttttaccatgtctatatctgttacgaataagaattgagtatttcctactccataaaggaaaattggccctgcatatatattttcattcaagtactacacaactcaattcacaattcacaccgtaacaaaataaataaataacaaatggggaaagacgttggaaggccaatcatgaccaatcgaaacgacatcatgaagtttgtcgtttgtattagtcctttttgagttaaactgaagcttgattttgttcagttcagagacatttcccaatagatttgaaggtaatgggcctcgaatcccttgcttttgaagctttaatcttaacctcttaggttttaatactaaagacggataaaaatacaagaaaaacaatacaaacccaccaaccaaaacaccaatgacaacgtttaacgcctacattgctacctctgtctattgtattttcttgccataaaaagaattgatattgtattaaagaaagtaaccgatacgtaacgcatgcatgtatggtataacgtgtcagctaaaggatgacgtcaaatgtaacatatatataaaacaaggaaagccttacaggggaaatggcagtaactagcactactccaaagctgatttgggtaacattggcaacaaaaatattagtttcaattcaaacacccagaaacagtttttttttacagtcagattaaacaaagaaacagtccttttacagtgagattaatcaaatttctttctacttatcaaaaaagaaaaatcaaattttaactcttctagtaatttgaaaataattgatgaagcagttcgtattattttatttatagtttattcggttcgccctaaatgtaaattttatattttgaatctaatttcattcgcacaataattcaaatctactttttaatatttaattatttaaatttactagtaacaaaataaaataaattatctctccaacaaattaaaataaacaaaacaaaaggtaacaaattcaaatgaaaaaaaaatagttaatttcattttagattatttttttttataaataataataaaatatatatttgatttgttaagtctttaaatatatttgtatcatacctattaaattttttaaattattatttttttacattaaaatattagttgtatatataattttttaaaaaaatatataaatatgtgtgaattagattggatcagtcagttacatttacatgtcaatcacacgtacaatctgtacaagtgcgaattttaaaatatattttcaatctaatttaatgcacaagtgtgaatatccatactttacgaattgaattgaattgaattggatcgtgcgaattggattgaattatgtattttatgaacacttctaaaagcagttgtaatagcaccactcatgactcaaccatggaagatgggctaaagatggttttacattcagcctgaatcccaattgaatattgttattaggcactaattatttgattaaattatataaaatttaatacttaaatacattaatagcgatataatacatttcatattgtaggtggtggcttttagcgtttcttaatcccaatttctccaacaagaaagacaaaaaggaaaataaaattttcttggattgggttgctctctttgctccattacaacaaactccctcatccatctccatctcagcaaagcttcttgttcttctttggactctaactctccatcttctagtggggttggtcatgttgctgggtccatctctaagcttgggcctgagtattgcttgttggtccagcatcacttgggccgagtgctcatagaatggtctatcaacagttgtcaatgccatgaaagaaagaaaccataaacaaacaacttaaattttctccttctccacctggtaaatccttgagataaaattaatagggtcagatatccatcaattttctagaatttaaaagctaaaggacattgccataagagaatgagaaatatcctctagtattcctatttttgcatctaaactagctccaatcaacatttaatttcctacaattaaaaaaaaaaaagaacattgttagtgggcagcaagcatttaacaccgtaagatctcnnnngataagtattttgtaagtttttatttctattagactctcccctacggtgactacttagaaat

SEQ ID NO: 31219 - DNA, 2834 bp, Cannabis sativa
ttttttaaaaaataaaagataaaaaaactatgggtattaatttttaatgacacttcatagttttagtgacacacattacacgagactgtgtcactaaaaatcattcctagctctatagtgacccacactttagtgtgtgtcactaaatagtgtcactaaaaggccagattgtagtagtgatttaatgcaaagaagaataactaattaaatatagaattaatagagtatattcataactcgctgactgtatagttttaagcgagaccaggatataaaactattaatacttgtattgacgagacaccagcctacctcgaaaatcacagatccaaagagaaaattcgtttattttgaaggaataagtgaagttacccaaggcaacttcagactacatatagcaaggtgtccaccttgctattcataagaaatatagacaaggcgaatcatttgttaaacacttagcgtatttttcacattacaataacaaagtgtaacaacttgaaaatatgcaagacacgattgtccagtctgcaaggccttatggtgaaaagcagatcttaagtttgcctagtacactggtgctcatgccatttcttgaaggcatatgattgtccaaatcagcattgaccatctacaagttaagcaaggtgctattgtccaaatcaacatttaccatctttgaggataagaataataagttgttatgcggttatcaattgttatccacacgtgatttaaatgaaacgtgatcaattcccatattttatgaaggggatattggcggctaaatccccaaacttttggatttgtgacaattaaccacaaaaactcaatttttggcgactaaactacctgaaccccacttccgttttgctcagcactattgcgtcactcaggctctgtttaagtgcaaaaatggcttacgtggcacgatccacgtcagccactcatgccaccttggcattaaataaatccctctcccaaaataaaattaaaacttaactccaaaattaaattaaaatcctaaattaaatcaaaaacagaaatatgccaaaaacaaagcaaaattaaaaaccctaaaattaaaagccctctcctgcacgactcatgccccttctttccgccattgtcgacacagtgacctccccctgttcttcccttcccttccttaagccattgttgcacagtcgaagaagaaaatgaagagggttccacatcccaagtgctcttgtgaacaccctataatgatcaaaacctcgtggacagatgcaaacgcaggaagaagattcgcgatgtgtcgacgttaaagggtgagttgtaattttttattttttttttgttttttcgtgattggtttgctcgagtcctcatctgattctacaataatagttttttttccacagctggttggtggatgttatttttgggagtggatcgacccaccaatgtgtgaaagggcatcataggtggttcctgggctactgcgtaaaattagaaggcttgagggagaaatttcaaacatttcaagatcaaatattgatgagcataattacctgaacagtgtggacaataactgtgagcaatcttctatactgaaggccttgaacaagggggtttaggttgatgagaaatcattgcttaacagtatgggaaaattgattgcatggagagtttcaatgggagtagtagtacaagtgttgaagatccaaaagaaaagatttgcaccagtggaatcttagtcataagtgttgttgttgccattgttctgttttggttaatgtcttgagtattgtttaatgtaaggagatattatgaggctaaactaccttaacttttaaatgtgtaacagttaaccccaaaatgtactagttttaaggatattgttccatgtaatttaaggataccctgtaatgatatgttatttcataaaaatgtactgcttttttgattgctactgtagtattagaatgtaagggaaaacttggcaatttaaatgaacactcaaacatttacaaaatataatttctattcaactggttgttggtgcattgataaaaagatcaccaaaaggcacctatacattagcaaaatacactgtttgtgtgcttggtgcattgatcaaaagatcaccaaaatgcacctatacaattcacattgagccaaatataaattaaggtcctatttgtgcttggggcattgatcaaaagatcaccaaaaggcacttatacatcaaatatccaaaaggtatctaaaactagtttctattacaataggttaatgtaaaatataattttagacttcttcacgacaatcaaccccgacgctgggaacttgaaccttcccctcttcctagcctctttagcaagttgtttctcccttctcttcctcctctttagtgttgaaacagatggattttgaattggtggcctacttcctttattcttttgagcttacacagacatataaacaatgtcaaaacacaatagaaatgtaaaagtcaaagaaattggcaaatcaattcatacctcctttggcttctttggtacatgttccttacatcttgaggctgtgtggccagtttttctacatttagaacaatgcatgacagctccatttcagctggcttttctaactgtggcagctgcaggtggatctttttcatcagcaccccttctccttttcttttttggcctgccaggaaggttatgctcacagggagggaatataggattaaggcctttgtttggccacttgtcaaggctaggcatgggggaaattgtgcctgcatatgttgctgcataagcttcagttttgtagtacctatgtatgtaacc

SEQ ID NO: 31220 - DNA, 4743 bp, Cannabis sativa
tctctctctctctctttgttttattattcattttgagcaagttttctttgtctttgtgtttttgagagaaaaagttagagttcatacttaaatttctagggtttggcttctgtacaagctgagtttattttgttgagttttctgctaatgttttatgattatttaagctgtttttaagctggtttaagctgttaatttggtgaaaggttagaaagatcaaacttaggtctttaatggaaaaatcgaatctagggggttttcttgcaatttatgggtgttttatgtttgttgtggcttaattaagtattctgaaaggtttggtatgatttagggaaaatttgagtttgtggtaaggtttttagggttttctccagagaaccggttaactggttctatagattatcctttcttcactcttgtagaatcttgaaggagattaattctacatcctttacacttatccccaagagtaagtgttctaaatctgtaagtgacttttggccaattgcttgttataatgttatataaagtgacacgaaaaatgatttgctccaaattaaagaaagtgttgcctagcttaatagctatgaatcaaggtggtttttttctacgggagattcattgcgcataatatcataatctatacgaatcttgacactatggaaggaaaagtttcaagcctagttgtatgatcaagcttgatctcaagaaagcatatggcaccatggaatgggattttgtagaggagatgcttgaagcttttatatttcttagtgtttacaataaaagtagttctgatgacatggatatcgatatttgattcgtgacaaaaaataaaacattccctaggtgaaggaactcgagtcatggcagtcaattgggaaaaggtccctagccctgtgcctaggttgactttgaggctttggaatgggtatttggatccatccttcagtattctgaataatgaagtcaagagataaccaagactgaggtttggaagctaaaagtacatgaaacaacaccctaaaattcaatccgaacgcgtcgggtttcacccagcgcccaagttgacattctaattaaggttttggaatctaggaccgtcttagtaaaatgggtcaaaatttgtactgggacatgaattagacatgtcacgaacatatttaaggcatcagaatcagatttggagcactttcatttttgagcacccggagcaccagatgccctaggcacttggcacccaggttgacacattgtcaacctaggtcacttccaagcatcaaactaaagaactatctcgagaatgttctttgtcttcatcaaaaacgaggaaacaagtgtgtttgaggaagaaacaaacaattctaggagccagaataaggtcccaatgcccaagttgacattttgtcaatctggaccattttcaaggagtttttttgagaattcaatagggcatattctccgttgttgtcaaatattaagacacaagtgtttttgagaatcaaacggaaccatctaattgcttgaaactggacccaggctgtttctaatcatattttctaaaaaagtgtttcgggcattttttctatcattagaaataacaaagatacaagtatacttggagagaaaagagaattccaaggacatgaaaactgagcgcagcgactaggttgacaatcaacctggtgcgatggttttaatcattcaaatgcaaattcttctccaagcattctcttcggcatggtcataaataggctaggagaccttgtttttgatttcaagaaccttggaagtatcaagacgacatcctgaaagctccaaaaagagtaccgagcgcgcaggttgacaagggacgtggtgcgttgggttctactaattcaattttgattccatctcgagcgtttgtctagtttttcatagtaaacaaaagctatgaactttgataagtaaaattcccaacttcataatcttactttttttggaaaagtaacttagtcacaaatcgagtagttttgagtctcccaattttgagaaatagcaacatctccgagaattggtgaacgacttcactagagtaagaaactagctaagtcaaaatatcacttgggaatctaaaaatacatcccagtatgtttttccactcacccaacatccatgttgacgtcatatgttaacctaggcgttggactgtcaacctgggcgcttctatcagagtagtcttcagtaaaacagtcatagcgcactctatattgatttgatttgatgcaattaaaactttattttgaagatatttcaatgctttatcaagtcatgtcttacacttcaaattttttctcaagagagttacaaatttaatctacaacttacccaaagtgggtcccgtgaacgtgacccaagttccaaaaattaacgaccgacctctggagtcaatttcaacattatatcatcatcaacagtcaaaaatagcctaaatattttttttatatatatatttatggaatatttcattatgattttaataggttctcatttcctataaaaggagagctcatctaactcattttccacattcaaaaaagtacccataaggtcagagcatctctctctagaaattagaattgaatttcgtacttagtcaattttttttttttattttataattctcgtgagaaataaaaactcgaagtacacatagctttattactatcgcgacatagggagtgaactactatatattatgtgtctctctatttactttgcacatctcttattttatttctccaatctaacgaactagcgttgaccactttttaatggcaatacttggtgagtttataaagcttattgtgaattgtgttcggacaccaaaattttccctaatgtttaatggagagttgcacggttatttcaaggctaaaagagggttgtgtcaaggtgatcccatgtcacccatcttgtttgtcttaggaatagagtacttgtctcacataatggggagaactgaaaaaaaaattgactttcagtttcatgaaatatgcagagatcttatgttgaaccaccttagttttttcaataatgtgttatttttctgtaatggtgacttcaaatcaatctattatttgttacaagggtcaaaactattctccaaatcctcagggttattcccaagtgaagcaaaattagccatgtactatggtggaatggttgaaagtgaggttaaaaggttgttagatgcttcaggttttcagcgaagcactttgccatttcagtatttgggagttttaatttatgcaaagaaaaaaaaaaaaaaaacaattcagatacgaagatggttgcgcagatacgaagatggagtattagaaatttgtcttttgtcgaacgaattacactcatcaactcggtgttcatttccattcacacttattggagccaaatcttcttgattctaatttttttaaagagatattaatgcaattagtcgggttttcttgtggtaagggaaatcttatggtattagctcggggatgattgcttcgacagggtctataagcctaagaaggttggaggtctaatatactgaaatatccttatctggaataaaacaacaattgacaagtatgtttggggtatctcaacaaaggatgacctttggatcgagtgggtaaatagtgtaaacatttagaagtaagaattggtaggattacactgctccttcttaatgtagttggcactggaaaaaggtgattgcagtgaacgaagaacttaagagtttggtaagtgagcttcaattttctactgcaacttaaaatattcaatagggttataagctcatttgaccagaggttgataaattacagtggagcaaagaggtttaggatagatttaacctacccaaacactgtttcatctttcggttggctatccaaaatcgcttaaagactaggaacaggttgaatcgccttaatttggtgcaagattgctcgtgccttctttgtggagtggggacgcaagttgtcactcacctcttttttgagtgtgttgttagcaagaaggtgatgatggaagttaaaaattggcttaactagaaggtttcaactatctctcttcaacagttggtgaggtggattgataaatcaaaagaaagtaagttcaacagcttgcatagctgtcttgatttatcacatttggcaagctaagaatgaggcctattggtccttgaaaattacccgaatcggtatacttgtaaagaggatagttgaaagtgttaaaaatagagttttgtttgtttggccaaagtctattgacaagcaagatagggaatggtttgatagattatagattaacatgtgatatatacttgtatagttcaatcaggccttctttataaacaaatgtgttgttagcttgtaaatgatttggtattaatggatttatgtctccgagtttccaaaagaaattgttttatgggatgttagggtcggccttgagtaactgccttagtaataaaaagaaaattattgggccctaattaaaaaaatatatgatatcttcaaaaattaccaaaaaaaaatatgtttatttttaaaagaatttttttggggactcttaggctaagtgggttcttggtgaaggcctggcctgtcatagttcggggttagcactatggaatgtttacggtggtaaagcatcaaaacatggagccagagatggatctagacgtatgggtgttgggttttgtgccct

SEQ ID NO: 31221 - DNA, 1407 bp, Cannabis sativa
  modified_base (46)..(47): a, c, t, g, unknown or other
caacataaaatgttatttttgatttttattaataagtaaatctgannatattgaaatgggttttatatagggcataaaacccaacacctgcgtgctacgctcacacatctatttatgtctatgtggcatagacccacatgttacgctcacacgtctaatcacaataaggtcttagaatggttcatctcggttctagctaccgagtccaacccgattatgccttgaacacataaccgtaaatcttaacatactcatataattaacatggcatagcatatacacatcatatatcactagggtaataaccctaggctattaaaccactcatgttagggtaataacctgaatcccagttactaattgctcacatatatcatttccaacataagcgcccccgcgcatactctacgtgctaactactgtcttacttgatgtcccacattagtagagattcaagatccccgggtgctcctgaccaagtgtcggtaatcctagtcataaattctgggatttacacatataaggttaatccctaattccacatttataaaatatatacttggcattcaaaacacaaatattcacatagagctcaaaacgagctttccaacagtatataaaactcccaaatcaaagtccagatcataaagttatggctattcaaagtttgcatttggatctgcccagaaacaaaagggcgggctgcgacgccaaaaaagctgggccgcggcccctgggttccaatcccagaaaaacctgctacaacttcgaatttcagctccttacccctctagacaatcctgattttcttgctttccttgtaggagtctaatcactttcaaatcaacccaaatcataaccaaaactttaaaccacaaaatagattttccaataattatatagagagtttaaaacaccatttcatgcattaaaattcaacaataataacccccaaaatttagattaaacaaccaattccaccttcaaatattcacatgatcaagccaagaagtcatgtattagacaactaattttagagctaataaccaaaatataaacaatactaaaatccctaaaattctttcccaaaccaaaacaaaaacaaacttaagagatccaagtacaaaacatgctcacagccacaagaacaacccctacaaccacaacatgcatttcaagagaaactcaacccatttcatgcttttcaacaatagaaaactcagcaagaatttaaattaaaattcagcaaaagaactacctcaattccttccaatttcaagctcaaaagcatccaacaccaagcttgaaaccaagccaaactcaatcaaaaatcaaaagcaagaataagttgagagagagagagagagagacagtttgtgtttgaggggagaagaaaccagaaaataa

SEQ ID NO: 31222 - DNA, 1877 bp, Cannabis sativa
aaccttcttaaactcatctctgggtcattctcggccctcttacgtttggcagagcattcactggggtaaatccctttgaaaacgggtatttgtaagaggattggcaacgggactacaacaaaagttttacaagacttttggctccctaactaccgttttcttcctgcccatcttccaagtcacctggtcaatgtctctgatttgcttcttccaaatggggattggaacatcccattgttgcgcatccatttcacccaggacattatcgatgacattctatctcttcccccaccagatattacccaaacagactcctatttctggcagcacacctcttcaggtcattattcagttaagacgggttaccatgtggcaaaaatgtctattaactcgacacaaccttcatcttcaaatactgctacccttacacgctggtggaaattcctctagagtcttcaaattcctccaaaaattaggcactttatctataggctcactcagaaatctattcctactgcagaaaatctctacaataggaattgccttaactctcctatttgtcctcgttgtcatctttaccatgagtctgtgcaacatgctttttttgagtgcaaggatatgaaaaaggtttggtcaggtacgtcttttatgtctgcgttgaaggatttaaagcactatacatatgattgatatcattttatacatgcaacaaaatttcccaactgagtcttttaacctatttctatgtatgttatggaagtgttggaatagtaggaatgcatttgttttcaggaatcaatgtgcaaacgcaaccaaaagtagttgaaggttgggcgttactacaaggccttcgatggtgctctgacaaccacattaacattcattacatggaggtagattgtaaaaatctcgtcactgatttaacatcaaacgaagttattctctcaagctatggagccattatcgatgctattcggcaggtgttatctttacttcccactgttttccttcaacatatccgtagacaagggaatacaggagctcacaatttagcccagatggcattaagattagataacacatggtgttggaatagtcacgacccataccctttacctttgtaactttctttgggtcttccctctcaaaaaaaaaaaaaaaaatcagtgatagacccaatatttatacttggtagggatttatatattatatacaaaataaaatttgcgctttctttaaacaaaaattataatcattcttagaattattctagattcatttttttttgttttttttttgtttattatttttaagtataatcatcaaatcaaaaaatatacattcaatttttgtgtaattatcaaattaaaaatattatttttttatttaattaccaaataaataaattaaatttaaatatttagaatattttttttaaataagataattaattgatttatttaacgatgttagttagttttaaccgttaactttcacgaaaaataaaaaagaaccgttaaaccaacaattttcattaaataaccatgcatatttaatataaaattatatatattataaataagtaggtcatcattcttgttttaaaaattaattatcaaaacatttgttcttaatataaaaagaatgtacccttttattgttaatttttaataagtcatttttagtttgttatataaaagtttagtattgctacgaagcggtgttttaagagtggttagtaatattctataaaaaaaaatattatatttaattaattatttgagagatccgatacttataaattatactaataataatattatatatatttaaagattttatttttacatttccaatcagttttttttttttttttt

SEQ ID NO: 31223 - DNA, 1827 bp, Cannabis sativa
  modified_base (1646)..(1658): a, c, t, g, unknown or other
  modified_base (1722)..(1733): a, c, t, g, unknown or other
tcaccaccggttgtttcatccgatgtaagcaacttaatgatctcttctttctcatgatctcttccataaatatcagattcttctagcgatggagcacataccctctctggaagcttatgatttttcacacgttccagaccaagatctttgttgtctagaagaaccttcaatttctcaagtgtatcttgtatctcgggttttatggccttatcaaaagaagttaaaggagttgagatgaatttcatgagtacctgacaagtattatgcaatagagaaagagtgagagattgtgttaaattctcatatattgaaaaagattcatacaataactaactatagggtgtacaaaaaagtttacaaacagccaaatcaaaatacaccacctaaatcaaagccaaaaaatgcaactcaatggagatctaaatcacccaacgtagcacgaataaaccaccagaattactaggcgaattaaacttttttattttctaaattaaatgggttaaattgggttggttgaaatatataattaatatagtagtcaagtgtacaagtgtctaaagcatagttattaatctagaatatttctaactaatctagtgacaaagcataataataactaattagaaaaatccaatccattgattcattagtaccttactagtacaagtgcagcccctatgagattcatgaggaccaccatcttccagttccagttcatttagccatgcttcagtgtcaatcttgtaaaaccaagtcatcagcatcataaatagcatccttgagatcatcaagccatttccgcactcttgggtctttgatgagcttctcctcagcatcaatgagcagcagatcagccgtagacagcagagttttgaactccttaaggagcttgagaatggcatcttttcctttgaagaagtccttaacctcagtagttaactttttcaccaatggattaagcaaagcagagagaagtgctcctccaaccacttcagcagccatcagatcttcaaaaactcaaaaaggattacaggaaagagagagagagaaatcagaagtaatatggcttgagttcacataaaaattttgagtacatagtattagtaacatacttctctaaaagcaggtcatggggtccattaaacatagtttattatgagtttgttttgttttatggatagcagtgtaaaacaaaacatgagtgcaccttcttaattacggtaaactaatgctaatttacactaatctaattatatgttaatttaatagtggtagactgtgctagctgcatggtttacataaatttaagataaagaaataaaataatacctcattacatgtgccttcacgtacggctatgaagattagagaaactttgattatatatagtaagagaaatatagctagcattgtagtatttgtttataaaatgtaaaggttaattggaataaagctcgaaaatcagatcatggaattaatcaacattatcacaaatacataataataatgtctagtgggggattgctttccaactttaattattactgtaaatttaatatcattttggtatcttattgtttgtcatagcaccaattttatacaactattattttaaaacattgtaattagacaaaagtccttaaatnnnnnnnnnnnnntagttcaaggggaatttttaacagccaaaaaagttcagagaacacgatttagtacatgtcaaannnnnnnnnnnnaaattactaattagcctatttaaaattatatatatatatatgtatgtatataaagatataagtcttttaccaaaactgcaataaatagtttttt

SEQ ID NO: 31224 - DNA, 4908 bp, Cannabis sativa
caatatattataatttttgtgattaatacatttagctacaaactttttagtcactacataggaataataatttataattagttacaactttttcatttcagtcataagttttgtgctgactaaaaaataagatttttttgtagtgatagaaaaattattatttttacactttcaacttttttatttataaaaatacatcttcagtaaaaataataaatactttttagatattttatttatagtttcatatagttgtcatgtggttgttaatctaatttcttttttatagtttatttatagttcttgtgaggttgattttgttagtttataggattcatatcaaagtttcagtggaagcataaaataggatcaggtttaaaaaaatttgtgttgaatctattatgaaccataaatcttaagatctcaacacaattagcataaattgaatctaactgcatgaaaaagaattttacctcttgatgcctattaagggattctcgtttcttttcgtatacgaattcgatcatctattctaaagtagtaatagacttgttgaagagttcacaccagatctttcaaatcagcctcaacatttaggaaaagagagggcttatagatctaatatgatgaatgatttattacgtgtgagagagatgagagatagcgagaattcgaccactaggttttgaagaattcttagtttttcaatcatatatgtccatcccaaaaaacttgcatatattgtatatgttgtgtctctaatatatcagttttaatctatatatatttgttaacacagatattcgttaaccaaatatctagccttttacgtaataaatttactacagaatttaattataataatgaacacaagatattttaagtagttgtgtagttgaaatttacatactccatgagtccatattattagggattattatgttaatacagagtataaatctcagtaaataaataatagaattctctctctattttactgtcccttttcccattgattctatccctatttataggtgtataggttggcagttatttttattgggatcgattcatttacaactgttgatgaaacgtggacattctccatgtttcatttatttacacatggtataatatcttatagctacccaaatgctctttatccttatccttaaaaacagttatgctgactaagaaagttgcttctcgctgagaataagttatccttcttttccgtatttagaggaaaatatgcttagtgtagacataatttttctcgcaacactctcatattgtagtgatgatgcgagatgattactatgtcgcataaaaagcaagatgatttgagcgtagttattttcaccttgctcatgtatgtggtcgatgagttacaagcttcttaatgtctcatcttgtaagcttttatcatatactctgtttatctcgagatggacatattgcctcatcaattatattagtttagtagttgttatttttatctcgcatatgattaagtaatcaacgagtttgaacatttctatcaactttaattaattggaacgagttatttaaatcgcatttaataatgccatttaattattatattcttcaagtagatacatattccttttgtaggacacgtgttagtctctgatgaacagccggattttgggtataataattgtccaataaaaagtactttttgattaaaaagaactttttaaatgctcttaggggtataatcatatttaacctgttttgaaaaatttcatgcttttatttttggcggttcaaaacttcgaggcacatcattacccattttatgttttgaccattccattctcgcatagttctcacccattagatcagatttcctttgatcgaacaatgatcacttattaggtataaaattgaagtttgcacatcattttcgccacttttagctatcagaccttcgagcttttcgtcgaaatctctaccactttcttcccaatcttgcatgccttgactatctcttacatttttcctatgcatatcatccaattacaattcttgtaataccctaaagtttaataactggattagcaaccgtaactaagttaattaagtgtaaatgagaaattatattattatatgatttaatatgtggaattattatgatttattacattttaagactccattggtgtgtcagggaaatttttgtaattttgacctgagaagggtaaaattgtaatttatagtatattgtgtttatggactatattattatataatatgtttattttgtctttctgcaggtgatttttgacaagttgacacgatatagtcacaatcgggtattttgggccgaaccggattagtggcccaaaatatatttttgagatttagttatggcttatatgtgttaaatgagaatatatgatttatgtgatatatgtgtgtgagtggaaatgacaaatttaccctttaatgtgtttatgcctatatgtgtactttaggggcaatttagtcatttaactaaataatctattttcaataaaataacatttcagccaaaatagaaagtcattttcaaggttttgacaccccaaaccgcctctctctcaccctctccattttgtgttttcaaattaaattttagacgaaaatgcttggatttggtgtgatttttgtgtgcatgttcttgcttggagcttgaggaacttgatgtatttattttttcatttcttttgcctattgttaatttttggatttaaagattttctatggtgttcttggtgttcttaagtttatagttgcatgttattgtaatttaaatgaattgcggtgattttgatatatttttgctatgatgtttatacttgctggatccttgttgttttgaaaggctttggattgaactatgatgtgtaaattctgggttttacactttgaatttctaggttgtgctttgaaattttgagtttcaaagcttgaagattatgtgctttcttgattccttgattacatgccaaagatgagtttttgggtttgtttttgagctttttgctaagctcaatttcttaccaaagttgaattaattttgtgttgagttaattttgagttatgcttggtttttggtttgagtttgggtaaaatcaaaggcatgaaaaaattgggtttttgtgaggggagcaggagctgtcgctgcggccacagcaaggctcgccgtggcgagctccagcaggttggaggcaccgggatgagggccctattttcctagtttttgccataacttttgattccaaactccgtttcggacgttcttgatattggttgaaagctcattttgggctctatgtgttgatctataattagagttcaaattatgtatatgtgtgaaaatgaatttggaattaactctatttgtataatcctaggaatgtgtgactaggatgaccagcgcttgctcaagaacatccgggaatttggaatcttcacatactcggattagcaggtaagatagtaaactagcacatagagattagtgcaatggtgctcctgtatgttattttgtatatgctatgtgagaaactgagattagggttattactctaaaatttagcggttatgtgatctagggttattactctagaatttaagtgaatatgattgcaatagtgtgctatatatgttgatataaacaattatgtggttaaggcataatcaggttagactcggtaaataaaaccgagataaactaatccaaggccttattataaatagacatgtgagcgtaacacataggtctatgacaaatagacaatagatacagtggcatcaatacttaaagtgattttaattgatattcatattattttttatactgtcttacttggccttggcggggtaagtcagttgttgatcaaccatgaggttgagggctttacggtgcatttaacatgttcagggcaagctagaccacgagggttgggtctaccaggggaaaattcttgtaatctccacttttgttgcttaggtccccgtgtactaattacttgtaatattttgaaaaagttttacgagatcccaaaataaaatatgatcttttggatgtttgtaaagtttaataattacaagttattatttttattcaatatttttttaaagtttaattttcactcttggctttagtaaatcccaatttagtaggattagtatatgtttattcattgtatgtggcatttcttaagttaggtcgttacaattcttgttctagaaatcatcaagactcagttttacaaccttcagaacttcgattgcgaagcttccttctgcccagacactttcatcaaaacagtaagtgatacactctcttttcttattgatttttctttctttcttcataatttattttccttgtttatgtttctctatctacattattttgttgtttggaaaatttaattttgtttgtcagaataactctagggctaggaaaatttttagtttatatgattcgttgattttcttgggttgagcttgcgttctttttttttttagaaactaggattttattagttacaaatatgtctcaatttgttccaaaatcacaatctcaaaattcttaaaattattttgtccttaaatttctgccgtcaaattcaaacttgaaacacatataccccaaaccattcttaaaataaatgatgtaaaaattagagatcatctcgttagaaccagcccagatgaaacctctagccattataggcgattcttacaagagataattgagggtagataccactttttgcaagaagcttcttggcttgagcctgtaaatttaattgatattcccttagcgaccaatatttttacctctagtcactgttgctttttcaccaggtgacttagatttttaattta

SEQ ID NO: 31225 - DNA, 2548 bp, Cannabis sativa
tgtgactagatatggaaagtctgtagtaaataatcctatttttcaggatagtgccgttggtgagcagataatgaacactgattatgctgcaataggtggcaaagagttgattgtggaagtaattgaggaggaaagtcaaactcaactcaatgtggttgattctaaacgtagacgtactgggaagattgttatgaatgaattgcctctcattaaggagactagtagtgggccgacccacttaacaaattttactatggggctagtgggacaagatgtggtaatggatgaggagttgaatggaaataatgggccagcggttccaaaaaacttattaggggtgggctctgggttccaggcccaccattcgccatgagtgtgttaagctggaattgccgtgggcttgggaacctacgggccgttcaattcctaaaagaccttgtaagtcaaaagagacccgattttatattcctttgtgaaacgttaagtatgaaggaaacgcttgaaagaattcgtgtgatgcttggctttgatggtgtttttacagttgatgcgaggggtcatagtggtggaattagttttctgtggagaaatcagaatgatttggaagtactgggtttttccaattaccatattgatgtgaaaattaataatgttgagagaggctcatggcgattaactggtatgtacggtgaacctaaccgagcttttcggttcagaacttgggatttgcttcgtacgattgctgatgaatctcagttaccttggtgcgtaattggcgatatgaataacattgcttctcattcggacaagagagggggcaatcgatatcccaatggtttagttgaaggcttccaacaagccctctctgattgcaatctgatggacttagagcttattggatatccctttacttgggaacgtgggcgtggaacaaatagctgggtggaaattaggttggaccgtgctatggctactccccactggtttgagatttttcattcgactcaacttgtgaacttggaaatctcaagctcagatcactgtccgttgttacttgacatggtgaataatgtgttaactgatgctcctcgccattttaagttcgaaaacgcttggctgcgtgaacccatgtgcctgcaggtggttcgggattcctgggctaccagtaatggagaatcaattacagcgacaattaagcgttgtggggaggttctgtcaagctggggtaatgaatatactgtcaacttcaaagatcgaataaaaaatgcaagaataatatcaaacgattgaagaggttgagagatgaggcttcggctgcagaattgaaaaatgcagaaaaaagcttgtcagaaattcttacacagcaggaggtgttttggaaacaaaggtcgaagcagctttggctccgtgaaggggattccaacagcaagttttttcatgccaaagctacatctcgtaagaagaacaatgctattacaagactacaaaacagttcgggtacttgggttgattggagttcaggtttgcaagacgttattcacatgtatttctctgaattatttacttcaactaatgctcttactgatgctgtggtggctggtattactcccttcatttcgaatagtcataatgaagagttgattcggccggttcatgaggatgaagttagaagggcgttgcttcaaatgcacccagataaggcaccaggtccggatggcatgactccgggcttctaccaaaaatgttgggatgtggttggccaagatgttgtgatgcaagtgaaaaacttctttgaatcaggtgtgttacccgacaatgtcaataatactaatattattcttattcctaaaaagaagaatgttagtagtatgggtgacttaaggcctatttccttatgtaatgtatagtataaaatcatatcaaaggtcttggcaaatcggttgaaaattgtgcttccacatataatctctgagaatcaatcagcgttcattcatggccggttaatctctgacaacattatggtttcctatgaagtaatgcactacttcaaaagaaagcgtaaggggcaaactggctatatggctttgaaactcgatctaagtaaagcttacgatcgtatttagtggggtttcttaatggctttgatgagtaaaatggggtttcataaccgattcattgagttgattcttcacacgatctctacggtggaatacaagatagtacatgggggtcatgaaattggtcctattgttcggagtaggggcattcgacaaggggattctctatctccctatttgttccttatttgtgcggagggattttcatcattgttaagaaggggtgaaaggagtggtcatattcggggttgtaaggttgctaatggtgcgccaacaatatctcatatgctctttgctgacaatagttacgtttattgtcgagcaactgagaatgaggctgataatgtacttcgtatattagacatgtttgaggtagcttcgggacaacaagttaaccgggcaaaataatcaatcttctttagtgccaacac

SEQ ID NO: 31226 - DNA, 2534 bp, Cannabis sativa
tggcaggagttacaagacatcctacgttgtttcgacaacaaagtcgaaaggctcagcacgttttcaggtgccaacaaattgaacacggaaatgttgctacaacagcccctaatcccactgctaatttggctaataaaggaaatggtgctggtcctagctttggtggaggacaaaacataaacaatagaggaggtaataatcaaggtggaagccaatttggaaacaatagagacagaggaggcagaaccaacaatggtctaaaacctacatgtcaaatctgtggtaagtatggtcatgttgcgatctacttctacaacaagttcgatgaagcctttatgggatatgctccaactagtgtcaacaaccaaaaacctccccaagatccagcacctttattgtcactcctaaaatggttgatgatggctcttagtacacagatagtggtgcgaacaatcacatagcagcagaaggcagcaacataaaccaaaagatgaaatacaatggtaaggatagtcttgtggttggtaatggtaataagctaatcgtaactcatattggttcttgattacttgagactaataatgagaaacccctgctgttgaaagatgttctcatagtgcctgaaataacaaaaaatttaattagtatttcgaaattaacatctgataataatgtttgtgttaaattttcttctaattattgcactatgatggacaaggaaacaatgaggaaggtacttcaagggaagcttagagatgggctttatcagtttgagcaaactccttccaaaagcaactccaacaacaagtccaactcaaagttcttttttagtttagcctccatgtctaagtcgaatgtaactcaatctattaagaatagttttatttccttgaaggaaaaatggcataggagatttagccatccatccaatcgtgtgttaagtcttgcgttaagtcaactaaatgtaagaaattccaagaatgaaaaagagcatttctgcgaagcttgttaatttggtaaatctcactccttaccctttaaaaccaacaatgatatgtctgaatctccccttgatctcatccacactgacatttcgggtccaacccccataatgtcaaacacaaatttcagattctacattcacttcatagatgattacagtaggttcacatggattgatcctctagaaactaaaggtaatgctctacaagcctttactcaatttaaagccttagtggagaacaaatttgaaaggacaataaagagactacacacggactagggaggtgaatataaagcatttaccaatcttgttattcaaaattgaatttattttactcacccttgtcctcacacttcagctcaaaacggtatagctgaaaggaagcatagacacattgtcaaaatgggtctaacttttcttgctaaagcaagcatgtcccaaaaatattggtgggatgctttcaaaaagttgtttatctcattaataggttgccaactcctattcttaataatgtttcaccttttgtgatgattcagtcaaagaagtcagattataagtttctaaaaacctttggcacagcatgttacccctacctcagatcatatcaaacacacaagttctaatatcactccattaaatgtgttaatctaggatacagtgatagtcacaaaggctataagtgtcttagtagcactagaaggatctacatatcaagaaatgtgatattgcatgagtctgattttcctttcaagaataatttcctcaacatccataagtctgaaacaccaatccaatagttgaggttccattctagtttgctactcttaatccttttatcactgactcccatagcaaatctcaatcgattgatgctaataaaactcatcttcttggtgcccacgaggtacaatatgatcataactcacctaacagtagtaataatcatgctgaaaataacttatttgatgattttaatattgaaactactgatgttggttctccacctcaagaaaatactcagcaacaggtgattgataatgttgtggaagaaagggcaacaaatgataatgctgtaacaagccttgctcctactcatcctatgataactcgggcaagagctggtatatttaaacttaaagtgtatgttgggcaagcaaagtggaatcacatcagtgaagagctaagttcagtaagtgaagcattggcccatgaaggattgagaggtgctatggatgaagaaaatacagccttggtgaaaaataaaacgtggggtttggtccccaaaacaccccatatgaacgttgggggaaacaaatgggtttacaaacataaatcgaactcaaatagctctttccaaaggtataaggacggattggtggcaaaggggtgcaatcaaaaaccgagaatagactatggagaaacgtttagccctgttgtcaaagcctctattatgagatttgtgatcactatatagtagtagcaaaaaattgggatgtaaggcaaatcaacataaacaatgcctttttgaatg

SEQ ID NO: 31227 - DNA, 1956 bp, Cannabis sativa
attattttctttaattttttttttgctcaaaaaccagctctccaacctgctatcagcatctaggagtgaagcaatctataggtggaagctaaggtaagaagtttgactattttttattttgaaaagcttatgtttaagggttgactttttgttctggaagtgctaggttaaatatgaatttatggttgtgtttctaggttggattaggagtgttttgaaatgcttatttgttagttttgccttgctgtgggaggtgagagtcaagtttaagcttttaagagatcaaagcttgagctctcatgggggattttgattgagagcatggttttgatttctgttacatagaaaatgttgtatggattatatatatgtgttatgtgaagtttagaatcatttggttaggtttggagttagtttggaggattttaaggttgaggaaaatcgtgttctgaaccagaattctgaatggtaccaactgaaattccgaatggtaccaatcggaattccgtttggttagtttttgggaaacgtcaaattttgtattttggccatggctttttacttgggtatccgttttagacattctatataccgtttcgaagcttgcgacgagatctataatgtggtctatgttttagagtcaaattatgtattttattttagggtatttttaccataagatttggtacaaaatcttagatcattttatgcaagtattaggtagtgttttgggataaaaacttatcggattaccgttgttgtgacatagggcccgagatcattgatcgttctccatacaggtcagccaacatacttgaattgagacttaaggtaagaaaagtataatgtaccacatgacatgacatgttttgtaattgtcgattgtctgattaggcaatgacaatgtgatgatactattaatgtgatatacaagtgcacctcattaggtgatgtgatgataggctatggcatagacttgcctgattagacgaggcagtatatgaatgcaagattatggcatgagcttatctaattaggtaatgcaacatatggatgccaggctaaattataggctcgcctaattaggcaatgcgatatatatatatatgaatgtcaggctatgtcataaatttgcttgagtaggcaatatgatatgtggatactggtattcatgttgtgcctgtgaggcaaccattataaagtcatgattataaattgaaaatattgttaggtttcttcctgtcggcaatcctgattaggcacgggcgaaagtgacatgtgagtgccaggctatggcacagaccgaaatcgttattaggtttcttcctatcggcgatccatattaggcatggacagcagtgacatatagatgctaggctatggcacagagtgaaactgttgttaggtttcttcttgtcagtgatcctggttacgcaagggcggcggtgacatataggtgtctggatatggcatgagctcgcttgggtaggcgatgtgatatattagtgccaagttgtggcacatgctcatttggttagacaaagcaatacattggtgcaagattgtggcatgggctcatccgattagttgatgcagcgacatcatatatgatgccagattatgatatggaatttcttgatttagcaatgcaatttatgattgcttttatttctatgcatatggctagttatgttatctatttttgaatgttattactcaatcaaaccataatagtgaagtgaataattggttattccatgtatcattattacttctcttgctgagtccttgtgactcacatgtactctgtggtgcaggtaaaggcaaaacaaagctagatcagccataagatgacaatcttctccagcaatttacatattgaccctaccggcttgcatgtcgagttgctaggagttgtttttgggatgtatttgcatgtattttgatttattattt

SEQ ID NO: 31228 - DNA, 886 bp, Cannabis sativa
aggttatgccgcaaatatctctttattgcattataaaaagtatattaacttttgtgttaattttaaattagtaacaaacaatagttagtttggcacgatttaataattttataataatttaaatttatattttaatcataaatttattatgtgaaaatataaaaaattgatctctaaagtacaaaaaatacttaattcacttcctgatttttactatttaaaaaattgataataaatttatgaaaaattaaaataataacaaaaacatttgaatagactaataaacttgtaaatataggggtattgtatttttaaaattcaaataatgaagaaaaaaacaacaattgaaacattaaaaaaaattaaaagaatgctcaaatattagtatggcatatgataacctataaacttataccttcataaatatacatctattcattcaattattttctttttttttctaattacttttataaataaaataaaaaactattttcaatttttgggcaaataaaatttagaaaaaaaaaacttatataaatttacttaaaaaaattggttttaaaaaattgtttgtaattgttgaaattaaaaatagaaatgtaaaatagaaaaaaataatcttaaaaaaaattaatctacaaatatataaataataatgaaaataattattatttataaataaatttaatctacgtagatattattttaaaaaattattacttctaaaaatgtaaataatatgttatgtattattatatttttttaaaaaaaaatacttattgaataaaatattaatcaattacccataaaaaaatattacattttctacggataaaaatgacataataaaatattattcataacctacatgaatcacatttaa

SEQ ID NO: 31229 - DNA, 1623 bp, Cannabis sativa
aaccacgattcaggagggggacgccattcacagaattccaccacatcgttggctgccaccttaagatgatctctaattttattattaacattaagtagcaccttctgagccgggcttcttgtttcagcatgcactgtagagtttcgttcagaccacatagtttccaccacacaaagagcagtgatcaacatctcttgaaaagttaggtttgggggtctattgaaatccgccataaaccaatctttccattgttcccaactgttcacatcgaccaattcagcacgaagccccataggtgagttaaaccaaatggctttggccaaattgcacttccaaagcaaatgaaaaattgtctcctcctcttccccacacacaggacaacacacatcagttagatccataaatttagctatcttacctattgttgggaagacatccctctctagctgccaccaaacgagttttagacgagggtggattttggatgtccaaatcaacttccattttgcattcgctggggcagtagttgtgacacccataacaatacgacacgctgatctaattgagaagagtccactaggttcccccatccacatccaggcatccgttgtgtcaaccaccggtagttggatattcaatatttccttcgcatcattccagttgaaccactttttaaccaaatccacgtcccatacccgattctcccttataaattgactcacccaagccactccatgtgttgcgtccaggaggggggtaggtcttgtattcaaagaaggcacccacggatcgaaccaaatggatggctctttcccattaccaatctttttacacacctgagtaagaagcaaggattagctcttagaactgctttccaaaagcttgagtcccccttcttaatttcagcatccaagaaacatcttccatgaaggtatttggtttgaataatggtcccccacatgctgtccttatccgtaagagccttccacgcccatttaaggataaaggctgcattaatagtttcgattcttctgaagccgaggcccccacacaattttgattgacaaagtgaactccaatcaattgtatgccaagtctttttattctccgagtcaccccaccagaagtccctcaactctttgtcaactcttcctactattttctttggaattacatcagaggctgccacatatgtagcgatggaagagcctaccgattgaatgagacaagctcgtcccgcctttgataataaccttgttttccaactttttactcgttgcataactttgtccacaaggaaattcaggtccttagctctcttcacctctaaataaaggcaatccgagatacaatgaatctctattcatcctcttcattcctagaatactcatgatctcctccgccttcttgctagggacaccttgggtgaagtgaaccgttgatttttgataattaactgcttgtccagaccaagcgcaataatcttcaaaacacttaaagtagcttttcgcttccctcactgatgctttgccaaacaatattatatcatcggcaaacatcagatgtgtaatggctggtccccctcttctaaccttgaaacctgctatctccccagcctcattc

SEQ ID NO: 31230 - DNA, 1680 bp, Cannabis sativa
tcttacctgttgtcctgcaatagcagagattctgaatccctgggtgttcctgaccaggtgccagtaatcctagtcacacaatttgggattttcacaaatagggttaacccctgattcgatactcataaaatatagtcatggcctttaaaactcagataatcacatagaactcagaacgaactttccaacgatatatagaactcccaaattggagttcggatcacaaagatatgcattttcaaagtttacactcaaactgcccagaaattcgagggcgggcatgcaaaagccatgccgcggcacctgggacaaatcccaggttccacccaaaggggcgggtcgcggcatacgcagaccacgctgcggcacctgggttccaaacccagaaactagccacctccatcacaaaaaatcagcacaaacacaatcaaactcattccaattcataaccaaaacttccaaattataaactagagctgctagcaaacattagggactttaaacacataattatgcatcaaaattcaacataaatccccaatttcagattgcatataaatcacataaaccccaatttcaagctctagaacaataacttcaaatccaattaactcaatcaattttccagcagcaaaatacctttaaacacatggattcaagctagaaaacatcccctaatactccatctaaagcttaaccaaatccaaaacatcatacaatcaaagattcatgcttaaataaactaaaggtcactaacatgcaacacaactgcatcatcttcaacaaactcatgattttcaactataaattcagcaacaataacaaaaatacaaatctgtaaaaactacctcaatttccaattccaagctatgcataattaacccccaagaatcaagctccaaccaagaaatttctttccaaaatcaaagagaaaataagtgagggtttgagagagagagagggggtcgactaagaggggatcaaaagccagaattttctttttcatttccttaaaattcaacttttatcaaagtatcaataaaggtcaaaagaccattttgcccctagggccatataacattcattttaacatacaagggttaaaatgacatttcatgcacaattcaaaaccaattaatttcagattattcaccaacatttaaatgccaaataatttcaatcccaattgcattttgggcctgaacccggttcaacccgaaacaccctgttgtgactataccgcgccaacttgtcagaacacacctgaaaaagacaacacaggcatactatataataatatagtcccataagcacattagtaaattaatttcattattttacccttcttgggtcaaaattactaaaatacccctagctcaccaacgggctcttatcatagcataaatcatattaattcacatatattgaactatgtaataatacaattccttaattattcataattatctaattagagttttgctaatccatttcataactctaggttattataattaccccctccttatagaaattttgtctcaaaatttacctgaatcactccgcatatttctgtgcacatccgtctcgagctcccaggttgcttcttccactttattatttctccacaatactttcaccagtgcagatgtcttgcttctcaagactttttctcttcta

SEQ ID NO: 31231 - DNA, 2463 bp, Cannabis sativa
  modified_base (2020)..(2024): a, c, t, g, unknown or other
taattaacaatggcagccctgacgaaatgctcgagaggagtctcaattttaacctctcgatttgttcccttctttttttctttgctctttacctttctttcaaatttacatataaacaaaagtcatatttatattttcccttttcatctcatgtggctcagcattggggtctccagaaggtcaaacaattggcgactgaccttcgcaaatccattcaataacgcgaagttgttgccaaaccatggaatggctcccagatggagattacacgactgaccaaggatgatgaggagttaaagaggaaccacaaggcagagcttgaggtagctcaaaaagaggccaaggacaaacgcgaggtcggccgaaaactccaagaagaacttgatatggccaatttgaaccttgagggagccgagggcgatgataaggaaaggtgcaacaatgttgcaaactgattcatttacaaagcctggctggctaaccctgacatggagttaagctcttgggtgaaggtgccaaggaggttttggcttattgtgagaaacctaaaaaagaagaggaagagggctccaaggaggaagaagaagatccatccaagtctcccactatgtagacttggtttttaatttgtgtttgttttttttagaaaaatgtccttttagacgagacaatagttattcttattggcatttatttttttgtaaggacacgtttgcattatggatggccaactttgctttatatgcatctatctttctcttataatgcctcgtaccttatacttgaattaactatattttttcattgcattctaattcacaaatcaacgtttatattttgatccaatttaaggtactttgagaaagcatttccactattgtcgcttttcctttgatacacttaggtagttattaatctactatgtatatgtgcgagcagttatattcttcatatgcttttcgattcccgagcagttatagtctgccttattatacgcgagtagtttactatctaccaaatattatgtgagcattttaaatctaccatatataacttaaaattaaacttaaacacactttgaataattcaacttataaactattttctatatttttgattgctcatatgaaagttaggccccctattcatatttaaggttaagtattatttttctaggcatttctgtgcctcgtttataatacacacctgaacaatgtgagtcgataaatattcaactctgtatgtgagttgttttatgagttgatctcatttacaactgctactttgattttcttatctgaagaaaagattcttcaattttttgactttatattggtccatagacaattttaatcaatttgtcctctcttttatggaaaaaatttaaaatgggtgggtttgcaatataatatgtattttctagatgaattccagttgatatacacatatatatgcccctcaagtaattttaaagaatacaactttgtaattacttgaacaaactttaactttattaataatgagaatttaaaaattacagagataaatacaacatttacattttaaatctactagtaataaggtcgcaaatgttcaaagttccagtggttttttattagctagtcgttaagccaatccaatttataaaccttagttcccactactgcctcgataacatagggacctttccagtttgggttaaatactcaagtacatgcatctcgtgtgtttgcaaatactcgtcttaaaaccaaatcttcaactttaaagagtcttttcttaactcttttgttaaagtacctcgtgattcgatgttgataagctgcattagtaattcccgactcagtatgtctctctttaagtaaatccaaggacaacttaaggagaattcacagatagcatgcatatcacacatataattcaataaaatctcaaaaattgtaaaataataatcataacacatattttcatgaaaatagggtctataaagcataaaatacataaataatcacatagtcannnnnattagtgctaagtgtcccactaatgccatgtctatgtataacggtcattacactggtgatccctggttgcaggcttgtggcccatggttgcaagcttgttgtccccagttgcaggttgcgggagaggggttgttgcgtactctatgtcgagtcctcaaaccttacaggtccgtatacgatgctactagtacttcctcacatttgtaggcttcagaaggcgtggttgtatgctttcccttagacgccttatcccttgagtcctcacccaatatcatccttatcgatgtgtacatacctctcattttatgcttatagccccttgagacgcctttttcacacacttgcatggctcgcctgtaagccccccatgggctcgcatgtgagcccccatgctcacacacacacatgacactccctcccacatgcacacacggctcgc

SEQ ID NO: 31232 - DNA, 1422 bp, Cannabis sativa
  modified_base (1273)..(1287): a, c, t, g, unknown or other
atattttttctttaatttttaaataaagtaaaaaaatacttagcataaattttagtatacatgcctcgcacgtaactttttgctagtatatgtatatgcttacttagaaatgcgtagtgtatttttttttataaaaaaataattttaatgataattcataaatacctaaaacttataaaataaaattactaaaatatagacgtggtcctaaatttatttctaattttggaaaagtttacagaaagccatgggaaccaagttgaagttcagtacatcctttcatttcagacggatggtcagtctgagaggactattcaaatactagaagacatattgcgatcatgtgtgatagattttgagggtttcaggaataaatttctacttttgatcgagttcttgtacaataacagttaccaaagtaccataagtatgacaccttacgagatgttgtatggtagaaaatgcgattacgtattcactgggatgagaccggtgagagacgacaccttggacttgaagcggttcaaaggactagtgaagccattgaaaatatttgatcttgtatgctttgcttcacaaagtagacaaaaaagctacgttgatccgaagcgtagggatattgagttccaagtgagagattctgtattcttcgagtatcacctatgaaagagatacgtaaattttggaagaaagagaaactaagccctagattcattgatccttttaaaatactggaacgagtaggtcaggtagcctatcggctagctttacctcctgcgttgtccagagtgcataatgtgcttcatatctctatcctgagaaagtacgtgtcagatccgatacatattttgtgctataatgacattgagcttcaagaaaacttataatatgaggaaacagctatccaggttttggaccagaagaaaaatgtacttcaaaataagaccattccattggttaaaatattatggagaaacaacaaggttgaggaagcaacttgggagttagagtcgcagatgcgggagcagtatctcgagttgttcaggtaaatattgagtacgaaatttctaaaaggagggaatggttgtaatatctcggaaacctaattatgaataattaggatttattatatattatggttgatcaagtaataatcagtaagattatgatcttactaatctaaatttagcataaattatgaattttgccataagtagataaataagcgtaatttatttgaaatatgtgggtattgttgggttttgtgccctannnnnnnnnnnnnnnaatataatcagatttacaaattaataaagataatttttttttatgttgcatggttcaaatgatttatttcatgattgtttaatgtataaaatctattaagtccagaacatatttatttattcatgattatagtgt

SEQ ID NO: 31233 - DNA, 1182 bp, Cannabis sativa
  modified_base (950)..(966): a, c, t, g, unknown or other
  modified_base (1152)..(1156): a, c, t, g, unknown or other
gtaacgcattactagttatagtatgtatactatgaagaagaatatttaattttatttatttgtttctttgttttttcaatcaaaaccggagcagtttgattatgtcactattgtctgatttcaatgtcgtgctatttaaaattctatcaaatgaatcaatagttttctattctaatagatattgaatgctattttactcaacactaactataagataaataagcagaaaataaaaactaaagtataaaaaaaaatgaatgaggggaagaaaacattctaattcgaaaaggggtcacttgtattcctaatctttgacacaagaaaagaatttttccacaaccttttcttatgtcgaaataattattattcttaatcccgttcgttaaagattcatattcgccttgtagtttctatattttctaggtttatcataacccttctttaagatttattctataaataaagtatggacggatactatcaaagaatagatgttctgaatcaagtaattaaagttattttttaaaaatatcatcaaaatgaaactgtagttttttgaaacattcgaaaaaaatctttttttttttttttttggttatcatttagatttagacgaataaaatattatgattattaagatctcaacgagacatgccccctctttctttgtcttttttgagggggatttcgttgagttcttacgctttcatgtcatgtctacaattcaatttatccaattacaaaagggatgaacctaatccagaatataaactataaaagaaaatacagagtaaaccaatcacaagaatatcaactacaatacctattatccaaaaaggaatccttctagtagtatcaaccatttgtcctacttttctctatattttgttaagtggtcgtgctacagacataaacatccattgagaattatgagatgatatccttctgannnnnnnnnnnnnnnnnctactattatttcctattcttcttcttcttcttttaattgaataaataattgaaaaattaaatagctagcagaaaaatgagtaataacccttagtagagattggtacgattaaatttaacgttttgttcgttcgggtttgatggtgtcgtagctctatgattcagatgttgggttttatgccctannnnnaactccatttcaatgtaatctatttt

SEQ ID NO: 31234 - DNA, 5069 bp, Cannabis sativa
aaatttctctttttattattcgttgttggatcaaaatctaataatttaatatttttaaaattaatatttatagttaaattgtttagtaaccggtaatatttattaagaagtggtccacgtatatatttaaagaaaacttgaatggagagtatttaataagatgacacttaaataattattttttgcgtgtatataacggatttttcaacctccacccaagtaaattcctataattaatttattatatatatatacgatatattaaatagtattgtatatatttaataatttaatatatttatttatttttggtgtaatattttattatgcaatactaaaaaatatataaaaattatatgacttgatttaattattatatataatttttttaaaaaaaattaatatgaagtaaatatatttttataatttttattagttaatttattatatttggtcattttattattttttttaaaaaaaaaatagacatttactaacttagttcccaaatttaaagtcattttgcatcttagtcctttattaaaagaacatttagaagtaactgatactacatatttttatctagacccaataatttagaattttagccttatgtgtgccctgtttaagataataatagagtctatactgacgaaattagaaaaaaattccagttttaaaaatattgggtacttgaaataatattgaatttatgtcacttataaacttgtatttacccaatttaaatctcataattgcaccctataaacacttataaataaatgtttctatcccatgtgagactctttttaatatcaaacagcacttttcataatttttgcaaaattcacagcagaagttccaacattacacaactaatacctacaaccaatactcatattgtgaacctttgaaatacttgtcatcattatgtcaaagcaatattctttttgttttctcccacatcatatcagtgtttcccaacttggaactttgaagtctttaatgtgtaattattcgtaccattttacttggtcttgagagatttttcatgtatgagtgagactatgaatatgtgattctcacgtgtgaggccttacgcgcaaagtggctgccaaaactatataaatatcaaactccatcctactactacctactcataatttccaaccaaaaatatgggtttccattctcttaattatattctcaagttttcaatcttaactattttcatatgtcttaactccatgtttctaggagttaggccagccaccttaaccatctccacagacaaagaagctttgatctctttcaagtcaactctaaattttgaccatgcaaccaatgataacactctctctacttggacccaaacctcatcatcatctccatgcaattggactggtgttgcttgcgaccaattgcgccagagagtagtgggccttgatctttctgggcttgggttgtctgggtccataagcccacatattggcaatctctctttccttgattctcttcaactccaaaataaccgtttcacaggacccattcccaacgaaataacaaagctttttcgcctgagacttctcaatgtcagcttcaatctcatcaatggcgtcctaccctcgaatctaaacaacttgaaagagctaaaagtcattgactttacttataacgacatctcaggaagactccctgaagagcttagtctcttgacaaagcttgaagttttgaagctcagacagaatcatttccatggcggaatccctcagtcatttggcaatctttcatccctcactgtcttgaatttaggtaccaatacccttagcagagacatacccaatagtttgggtcgtcttcataacttgaaggaactcgatctcaccattaacaatctcactggtatgatccctccatcgatatataatctcacttcattagtaaatttggctgtagcttcaaataatctctggggcgagataccgtacgatgttggggttaagcttcccaacctcttggttttcaactactgcttcaataaattcacaggaaggattccagggtctctacataacctcaccaaaattcaagtcattcgaatggctcacaaccttctcgaaggtccaatcccaccaggtttgggaaacttgccatttcttgagatgtataacattgggttcaataagattctcagttctggtgacggcactggcgatggtctgagcttccttacttctttggtgaacagtactcggttaaagtttttagctattgatgggaatggtttggagggtgttataccagaagccattgggagcctctctaaggaattgtcaaaactttatatgggaggcaaccgtattcatggagagattccccattcaattggtcgtctttaaagtttgactttgttgaatttaagttctaacttgatcactggtgagattccaaatcagataggtgagttaaaggaagttcaagaattgtgtttggctgataataagctttctggggctattcctaggtctttaggagagttgaaaaagctaaatagcattgatttgtctggaaattctttaaatggttctgtcccaactagttttgagaattttcagaacttgctttcgttggacttgtcaaacaataagctcaatggaagcatcccaaaagagtgtcttaacctccctagtttaagtactgttttgaatctctcaaaaaaccttttgagtggacctttgcctcaagaagttgaggacctaaaaaatgttgttacaattgatctttcccataaccttttgtctggtccaattcctaattcagtcaagaattgtaagagtttggagaatctattgatgagcaataatagatttgtaggttcaattccaaaaggtttagctgaagtcaagggtcttgaaatgcttgacttatcagcaaaccaactttctggctccattcctaatgatctccaaaacctacaaggcctcaagttattaaacttatcatttaatgacttggaaggaatagttcccaaagatggagtgttcaaaaacctttctagtgtccatttagaagggaataagaaactttgcctcaaatttccatgcctaaattcaaaatcaacttccactagaaaaagattgataaggttcactattataggtgttttcacagccttaatactcatatcattatgtttagtacttggtttattgttccatctcagaaaaaacaaatcagccaaaattagaggggacaaatcttttggtgaagtagatcacaatgttcaacatcagatggtctcctatgaagaaatacgtcgatcaacagggaattttagtgaggaaaatcttcttggaagaggaagctttggctcagtttacaaagggtatgttaatctaagagaagggttagttaccactgcagtaaaagtccttgatatactacgaactggatcttcaaagagttttgttgctgaatgtgaggctttgaggaacgtgaggcatcgaaatcttgttagattgatcacatcttgctctagcatagactacaaaaaatggattttcttgccttggtttacgagtacatgtgcaatgggagtttagatgattggatcaagagaaaaagaacgaaagaaaatggtgacttgttgagccttattgaaagactagatgtggccattgatgttgcttctgggctagattatatgcatcatgattgtgaaattcctgtggtacattgtgatataaagcctagcaatattcttttagatgaggattttactgccaaagtaggagattttggtttggccaggttgctcatgatggagaacaaagagacaattcaaacttctattagctccactcatgtcttgaagggttcaattggatacatacctcctggtaagtgtgtcactcactcattccttatactcttaattgttatactatacacacaatacatttagattatatgagtatttaaggtttagatatttgcaactttataatttttaactatatgctagtttgttgcaccttctagttccaagttatggtctttataaaggaagagaagagtggccttacattatcaactattattattaacaactcaatctttataataatttttttttacaataaaactattttgataattacattatgtaagtactttaaatgtctgcagagtatggttttgggcagaagccctccacaggtggagatgcatatagctttggagtgttgttattagagctcttcacaggtatgagtcctacacatgaaagtttcacaggagagttgaacttgatcaaatgggtagattcagctttcccggaaaatttgatgcatgtaatagactctaatctattacaattttctgagaatcctaacaataaagatcatgaagctataataagtccagagaagcaatgtgattgcctaagcagagtaatagagatagggctctcttgtgctagagattctcctggtgagcgcatgagcatgagagttgctcttaatagtctgaaagcttccaaacataacctccttaaacactcaaatatggattgttgatttgtttcatcaacaactatgtgttttattttcaagtattatatttgataatgatgtttattagggtgttaaaaaaaaaatatatatatatatatatatacacatataaggatgaatggtctataattaaaattgagtatctacagttgtaaaattatattatattggtttttaaataagaagaaaaaaaattatattatattggtttttaaataagaagaaaaaaaaaagtaatattttcttgaaattatttatgttttaaatgttttttttatatatactctaaattataatcaatttaaaacgtatccttgagtgagccgtaatgtacaatccgtgtatcatgttaaaaaaatttaaggaacttattcacattactgaaaagtttacattaaattctagggtaaatggcggcaaaacccccaatactttcgttttggtttcattaaacccccacaacccaaatttctgcgggtaaacccccaatactcg

SEQ ID NO: 31235 - DNA, 3387 bp, Cannabis sativa
  modified_base (37)..(47): a, c, t, g, unknown or other
  modified_base (195)..(208): a, c, t, g, unknown or other
ttttatatatttttaatttttttcaaatataaatttnnnnnnnnnnnataaaaataagttatagtatttgtttattatgttttatcaaatgtaaaaaaaaaatagcaactcaagcatataaaaaaaaatttaggttgatgttgtttgttaatattaaaataaaatataaattatttttttaaaaaaataagagannnnnnnnnnnnnnattttattataattagtttatttattatttttttttatgtttttaatatgtaataaatcagtaaatatagttttagtaaaaaaaaattattagtcttttaatcaaaataaatttttttaatatctccgctaacttttcatctacctctaccatccaccttgtatattattaattaaaaaaacgattactttctaattttataattttataataataaaattataatttttctccttccttactgttatatactatccatctctcaaactcaaatctatcagccgatcaactcctttgatgtcaatcgcattgatgatatagaactttggccattgaacaatttcttaaacgattgaaggaacgataagatgatctttacccatcatttaattgcatgttggcaacgatctaatgacatcataaataatagctttggaattgtagacttctccaatgtggatctccgtatgggtggtggtgataagattcattgagttttaattcttcggccaccttctagatagaatttcgaggatggagaagcaagcgggagaatgttaatggagactctaagattagagatgcacacttccttaggatattgtactgttcgatctcgccatattgagaatatagaggttagccatattgacaaatgtatatttaattatgtcatttactataactcctatacagtagacttaatatacaccaaccaaagtaatgttactcgggtaatttcatagttatattaatttgtgagaataatggatttgtgaaagattctctttttattatggttcatggtgattattttgagtttaatatttgggtgattgatgttagagcaaattaattaagctaagataaaagtggcctctccacaagctatcgtcgaaaaggagccctctttcacaatttttctcaatcttttgtcaattttttttttgaagattacttgatttagtcgtagggtttttgatcagaaataatggtagatgaagcgggttcccacaaatcgatgaagccaaggattcatatccaatcagacaacatcaaatctggcgcattcaaattcgagaggtatttgcctttggttttatcaaaatgtgatgtatacaaattaatgtattgtttattctattgggttttttgtgatttcaagcttccaattccgatctgttaaatgctcctctgatctccgccaccttgttgctccacgctcattggccaataatggtgatctacgacgcagtaagattgaaatccacccattaagagtatctttatttttcttatctataacttttagacggatgttatcttcaattatcaataatttggagattgatttttaattttttttttattttacacacatttaaattgtgttttctttagtattttttttttttgataattaagttttttatttaaacgaagcaagctagtgaccacaaaagggggccacttcccttagaaaacaagaggacttagctttggatatccttgcccagcgagctaaggcatcagcacaaacattttcctgtctaggaatataagaaactctaacattcaccaaggacttacacagatcaagacagtagttaaacaaagcataggtattccaaccgaaaggaagctctctagcctcaaaagccaaagctgccgatttggagtcagtctcaatccacacctttggaaagttccttgagatagccaattgcagggcgcaagcgatacctaataactcagcttcaaagaccccctcaaccgaagcaaagtcaactgagactaacgaatccgagggcatcacttgctggagcacagccgcaaaaccagcctctttatcaaccactgaagcatccacttgaacacgacagaactcattgatgtcgaggggttgctgcatagttgggacagtgtccataaactccacctgatcttgccaaagcttcttatgcgaaaattctgttgttcttcggatgctgtctttgaaaaccatctccacattacattgactctcgttgaaaactatgtcatttctccatttccagatcatctcacacgcacaggccacaaacaattgaaattcggtgtcctaaagattgcaccaccaagaaccaaactccaggatattgttccattgaaacgagtcaagtctgataccttttcgaaaccacagacccctggtgaaagggcattgacagaaaagatacagagatgattcattcattgaattgcagaagcgacacaaaggattagaaacctggataaaacttgttctgcttgttgtgggaagaatatccgaaaataatctccaacaaaaaagcttcaagcgagggtggatatcagtcttccaaagtttcatccaaatttttgattcatcctttagacgatgtttttggctgttccagtacgcacttttcactgaaaaatttcctgatttggaagcattccaaaatagtatgtccgggccttcttgtaacggtttgatcttcaagatctcattagcaatctcatcttcgaagcaatctctgatgaggttttcattccacgatcgggttcctttggagaacaaatctctgactttccatagagcctggttacgaacaaattgaaagtgttccttgatatctgcaggattacgcctcggaatccaaggcctatcccataattcgcactctccttcagcaattaaaactcccgcactctccacacatagtttcctagcatgtagcagacttttccacactcttgagttcgtatcatgttgttccacttgccaagcgttaactttgaacaatagtttatagtttatgtttagataatcttaagaacatattacagtttatttataaattatattatttagatatacataataataatctcacctaataaataataacatttttctcttttattatataacttttatataaattagaaaatacctaacataaaatttaatatacgtgcctcgcacatagctttttactagtatataaaaaagtgactatctaactatttttattaatttaacagatatattttaaaaataaaaaaatattccattaaatttaacgaatatttttagtactgtttgttttataaatatataaatagtaggggtgttcgcggtgcggatggtgcagtttttgactattttttcaaac

SEQ ID NO: 31236 - DNA, 2696 bp, Cannabis sativa
  modified_base (27)..(34): a, c, t, g, unknown or other
  modified_base (1500)..(1501): a, c, t, g, unknown or other
aaaatagattacattgaaatggagttnnnnnnnnggcataaaacccaacaataacattcccgagaaacctactagtttcctcttggacaccctaccccattctttgttggggatttaaggcatgaatggaatatcaacgtaacaacctttaagtcatacaaagttggtcggcctaacatgacgttgaaggctaatggaacgtccaataccaaaaattgtgccattatagttatgcttgtcggagctttcccaacagtgaggggtaggcgaatttgtcctagaggtgcgactccttggccgaagaagccatacacgggctgaagacagggggttaaatctttgagttggagtctcatcttttcgtatgtggtcttgaataagatgttagaaaaggctccattatctatcatggttcgggccaccatcttgtttgctatctaaactcccacaactaacgggtcgttgtgcggaaatatgatcttgacagcatcttcatcattaaatgttatggtgggttcccctgcccgtgggatcttcggcttcctctcttctgcggctaggactacttcttcttgctcgtgctgtaccgttcgggcatacctttcccgagctttgcccgaatctccagctatgtgcggtcctccaattatgacttggagatgtccatcgactggtggtggtagcaagtcttggttgttatcgcccctctggttatgatcgacctatacatacttttctacgtgcgaattatttttccttatcatgaattcaatttctcgctttagattgttgcattcattggtatcatggccttaatccccatgaaaacgacaaaactttgtcatatctctcttgctgacatcttttttcatgggtgtgggcttcttgtacagggttattgacagagttgccatataaacactttctatatcctccattacaatggtaaatgcagtatacttggaagtattctcccggggagcttattcggtcttgccagtgaactttccctttttcccatgcccttgcctattatttttgttggagcgtttaccacttgagcttgaattgctcggataatgggggagttggacggatgtcccagtggaaagagcttttgactggctaggtttttgttcaccttttgttcgctgaatggcctcttcaagcttgataaaaccttctgcgcagtcaagaaaatcactcatcgagtctactggtccgttcttccttatgtccttcaaaagttcgccaaggacttcaatggcccccagtatcgcagacaactttccgtcctcagttacccattcaaccttagttgcctccgtcatgaatctactgatgtaggcttgcagaggctctcctggtctttactttacctcaacaagatctcataggtgtaaaggaagttggcgagaggaggagaattgtgcatgggactccgaggagaaggccttccatgagtataactttcagggcgccaacttgaaataccattgnngggcggcttctgagagggtggtaggaaaaaccctacaacatacgtctcctcgtactccttgcaggtccatttgcatctcaaaatacttgacgggggataagggatcttccttcccagtatacatcttccaagttggcatcttaaatttgtggggaaattccaggagattaatctcaagggacaaaaggggttccacgtgctcggtcaacctcaagatcattgttcctctgaccggccaggccttggaacatatttttttagttcatccagttgtgcttgcacggctgaactaacctgttcggcctcttggccgaccagagtcacatcagcatctttttgagcgggattttgagcgcgggttccgggttgcatgattggtgcgtcaagctgatcgtgcactcctctccacctattctgattgttcctgagatcatgagtcgtccccaatctatcgaatacagaaacgtctagctgcctcagcgactgattcatttggccaatttgctgaccgacacaattaacttgatttgaattattgagtatgacttctcctgatgaattactagacaaggtctgctcgcctaccacttcgcccacaggtggaacctgtgaccagggatttgacggctgaacatttatagtctgagaggtattcatcgcttgatcttcgtctgtttcaccaaaggggatgaaggttacgggttattgcccgacaatctaataagcttttcatatcaacacagtagactgttgactacgattgtcaatgactgcttgctgaccccttaacgtttccatctccttttctctccattcgtcgaacatgcgcctctgctcttcaaacgcgaggttcaccacagcacgaagttcctccttatcatgatgcaggatgttggtatgaccttgcatgattccaagagcagcacggagattctggatttaagtgtcatctccaatggttgtttgaacattggtagcgggcagaacgactgtgttatcaatgccctggttggctgcagaactgatattccaaatctcttgcacaccaggcgcgatttcatcctcaggagttgtcacaccgtgacccacagttgattgctgtccgggatttatggttggcgaaacccttgtgttcccttggttctgcagtgcaggatccaccgcctgtggatttgctggatcaaccacgccccta

SEQ ID NO: 31237 - DNA, 1254 bp, Cannabis sativa
cttttaaaatcccatactaagtgtaatttcctaaaaaaaaaacaaggcattcaacgtacatacgaaacagtagaaagatggcaaccatttctgatgtcagctcaaataaataaataaatgaaatggatgatataggtttagatcgatagatatgtaaggcaaaataaaaacaaatataagaatgagactaacaatcacctcatatatagtatatggttaccagttttctccgttgtaagtggtaaccagctactagtttacggggaaaaataccgttgtcgttcttgttaaagtcaccacggactttaatccctagattttacttgaatggaagactagtattggattaaaatcttgtaaaatctttaatgtgctcgtgtgaacacaagtgattattttaataattgtgggacattaatattaaagtatcatagtttaaatgtatagatactttgagtgatgggtttaactatcctctcaaatgagagaatggtcttcaactatcctctcttcctagagtttggtcttttaccttcctctaagcctagcaactcctttttctttagtttttcctgtctgtttccattcggtttgcatcattctgtgttttttttctggtgtgttttaaatcctctagtttcttaagttcccatcttttccttgtcctgggttttggtttttccttcttgggtttttcctagccgttttgtctttttgtctcttctgttgtgagtttgttgagagtagggtgtgtgtttcctttgactctctgtcctcggtgttggttttgtggggtagggggatctggtttggtgagggttggtggagtgttgtttgtttgactgtgcggttttttctcttgtcctttgtggttctgatttatggagctagttaatgctctttgtccccctaataaaggcaaaagtttctcttgtcttgaagcttctgtcatcctttctcctagctcttcatctctcaaggctctctcttctctttgtttgtatagcaaagtggtggcacccatggtggttgatgctaaggccttaactgaggttgtgaccagtcgttggcttaagaaggtgactgttttttctcttgttgaagagtcatctatgtttagctgttttaaacttggttttgaaagcgaagaagacagtgaatgggctttggagcaggggccatggtcttttaaaggctacacctttgctcttagaaagtggatgcctagtgttgaaggaccaagtctggtggagt

SEQ ID NO: 31238 - DNA, 1358 bp, Cannabis sativa
cacaaatggtttcactgcagaatagtttaaactgatgagacagtccaacctttgctaatatcataaaaaggtatgaaaatcacttaagaagactctggtgctggttgagtcacaccgaacttgaccaacaacttgctcaaagagtcaggggaacaaacttggtacttcacatttccagacggagaaaggtagacctcagccaactcaagtttctcagaagtaagacttgtgctatccatggtcttactcaaaaccttgagggcgagctggaccgcctcttcccttgtcatttcgtccttgtaatcctgcttaagcattgattgtgctgcttggttgtttgcaccaatagcagcagctttccagccaccatagttaccgctagggtcactcatgtaaagctggaagccgaaattcttgtcccaccctgcaaacaaaaatgaaacgccaaagggtcgaaggccaccaaactgtgtgtaaccttgcttagtgtcacaaagtgactgaactagctgctcaacaggcattggctcttggtaagagaatgtgtagcgttgagcttgaactcttgcagtgtttatcaagatgttggcatcggacattattccggccacagcacatgcaacatggtcatcaatcttgtacattttctcggtggaagttgaggtttgcaggagtttggatgttactttcttctcaccaaccaagacaacaccatcctttgacaatattccaattgcggtacctgcattaccaatggcctccattgcgtactcaacttggtagagacgtccctcaggggagaagattgtagtacggctatcatatcttctagacatctttacttatcactgtgatgaagcaaaaaaggataaatacattttcgaacaaaagttgactagaaaaattgaaagatgacaaaagcaaagttctaaaagtgatctcaactcaaataaaaccaaagacaacaacaggtcttaacattaacaagagtaccgaaaaattcaatgaagcaaactgtaagcaaaaaacacaggcaaagtacatctatgacattaacaattcaaagaaacaagctgtaaacaaaccaatgaaagcctggaaaagaaagaaacacactatttatttatgaatggttaacaaaacagtagatatcaacttcaaagctataatatcattatggtacactatcttaatagtaaagaagctctatgaaacacactcttcaaaatgagattattgtaacatctactttcctagcatacgatctcatagcactcaactaagcatgaccaatacacaagagccatttttagaggaaaagtgaaatcaaacatacaacgatatccgtaagaatataa

SEQ ID NO: 31239 - DNA, 1921 bp, Cannabis sativa
aatttaatatgtaaatatctaataatttcagttgtaaattagggtttaagctctcctatataaagagccttaactcaattctagaaacctaagtttaactctagcctccaagtcattagctctcaactctaagtctgaaaccccagccttcttctctctctctcttctacacgcccaaagggcttctctcttcctctctctcacacgcctctaaggccatatctctttctcattatacatctatctacttgattcatactttgtaaccttaaagagagctatatcagatcccacctatagtgatctgaatagtattatctctaggtattaatacacaaaaagaggagtaggtcattacccgctaacaaagggggccaaacctctataaaaatccttctgtccttttactttattgttcttattgtgtaacgtgtgacaaacatcaaattaatacgacccaggtgttagttggcctctttttgcggtcaaccgtttggtgctttcattgagagcaatatcatatctgatcaaacactatagttaacacgagaagaactttgattgtaccatctgcatctttgggtcttcttcaagacccactgattgcagatcttgatgtccatgttccagacacgactagaattcccatgaatactgcagatgtggtcacctctgccatctcggtaggcaccacggatctggccactacaactggccaaagtaacataaacatcccagtggatctgaacaataggcccttacctccaagggaggaccctccacaggtgcctcccactgaagaaaggacccttgggaaacaacccataggaacaacaattggatctcgtcatcggtactatgcaggagagacaaggaccatgatttggtgagcctgctattggcgagccccatgtggaccacagagaagatctagagttagcctgacttagagaggccatctaccaagctgacctacctgaagaaccacatgctgctaattgcaatatatttgctcagtagagacgctaattcttgagatggatggatgaccaagagtacatccttcgatctcaccaggcgaagttggattaccgcaacaaagaggctagcgacctaataaggcagtccaatcagagaactaatggaagaggccaagatctcattagaatatgcacatatggatttttattttctattccatgaaaagtcaacaaaaacataatgatgtcaggtttgacaccgagacttgacatattaggttgaaatataaagcatgacggtatggaagtttggtggcatcaaggtaatcattaagtgttctctgttgtattttattattattattcattgcgaaaggattaccgattattgtgtgaacgggagaatgagtagtggatggattggaaaaagtttcactagaagtggttttgtcaaaagaagagttactcatccactcttgtttgcttttttttaaaaaaaatatatatatatttgttcaacttgtttccaaattacgttggaggttttcagaatggaccttcacaacttactagaactccccggggttaccaagtaagtgtgaggggttcatcaaccttttttgaccaaagacctttctaagtaaaattgagttgtttatttttgatagaaaaagattgtttttgttataaaaaaaaacacaaaaaatgtaatattacaatgattaacacaacaaatgttccaaggccaattagaaaggttgttaaggtatcgctttatctcaaccttgcctagacagaacagaggtttccaggtaaagtggagggtacactaacataaactttatttaaaccttatagatagaacaatcttagtttgtgtcatatacaatattacaccgttgtacaaatactaagcgttttatgattaaaatgttagaatc

SEQ ID NO: 31240 - DNA, 5751 bp, Cannabis sativa
aagccatcagttctataaaggatctccttcatattattggttgagatcctttggatatctttccagaagtcactcaatggaaggatgccccccagtatggtcatatactagcgttcttttattaggcctttgaccttagtgccttcagccataaacctttggatgtaatcctttaaaggttcaccttgttgttgtttgaccgcgacaagatcttccaactacaatggtatcagtctcaaggatgagaactgggtgtataattctcgagaaaattaattccaagaattgaaccttcctggagccagctttaagtaccattactaagttgtttccaatagggttggcaggaagatttgacatcgaacatcactaataatcttttaagattaagttgcatctcgaagtacttgatgtgtgctagtggggcctctcatccaagatacatcttccatactggcatcttgaactttggcaagggcaaggtattaatatatgcgaagaatggtgaaccccttgacttatccagttaaagatctgaaggtttcgggccaactaggcccttgatcatgtctcttatctgaaccatctatgcttacgtagaaggatttgatgttgtaggggccttactaattggaccttcttggatgagatgtagccctgaatgggctaaagtctggtcgatcattccttgagaaagggtgtaggctggctagccctaagccttgtagttgtccttggttgccactcttgggtaggggaactagccttggccggccagccctactctaggctgctgctcatggtcggccaaccctatactaggtagggcctggttgtccgttcttccctgattggctagtgcagccttcgtgttgacatggggtagatcacaccatttgttggagttaggtggatataaatgtctaaagtggctagactcacttcttaagttgttgttatcctgggtgtttccacctgttcctggacctaaacagttaaagattggcctttgggtcactcgctcctggatgctccaagatgagagttaaccctgttggtaagccagaagtgcaccactaaagggtagccagccaaaggttggccaattgggggtattattgagtcagagatccctggtcggccccttagacttgtagttgccagggtctggctgttctcgccacttaatcttcgtggcaagacttttcctccttcaggtaggggaaggtctgtcctggttctagaggaacctagttggacagtttctctgtagaccatccctgatctataaataaactcccttatagaggatctctgatgagatcctaacctcttccaatagttctctcattgaaccgccttatcaggtcactagcttctctgttaggttggtctagttcttcctggtaagatcgaaggatgtactcttagtcatccatccatcttagaaatttgtgtctttgttgtgtgaatacatcgcagctaacaatgcatggttcttcagttttgccgactttacagacgatctttctaagtctggctaactcgagatcttctcctaagtctacatagagctcgccaatggctagctcgccaattcttggccccatctctccagcataatatcaaggaccagacccagtcatggtgtttgggcgttgctccatgttggccattctttcagtatgaggtgccattggaaggtcctccgtgaatggcagaggttgatcattaagaccaatcgtgttggtagtgtccacctcaccaatcatggtggccaggtttgtggtacctgacgagatggtagggttggccacatctttcgggttcgtggatattccagttgtagctggaacatggacattaggatcagccatcataggatcttgaggaagacccaatgaatctaaactatagcgaaagttctctttgtgttaaccagggtgtttgatcagataaattaacaactcgctctcaataaaagcacctaaatgttgaccttaaatttggtcaactgataacaaagtagtaatatttattactaatgcttaccacgtgtacacaataagaatagaaaagtaaaagagacacaagattttatagaggttcggtcccttgagttagcgggtaatgacttacttctcttttagttgtattaatatcagagagaaaactactcaaatcacaagggttgtggaatctaaagtggctctctcaagattacaatgtgagaatcaagttggaaaatctcaagtgagagaaagtgcctagggcatgtgagagagaagagaagagagagttcgagtttcagacttagagcttgagagcttagagacttagaacttatggaattagggttaggctaatactttttgtatagtagagcttacataaagattaacaactaatatcccttaaaatagaaaaataaagcattatttacataattaaataataagtcataaaagggttaattatctcccaagaatagggaagtagctgatattttctcctattcttgtgggttgttgaagcccaaattgcaatttagcttgttgttcctggatgaaggctgtgcaccaaattcctgcaaggtgtaagctggtcgaccatgtacctgccaggagcaggttggtcagccctacaatagttggaggttggccagcctgtgttggccataggccctgccattagggtggttggttcgtcatttcctcatccttcctgagtactaggacttcctgtcagctgaagtgtgtgtagatgacttggccttcttgttgacaagttgtactccacgtggcattgatcttgccttcgtggacatgccatatcgtgtgggcaaaaattgggataataggtacacaaggcaccaataatcactatgcaaacacatgtggtttagtttgaatagtaaaaggctttagaaatgaataatccagcaatcaactatgttatgattcaaacaattgagggaagggaccatcgattaattttatgagcttgtgagctctttattatgcaatacgggggaaattctaagagaaggaaagaaagaaaggatctctatcaaacaaaactgaaagaaagagagaatcctcgatagttcttacaaagattcctaaagatcgtgtatgaagtgagtgaggtgacctcaaaagacacagcatgttacttcaccagaaatgtgcttaagggttccttgttgagtgaacaactcattcttttaaaaccaaagacaatcacagaagtaatagaaaagaaaaaggagtctttaaggtcatggaacaatgagaacaagagaaaagaaagagagggctcaaaagtaagagaagacagattaaaggaagagtagctttaatttccactccacttgatagaaatcccctgcttagaactggagaaaaatgctacataaattcaaacatgagacctgggaaagatcggagaggatatatggaataaaggccaagaagtctaaattcaaggtcaagctcaaatacaacactttctcagatttacttgcagaataaagagaagcctatatagaaagatccttataagataatggcaccacttaagagaagagatcagatgaaccattgtgcctttcttaatgatgtagggaattatacaaatgattacagatctttgcttacaaaaattgaaataacaattaaggaaggaggccttcagcaatacgtaatgaagaatgaaggagggataaatacaaagagatacatggaggaaaaattagggaacacataagatagtagacctaggtagaccacgggaaaagaggaaatattgaagtgaattcccatgattttgggaagcatggggccgataattcatcaggaaacttttcttgataggagaagtgaacaatcaaaagagtaaaaaggcttggagctaagcatcatgaagtcaattacattctttctaaagagaaatattttccaatagctctaatcaccttcactgaaggaaacctggaaggagtaaaattgcatcatgatgatgctcttgtcatccaattacagatccaatattgtcttataggcagaatcttagtagatgggggagcagtgtagacatgttttatgttgcattaattaacatggggcttgataaaagtagaatcagagtttctgctctgccagttctttcctttgacaacaaccagatctatcctatgggagcaattgagctcaatgtcatgcctgttaggaaaattttgaaagtcaattttatagtaatcaatgttttatcaagctacaaccaaataatgggaagaggatggctggatcgaatgtagggtgtaacatccacggacctctatctcttggtcgtctcttacgtcatcatttccatcaaaacaaccttcagggtctggaccatcaccaaaatcatcatgaaaaggcatttgtgctacaatgtaaactgttcatatcatagtgttcaatttaggtaactcatcatgaaaaggcatttgtgttataaggatcaatacaaacattcttcttcaccaacatcaccaatagggggggtaaactcatttggatcttcgtaagcatagacaaatataaacttagatgcttatcatttcttataactttagggtgatacattaaccctttcatgtacttgtaattcacttctatttcaagtcatactgcaatttcttaacattgagttcttcatacaaaagctcaacaaaatgtgagtaggttatgttcatatcaatctcgaatgtcaaactttcagcttggttaaaaacccaatttctgtcctcaagctcccaaataccactatacataaagaacgcaaaaacagttaagcctatcatccatatacataaaaaatagtattcagaaaaaaaaaaatcatcacacaagataaataatttatgaccatgcataatatcggacaaatatcagacccatatcagacccagagtgggtccttcaaatagacctcaaaattgacaccctattagacgcactatcaaatccaattgggatccttcaaataaacctcaaaactaacaccatatcagacacactattgatcttatatcagacccatatcggacccaattaggtcctgcacactaacctccaaattgaacacccatcagacacactatcagacatatattggacccaaatcggacctaatcgggtcctccacactaaccttaaaactgaacaaccatcagacaccatcaggcctcctatcggaccccattgagaaatcatctgtaaccttagatctaagaaaccaatcgaactaccattgggcccctatcgagcaccatcggactaggtgaaaaaaactttgatgctagaaaaaaatgcagaattctcgaacaacaactattttcacataaaaaaaacagcaaaacggagcaacaaaccacaaatcaaacatcaaaacaacattctaaactaaatataagaaccaacaacataagtaatcaaaaaacatcacttacccattgattgttctcaaaattagtcttttacttcttcaagtaaaacatctcactactaatgcaccttacttatagtagcttcaagagggaaaatgtaaacttatgcaaaattttagtttgatttggttagggagaaagagagaagatgaggtaagagaaaaagcgaagggaaagaggatgaacttggagtgggaggggagtgtatggaggagtattttggagagagagcaaaatgtacatctattctaccaata

SEQ ID NO: 31241 - DNA, 2092 bp, Cannabis sativa
  modified_base (896)..(905): a, c, t, g, unknown or other
ccaaaactcatcccttatcttagggagagagatcatccgaccccttaagagtagtttagtaatatccattttgactcgaaaacgtaagaaaggtccccatccttcattcaaagaatcatcatggacagccaagaattctcccaagatagaggccaacgatttggccaaagatctagacttgctcaagaaaggtagtctgtaagcctgaacccaaaaaggagagaagatcataatgtcagcggtaatagtttaatgcaaagttggatcaagaaggataatatggttattttgaaaatgccaaggctctttttctaatgcccgaagtcgatcctcctcacaactgaaacagagcaagaacagatcagaatgatgttctttgatattaactttaaaccttccatcccaatgttctgccatttgtcgttgaaaagtagtcagccacactttcctagttgaaagaactcgagcaatgagtatatactcctctggaacttcagcatcagtaccatcctcactaatggttaaaatgctactttcattgtcagataatttcatggtggattgtagtttatccaaaagtggattcatattgattgaacatagatagaaaacagagttatatatagaaatttatggtggtggtcagaaattcaaggataatggtaacatgaacatgggaagttaaacatacagaataactgtagaaaaaaactataactgcctcagagcatgaacaagggcagacgctcttttttaagaaagaaagaaaggttataacagcataattttagtaaatatatatattttcattttttttttatgtggagagatttatcaaaataaataatttaaaatatcatttataaatgtttgataagtaaaatgatataaaatannnnnnnnnnaacttataatttataaacaattatatatttaacaaaataaccaattttgaatttgaaattattatggttagaatatctataaaaatatgtacgttaattttgaatatgttaattatttaatttatcctataagataatgttaatataatatttcaaatcaaaaggataaagttatcttttaatttaaaatatggctgatattaaaatatccgatcttataattaaataatatataaatattaaagaaattaataaatttttaaaatctgaccataattaaaaaaaatagaataattattttttaaatttaaacctcaacatataaaaaaaattaataataatatatttaaaattaaatattattaatttaaaattgatatttaagttaaaatatattaaaaataatattttattttgaattttaggatttgaaatttggaatgtttggaaaaattgaaaaaatccttgaaaattcgcattaggggtgtggctgccagcaaggttgcacgtgcaaccgtatcctcgtgcggacaggggctgcagcagggccccttgtgcgggttacgtaggtggatgcaatgtcctcttggcgtgaatgcaaccttatttcagattttttccaaaatacgtggcaacggctaagagcgacacgtggacctaaaagagcatccactcacgaaaatcaattaagtcttgaacaggaaagtgcatctcatggattgagcctcccggaagagagcataagacacacctttactcttcgggaggctggaactgtaacaaggcatctccgggaagggaagagactgttgaacagtcacttcctatttttacggtgattacgcaataattgacgagtctagtgatgcctacattatgaggaatgacatcaatcaagggaggataaaagattatatcccctaacccctaagatacctacggtataggtcttgtatttcctattttgtatctgttaggaatttgtgcccctaagaggctaacacagaaagacaagtgatccctttctagggatctccctgaaaaacactataaataccccatagacataatggaaaaaggggttgatcaattaattaagaaatcgaagagagtgaaggagagagagagattcaccaagaacattctctgtaaaaacactctcataaataacaaagactcgtggacta

SEQ ID NO: 31242 - DNA, 2560 bp, Cannabis sativa
aaaaaaaaaaaaaaaagaggaatctttattaaaaaaaacaagcaaattacacacaaaggcacaaggccacaacaacaatccagtggcagctgctacagccagcagcccacaagaaaagctacaacctattaattacattaagtaaataattcttcttttggcaagctttaaaaggccccttgctcaagattctcaactgaacctctttcctaatattcaagctcaaatgacttggagcagtacaacacaaataaaaaatacatctattcctattcttccacagattctataaagtctcagccaagattgcattgtgatccgattttggagattcttcatcctgtttctatacctttccaacaaatcctcaatagaattaggccattgatactctccatgccaagaaatgtttgcaacaattacttgtttagcataggaacaagtaaaaaatagatggtcatgagtttcgaactctacctcacaaatagggcataaagtgctcgagatggtcagatgctgagaaaggaaatctctagtaagaagctaggtattagctatttgccagaataggaactcgtgtttaggcacaataagcttgtcccaagctgctctagcataatcaaccttgtcctcctccaccaacaagtcataatacattttagctctaagcttattccctttcaccgcaagacacattctagcttagccattgtttcccgaaggctaagaatctttttgaaatatcagctctcatccatcttttgtgggtaattccaaatgtcatgctctttcagataaacagagttgatccatttaacccatatgcaatcttgtttactagcaagagcccaaaagaatttagccaagagagccttattctattttttaccttctcggaacccaacccctccaaggtttttagggagacaaaccttttcccaagaagcttagtgaagcatactcctattcccagctcttatcaatggcagtcgtaatctttgaaggcatgatgaagatactcatctagaagttccttattccaaggagcaccgagttaatcaattaagcaggacctgcaaaggaaatttttttactagcccagcagttaagattcttatttactttacccaggataacatcacaatcagttaccttccactttgttggccgaagattcaccccaaggtatttgaacgaaaagcaaccttcttcaatttgaactaaatcaaggatcttggatttgacttcctcactaacccctccaaagtaaatatgagacttttaggtattagctgacaaacctgtagcactgtaaaacttctagaatgcttcaaaagtaagcctcaccgaattatagttccctttgtagaaaataacaagatcatcagcaaagcacaagttagtcaatctcagatgcttacataaaggatggaagtcataacccttcttatctgcataaaaagttagcaaccttgtgaggtagtccataatcataacaaagagtaacggtgacattggatctccttgatgaagcccctttttccccttgaagttgtcttcgattctttcatttatcagcagatggtaagtggttccccttagacacgtcattatccacatgatgaatctagagggaaaacatagcatccgaagtaaatcttctacaaactcccagtcaaccgtatcataagccttgccgagttcaattttcatgatgcatctagcagagacattcttccttgtataaccctttagcagatcttggaaaatcatgatattatgggctagcaacctattcttaatgaacgcaccttgattatcactgacaatcgagggtagcacttctgaaagtctagaacagatcatcttcgaaatgcacttgtagacagtgttacaacaagcaatcggtctgtaatcctttgttgaagaaggattttcaattttggggatcaaagaaattatagtctcattcaaagtttttggcaaatttccatttgcaaagaaatctaaaaccgctgtagacacatcattaccaattttatcccataagtctttgtagaatccagactcgaacccatccaatcctgggctcttagttgcgtgaatgctgaaaaagagctttcttgacacccccttgttaaaaggcttaatcaatttaatttgttgctccaaatctaggaatttaccccgctttaaacaatccccatcaatcaagctagaagttgaacttttgctgcccataaagttttcgaagtgcttgacaaagtgtttaaccactttctcaaaatcatcaatgatagtgtccccctccatgtacgttgtgatcctgttttcaagtcttcttttcctcataaccgcatgaaagtaacttgtattatcatcactaaatttaatccaattaaccttgctttgttgtctaaggttctgctcaaatctgtcctttacagcctgaaacctctactgcttgatagaaacttcaagttgttgttgtctgtcatttggattcaaggctactgcttcctggatttcacaataatcctctttagccttcctgtaatct

SEQ ID NO: 31243 - DNA, 1671 bp, Cannabis sativa
ctggtaaaatatttccaacaaagtacgatcccaagtacatctacttagacaaatagtgagtcctaagttgtgcaggcgactataatggactcactattgactcctatgcagcgttcccaaggagaaccacagataaggctacaattgtatatgcatctaaggccatcacgagaccctagtcgaggttaatagaagaaaaaaattgaccgcccgcttggagccttgcccttgtccggctagggttcccaagccctagagcgccggccatgtcccatgacctagtctagggtcggaaagaaattccacttccaagcatatgtcggtaattggtaggagatcccccttggccagccaaaccccatagtgaccacccatggtcagcaaggccttgaacaagacctccttgccggctaggaggtgtacaggatccaaacatgtgttttttcaagaacttgaacacattcttcgtgttctttgtgacccaaagagccaagaatcacaacaaatgtcaaaatcagatcttttttgtctaaaaattacacattacaaatcctaacactaccatccgtatcaaaagaattacaatctaatatgggaatcaaaagacattcaaagctagaataaggttcatgcattcatggaaaaatcaacttaatcaagtgaatagcgggatagaaagcttacccataacaagaaaccattgaagaagataggaagcatggattgtcgaaacggtgcaaaaaaaacccatgagaatggagcaatgtgggttcaacctctagagagaaggaggagcttcttcaaagttatatttctagtaagagaatgaaaagtgtaaagtgaagagatgtttccccccaaaagactaaaatagtccttcacttgccacacagtactctacaaatagatatgaagaaatgaaatgcaatcaagtaactacaacaaatgagatcggacagtcaagagcagatatttcaaagactaaaaatgcagcaatatttatttagtaaaggctaaatcagttccaacttagctggtaagtccctatccgcacaaacgtcggcacagggacttagggggtaaatattatctcaatttttgcccacctgacgtggcatactaacgtggaatttatcagcaccacgtcgcagtacagcccgccaacaaggagttaagtcagcaccttagcaaccaggggtcctagaactcaaacaggacaacgagcaacagaccagccacctcaaggggcctgtccggccctatgaccgaccagcttctggacagtaaaaggccgaccagcctgcatcttgcggaagcattattggctaggattagacttggtagaactttggtgcacagacttatacgtagacttcaagttagactacgaattgagccttagcagcctaataaagtagatggaaaataccaatgtttaaggggcattttagacttttgtattttaccactttaatatgtaaatctcttaatttattttctaatcagggtttaagctgtccaatatataatgacccttaactcaaccctaaaactctaagtcattctatgtctcatttaagcttaagccatcaagctctaactttgatagcattctctctctcacacgcccactaacacttgagatttaccatctttgatccctactttgta

SEQ ID NO: 31244 - DNA, 1852 bp, Cannabis sativa
ttcaaaactaagaaaaactttcagcctaaagcactcaaatccaaaaaaaccaacccaggaaactcaccaaaaccgaaaccaaagaacatacacaaatacaatatcagaaataagatagataagagaatacaaacagtgataatatgagacaaagaacacagcggatttgatctcggagttcacccaacactatcagttatctttctagagtaattttttctctttatgcaattgtgtttatctaatatggctatcgtcctgatgatttgtattgttatatagtctgattagtcaattgttatatattcccattatctttgtgggttctgttatagttttgtatgtaagtaattttgatcttgaattcattactagtgagttttaagaattagaaaatgtagtatcaggctaatgttaatctatagtgtcaattcagttatgcttatgcttacaacactaatcaagtactaaaacatcactccatttgatcacccaaaattacaagccatgggtgaaatctttttcttgtaaacttgagaaacttcatcatttactattgattagttttgtgaagataatatatttcaccaagtttaacaattgttttttaatttctttgttagctattaacttattatttgaatggtgctcttcatttacttaaactgtgcatattttggagtcaaatttttcatttctatatttgttattatatatcaaccagaattttcttttttcttggaaattctgaatattttctgaatttatgtaactgttaaagctatgaaaatttggagcattttcttaatttatataaattaaatgttgattctgtgttaatttttctgagttttggaaatgcttatatgtgaaatgtattcttttcttctttcaattgtgtgcacagaagaggatactttgtgaaaggagaccgaaaggccaaaagaacataaaatggcgaaatcagtgtcatggtcattagcaagttccgtccactcccaactatcagtttcccgccacaatcaccatcaacttgagcttggaatgcgaacctcaccgctcaatttcgtgaagagacaatcaccgaattcccctttatcattttcgtcatcttgtatgggtgcacccacaccaattgaggacaccaatcgccaccatcctacacgcactgctgctgttcgtcatcttgttggctctgtcaccaaaactcagggccttcgttttgcagtggtggttgccagattcaacgagatcgttacaaaggctctgctcgagggagctttgaacacattcaagaactactcagttcaagaagaagatattgatgttgtttgggttcctggtagtttcgaaatcggggtggctgctaccagattgggaaagtcaggaaagtataatgcagtcatatgtatcggtgctgtgataagaggagatacaacccattacgatgctgttgctaactcggccgcatctggagtactttcagctggcctaaattctggaattccatgcatattcggtgttttgacttgtgacgacatggatcaggcattaaaccgagctggtggtaaatctggaaacaagggcgccgaggctgctttgacagctatcgagatggcttcgttgttcgagcaccatctctcctcgtaatcttcccaaactattggaaattacttatccggaaatgattgttgtgtttttgagattcaaagacgattcgagtataataatgtatcttggaataggttgtcagactgcaatataacctttttgtaacaatgcttagattggtggttagacttttgttataatcaatttggttaagttgggacatgaaattgcatactattta

SEQ ID NO: 31245 - DNA, 1459 bp, Cannabis sativa
aactgcaaaaccacgtaaaatcctggtgttcagattctatttttctatggttttattatttctgtattgaatcataatcgtggagctcaaatttggttaacaaatatctacgttaacagtacgcttccgctattcatgttctttctcctctttgaatcatcaaagactttagatttatggttataacacttctaataatatgtaatattttgtgtatgaaatgaatcttataattacatattttatgagtattaaagaattataacaaaaataaataacgcatctcagctcagaatccaattatacttaaaaaataatataaaccatacaatttttataattgagagatagaatatttgatatgaatgatgcaacatccaatgaagaaaaagtaaagaaatcataaattacacccctacaatttaattaatgaaaaatcaaaacctaatgcaggtgcttaaaataagagaaatgctaaaagacaccagtggtgtctagcacactcatatgtgtcaatattgctattggtccaattaaatatcgggtctcatataatttaatatcgctagccaattgcaagacgatatgtctagaagtgctaggcaccactagtgtccaatatcaatactcttaaaacaatttagctttagatgggtggaagacaattagtatcaatcattgtctatgtagaaatgcaaattgattttatttttcaacactactactaataaaattttgggagctgcacatcagcaatctttttaaacaaaatttgtattatattgatataaatataattttagttgtataacagtaagaacaggagagtaacatatttatttgctaaaaatcaaaatattttgtgactacaaagttgcaataaagcattattataataaataaacaagtaacttaaggaattaactatgatactcatgtaggaatgtcaaaatatctaataaaaaaaacaccaaatatgaacttccaaaaccattaatcatatcagtttaagatcatgtagttgctcagtgtggctaaaattaaagaaaaagtcaatactaatgatattataaaccatccttaacatcaaaatcctccttttaattgaaactaagtatcaacatcatattcatgtttgaggcatagaattaaactcaaccaatttgacatttgacataaaccacaaaccaaaactttatgatgtctatgctcaaaacttaggaggtagaaatgagaagagaatatatataccaacaccgacatcacccataattccaatagccatccagtagagaggccaataagatcactagcgagaccggatgagagatgggcatagccatcaaagagataatacgatttagctttgggattaataccagtactgatgatagcagctatgatgagatcatagatacgtctcagggttcttaattggacttgcctttcttgcttgact

SEQ ID NO: 31246 - DNA, 2338 bp, Cannabis sativa
ttttttttttttttttttctggtcaggcatgcctattttctttgagataggtgtggcttagtcgagattgtgttttgctattacaatttaatttttactactgtgattagtcttgtttctgtgacatggttttgagtgttttagtcttgtctatgtgacatagttttgagtgctttagtcttgtttgtgtgacataattttgttttgttatttattcttctttgttcttcgatgactcgtcatcaaatcactattagtggttaggaataacaatttctctatgactgaaggggttattagtagtgcaattatgtaccttgtataatagttcaatgctcaagcaatgaggttaaatgaacttgttgtaacagtttttactgttgtgtcttctgagcagtagatgaaactgaataaaagtgttctaaaggttatctgtggtgctgcaatctttttatctgattttagttttagtttttttttttgtcaaacgatctgggaattaggcgactgattatttgactcgtttttctaattatcaatcccggtcatgtctctaacagggggagatatcctaattaaattgcagactattattttagttgattggtattgttaactcagaaatttgttaatattaattgatgcttgataattaatactttgaacgaaaatggctaaataaatgtaataaattaaaatattgaataataaaagaagagagagatttttttttatgtgatttatagttaaatctacatactccacgggtaagtattatttctaaaatttttttgtgtatacaatttgtcagaatttttataagttagaaatttggtcgtgccttgtatattattgttactactatttataggagtaggattacatttatttctttaatgttctctagacaacagttatgaaatttgaacattctctactttttatatatcttttaataggtgggaagtgtatatataactgttcctgattgtctttagataagtcttatctctccgtattaacgatatctcaagaatgtttctgattgtcttaaacaattttagtacctttagtttaagtcttaaatcttctaagatatccattataagctttagttatttcttgtgattgaatcaacatttataattttggacttaggtgaagcatttgatttcttcttctcatcaattggatatatcatactgatactaattatctttcttggattgtgccttcatccctctattatttaggaagggagaatagtactcatcttttatttgagaaaatcttgagtatcttaatctatcaatggtcgatttaaccataataatatttcacttaaccagtattctttgagaggtatatattaaatctggattctttaatgagtgagctgaactattagctcattaattgggggatttaatacacgtgtcatgcaaataaagctatatatttattgctcgaaatataggtataatagatattaataaaattacataatttattaaaaaaaataattagggtatttgttgacactgaaaaatggccaataccaacttgctagattggcgaggtgaataataagtttaaataaataatttagagagacacacaaaatttatagtagttcactccccttatcgcaatgttaatggagctacgtctacttcagatttttatttctcacgagaattataagaaaattagttaagtgttaaagttttaatttctagagagagaaactaaagacagatgctctgaccatatgagtacttttcaaaatgtgaaaaatgagctagtgttgctctccttttataggtgaatgagtacctattaaatgcgaatagaataattcaaaaaaaaaaaaaatagaaatgtacatttagactatttttatcgtagatgatgatctaattgtgaaaattaacttttgaagttgattgttaatttttggagattgagtcgcgccagcaagacccgctccgagtaaattgtagcttaaattcgtaactctcttgagagtaaaatttagagtcaaaaaatttaaagttgcgattagagtgagacatgacttgatatatagttgaaaattcttcgaaattcaagttgaatcacgtcaataggatcaatattgagtaagttatgatcgttttactgaaggctattttgggcccaacgcccaggttgacatatgatgtgaacctagacgatggttgagttgggaaacatgtcgaggatgtagtttttgatgtctaattgatattttgacatcacttagtcgatttttatgttttggcgaagctagtcaccagttctcggagatgttgctgtt

SEQ ID NO: 31247 - DNA, 1048 bp, Cannabis sativa
  modified_base (47)..(49): a, c, t, g, unknown or other
ttttaattaatgaattataattttaaaattaaactatgtcttatttnnnaattttcactaagttatgacttaattgtgaagaaaatagattttagtatttttattaattaagagactgtgtcgagtctaattaataaataatataaatgataattttatttgataattaatcataattattaaataaatagatttgacatttatatggttgaaattagaaaatatggcatttgtgaaataatagataaatggttgaaaaaatagtaaaaatataattagtggggcccacaaacatggctggccactaagtctatattttttctattattttatcattttttatttcatataattcaatcctaatcctaagtgaattagtataaaaagaataggatagtctcataatctaatgactcttaacctagtttacatcttgtcagataactagagagttcttgagacttcttcctcttctttcttctaattttttaaattcttagagtattcttcataaatttttgagccttagtgattgagtgcatgtccacccataaaatgtctagtactcaatcatagtgtgtaagactatgaagaatccaaacacctgaaggagaattgggctcagatcatgactatactctgcgacaaaaaggtacaaggataaatatttgagtggaaagagtcattataatctgttgcaatgaatgtaaggttactcaaactttatatgtgtttaaattctattattttaaaaatttatatttagaatgtaataaatatacttgttagtaaatttaggtcctggtaaaatataatccaacaactggcctcagagccatagaattgatttactttcaagaaatatggatttagaacgacacatgtgtgatttggatgtgattcatgttgatctatgtatttattgatgattgattgatgtttacaaattttttatgtaaaataattggattcacgttttgaaattattttatttggatagtatggaaaaaattaagcaattccattttttatagaacttaatttttat

SEQ ID NO: 31248 - DNA, 1832 bp, Cannabis sativa
ttttgtagttaaaattctacatagtccacgaatcaatcttattcagatttttgatagttttctcagggccttttttgtatgatttttcgtcacttttttgatcttacttgctactatttataatcacatagtaggtagttaattactaagttgactgtaatgtttttacaatgaagatcccttgaaatcatggggtttgattacatatcacatagtgtaaatgcaaatattatttaaaaatcatataactgtgatttttcacttttactggctcaaaatgatcgtgtatttaaacacgtcgttaattgtagcattctaggattcgacaggagcttggttccagtgaccgtgacagcgagctggagccctttttttcttatccttccgaggtcaacgaagtacgccttgtcgcttctttgtgatgattgcggttcttattaacaaagagttatttgaggctcatttgaatgttagcttttgactcgtcaggattgtaggcctcactgagaagatgtctgaagttaactgggggtaagttagaggaatgaaccttcccatagcgagataggcacctcgcttatcgagccaatctgactgttatactttgtttgtacgttatacagtaagagtttctgcagttaatatgcgtcgctttcgtctttccagatgtaacatacttgatgcctccctaacgacatatgatttctcattaatatactaagcaacagtttgtatatcttttcctcgcataaaattttacagtcagcgagttgtgaatatactctgctacttacgcaattaaggagttattccattaaaagtgacattatcgatctttattccctttatcttgacacgtgtcctccactgaggtggtagccaaattttggttataacagttaccaaggttcaaaaatgttatacttgttgagggactaaaagctaatttacttagcattagtcagatttgtgatcaaggttataccatcaaatttgacaatgttcattgctttgttcttaatagtgtaaacaatgcattttacaagggtttagatctgttgatcattgctatactttcacatctgtccttacttgtaattctgcatgtaaaaataatagtgctataaatatttccaaaaatcttgctcaacattctcgtacaaaatgcattgatataatacatcattttattagggaacttgttgacaactaaacattatagttggaatatgttgataccgaaaagcaattggctgatattttcactaaggccctagattcaagtcggtttgactcctgcagaaaatctttgggggttcgcattgtctaattcttttctttttgttctctattttttacaaaattttttaagtagttcttatcttgcatctatccttctttcattcttagttggcaaaacatgtttatgcttttggatgataattagcttagtgtcttgtacttttcatacttttgaggttgggttaaaagattcaagttacttgcatatgtgtgatcaggataaattaaagtatcaatgtacagagttgagtaatttttgtttcagtttcttgtcagtccccttgctggaatagagctacccatactgaggtgtgaaagccatcttttgagtaacctagaactttgtaattgacaattatgaagaggatgcactgtcatagaaaagggctagcttcaaaatggtgtgatagcatccagttgcgggatcaatttagaaaaggcaaaaaataaaaatcttgccaaagacaatgatcctattttcactgcacacactaatgtctaacaagtgtgtacaagtttgtaagtctcct

SEQ ID NO: 31249 - DNA, 1790 bp, Cannabis sativa
tcattcgggaaaccagatcaaaatccagagaaataccagcgacacgccaaacctttttagcatgtttgcatagaaacaaggcatgttcaaccgattcccaggcattcgaacaaaggctacatgctgcagaatcaatgatcttgcgcttgcacagtgcagcagcagtgggaatggcacaatgaaaagctttccacacaaagattttaaccttggatgggagttgcaggttccaaaagtatttccaccaagtatgctggttattggaagagtttgagagatcagaatcttcaagatcatttgcaagatggtaacccgactggactgtgtactcattagagtttgtgaagtgccaaatccattggtctgaaactgatgaagacgatagaggaatggacaaaatatagtccacatctacagctgagaaatcacgagcaaggagtggtagattccattctttatcatcagtaatgtagtaagatactaagttctgagtgtctcccaaaaagcaaataggagtgaattcagagtgacgaggaatccacggatctgaaatacattgaacacttgaaccatccccaattttgagtcttaaacctttcacaaggagatcacgcccccaacaaatcccttgccaagtgagtgaagaacagccagttttaggagcttgtaaaaagtcattatgtgagaaatacctcccttttaagacacgactgagaagagaatgtggaaattggatgatccgccaagcttgtttagctaataacgcttggttaaaatggataaatgaacgaaatcccatgcctccatccatccttagttttgcaaagaaagtcactttctccaatgtgtcttcttcttgtctttgtcagaaccccaccaaaaattagccatcatttgttctaattgatgactgaaagtagagggcaaccttgaaacaactcatgacgtaggtgggaatcgattgaaccaccgcttttaggagaacttctttccccccaatagaaaaaagtttgtcattccaagaattcatcaatttccaaattcgttctttaatatcagcaaaaagttgcttcttatccctttcagagtaagctggcaaacccaaatatttttcgtgacaatcgcttataggcattccaagaatattctgaaaagaatgctgaacatgtgaaggagtatttggagaaaaggacatcaccgatttatccaagttgagttcttgacccgaagcacgatgatagatatccaaagcccgtttgatagacccacaagatcgatcatcagcttgacaaaagagtaaactgtcatccgcaaaaaataaatgggatattgtgggagctcttctagaaacagcataacccttaagtcgaccaactttttcctcatattgtaataaacgagacaatccttctgaacatatgaggaagaggtatggggaaaggggatcaccttgacgaagaccacgctgaggaataagtgaacccaccaccgaaccattgagattaaaggagaaggaagtagtgtgcaaacatctcataataagggagatccatcgaatattgaaacccatcttacccattacggcagccaagaaagaccattcaacacggtcaaaagctttgctcatgtccagcttaatagcagcatagcctttagtaccatgcttgcgatgtttgagtgaatgaatcatctcaaaagcaaccaaaacattatcagtgatcaggcgattaggaaggaaagcactctgcgtttctgagatgaccaaagggagaacatctttaaatctgaaa

SEQ ID NO: 31250 - DNA, 2228 bp, Cannabis sativa
tggaatttacaaagacttccattgttaaatcggttagatcttggaacttatgtaggagcagtggattcatttccagaagaatggttactcccacacagtttgactcatcttcttatcggtagatttgataagcttacagctctaaatggcaagggttttcaccaccttacctcacttcaacgattgtgtctgaatagcttgacaaacctacagtgcttgccagaagaaggactgcccaagaatcttgttgctatgaccattagatattgtccgctgttagttcctcggtgcaaggaaggaacaggagaagattggcccaacattcaacacataccgaacatacacatagaaacagaatagcaggtaatcactacaaaaaatcttacttttagtcacaataaaatttgtcacattatagaattggtataatgtaagaatatttctttttaattttcctttctctcttgtctttagagagttcgttgaatgaggtgaggaggactgaggaaccgttggtgtcatttccgacttgtgtgacttttgatgctgctggtgttgatgagtcttctgttttgcatttcaagtgtagaagttgtgtgtggattttgtttgttttgttgtgtgggatttgttaccactgtattcttccgccacaagtaagttgttattcaataataaattcgggggaagaagagtcactcatggacatgtgatcttcttctcttcttaaaaatatgaagaaatgttgtttaataatattggtgaaagtgtactgaatttgagtgtgtctctatacttcagtagttgtttttcataatgtatagcagtatagtatagtatttgaggttttatactatggtgatgatcttcttctgttaaattactctgctcacttacaactttcaatgaaagtgagtaatttgttatggtacatctgttttgattaacttttaaattcttggcatctatgtgtttgtttgcttagaaaagttggtaatttaattagtctaatttcttagaaaattaagtgatatgatatccttataaaaaattttaagttgatataaatctgtttggttccaaactatttataatctctggttccaattctgatgttcttatataaatatatagatatatatatatataaatactatagaattgatataatgtgtttgtacacataattttgttatgagtaatctgttttaatcttttaagtgtaaaagctgtgtaatatttgtggtaactggttaccagttacactttgttaaaagactaagttagctgccaactagagagagaagcaagtcttggaactctttagtgttcttgagagaacaacttgtaaactctataacaaaggctgttattcaaccgagatgtagagcattgcacggagctagaactcgttaaatcccggtgttattttcttttactttcttgcattttcccttctcacttctatgagaattctgttttagttttgtgttatttgaaattgtgtttgtgtgcatcatagcatagtttttgctgaatttttgttgctggtttgtgtgtgattttcctattttggtcgtttataggaatttttatttgttaccacattattcttccgccataagtgaggtttttcaatgaacttaggaagaggtcactcgtggacatgtgatcttcttgtcttctccatttgctgtactttggttgttcttagttatacagtagtataatatttgaggttttatactatgatgatgatcattgtgggaaaattataattaatggtacataatcaaaataactaaaattttaaacaattaaacgattagtaatgacaagattaataaacacaaaatagtaatcgaagaaaaaataagaatgaacagagtatggaaatctagaaaacaattaaaacaggaaacaaaaacattaacaccaagatatatactaattcaagtctaatagatcggtatgctctatgactctactccagttctggaacactaccaaatcttttttattgattaagaacatgtataatacagtcaaaatcgattctctgatgagttctctcatagtgtttcaactctcacccaagaatctaacacatagcggaggtatctacgaaaattccagaagtgtgatagaaggcatttttaccaccaaaaaatcaacttaggtactttactgtaaccgggagttacacttaaatattttcgccgcaaatt

SEQ ID NO: 31251 - DNA, 2149 bp, Cannabis sativa
ggttcaggtggctgaagttaatcatgatttgggctaaaaaaatgagccttttgtgggtgatgggatccaggcccactattcattatgagcatcattaggtggaattaccgtggacttgggaacccacgggtttatcaattccttgtggatcttattatctaaaagaaacccaattttttgtttttgtgtgagactcttggtcgtaaggacaagttagaaaggctacgggttgcggtggggtttgatggattgtattctgtcgatgcgagaggacatagtggtggggtggccatgctttggcgtaataatgacgatgtgcagctgcttagctattcttttcattacgttgatattcagatctcagaagtagcttctcctccttggcgtttaacatggctttatggaaaacctaatagagctgttaggtataaaacatgggatttattgagattgttaaagttgaaatcttcccttccttggtgtattattggtgatttaaacaatactactagtcatccagataaaagaggaggaaatagatatccataggtgctggtggatggttttaatcaagctttgtctgactgtgatcttgttgatatggagttaatcaggtatccttacacttgggagcatgggagaggcactgattcatgggttgaaattcgtcttgatcgagctcttgtttgttctagctggttctaggggttttgaatgggtcagctacataatttggaagtatctacttcagatcactgctcgctgcttcctgaaccaacggtgcgttctatcacggtgccatttcgtcaattctattttgaaaatgcctggcttcgtgaactattgtgccgccacgttattaaagatagttgggacctttgtgaaggttagcatgttatgaagaaaatctcttatcgtggggaatctcttcaagcgtcggggcgagattatacaagcaattttaagaaaagaattagccattgcaagcgggaaatccagtattggaagaaggggcgtgatgatatatacattcagaagttccgcaaggctggactgaatcttagtgaagttatgaaccaacgagaagtgttttggtgtcaacgctctaaacagttgtggcttcaagaaggtgatagtaacagtaagtactttcatgctaaagcaacttctagaaagaaatataatactataactcggcttatgaatgctgtgggtcattgggtcacttaggaggatgagttgccgaacgttatggttgattattttaataacttatttacttcaaatgtggccgattactcaactgtggtagaggagattacttcttcaattactgtggatcagaatttgtctttacttaggccggttttggaggaagaagttagaagagctctgtttagtatgcatcctgataaatctcctggtcccgatggtatgacccaaggtttcttccagaaatactgggaaatagtgaagagcgatgttgtgaaccaagtttgccaattctttgcgaatggcagtattcctgatggactgaatgatacgaatattgttttgattccgaagaagaaataacctacttcgatgggtgaccttcggcccatatccttgtgcaatgtcttgtataagatagtgtctaaggtgcttgcaaaccgtttaaaagaagtgttgcctcagatcatatccccaaaccaatctgttgtcatcccgggacggcttattactgataatattatgatagcgtttgaggttatgcattatctcaaaagaaagcgtaaaggcaaagaaggctatatggcactcaaactggatcttagtaaagcttatgattgtgtggagtggggctttcttcgagctatgatgagtaaaatgggatttgatttgcgtttcgttgatcttgttattgctacggttagccctgtgtggtataaaatagttcatggcggacatgagcttggtccgattgtttcggggaggggtattagacaaggttatcctctatcaccttatttatttcttatttgtgctgagggcttctcatctttcatatgaaagtttgagcgggatgcgaggcttaaaggttgcaaggtggctactggtgctctggttatatctcatatgctttttgccgatgatagttatgtctatt

SEQ ID NO: 31252 - DNA, 1996 bp, Cannabis sativa
  modified_base (40)..(78): a, c, t, g, unknown or other
atgtgaaccatgcagcataaaatattatttctgatctttnnnnnnnnnnnnnnnnnnnnnnnnnnnnnnnnnnnnnnnttagggcacaaaacccaacattagaaccctcatttttcatattttcttcatgtttaaggtattggtaccctagtgacctatagggagacttatggtgatgcatttagaacaggttaggtcaagtgattaatctttcttttcgttgttgtgacataaggcccaagatcgttgatctttctctatttaggtcaaccaacacacctgaatcgaaactcaaggtaagaacagtacattcaacatagcatgtaagatataattattatcattatgagtcgattatgatcaaggtaatggaacggtgattaccgttaagtggactaaagtcatgatatcaagtgaaaccattgttaggttttctacttgtcgattgtcttattagacaatgagagagatgtttagatgttggggtaggacatcgacgttgccttattaggcaatgggatatatggatgtcttggtaggaaatcggctttgccttattaggcaatgagatatatagatgtcatggtagggcattgactttatcttattagaaaatgagatatatggatgctagggtagggcattggtattttcttattcggcaatgagatatgtggatgtcgggttaaaacatcaaggttttcttattaggcaacaacaaaaatagttactttatgaagtaacacttacatctggtcttattatacaagtacttaagtactaatgtttaattatgttattattctaatttaaatatttgattgttatatactttcattgtttacttttcttactgagtctaggaaaaactagggcaaccatgagacgacaaccttctttagaaaatgtacaaatcaacttatctggcttgtatggtcgagttgtcaagggttgttttgggttgtacctgatgtgtattttgacttactgttgtacatagcatttttgtaaaaacttttgtaatatgggatccccgaaacaaatttttagtgatatcatcccatttatgctatggttttactttagtgaagttgttattattgcaacagattttattaaataattaatccactatccctaaactatgttccaaaactacacatgtggcgtttttggggatatggcgttagaataatactttagctcatcagctaaccccaaaaacaggcaagaagtagcatcagtgacctcagtaacacaaactagtcttccatctattatgtcatcaacattcaagacaaaattaaaatctctacaagtaagccaaggcttgactgccattgtaagaccaacaagcttttgccaaaaaacatgtctctttgttatatcattactgccacacaccactattaaataaaataatttgtttaatcctggcattctaacacaaaaatgaacaaactggtttgaatcctctaaaatttccatttttacaaaagtcttaagccaaacaagtaaaatttatccttttatagccaaacacgaatgaaaatcccaacaaaaaacttaaaaatcatcaaatcagctactttatttcctcgaaccttagtttcaagcattgttccaattcctactttattagaactcaacaattctctagctttcacctgtttttctttcttattaaaacctctaacattccaacaaagtaaattgcagttatccataaacaaatgaagagtctttcaatacaccaaaagagttatctcgttgtttagtagtttgttgtttaattatatcactcttccttttagaaatctcccaaacttcatttgtatcattacttggtttcaccttacccaactattcagatgcatcacccttgtctagagactcaaaaatacacaaattagccttagtaataacatccattttagtagatgaatcacccaactaggtagacgaatcaccatcctctggaattgaagagaccatt

SEQ ID NO: 31253 - DNA, 1951 bp, Cannabis sativa
gtaatatgagctatatgtggaataaaaatatttttaaatttggcgaccttagagactcgatcggggcccaaaaatgtcataacgagtttaattaataaatttggaaggaatattatgataagttgatagtgtaagtattagggtaattaaagcttgtaagtgttccatacgtatattatatatatatgtaagagtgactactcaatagttacatttttttttgtaaccatgatggttacatttttgttgacctgtaatagcaggttatcaacattaaaaatttcttttttagagttaaattaactataattaactatttcttaaaataattaattttttaatttgaatatttaatagactctttttagcaattaatattaataattttatttttatatttaagtctctattatattttttttaacaattaagccatttaattataatatctacaataaaactctattattttataaaatttaaactttcaccctttctaaaaatatatttttgaataattaatcacaaaatatgagaaaagtgcaaaatactagaatatgagaattcatgttttatacatcatatctaaacccccatttcatccgtatatcgttttagacacaacttgaaaataaactaacaatttcatatatgtatatttttaatagtaacacatattcgagatcaataaccagtaaatgatgtactaactttgttgatgatacatagacaaaatcaataattaataataatcaataacatcggttgctaagtttataaagaacacatgttcaagattcataaccaataacaattaatatttttaaaattttcaataatacatattcaagttcaataaccaataacaattattaacttttaaactttttcaataacacgtattcaagatcaataaccgatatcagttagtaactttcaaacctttcaataatatattcaataatcaaaacgatcaatattttttaaacttttgtaattttttctttttttatgattcatctccgatcaaatgatacatatacaatatattaatatgtgtgtaatatttttaaattataagtggctttattataaatattttaataatttaaagccaaaaatgttaatttttgaaagattattatttagtaacaaattgtaaaaaattaattaatgattattagtaatttaattttaaatataattaattttaattaagattttatgaggaaataaattttcaggttactatcaggtaataagttatttatttatttatttattttaatttttaaattaatcacaaccattcaatagtaatctaatgactaaaaataaatgtaactatgatggttacatgatataacgattgaaacctcttcctattgtaaaaaaaaaaaaaattaaaatagaaaatgtttggtctaaacaaagctacgtcccttctggaaaaaaaatttggaggtccaatacattttttttttttaaattttagttttaattaaaaagttttccccactttttcccattcaaacaaaatgacacaataagctgaaaaacaaaagttactacttttgatggtagtcaaaaagctaagaaatatatgctttgaatagtaacacacttcacttaaataagtcaatcatttttttaatttaatttaattttaatttttaattttcatattttatttttctttcttttatataatttttaattttgttttatttttcaaataaataataattttcatacccaaatttacatattaaattatttttttagtatttaaagtacaccatcatatattttgtttgagataaaactcctaaagaaatatctcttagtgtttttggtttgaaagaagtttcaataattttttttgtgctttttctcacacgatggcacaataagctgaaataaatagttactacttttgatcttagccaaa

SEQ ID NO: 31254 - DNA, 7221 bp, Cannabis sativa
tgtccttgcaccacgaacccttgaggctgctccacataaatttcttcttcaagataaccatttaggaatgctgagttcaaatcgggttgaaaaatcttctatttcttctatgtggctagagctattaaagccataatagtgtcgagccgtgcaactggagcaaatgtttcattgtattcaactctatattgttgagagtatcctcgcaactaattttgctttgtactttcggatagagccatctgcatcgagctttgtcttgtagacccacttgactcctatagtatctttgtcttgaggacgatctataagctcccaagtctcattcttcacaatcatctttatctcttcattcatagattttttccatacttcttgtttctgagctgcttcaaaacttttaggctccataaagactaaattacatgtctcatagatctctgatagtggtcttgttcgccttactagtgggtctgatggggattctatgacttgtgcaggttgattctttatggtaggttgaattggaacatcattttgttgatgcactggaggtctccttaattgttggttacacaatttagaatcattgatgtaattttccatctcttacactttgtggttaaaattagttcttctaaattcttcttttactaaaaagaattgtatccatatacatctaaatatttttagagtccacatagctactattctagattcaatcttatctagaaattatttaaggttcttaaagaattttttctaaaaatgtgttgaaatttttagactaaagtgttgtaaaaatatgtagtatattctaataccccaattttatatttcattaggtggcgtttggttggaggtaatgaaatggaatgaaaaaaaaaaggaaacaatctttacttcattcttttgtttggttgcatattaatgtgttggaatgacctttccacttttttagtggaatgactattccttttgaaatagaaagaaaaaccattccaatatatgatgagaaaatatttaataatttttttatcaatttttttttatgtattttaaattttattctattctattcttatttctattctcattctcattctcatttctattcctacgttttcattccttctaactaaacgccacttaagatccacacagatgcggagctgttttggctagttctaattgcattggactgggtttttctcgttgcactattgtagttaatgatattttggtttcttttaagtatttccatgtgttttaattaaattgtcttgtaaaaaagagtcaactgtaactcatgctttagccaaattagcttttcctttagtagttgagcatgcatgtgtggtgaccgggatgcccacccgtgatgcagtaacttttgatttttgattggtaatgaatctttgatttgtcttgtttggtagccttttcttgaaaataaaataaaatgcaaactgcatacaatatgaaaaacacatatataaggagaaatggtgtctttctaggaagcatttcacgtaaaagaaactcctaaattttcagcacaatttgattttgcctagggcttattaaaaattcttcttaaaatataaggttctttttattttactgttaaaaattaatatttttactcctgaactttgagtaatacaaaattttgctccattttattaaaaaaattaattttttaaaaataataatattctatcatttttaaagcaattataatattctattaattcaaaaaaataataaaaaattattaaaaaacaaataaataaaaatattaattttactaaaaatattttaaatatttatttatcaacatgtattttaaaaaatcaaaccaaaattattgagaatctaataaaaatataaataaacgtagatttttttttttaaaaaaaaaaaattaaacttatttatatttataaagtcataccttaacaaataaagaaaaataattaaaattcaataaaatataaaattattttgaaaaaaagttataaattaaactaaaaaaaaatgttatgtttacttgttcaaatctataattttttgataaaaacaaaatatattcaagtttgttctgtaaaatttagtttttaatatatttttacaacataaatttttaatatatttttttaatatctaaataaattttctaataaaaaataaataattttttttatcacgtaattagttttaaaattttaattttcttaatcattcaatataattttttttaagatctaaattaatttttttagatttactaaaaaaatattgaatctttcctattttattttgagggggtacgttttgatagttgccaaagtttaaggaacaaaattgctaattgataaagacatgttatcatttaaacgaaataatgggacaaaatcaaacaaaatgactaaatttctgtatatgtaataattcaggggaaatttttaacaagccgtatattttagggaccaaaatcaatattatcaaaaattcagaaggggaaattactaattattctttaatttaatgtatgagtaagtttctataaaaaaaaaatgtatgagtaagttattattttttaaacaaaaagttattattttttcaataatgagataatgagttaagtacactaaaaagaaatgataaatgagaattatctatcaaaattagtctttcattcaattaaggtgcactctaattgtgtaattactatgttgtatgtagttactatgacgtacttaatttttgcccttgaattttttttagtcattaaaaattttatctgaattgttgagattgttagatttaaggatatttgtctaatttcattcaattttactaattatgtgattgtccatgtactaaatcatgtttcctacactttgatatctatcaaatcatgccccttgaactttgacatgtatcaaatcaagctctctcaactttcatccaaggggtacccaattttatgtacatgggtgaggactcacacaccaaaccaccacacacacgcgctctgccattcgtccgagctggcgggcaggtgtggtgtcactttatttttttggagaaaatttatttattatattattattttttatttaattaattaaaataattttgtacgtgtttagttaattagtaagacaatttctcactctgtattttcggtaacattcacatgatcgttcacacgatcccaacgatcaaaaaatgactttcttcctattacttcattctgtgcgttcctatataatgcatcagaaccaacgggagaaagacatcattttctcacaaaaaatatatacgataacatatataattataatacatatatattctaagcagtagtacgattattgggtgtggtatttcgaaagttctctatcgtgcaataaagctccgatacagtgtaatcgattgcattgttttattctaggaacgatgaggctgatagtctgcttgcacaattgtggaaaataccacaaatgtcttaaagagagcgatctagtgtgcgactcaacccaaattttaattcggtaaatttattcattttattttctacaacaattgttttcaacaattttaagatgttatgtttctaccatgactaccgatgaattctggtgttcttgatattaacaaacctttttgttttgagggaaactattttaaaagatggagatagaaaatattatttttcgtcactatgaaaaaaaaggttgcttatgttcagatgactgataaacctgttgtttgtgatacttctaaggatgatgaaaagtagaagcaaactggtgattagcaagctaggtcgagaatgattttttatgtaaaaattatattctaaatggcttatctgatgatatatgtgactactataattttgacaaaactgccaaggaaatctggggaggccaaaactaagaagtacgctgtcagccgctacctcaaattccagatgactgacgataagttagtagaggctcagtcttatgaacttcagaaaattgctcacaaaataatttctgaaggtacgtctttagatgaacaattccaaattactgttattattgacaaattacatcatggttggaaaaattttaaaaatattcttaggcacaagacaaaagaatattttttttgaaagtctgatcactcgccttctcattgaggaggaggctcgtaaacaggactaaaaagaagaagttcttgttgtgtcaaacaacaacactaagaaatctagtgcgattctaaaacccactgggaaaaatttcaagaataagaatcgcaagcgtgctccaaatcgtaacaataattcatggaataaaaatcagaattggattccaaggaaccaaaataaacagtagcaaccccctaataagaatgaattggcaccatttttgtgctttctttgtaacaaaccgggtcatatggcatgcaagtgtcagcacaggtcttgttatgctgcgtaggctaacttgactgaagagctgccttatacagctatgaatgtagagatcaacctaattggtggatcagaagggtggtgggtagaaaatgacacttctcgccatgttttatttgatcgtgctatgttcaaaacatacacggctgagaccgatgataagaaagtattgctaggtgactctcactactattgttcctggtactggtgatatgaaattaaagtttacctctggaaaagccatgattctcagaaagtcatgcatactctagagatgagaaagaatctggtctcgggctatctcttcaacaaggcggggttcgcacaataggggcagatttactttgattaagaatggaaattttgtgggaaaaatatatgctactgaaggaatgtttaaattaaatattgaagttaataaagtgaatatttatgtttacttgttatgttcttttaatacttggcatgatagattttttttttcacgttaacaaattcataataaaaaatatgagtagtttaggtttaatccctaaattatcattgaataattttaaaaaaaaatgtgactttgtagccaggctaagatcacaaaaacaccacataaatacgtaactagagaaagtgagcctctagaattaatttatttggatatttgtgaattagatggtgttttaacaagaaacaaaaaatattattttatcacttttattgatgattgttctgattttacctatgcgtatttcgaaaaataaaagtgaaggtcttgatatgtttaagttatttgtggctgaaattgagaattaatttagtagaaagatcaaaaatttacgcagtgatagaggcactgaatatgattccattacttttgttgatttttataactcgcatggaattatacatgataggactgtaccatattcacctaaaataattggtaaaggtgaaagaaagaatagatactttactgaatctattgttgccattttacttaattttggtgttgcttctcattggtggggagaaattctcttaactgtttgctatgtgcttaatagggtacctaaatcaaaaggaaaaatttctccatatgagattttgaaaaatagacagccaaatatttcctattttagaacttgaggttctttagcttatgttcgtattcctggtcctaagagaattaagctagtaagtagagcctatgaatgtgattttagggtatgctgttaatatcaaagcctataggttctatgatcttaatgcgcatgtgattgtggaatctaatgatgcttgtctttttgaagatggattttcatttaaatagagaaatagtcggggtgcatcaactagcaacattccagtgattaggagtgatgaacgtactaagagtttagaaactgaacctagaagaagtaagagagcaagggtagctaaagactttggtttagatttctgtgcttataccttaaaggaggatcctgctaacctccaagaagcattgtcttctttagatgctaacctttggcaagaggccatgatgaaattgactctcttgtgaccaacgaaacctggtgcgttgtaaacttaccacctggttgtaaggctataaattgtaagtggattttgaaaaggaaattaaaactcgatggaactgttgataaatacagggactgtttagtagctaagggttttagacaaagagagaatgtagatttccttgacacatgttcaccaatcactagaataatatccattagagttttaatttcactatctaccatacacaacttagttgtgcaccaaatggatgttaagactgtgttccttaatggtgaattagaagagaaaatctacatagatcaacctaaagggtttgtgatccttggctaggagcataaggtctgcaagttggataaatctctatacggtctaaagcaggcacctaagtagttgcatgaaaaattcgacactttagtcatttcaaatagcttttaagtgaatgaaagtgataagtgcttctattacaaatctgaaaaataacatatgcacaatcatatgcctatatgtggatgacttgctcatttttggctctaacattcatgccgtgaacactgtaaaattaatgttgtgttccaactttaatatgaaagacctcagagaagcgagtgtaatccttggaataaagattattaggtatgacaagggaatttctgtagatcaatctcattatattgagaagattctaaagaaatataattactttaattgtaagcatgcttgtaccccatatgatgagtgtaaaattatttaagatcactcgagatggagtaagacattcagattatgcgagcataattggtagcctccgatatgctactgactgtactagacctgacattgcctatgtcgtatgactattatgcaggtttactagtacacctaatatagagcattgtcatgctattgagagagtcatgagatacattaaaagaaccatgaatcttggattacattattagaagtttctagttgtccttgaacgatacaacgatactaactggaatactttatctgatgactccaaagcaaccagtggctatatttttagtatagccggtggagctgtttttttggaaattacttcagtccaaacaaggtattataataagaaaaatatatacctcgaaaaaaaggtaagactcatgaagggactctctatcctctctttt

SEQ ID NO: 31255 - DNA, 2027 bp, Cannabis sativa
  modified_base (739)..(739): a, c, t, g, unknown or other
ataactaatataggaaagaatatatttagaattaatttttaaatatatgttatgtataatctttataatatatgtaatttgcgatagcattatgacactactaaatttttctcaatctaccaacatatttctacatatatgctcaatttcctagtattaaaataattgtaatataaatgtttgctctaatttaattcctcatgacttttaaagatacacaaaaatatcacgaattagaaaaaattaaaattaaacctcctctctctctctctcttagatagattaatattaataaaattagtttaaaaattattatgtacttctctctctctctctttttttctctttttgagataagtatctcactttgccatacagatagataaattaatactaataaaattagtttagaaattagatgtacttttgttttaattttacaattttatatgagaaaaaataacaataatagtgataataatattagtagtgaaactaacatgaaactatgtgaatttcagtttgaatttgaattagtatatatatattattatactttgataattaaaaaaaataagttgaaaaaattgcaataataaataatagaaagaaagaaaaaaaaaaggctatataagaggtctttttttacttctttaatattccttaactttatattaccttaattttcaattatctaaataaagatatatgttgatgtataataataataataataatnataataataataataattgatacaaataacgattaataattattatatcaatttcaatagttttggtttaagccttttgtttacatttaatttatttattaattaaaaataaataatattaaagagaggtatatgaagcaacatttgtgttttgattgaaaaagatatataaaaataaaattaaaaaaagataatatataaacatgcaaatcatatattaatatatagagtgctttttaatacaataaaattgaagaaaaaaaaagaggaaataacaaaagaaagcatgtgattttcacataaaataaaataaaaaaaaatacaataaaagatacaaaacaacgatattctcatgtagaaaaatagataaagtaaaaattatacaagatacatcaaaatatatacattataaaataattacaatctatcaaattgtttgtcacattttttaaaatatataatattataaaagagattttatagaagagattgtatatatagatatgctttacccttccaaaacacattaattcatagtggaatctttgagtataacaacttggaattggaatgtgttcaccatagtatataagtttacaattatttaagtttgatttatcttcaccttttatagaaaaaaaaattcaataacatattattatacttatgagaattgaatatagaatttgagtagacatattattattagaatttaatatagtacagacatttatatttgctttagatatatgatacataaatttattttataacatattattttattattttattattattagaattgattatggaattttaatagacatattaatatcagaattaattaatataaactaaatattttgtattaaaaaatatctaaattagttttatataattattatgtagtcttaagtcactccattaatagcgaattaatatgtatgtaagttactctattaataatatcatataataaaattttagctgaaaaataattaaaaaaattaaaatcattaacaaaatttgagaaaacaaataatagggaagaaacttcaaataaattaccacctaaactctttaatataatttcctatatatattgattattaataataaaattgaagtaagtaaatagttaataaaaataaactaaactagaaaaataaatgaataataataaaaaaaagtgttaattctatttttggcatatttaattgacaaaaatattttattgtatatttcggctggtgtgttttaaattggttaccatattttgtgtatc

SEQ ID NO: 31256 - DNA, 1675 bp, Cannabis sativa
  modified_base (843)..(852): a, c, t, g, unknown or other
aacacacttaatttaatgaaatatattcaagataaactatatgaatttttctatatttaattaaattaagaagttataactaattagatatttctatattcttaattatttaaattttcatacaaaatatatttaagctgaaaatcagtttttcaaactaattttagatcaacttaaattagaatattttgaaattaataattaagtagaattttttaggaaattagttattcagatattctttaaaagtatttttaagtggaaaattaattaattttatatcaacttaaatagggatatttttttttaaattaaggtgattagtttaagatacttaattttttatttagttaaattttggaaaataagttgaaaaatttgttatttcaaaacaacttaaattagatatttttcaaaaaaattattttatgatattttaatacaatttaaaaaatttataattatttataaatagatttttgattttttttttgaaattaaattaaagttaaaaattatttttgttttaattaattttggatcaacttaaattaagtagttttcactattaaaatatacatattaaaataagtgattagataaaatatattttaaataatgagctttaatcaaagatatattcgatctccattgttggttctacatagttcttgttttagtgagtaatcaaccctaatggattaatgttcattagcaatttaacgcagtagaaactcgaaagataagtattatttgtaagtgttttattcttaggaacgtccacctgaatagtggctgctaagagtaagacttacaaggtatgaaacaatggtagaagctcannnnnnnnnnatgaccttgactctcgcctaaacaggacaacgtcggattctcttttcgatcgaataaaaggtttctagaatgttatttattttagatgaactaacaaatctatttagtaaatgatatctttgactcttgcctaaacaggacagtgtatcaatttgttggaaaccttggaaaattgaatatgttttatttttggtatttttgcaaacatgtttagttacttgttatttttgaacttgtgtatgaatttaatcgaaccaaataatttatttctgttgattgatatttgtagtgtcaaaatgaacaacccacaccccaatcctcaccttttacatgcctttgcaaatgaactttatagtgtgaaaatgtctcctagtaagagcattaattcacacttaatcatgacgaatatgataatccaaaaagcaaatttgttgggaattgatttatcaatagagcaatgggttcaattaattctcaatagtcttccacctaagtataatggatttgttgtatcatacatgatcaacaattttcacttattcgacgtagataagctggacgcagaattgcgtgcttacgaatagactttgcctacaaggaggcctccctccaatttttcagacatgagaaaaaggaagagggtaatagagcttctgacaatgatgcttcttcaagttcaattttaagggctagaatcgaaattgaaccaagaactgaaacaatgagcaatcatacacttctatgttcatattgtggagagaagggacattcagaagaaagatgttccagacttctagaccattaaaacgaaggtaacgcttct

SEQ ID NO: 31257 - DNA, 5610 bp, Cannabis sativa
  modified_base (5542)..(5574): a, c, t, g, unknown or other
tttatcccgccataaagtaaacaagagtaaggagaataggaaacttatcccccaaaaagtgatgtggtacatgcctttgattccgtgacttaaacggttatatcgtagtgcagaagattgtgaaaatttgatttggcatgagaccaagagagtgaaagatagaaaactcaaacatcctgtaaattcgcaagcttggaaaaaagtaaactacataaatcttgagttcaaatctgaaccaagacacattcgtctcggtctgtctacggatgcactaaatccacatatatctccaagtagttgtcatagttcatgacctgtcttccttgttatgtacaattttcctccctagttagtgatggaaaggaaatttaatatgctttctttaatgatataaggcccgcaacaactcggacataatattgatgtatatttggaaccatttgattgacgatttaatagaattatatgagaatgacattcaggcctatgatgattttgaaaaataattcttcaatctaaaagcagtgttattttgcacttttagcgatttttaatttgtcaggcttaagcacaaaaggttacaaaggttgttcaatttgttgcactaacacatgggctcgtcgcttggaaaatagatacaagatgtgttatatgggttatagacagtacttgcctacaaatcatcctgatagacggaagaagaaagcattcgatggtactgaagagggagatatgactccttagccattgtcaggggaacaaattctccaagaagtagaactagtagattttaagtatggaaagacgcaaaaaaaatccgaaaacaaatggttgttttcaaagaaagtcaatcctttttcgtcttccacatttgaaaagtatactggttcaacattgtttggatgtcatgcatatcgaaaaaaatatgtgtaagagtattatgggtaccttacttgatattcccggcaaaactaaggatggtttaaataattatttagatctcatttaaatgaggattcgacagtctcttgcacctgaaaaagaaaagtaaacgattatatttgcctcctgtttattttcctttgcccaaaagggaaaaacaaatagtttgcgaatcattttgaaatatgaaagtattgatggctacttgtctaacatcaaaaacatggcaaataaggctgaattcaaactaatgggtctgaaatcacatgattgtcatgtgttaatgcaacatctactttcaatctccattagaccagtcttgctgaaaattgttcaagagtgtttgacacatgtttagatttttttaataagttatcaggaaggaaccatgcagaagcattacgtaggacatgtcgaaggaatgcaggcagagcctctagctgccctgacctcccagtcagccgcatcttggatagtctgaactacattctccctcactctttgcatatccgccaaagcaatcaatgcttttgtgccattgacaagtttttgaggagcctccatccatagtttttctatggtttcctagcgagtggttttggtcgcacggatagttgtatatcacaactccaagttaacatacttgactgacagtgagttattcaacttcttcaactggtcgtagtcattacgcaggccttgaatgaccaagtatttctcgcgaccctcctcttgtaaggaaccaacctcttggatttggatttttaaggtctcgccttagggaacaacgtagccttaactttttccttgtcttccctagtttggaaaattttatcatggagagatgttagagtggactggattttctattcaacctcaaatttgtgatcctcatacaacttctagtatttgggactaatttcctttcccatccgggcttgcttaacattgcatgtcttggggttcttttacatcttgggtggtcagggacataatttgttctacctcaacgtgaagagttttgttctcaaactagagattggttccaagaatgaagttgccccatctcggtggtcattatgcctacttctttggaagtcctctccgcaaataaggccatctgacataaaacaaatgcaattagatgactgtgcacaaccaaaaggaaacattgatgatacatgaaaaccagaagttactcctactgcctattgttttgttgccacaaataaggtgtataaatctgggctactgctaacggaccacttcttagacgtgagttcacttatgctcatgcccacatgttctagcatctcagtgacataaggtgccacctctctcccaaccctgggaattaggttttgattcactgccactgtgtccatcaccgggcctaatggaaaaggcatacagatccctttcataatcttagttgtcttcatggaagatagcctagtagaccttatttgaaggactacctgctccctttcatgatgccttcacaaggtgatagtagtttcacccatcttggtaagaactttgtggctgataacgactagtttcatggggaaagaaaagtataacggtgggatcctgcacaaagaagtgccaagtctgggtggatggctgaaggatgttggcctggaaaattgttgctgtgtttggttctaagggggtaaaggccgtgtctatggtggattgggtagagacataactattaggttgtgagttgtggagtttgttgttgttgttttcgtggagtttgttgttgttgttgttgttactattgtggagtttgctattatttttgctattgctgttgttgttgtggagtgtgttgttgttgttgttgttgttgatgatgttgtggtttttattgttattgcagttgtgatggtaatgcagatgatggactgaatgaagttggagttggagttgaagagtttgcctttttggcaccctggctgggggaagaggttgatcctttgcgtttagactttgcgggggaattcttctggggaaacacaagcccatccagactatcatctgaacctctcgcattcatcagaatggcagaagtcactccttccactagtggagtatcccccaaggcttgctccctcagagcaataggttccttagattcctccctgatagtggcaggagttttctccaccccagggggagccgaggaacccagagttgtagcactcgccttcatgaaaggagaaatttcccagacatatgatgatgataatgttgaaggtggtcgtggtatttaagtcatagaagcttgcatctttgccttacccttccccttttcctgagtctcttccgccttggccagggtcacagcgatcttgtcgttcaaagacttcaaaattctagattcaagggtatcttcatgcacaaccacaatatcagcaacaagaaagcataagccaagtcaaagaaaataaagaaatatttataagatagcaaaactaactaaaaatgcatgtgtgtgggtgcaaccattcagtgagcagctataaggttccccgcgagcaaaataaattatgtttttttcatcaatgaagctgccatattccctcaagtcaggcaatgatatggtcgcaaaaggatccacactaacattatatgaggatgcctcaagattactagggcgcctaacgatttggtctcccatgtctatatagtatttcatggggtatttatgatggtctaagctcaaaaaatatttatcgaatctcccatgatctcccaagacatgcagtagaggctagggatacgaaagacgtggaagggactattacctcttcccgaagttctagctcattgagtccccacgtccaggtacgctacaacaaacctctttaacatttattcttcttcaattaaggaatttggatgatgggccaacaaatcaggttctaggatcttgtcctcttaagccgcttcagttattataatgaccaagttcgtggaactaacttctttcacctattttagagcttggtgttgccccgacggttaatagggttgatactctaagatttcacaatcaggatagacctacgaagtaactcagttgttaccaactcctcaacttttaactactcctcagtaaaggatctgtactgagcctttttcttggttattttggaagttttaacactctgggttgagagtcctggcaaaaagtcaaaagtatacaaaaatatcatcaataaataaaccaagacaaaggagatgtgagaaatgggaaaattgaggttgtgtatcaacaatatctggcaactagaagttcaactagagtgagggcaccctttttactggaaacctagaagaaaagaaccagtactcggagaggtcgtgagtacaatcgttgtgattaacaggataatgagaatcaagacgcttgtctagtctctagaagcctagtttcttcttatttatcctcattgggttggccttcagactgtaaagtacaatatttcctcttgggaaggcacttcaagtttgttcatcttgcaaaaaacataccacctagcataaagcctgtaggacgagggggtcatctgaaattggagctatcccaatcttggcaataaggtttgcaaagtaggacctcaatggaaagtgcactccattggaaatatgggaccagctctaagcaccgaatacctccatgctcgtggatgcaaattctcttgtggcgtacatcctatgccacattaactcgagaacattgtgtagtctgacaccattggcatatgccgctaacataccgtaagaacaaaaatagtttgccttttggtctatctcccagatggagtcgttgaaagcttggacagtgggaggggtcttggccctccttttccctttatccttaatagagggttcatcctctgtgagaggttcatcctccaggatgctcctaagagccacctctgggtgggatacaatagtgggaacctcgacttgagttcctttcgcgagtatgtaacaccctactagtttagtcgtgttatcgtaactttaacttagttctgtagctcattgctaatcagcgagtttttttggaaaacatgattaattaaaactttatttaattgcttataaataccaaaataatatatatataagtgggatcccgagtataaaatatttacgactgttacaaagtatgtactacaaaagttgtcgcctagcgactatacaaaatacaactatctgtcccaaagatcgtaccctccgggcctaaccgccccgacaattacaatcttcacctgcttactctcacgcctgctcaaacttagccttgcccttacctacacatgcaaacaatatctgtgagacgagagacttagtaagaagagcataataaatatcataactataacccgaattataatcaagcgcccatacacccaattataaccctatccttgtgtcccacatggtactgagtccagaactttcatacgataatactatcgaccataatatcattctatactcggtacgctagtcatactatagtcatactgatgtgataatgtcgatcagtacagtactatttgttgggttttatgcnnnnnnnnnnnnnnnnnnnnnnnnnnnnnnnnntcaatttagaagtgaattatgattacatgtatgtta

SEQ ID NO: 31258 - DNA, 1781 bp, Cannabis sativa
ccatttcttccaatgaattttcttcttatcagttgttgttcgccaccagatattggccatcattgactcaatttccttacaaaacttggatggtaagttgaaacaactcataccataaatgggtattgattgaactagtgctttcaacaatgcctccttaccaccaatggagaaaagcttatcagtccatgagtgaagaagcttccagattcaatccttaatgttgctgaataaatgtttcttatctagtttagagtaagcggggagacccaaatacttttcatggcattcacaaatgggcatgtctaagattcgttgaaaagattgttttgttgcttctgtggtatttagggagaatggcattacagatttattagtattgagttgctgtcctgaagccctatgatatatatccaaagcacgctttaaggcaccataagaccgatcatccgcttggaaaaataaaatactatcatctgcaaagaataagtcagtgacaactggggcatgatgagatactgttaatcctttaagttgaccaatggattcttagacctcaataatcgagataagccttctgaactgataagaaacagatatggggataatgggtcgccttgacgtaaaaaacgtttaggagtgactaaacctgatacaacccgtttaatgagaagaaaattgaattatatgttggcaagtcattatgagagagatccaccgaaaattaaaccctactttgcccatgactgccgcaatgaacgaccattcagtcctatcaaattctttagtcatatccagttttagtgcagcatatccttttcgaattcgtttatgcttcaaagagtggacaagttcaaatcccacaagaacattattcacgattaaccggtttggtaagaaagcacttttagattcgaaaatgacatgtggtagaataaccttgaattgaagtaccagcatcttaaatatgatcttgtaaataacattacacaagcttattaactgaaaatccttcattgtcttgggtttcttgatttttagaatcaaagttatcaaagttttgttaaacacagctagatttcctccatcatttaacacatgaagcacaaccttagttactagagaactcacaatatcccagttttgttgataaaacatagtggacattccatcaggtccaggacttcgatctcctcctttaaacgaaggatgttatattatttagtaatataatatttaaattaaaatgagataatagtattattttattaataatatattatttagcaactaaactatgtaatatataatttcatataacctataaattgtaacatacattttgtaacatggagagaagttacaaattaattacttttgtaacttcttttggttgagcacattttagtgtaataaaagagatgttacaccaaattgatgatagaattcaaaagttatgaaatatagttgttagaaattatattaatactcatttatatgagagaaataaagtggtatgtgtcaatccttagtgtgatcacttaaaacactatataaaggagtctaatgtgctcatttagataaactaagtttctatctacaaatcactttgctagaaaccctaacaatcttgataattctcaaatctattttcatgagagttctcttagacgaggaaaaataagcttttgaaaaggtgtaatacattgttcaactcataatgatctccactaatctacattcaaagttgtgagcgaatgtatgtatatatattttaatat

SEQ ID NO: 31259 - DNA, 2219 bp, Cannabis sativa
  modified_base (1887)..(1894): a, c, t, g, unknown or other
cgcaattgtgtgtggtggatttgacgcttcctaatggtgagtgggatgaaagctttatccgtgctaactttaatgatgaggatgctaagttaattattagtttgcctcatgttaaagatggtgttgaggataaaatgatgtggcattatactaaggatggtgagtatacggtgaagagtggatatcgtatggctcttgaaatgaggaaggaggttgcaacttcagatgagaagctagtggtggagtggtggactaagttgtggaggttgaagattccttccaagatcaagtactttgtgtggaagttggctaatgaatggttgcctactaattcggctttggcacatagaaaggtggctattgatccgattggtcatcgatgttcgaaaggggtaagagagactattttccatgctatatgggggtgtcgggcaaattggggtgtttggaagcttagtggttttaaggatgctactcaaaggtttggtaaggaggatataatttccttgctcatgagaagggccaaaggtttgagtcaaactatgtttgagttctttctggtgttgtgttggcaattgtggtacattcggaatagtacaaagcatgggggtaggatcctgcggcctactgatgttgttgaatggtgtcatacttatttgtaggaggctcggggaccatgtgcaggtggaagtggtcgggttgtgagggaaaaggcgcgttggctgcctcctccgaatgctgaagtaaaaataaatgttgatgcgggtgtgaagtgtggaggggggcattcaagtttcagctgtattattcgggatgcgggggggcagtgtttgtttgcttcggctgctgctatgccgagggagtatttaccattacatgtggagttgttggctattcaaaatggcttgcaagttgggatacaacggggactacatcgctttagtattgagtctgggttaagctgatgtccatttaatccatgctaaggaggacggctgtcgagacattgatggcatactaactggtattagagagttaatgttacatgtttctgttgttggtatttcttttgtgtatcaggaggccaatgaggttgcccatgctttagccaattacgctttgtttaagaaggtgagagctatgtggattggggttgttcccccttgtgcgagacttgcggtgttgcaagacttgcctaatcctttgtaattgttttgtggtattgaagactttattttcaaaaaaaaaaaaaaaaaaatctcattaaatacatttaaattttttatttccataatttatttagcaactgttccccttcgtttcgtcttctttaatctctgttttaattttattgagttttcattctattcctctcatttaattacctttatattcttttattcctatcatttatttaccaactgttctccttcttttcctcctcttaatttcagctcgactgcctcttctctctctctctgcctctctctcactctctcccaacccagtcctccatgcatggttgcaaggaaggcatctccatctcttcctcttaccccatctaggaaagtaaaggttttctctgtatttttggtaaattctacaaactattttttttcaaaaaaaaaaaaaaaattgttagtttcttctttacttcaaaaagataaattatttgtttatggattttagttattttgatgattcatagacttccacttttagcatttcatcttctttatgaattattttcttaatttttcttcaaagaaaagatttattatttgtattcaggttttgattattttgataattaaagagtttctctattacatttcatcttctttttggttgtcatagatatgcatatatataaatatatttatatannnnnnnntatatatatatatatattgtgaaagtgggaaggagtgtataaaagtgtagttgattataatgcagaagctcacgaaagttatcttggtactatttttttattttttttggttatagacaatttgcttcatttcagtacttttaaagagtcctccaattttgcacaatacaaggtatattaatgcaattagaagaaatacaaaattttgaaagagcaacaaaccctcatgtaattacactttcatactagaatatattgcttttttatcttcttctaatattttattgtgaaagaacgcgagatgtcaaacaagaaaaggaagagt

SEQ ID NO: 31260 - DNA, 1675 bp, Cannabis sativa
ttctccatttgggtcgatcaacattcctgaattgggacttgaggtaagaaaagtacatatgtaccacataggatatcaagatatgattattatcatttatgactcgattacgatcggggtaaagatacggtgattgtcattgagcaagagaaaatcatcacgtcaatcgaaaccattgttaggttttgtacattttagttgtcttataagacaatgacaaagatatgtggatgtcgggataggacattagggttgtcttattagagaacaatggaaacggttactctatgagggaacacatatggcttgtcttattagacaggtacttgtgcattacttttcaattatattattcagaattgattatctgattgatatatgtttatatttactttttttgctgagtctttacaactcacgggtggtttgtggtgcaggtaagggcaaagaaaaactagggtagccatgagatgacagtcttctccgacaaatttacatatcgacttatctggcttgtgtggtcgagctgtcaggagatgttttagtgcttcacctgattagtattttgacttacttttgtgtatagcccttttgtaaaaaaatttataacaagagattcctgaaacaaatttttaccgatgtaatcttattcatagctatgattttattttcatgaagtttttattattattacggattttaataaattgtttatctagtattacaaaactatgtttcaaaaatacacaagtgacctcgctggagttagggtgttaaactaggcattaaaattctaactaacaaaagaataagtattataacacttgatatgaaaagttacatagaaaaagtcatagagaaattttctatgaaaggttccatgcaaactaaccagcctattcgtaattagcactatctaagtaaagaatagtctcctaagactatagaaagaagttatgcgtgagatatcttattctattgctgtgggatctataatgtacctaatggttagtacaagactaaatttagcctatgctattagtatcttatgtaagtatatggctaatctaagcatgacacattgggagactatgaaatttatttttatgtatctattgtgatctccagaattgggtttaaatttcaagaagaaaaagagtgttatgattactgggtagtgatgcagattatgctggagaaaaagatagtagaaagttcactttacctacttctttgctggaaagttcaactgcaacatgtagttgcactatcaaaaaaaggcaataaaggaggaaatttggctaaagggattgatggaggaactaaagctacttgaaggggattctatagtgttttcaaatagcgaaaggtgcattcaactctttaagaacccagtgtttcataataaatgagtgcaagtgctttacaatgaagctcaacatattatgatgacttaaggaatggtgcactatgtgaaggaaatgccaacacccattaggaggaacaatccaagtagtagcgaaatagaggtccagagccaactaaagaaatgcaccaatacaccaactttgagaagagaatgtttgagagggtaaaatgtgttcagttaatgcaacacatagtactttgtcacgccacaagattaatacttcctagatccacccattatttgtat

SEQ ID NO: 31261 - DNA, 1208 bp, Cannabis sativa
caacttgtcaacttcttctttaagtgttccttgtctctcagagtctaatggacatcctttttgccttttttctagatagctggggtcaatgtttaagtgatgaaaatattagggtttatccctatcatatctgagtgtctctaggaaaattgatcatgacttgcctttaaaaaatcaattaattgctattttagtttttcatccaaaattcttcccaatgtatacatattttgtgggattattaggatctaataaccttttccatctcttcaataggtttgagctggttatttttgtcgtagattctaggatctagatcctcctcttcatgtttgccttcttctgttataattaccatcaattgatgagtggctctcctgttctaaagttctattcgataacactcccgagccaataattggtcgcctcagactactcctactcctacttgtgttagaaactttagggacatgtgtttgattgagcttactgcccctaatccaattaatgatgggcaacccatcaatacattgtatattgatggaagatcaacaactaagaattcctacatcaacatcgttgataagggtgggctctcctaacagtcaatggggagttcgatgatgcctaggcttgcaatgctatctcctgtaaatccacataggctcaccatgcaaggcttcaactttgcatcctctaaccccatttttttcaatgtatccttgtaaaggatgttgactaaactcctgttgtccaccaataccctttttaccttcttattggcgagctggactattaccacgaggggatcaacatgtggatattgtacgtgttttgtgtcttcctctaagaagataattagaggtcatttgaatttgccttttttaatggttgtggagcaaacgccaattttccattttttatttcattgatatacttcttttgggcattattgctatttcaagtgaggtgtggtcctcccaaaatgaccaggatatccttgctctcaactgggggagattgcattctctggttatttaggttattagggtaatttggttggtttagctcgtttccttgatgtcttacatattgtctgaaaaatcctcgcaaaatcaatttttctatctcgtctttcagttgttgacattcttcagtagtatgccctatgtttgtgaaatcgacaatactttgtggaatcacgctta

SEQ ID NO: 31262 - DNA, 2783 bp, Cannabis sativa
  modified_base (1033)..(1039): a, c, t, g, unknown or other
  modified_base (1953)..(1954): a, c, t, g, unknown or other
agaagccgagctgctggcaaccattacatccaaaaaagttcaagactttgttgtgaagaacataatctgccggtttggattgccgtataatatagtctcggacaatggcaaaaagtttgacagccagtcccgtactgatttctatgcgaaccatggtatcatcaaaagtttctccgcagtggcgcatccccaagcaaatggtcaagttgaagcagtcaacaagacattgaagggtacactaaagaaaagacttgaggatgctaaaggaaattggctggaggagcttcctaaagtcctatggtcgtaccgaacaactgagaaaatggcaaccggacagactccatttgccatggcatatggatatgaagcaatgctgcccgtagaactcgaaccaccatcccacagaagggtaacatatagccaagaagccaatcatgtactccttgctaaatcacttaatgaaattaaagagaagcgaaccacaacaaacttaaagctgatggcacatcagcaaaaagtagcttgttatttcaacaaacaagtgaaggctcgaagattctttgtgggagatatggtcctaagaagagtatttctaaacaccaaaaacagtacgacaggtgtgctcggacctaattgggaaggaccatatcaggtggtcaatgttctcgaatcaggagcatacaaattgggtaagtatgatgaaaaaatgcagcccgttttgggaccaaggtattggaataggtaacatttaagaaaatactaccaatagaagtaccaggtcggatgaccatatcaagtactaagaaaaagaacatttactcttaagtgaatggccttctgggtggaccacacccaaaggttcagataaaatgacatagtactcaggttggacgaccaccatctaaagtacaatttttaattcctgcaatttgttttatttcatgttaagctaaagatcagattagatcaaattaatagctttgatgtatgttactatggtaacaaacatattttcgatcaataaatgaataannnnnnntatttcaaaattcaaattgagtcgagtttactagcatgttgttaatttaccatcaaatgcatacaaaaggtttggtcgagcccaaaaccccgaacatacaaaagagcacacttggaaaaaagtataagtgaccaagagtcataagtctgctcggtcacttgggggcacctatacctgcacaaagcaattggtaaaaataaaacaaacacaattgtaggatgattataaatagaaaatgaaattcaataaagataacacaagcacgtaaagccgggattaaaggctgcccggtcagcctgttgtttgaaaaattaaaaataattccaagttaaaagattgcttggttggtcactttgtcttaaaaaaggccttatggctggacagataaaaacgagatagaaaaagaaagtagtcaaacggctggagtcccaggctcttggtacgggtcttctgtgtcagttggagctggaggatcgtttgtctgagcggggggcatgtcaacagtctagccagaggtggaagtggtcgcctcgggttccccatatgccacctgagaagcacagtgttagggtcatcattttgatagattatattaatagtgagtccagtcgtatatgtggttttaatctattatacctgcataccagctttctattaaagtttgtgtgggtctgttatgttttaactgttagttttaattgttcttaggtcagttgaacatatgtctataaataggtagtttcattctataaatgagttagctaggtaattgatatttttagttagttctgatatatcgtgtgagtttgtggggtatcttggattgttcgttgttgtctttcaggtctgattgcatagcttggagatggagatccatagcagaaagatcagagcctggtgttgctgagttcagnntgaagggagttcagtgtcatcttcgtcatcagatttgaagggatttcaaattgaagaaaagtgtcgaagacgaacttagctgctgcataagggattttgtgcatacaatcaagaatcttgattgttgttggtaatatattactaattgctgtaaagattgaattaaattcctaaatgtgaactggagattgtaatacaaatcttttggatttagtagatgttattaccctggttcggggaacccaagcactagtcggctgagatttgttctcagtgcagatgaagcttgtaaatcattgtgtgctttactgctttatcttcaattcgattcttgaatgcataagttgaaattaaacaatctaaccatgaataattcggtaacttgaatcatgaaaattggataagtagttctttcatttggtatcagagcttgaaattttctaaaaatttgtgttagatcctagacttgtctgattcttgattctgaaaaagtcacttgatacgtgttcagatttgatcttgttaccactaaccctctctgagttctttctcagagaactatagtacaagagtctgcttgtttctttttcttttctgtgcagaatggaaatgttttgggaaggtggatcaacctcgagacctctgatgttggagggtgctaactacccatactggaagactaagatgcgagcattctttagagctgttgatgaaagagtctgaatgtccatagaagaagggtggtctagacccacaatgacggagaatgaaatggttacccctaatgtaacaccctaactagcataggcgtgttatcatgattttaaac

SEQ ID NO: 31263 - DNA, 1636 bp, Cannabis sativa
gcatctccactggaaccaagtttaattcatccaagtcattctgcgaggccagtttttccaaggcatcagtgttagagttttgttctcttgggattttctcgattttaaactaaccaaatctttccaagttcttccgaaccttttctagatacttacccattttaggcccttagcctggtattccccgagaaccttatttacaatcagttgtgagtcactatgacacatgagattctagaccttcaacgcctcgactatcctcaagccagcgatcaaggcttcatacccagcctcgttgtttgacgcgtcaaattgaaatctcaaagcataatgaaacttaaagccttctagtgaaataaatattaccccttcacccgagccctactcgttggatgcaccatccacgtataacttccaagtggctgcgtctcggtgaacaggaaaatttcccttttgagttattccttctattaagaagtctgccaaggcttggcccttaatggatgttcgagggtgatatgttatgtcaagctgccccagttcaattgaacattttattaatcttccagaagcgtctggttttgataaaacttgtctcaagggttgatcaattaacacttttattgggtgtgcctggaagtaaggtcgtaacttgcgagacgcgtggataaggcataaagcaagtttttcaagaaggggtacctcgtctctgcccccagtaacattttactgacatagtaaataggttgctggtgctttccctcttctcttactatagccgcactaatcgcatcttccgagatagctagatagaggagtaacgtttctccagttattagtttttccaaaactagaggcgtcgccaaatgccttttaatgttctaaaaggcctcctcacatccttttgtccactcgatttcttgttgcctcacaatatattgaaaaatggcaaacacgtatcagttgatttcgaaatgaatctgttaagtgcagccatccttcctgttaaagcctggacttccttaggttttgttggtgatgacatatttatcaaagccttgattttctcagggtttgcttcaatgcccctcgcattgacttttcccaaggaaactccaaaggaatattttttcgggttaagcttcatattatacttctttaatatttcgaagcattctacgaggtttgtggtatgactcccagtttttactgattttaccaacatatcatcgacgtaaacctccatgttttttctgatttgattcgcaaacatttcattcaccagtcgttgatattttgctccagcatcttcagcccaaacgacatgactttgtaacagtaaagtcccatgttggttacaaaacttgtttgttcttgatctcggacatgcatttttatctggttatatccagaatatgcatccataaatgacataagctcatgcccagcagttgcatccaccaactggtcgatcctgggtagtgaaaaacaatctttttggcacgccttattaaaattagagaagtcaatacaagttctccaagttctgttaggctttgggacgagaacaggattggctatccacaaaggataaaacactttgcgtagaaagtcactgaccaataacttatccact

SEQ ID NO: 31264 - DNA, 1170 bp, Cannabis sativa
tgttctaaaaaatgtgctaaattttatccgtattaaaaattgtactaaatttaacataaaatataatattgtactaaatttaatttacaataaatttaaaattttttttattatgattccattaattattatgattcttttttttttatttactaaaaattaattattataattcatttatttttataactttgtttatttacccatattattatttagacaataaaaataaaaattaatatatttttgtaaatatttttaataaaatattaaatgcttatcaataataatcattatattttacattttggttattgattcacaattttgtaaataatacaccaaatataatataaacttatttttatgttaaatattattacaaattttacatcttggaaatggtgctagatcctccaacatctcgtaccatatatatactcgtcgtcgactctggtataggcggactaagcacgcacctaaaacccacttattttaaggacccaaattaaaaaattaccttttaaaaaatatatacatatttttttaataatttttaaaaatactatttatctagtaaaggctcaaaaaaaaaaaaaaaatttgctagtaaaactttttcgacaaaatctattaaaattaaataacagacgcacatttttctcaatgaaaaaaaaaagtgttgaatctttatatcctagaaattaatttcgagtgataaaaatatgtgctaatattttgtataccaaaaactaatggtgtaaataccaaaaatatggatggtgttgttctattctcatattcgtgttatgcctacccggaccagcctattttctatataagtttaaattggtactctatttttttttcagattttatttttataattaataaaataattactataaactatgtatcttttatagttcaattatttttatctagtttttaataaatgccttgatctttccttttagttttaccttttctttgtttagtcccaatatttaattttcattttattcacccatacctcatattctttttttaggaaacccatacctcatattcaatgaatatatcacttttgttcttttatttatttctcttttttaattttcttttcaaatggtttcctcaataaccaaaccagaaagataattcggacag

SEQ ID NO: 31265 - DNA, 2615 bp, Cannabis sativa
  modified_base (1024)..(1031): a, c, t, g, unknown or other
  modified_base (1905)..(1911): a, c, t, g, unknown or other
  modified_base (2221)..(2229): a, c, t, g, unknown or other
tcttgtttgagttgggaagccaattgctaagtgcaaacctcatgagagatgcatgagcaaaggtaagatgtgtaattcgaagactctccccagatttcaagtcagtccgtgcactagtgagttcagtgagcatcaagtggtgatccatagacattatagaatttagtacattttctggcaattacaaggcttgggaaatgtctttttcagaaaaagaaaaccaatgtcctctaacaaacacttttcgaaagagtttagaattctcatcaagaaaatcatcagataagttagcatagaattctttgacaatgttttcaatatacccttcgaaaccagtgagagtgttctcccattgatggtattgaatgaacttaacaataccatataccctatgagcatgcaaatcataattcctttcactttcaaaatttcgggtagcatacaaattccaatcacactcattatcacgaaagtaaaagcgagaactgtaggagtgagatgtagggatattaccaggagatgattccttcatgggtgcttgcctttggcagcagcagaagccttggctgctgaagatccacgagaagtcgttggagcagatttggtcaaaggaggctctagttagagttcaatttcctcactgtctgaggaggctccgatgtcttcaggaatctctttttcagaatggagagacacggatttatcagaggaatcaacagagggatcatccatgggttcttaaacaaccttaaatatctctttaaatttaaaatttaaactaattttaaaatatttatataattaaattattattttaactaaccaaataaattttgaaaaattatggttgttaaaaacaaccttaaatatctcttcaaatttaaaatttaaactaattttaaaatatcgaagtttaatagaattattttattaaattaaattaaatatctaataaaataaatgatttgaaaataaccaaacagatatttttcaatatcattttttaatcttataatttaataannnnnnnntaacaaaataaaccaattttaaaagatgtggttaggcaattattattttaaggataaaataataaaaaaataataattatccaaattatatgtcaaaatatctcaaattaaacctttttcaaatttctacaaaaatatctaggttactgaaatatttaaaatactatttataaatttctaataaataaaatgacataatatcatttttctaacttataatttatagacaattaaatatttcacaaaataacctatttttgaatttgaaaatattatggttaggatgtctataaaaatatctaagttaattttaaatttattaattatttaattcatcttataagttaattttaatataatatttcaaattaaaaagataatgttatcttttaatttaaaatatatctaatattaaaatatctaatcttataattgaaaaatatataaatattgacatattaataaatttttaaaatctgaccataatatttaaaaataaaataattaattttttaaaaaatttaaacctcaaaatatcaaaattaataatactctattaaataaattaaatattgttaatttaaaatttgacatttttatttagatttttagggtttgaaattagaaaattcaaaattcatggaaaaaatccacaaaaattagatttttggggaaactatgcaagctaccagaatgtaaagaccgcttagcttaaatttgggaattagccgataattagggtttaattacataaattatttattaattctaaattattaatttatgatattttatttgaattcagaatgcatttatatgtcatatatagaaatttcataattttgcatgttcagtgcccgacaacattggaacnnnnnnnatggcttagtagaatcacatcttagtattttagtataacggagcggtatagttagacattggaaatttcgggaatagtcgggattttagaatttcccaaattaccccttagtgacttttagtgatttttggtgttaaagggcaaaatggtctttttagcaagaagtgttttgtcttttgtgggttatactaatctgatttttaaagtttaattaaatggttttatttgattaaaacaaatggtgtttatctcattttctaagaaaaatcaaaatttggaaaagaaagctcatctctctctctctctctcnnnnnnnnnctctctctctctctctctttcaagctctctctcattcgaacccctagaccagctagggtttgtgtttttcttcatcaattctaagtgattttcagcagttccaagtgttatccaagccaaggtatagttctatcaacctcttcttagtttttttgaattgtaagaaagtgaatttttgcatgagttgggattttggttgctgttgttgctgctagtgtttgttattgttttctatggataaatgatgcttagatatgttgttttacgcttgtggtggtggctgctttagtgtttgagcaagctttgagttttagaactcaagcttggctcattaatggcaagttttgttctagtgcttgtagttgtgttttgttgcttggaaaatg

SEQ ID NO: 31266 - DNA, 1464 bp, Cannabis sativa
aataataataataatctatatatataaaggagaagtatgaggcggtgatatgacactctaaaataattttattctactctaaaatttttcttcttttttcatattttttagtcacattaaatatcaattaattcaataattaataaaaaaattcaaaaacaacaactatttaaaaaaaaaaacaacatcgtatcacatttttttatcttttttttttttggttttatttttatattttcttaaaaaatctcttttttttttaattaaatttttaaaatgatatatttgatggcttttgttttttcttctatcacttactagattttatatatatcctaaattatttttcttaaatctatatatatatatatatcaatatatctatacatctatatatctatataaaggagaagtatgaggcgatgatgtgtcactctaaaatagttttattctactttagaatttttctccttctttcatattttttaatcacattaaatattaattcaataataaataaaaaaaattcaaaaacaacaactaattaaaaaaacaacatcatatcaccttttttatcttttttttttatttatattttcataaaaaatctatatcaatatatatatatatatatttataaaggaaaagtataagacggtgacatggcactctaaaatcacttcattctactttatttttttctcattttttttcatattaattaatttaaaataaaaaatctaattactaagtcatagtttcatacggctacaatctaaaaatttttaaaaaacgaaatctacaacaattaattgatcactctaaaatatctataataactaattatttttaaaacctaattaacaaaactaaagtatttatatataaacttaattctaaacctagttatattttaccattcactcttccatttttttctctctatctctattattttgttaccgttttcaatatatatttttgtatgggaaaattagtttttacttccatattagttttattatcaatgcactttagttagaattaattaatttcgtttttttgtttacatgcacgacatcatattaacaaataacaattgatgatgttttacattgtattggttggtgttgataatgtattaacttgtatttacatataactttttatatgctaatgtttttttttctctgggcccatccataggggtaatctctttaatttaatgcaacaagtctactccccaaagatatagataagaattctacctttatttattttgagcaaccagatttacttttcttaatgttatctctctaatttctacaaataaagaagcaataatttcaatttaaatggattactttcttagcaagaagaggtagtttctattttaaatattttaattttcttcatgacaaataatattatttaaattttgatatttatgttgtatattgttaa

SEQ ID NO: 31267 - DNA, 2314 bp, Cannabis sativa
tttttaagaaaatcctttgattagaaaaggcagcactgtagcgtgccttagcattagggtatacttgggtattttttaatcacaagtatattcgtctaaagtaaggaggccaacgttcttcaagttctgctcatttagcaagaaatctacacctcacaacccatatggcagactcagcagggttttgtgatgcttggctatctctggggtagggactggtcttcgaggaaccgctctaaacagataaaagtttagtaagaaaccttaaaatttacaagtaaatgtttttataggttgttttacgaggatgggaacttacgtataatgtgaaaggcagttgtgtttattggagataggcccatcgtctagaagaagtcttctttaaaatctgtcttgttgggcaatctaactacgatcttgcgatcaccagtataagtcccaacatagtagaagcctcacgcagcgttctttctcgtgggaactgctttgacagagtaaaagcaggctatctccaaaggagtagggcactgccagcctaagatatggtatagaaccttgaggttcgcaaggatcctgtatgagatagtgctcaactggaatggtgcaaccccgatgtagttgcagtactccttaaagtaatccctaaggggaagggctgccctagcctggatatgtttgaggctctagggttcaacacctgaggagttacttgtgctgggtccaccacactccttgcattactctttttcagggggggggaaaacagctgaattccccaggtaccacagaccttataatgcacccttttcgctgcttgatgctgcaggaattcatgataccaccgagtaggccccaatagacctaaccttagactcgataagttctgcctcaaaggtaacattggggtcctgtggggtctttgatttgagaggcttaggagacatgatttcaaactcaaggtcacatggttcaaaagcaacagtgactttgggtaaaaacattggtcttgcgagtggaatagaagttagtattgtgggttcaggccaggccgcgtctcacaagacatgacgcttgcccttggaaatttcttataggaattgcctataacgactggcagtctcttcttagctcgactaaatcagatggtctctaattctggcatcatttacttctaatttggatataggttcgaaatttttgggtttatatggagaggctagatgtttaggatttctaattctaaaaattctagagaataaaattctgaaccagattgggacatttctacaatataaaaataatactaatttctggatgaaatttattaaaccaaagtcttaaggaatatgacaaacctaaattatgtctaaaccctaaaaatcacccagaaataatgaaacctaattgttaaaccgaatgaagtgacaaaattcaagatgatcataacccaaaaaaagagggaaggaaaatggatgagatacttactgtgtgaagtcgaaaaactgggtgtcggagaattttgcaagtggagacgtgatggccggcgggatgagtttttcgaacaccaaaagttgaagagcaagactgagtaaattcgcaggaagaatgtcaaagataaggatggcatgcacggattcgggaagcttgagtgaaaagtttcagaaagcttaagtttttgaagaagacaaaaatagtagaaaattggattcttaccgttttatactctaaatttaacaaccatcagatcataatataaaagatctaatggatgaaaatagaagagaagtggaaaagacggttcattaatgctattcatgtgcattggaaccataaagctgccaaaatcaaaagcatgcataatttcaaaatgaattatgacaaaaataccctcagtgatcatgtaaaaagcaccttttttaaaaagggactttttaaggggcaattgttataccttaaatttagctggcacttcagaggatgacatgtgttaaccttggagaatatgaatcaacaaatataattgcaattatatttgaaagatattaaaatggaataactcattagatgcggaaataataatgcacatatgtaactcgctgacagtatagtcttgagcgagacaaagatgtacaaactagtgattaacgtattgatgagaaaccattttgcattagaaggatattggtaatgcatagcatggcactcacctcgcgatatacgattagtgagacacccatctcgctataggaaggcatactcctggtaccttcactaatcagctccaaacatcttttaatgagatccactgctccgt

SEQ ID NO: 31268 - DNA, 3704 bp, Cannabis sativa
  modified_base (34)..(34): a, c, t, g, unknown or other
  modified_base (2049)..(2050): a, c, t, g, unknown or other
tcacccctgcacccgagccattttcattagatgntccatccacgtacaacttccaagtttctgggtctcgctggtcgagtggattttcatatggaactatcccttttataaggaaatctaccaaagcctgacccttgatggatattcttgagtgataggttatgtcgaactgccccagttcaatagacccttttatcaaccttctagaagcgtctagttttgacaaaacttgtcctagtggttggtcagttaagacctttattggatgtgcctagaagtaaggccttaatttgtgagatgcatggattaggcatagggtaagttttttaagagggagatatctcgattctgcccctagtaacctcttactaacatagtaaactggttgctagtactttctctcttcttgcactaatgctccactaatcgcattcttcgagatagccaagtagaggagttaagtctctcaagttattggtttggccaatactggaggtgttgatagatgtttctttatgtttgtgaaggcttcctcgaactcggctatccattcaaactttttgttgccttgcaacacactgaagaatggtagacacttgtcagttgattttaagatgaatttttttagagctgccattcttcctgttaagacctggacttccttcagttctataagcgatggcatttctatcaatgccttaattttctcaggatttacttcaatgcccctcgcgttgactatgaatcccagaaacattcctgaggagactccaaaggaacacttcttcgggttgagttttattttgtactttttcagtatctcaaaacactctgtgaaagcttttgtatgatcttcactttttaccgacttcaccatcatatcatcgatgcagacctccatgttccttcctatttacttttcaaacatttcatttactagtcattgatacgttgccccaacattcttcaaaccaaaaggcatgactttataacaataaagtcccatatctgttacgaaacttgtatgctcttgatcagggacatgcatcttaatatggttatatccagaatatgcacccatgaacgtcattagctcgtgtctagcagtcgtatccttcaactggtcgatccttggcagtggaaagcaatcctttagacatgctttgttaaaatctgagaagtcgatacaatttctccaagtttcgttttgttttgggacaaggacaagattagatatccatgagggatagaatgcctctcttataaagtcattagtcaacaacttatccacttcctctttgagtgccccttatcttttagaatccaacggcgtcttttttgtctcttagctgggtaatttgggtcgatattcaagtggtggcaataactttagggtcaatccctatcatatctaaatggctccaggcgaactgatcctgatttgccttcaaaaaacttattaattgttattttagtttttcatccaaattttttccaatgaatatacactttgtggtattttttggatctaaaataacttcttccaattcctcgatcggttttaacacgttcttttaatcttgaactcgaggatccttgtcctatttctagatccttgcattgtttctcgctttcctttgttatgactaccattaactgatggtcgacatttttattttgtagcgatagcctttctgagccagtagttggtcaccttgcactacacctacacctgctggtgtttaaaactttaaagacaggtgtttaattgaacttactgccccaactccagttagtgcaggacgacccaatagtatgttataggccgacggtaagtcaagaactaaaaaatcttgcatcaatgttgtggatgtaggttgctcacccaaagttaacaagagtttgataattccttgactggaagaactatccccattggatccgcataaattcaccatgcaaggttttaacctcgtattttgtaatctcattttctacagtgtgtctttgtaaaggatattcactgaacttccattatccaccaacacnntttttattcttttgttggtgagctagattgtaattacaagtgggtcggcgtgtggatacctcacgtgctttatgtcttcctccaaaaacacaattggagattcttcagtcttactttctttgatggttctggagcataaactaattgcttgttttttatttccttaacatatctcttctgggcatttctactttctccaatgagatgcagccctcccgagataaccaaaatatcctctctttgaattggagaaggttgtaatctttggttgctcgggttattgggcaaatttggctagttttgtccattaccttgtttctttgcatactattgaaagtaaccacaagagatgaggctctctatctcgtcttttaactgacgacattcatctgttgtatgccctatgtccctgtgaaatctacagaatttcgtttcatcccatttgtgcctcgcatgcctcatgggctcaggcttgcaaaatgcaacttgtgcttatgtgcaagaaatatattttcctgagtttcattaagctcggtataaatagtgtaaattggcacgtacttatcatgcttcttctttattttttcttttctttggttgattccttagagtcatcttttctcttagtgctagagcctcctagattgtcagccttcatcgagacggtacttgctaagacagtgctgcgtttatttcccgagcagttctttatcaatttcatctctttcctttcttcctcttttcatacgaacacctgagctctttcattgaactcactgatgttttttatagggcaaccctgtaagtcatcccacagctcgcctctagctatcgagaggtcagtcgtatgcttgaagagtagtaagttgtatattgtccttcaagtttctaactctagcagaggttgtactaaattgactcaagtaagctttgagtgactcgcctggctgctgcttcacgttagtgtgggaagacgctttaggtcgcctatctctcgctgcctgaaattgtttcttgaaatcaatagacagttgttcccaagaggtaattgagtgatggatgaatttatataaccagctgctcgctgccccagtcagcgaggtggggaataaaatacaacataagttattcatgacattgctagctcgcataatggtattaaaattattgaggtgagtgaccagatatatagtcccatcgtacggtgagacgtgggagtttttaaatccttgggaaaatttagagctcataatgattggatggaaatgtttgagctcttcatctaaatcgtaatgaggcagtttcccatcttgatattctttgaatttgttttgtaactcattgattcaaaattggattggatcctcttacttttgattggaattgagttatttgcataaattaggctttctccgattcaattcctcacgaagatctggccgcctttgatcatagttgcttgttgaccttgtacttgagtaactcctagattgactactccttgtatgacttatactttctcaagcattactatgttcaagtctatcccctcgtagatcgactgtgatctcgagattgcgaatgtcttgtgcttgaacttgcctcattacctataggccttctcctttggaaaaggtttgatacatgtcccctg

SEQ ID NO: 31269 - DNA, 1682 bp, Cannabis sativa
atataaaccattaatctttttacctttcatcattactaaggaacctttggtgatcctcaagcttctgttcatggacttgtatctgtatccttcgtcctcaagcacaaccagggatatgaggtttcatgtaaagtccggaatgtgccttacattcgtcagcaccttgattccaccatcatactgtttgatggtaaccttctcagttccaataaccctgcatgaatgatcattacccttagaactttaccttcatcaactgacttataatcaaaaaatgattcttgattaggacacatgtgataagtgcatccagaatcgagaatccactccctgttcattgaaaactctgagatagagagcagctctccgtccatggagcagtcatcactatcttcagcgattgcagcagagtcttttccatgatgatggtgccagaagtctttcctatctccattttgagatttgttgaagccttgttgctccttgtacttcttgcaaaatctttgcaagtgtccagactttccatagaagcaacactttcttttttccttctctctggactttgatcaaaattaagagtgatggtgtttactcttcaaacctgctttcttgcgggtgatctttctctttccaaatacacttattcttcttggattccttctacaactgtaattcgaaatctttcgacttaagtgtggcaagaacatcttccaatgcaataacatccctgctatacgatggctgccttaacttcttaatatgtgattggaagtgatctcaacaggatgatggcctgactttcttcatcaaccttgtgatttatgttagccaaacctacaacaatctcattaaatctatcaatattctcatctaaagaaagggacaaaatcattctaaaccgtataatctttctagcaaattaatcttactagttatcgatggttttaagtacaattcttccaatttatgccaaacttctttatgagttttcttcgaatactgtttgatcgacacatgatgattgtgtagtacaccatctcctctgtttctactttttcctctggttttttttgccaataacttctcatctccaagaacattggagactttctgttgcactaagatttcttttagactttctctccatagcgcaaagtctccagttgcatcaaacttatccaattcgaatctcgccattgatgacatttgtaacaacctaactaatataggcgtgttagcgtgatttttagcatattgtgcagctcgatgctaatcaacgagattattgaaaatcgtgaataattaaaatttgcttatttaatttaagacttaaagtattacatacataaaatcccgggatccactacaagaaaatagggccattacctacaaaccataaatgtgggtaaaactccccaaaatgtaggcaaacagatttacctacaaataaacaaataatttttatttgtagataagagattgtggagaaagatcttcacctacaattaattatatttgtaggtatgaaaatatggtggatcccacctttcttagtcaatgatgatgagtaagcaagtgatgtggatgacgatgtgtcgttctatgtggcagctgacaaggattgccccacaggataacatgttacatatgtggcaatccacgtgtcagcttagtcataggcc

SEQ ID NO: 31270 - DNA, 1246 bp, Cannabis sativa
ctaaccacactattgatgttctaatataatggtaagctcttacataaggccgttttaaacaccttggaggccctgttctaattttaaaaattagacccctacaaaaaaaaatacaatttataaataatatttttaaatattattatattctgtatacattttacaaaacactaaaaaattccaattaatttataaaaattattattgattgcaatacaacaaaaaaataataaatagcagcaatgaatttttattttttttgcttaaaaacaatattagaattgaaaatagattttgagaattgacatagaaatgatcaatgataagttgtcagtcctttaaaaaattgagttcataaaaaaaaaaattgaagggcattaaaaaatatatattagaccctttatttttttgggccctttatttttcgggccttgtgcaatagctcatcttgcaccccataagggccgcgtatccttacattagtgttgttttgtgatattattcaatattttaaacaagcttttatatgcttttgcagtgttgcattgttgaaacttgctgatatggaatattgtggtacaacaaggtactccaatacattttacacattgtatgttagaatagaagcattgtatattctataagatgttatccatcaatgattattgatctgaaatgtattctacacccgttcgccaactaatgatgaaacataacctatttgacgtttcaaattgttaatgtcttgacattgttgggtttaaatacttgcagttactttataaagatccttttggggaaaaagtatgcttttccatatcgggcacttgatgcttttgttgcacaatttgtgagattttcgaatgacacaagaattttgcctgtaatatggcatcaatcgctgcttgcattcgtgcaaaggtatttaaacattcaattgggtgttccaagtaagagtttgagactggcaaagttattgattcttttacaattaggtggcattgcttacaggtacaagaatgaactgcagaaggaagataaagttaatctgagagctcttcttgaaaagcaaaatcataaactagtgagaacatttatctaaactactttcatttattctatattcaattctttcgttaacataactaagatggatatgtaatcattttctctggttgaatgtagattactcctaagattagcagggagctaaataatagccgcaatcggggtgagaaggaggatg

SEQ ID NO: 31271 - DNA, 1991 bp, Cannabis sativa
attttacaaaattcttccgtatcagaaattattcatgtactcacttatgtttttgacactttgacaagttattatctcaatttttttttataatgttttaaacaaatgaataatttagaaattttttgacttcataatttaacaattatttttcagtcttaacaacttttaaaatctaataggtgtttggccaaattttttaaaaacaatttttttgaaaactaagttttaaaaaactagaaaacagaaaaatgttattttttatttttgtaaatattttttgtctaacatattatattttacattttttctcacatagtcgaacctaaacccaaactcggactctgaaactggacttcaaaactggaccccgacctaaacccaaactttgacctggacccagactccaaactcagacctcaaccacgatcccgaccccgacccatacctagacacggaacctggccctaaccctaaccctagcccaaactcggacacggacctccagacctgaacccaaacctagccctgggtttgggttcgaggtccgaggttcgaggttagggttaaggttcgggttcgggctggggtccaagtctgggtcattcagtttgagataggatgggatcatgtcatggtatagtgtaggatattatatttttttagtaaaaaaaatataaaaaatagttttaaaaaaccttagtgaaacaccattaaattttttatattgacaaaaaatattttttattttcacttttaaaaatacaattcgaaaagttgaaaattaaaaactaaaaaatacagccaataaacctcttaaatttaccgtttttaaaatcaaagcgctaaccaataccaggcaaaattttattttctttttcatacactcgctagtcaagctatttataatttgattttgataacataaattgatcagaaattgatgtggtacttattacaactataatgtatattgtcttataaaataattaaaattataacaattaattttttttacagtacactcctaaaaaacgagtgtatcgatataccccttcacatttttgatatccagataattttaatcctaactatatgtatatttacatctaattatttaagatattctgtaaatttttgagaaattcaaaataaacgtattttatacgcatgtgaaatagattgtttaaaccttacaatctgtattataaattataatgaatttttcaaaaatttgtaagatgtcttaaataattataataaataacatcatgtatataaaattataatatatattgtatatataaaaaaaaatcataactatttaatattgaaaataaaaacggatgcaagagtatacttattttttggagtgcactatagaaacacactagaattatttagagcacctccaaaagtgcaccattacatcgaattagtgttaaatcctcatatcattctactccaagaattataccaaattggtatgtaccaaattttacatcataataatattgaattttgaatctatactaaattgatacataacttttttttaacctttttttttgtttgatataagaaatatattatttaagttgttgacaataaataatactacatcataaattagttattattaattactaatgctaataatataaaatgtgagatttttgaagcaaaatacgtttatttgttgtgatatttggtgtgaattattggaatctttacttaatagattttacattaaattaatgaaaaagtactctaaaatagtgtaattattggagatggtctaataaatagtttgtacaacaaatattagttattattttttttaatatatattcttttattatatattggtattgtttatttatttaaattttatataactaggataatcacaaataaaagccttaaaaataaaaattctaaggaaatgtgctaaaaacaacttagggtaatatttgtaaaaaaaaaaaaaa

SEQ ID NO: 31272 - DNA, 2637 bp, Cannabis sativa
cttggtgatggtgatttgtattttctggcctctgagatctttctctggtcatttgtattttctactttgttcatctttttggcactgtgtaagctgcctgaccaagggacttgttgcatgtggctggctggccatggatgcatctaagaggtgctctccaaccattgtattcccaaagaggggatggtcagccactattgtagtttgacactaactttgtcttgttttgcttttaggcattgatgaagctaagctgagtacgtgatggttcccggggttcctcgaatgctctttgggaacaggtaaagaccatggaggcttttccttctggggaaggaaaaagccatgtctaagatagagtctctcattgtagagagatagagcatgatttttggcctagagaccatgctgggcgcctaaaacgagaacaccacaaaagttgcctttatctctaggctgaagtctgaagttgtagagcatgaggagagactgagggcgggtcttgatggctagcaggccataacggaggagtatgctgacttgtcctccaaactcacttatgagtttaagctgtgtaacccaagagctaatatatcatacatgggcagtgaagcttttgtggagtgcacattggcacaagaaagtgggctctttgacagccggttgggagcagattagcccgttccctattcagaggggtcactattagggaaccatgatgaggggctggttggcccacctactgaggaggtggtcaaccaggatactgaccaccgggctggacaacttggtgatgttgtggccggcctacactctggcgatcctgatctcacgacttcagactcggctcctcctacccttgcatacacataggcaatatttttcattagtactattcaacatcatgtctgtataatataaacaatattttcatgttctgtatggcccgtggccttttgtttttagaacattacttattttcatgttccatgtgacatgtggcctttttagaaaactacttattttcatgttccatgtgccctgtggccttttagaacactacttattttaagccctagggccttcatgttcttatctttggcctatagaccctctatttttgagcactagtattgtttggccctgttacttttttatcatgaattgtgtgactagccaagcggtatttaatcatggctatcttcttatggccttgacaagtaagggtttggatttactttgtcaagccgaagtatgcctgcacgacttataggcaggtttagtaccttattctaagtgttaaaatttctctgcataagttttttgtgctagttcgatgcattgtacagtatgggtgcctctcaagtgaccatgcagactagtctctgggtcacttgctattcacaaagtttcatagaccttgcctgggttctttcttggggttttgcccattgtacgcatgtggaactgaaagagtaactttaagaagttaatcttgtgagcaagtggtttagacataataaatagaccataaacattgatttttattcattaatttgtctttgttgctgtgcaacttacataaattgaatctacaagcttacattacatagatttagcttctagatatcaaatgactacccctgcttgccttgcatagtagaggccaccgttgaagaatagcgggagaccacacaaaaaaggctatgggtactagctcttttgtactctaatgttgagtaggtagaactgctaatttggagtagtgttctgtaagctggttactgatagtatttgcgaaggtgttctctattctagtatcttggtatgagaacgagttcaatgttcttgttgtaccttcccagcttgtaggctcccttactagttatctctgtaacttgataggggccctcctagtgaggtctgaacactcttgcttctgagtctttagtgtttaggaatactcttctgagcaacttggttattgaagtgccttgctaccttttactagtaggcctgcaactttaggttggcttgatctcttctttctttattgtgtcaagggactctgccaatagggtgatgtttgtttgttagtcataggttgatctcttgtgagacactggtactagcgctatgggcaacatcccctcatagccataagctagagcaaatagagtttgcctagtggctgtcttcttggttgtcctatgcgaccataggacctctaggagaaattcaagccaatttccttttgcttcctcaaggcgcttcttcagggcatccttgagggttttgttgacagcttctacctacccatttgcttgaggatgggccacgatagagaagcttttgttgatgccatgtttgttgcagaaatcagtaaacatgtcactatcaaactacttcccattgtctgacataatcttctaggaaagtccaaatcgacatatgatgttcttaaaaacaaagtcaaggattttttggaggttttttttgccaaagattcagctttcgtccacttgatgaaatagtctactgcgacgacaacaaactatacccctccttttttctttgggagtggactgattaggtttatcccctcacaatgtgaagggccaaggatactgcatcatc

SEQ ID NO: 31273 - DNA, 3957 bp, Cannabis sativa
tgagtagatctaagaccctggtaaaataaattcccaacagggaattgatctgattggggcattacccacagggcgaggatgtgcaaagtatgcagtagtagcagttaacttcttcacgaaatggacagaggctaaacctctagtttccataactagcaaaaaagttcttgattttgttatcaagaatatcatttgcaggtttggaatacccatcaaaatagtgtctgacaacagaactcggtttgatggaaaactattcactaaattctgagaaaggattaagattataaaaagcttctcattgatatcaagaccccaggcaaacagacaagtagaagctattgataagaccctaaaagatactataaagaagaagttggacgctgctaaaggaagatgggtagatgaacttccacaagtgctttggggtcacagaacaacagagaaaacaacgacatggcacactccattctcgttaacattcggctcagaggcaatgctaccagtaaaagttaacattgtgacccacagacgtgaattctacaatcaagaagaaaaccaagaacttcttaatatgtccttggacttacttgaagaaagacgtactgactcgcaaatagctaatgcagcttatcaacatcaaatcacaagatactttaacaagagagtgaagaaaatgctctttaacattaaagatttagtgctaaggcgtgtatttgtaaatacgtgagatccagctaccagagtatttaacccaaactgggaaggtccttatgttattgagacagtagtgggaatcgaggtttataaattagctcagcttaacgggtcgctaataaagaatgactggaatagtgaacatttgcgaccttatttccagtaaactcaaaatgtaaatgttgtatttatctttgtacataatagttaaattcttattataaatatagttaagatttgtttaagtaattataaagtttatcttctttaaaattacttgatggcatatatatgtgtataataactagaattcatctaaaaatacatattatgttgcagacctagaaaattaaaattatttcacaaaggaaatgatagttgattaaaattttctatggacaatataaagtcaaaaaattgaaaaaccttttcttgtaaatgagatcaactcataaaacaacataaagctatatgcgagttgaatgttctaacgactcgcattaatctggcatgtattaaaacgagacataagaataccttaaaaaataatactaaagctaaaatatgaatagatgatctaaatattcatatgagcaatcaaaaaatatacaaaatagttccagagctgaattattcaaagtatttttttaagttttctctaaaagaaatacgtttaaatatggaagattgtaaactactggcatataatagggcagaatcaaactgctcgtggattaaagctacacgcagagattatgaaatactttgaataattcacctcttgaactattttgtaaactacttaaacatatcaaaggaaaaatatgaataatggaaatgcttcctaaagtatcaataagttggatcagaatataaatgtttagattatgaaataaaatacaataaacagacatactcaattcaaacataagatacgagacattaaaagtaaagataaatgcataaaaaagcaaagttggtcatccaataatgcaaaattccttacaaaaaataatgcaactagttgcaaccattatctcggccaaatggccattttcctaaataaataaataaataaagataaaaagaccaagcctacacagtaggggatttagttggttcttcttgatcttcttcaaactcgtctgcatctgcagcgtcatccttcttggtcttctcgtagtatgcaagaatctctttagcccctttcccttgaaagccgaaatctatctcgggattggctaaccaggcttgatagatagactgcctagcaattttgttgacactattttttgtgtcaaccttggccttctcaagctttctatcaacctcagcctggatagtcttgttagcatcctcgagctcttttattttcttttggtcagccctttgttgctcttcagcttccttctttacccgagagagctcagactccgaatcattccacttcttggccatgacatcatgatgctctctagcctggcaaagctctgtctcgagcatctcaactcattgaagccccctatgttgagagtaaaggacaaaagagatgcctacgaggaatgaaaccagaaagtaagagagtataaaaataatgggagtgaaagaaaataggtcagaaaaaagactaacatgctacataagatcgtaactcctctgcgccaagttttcaaaacctcctttattgagtaattcccagtcgttggactcaaaggtttgatagcgcccccaattgctggtagcgtgtagcgagctgagttgtgagccttcgataccagcttcaatgggcaaggggcagaagggctcgaggaagaccatttctgggcgagaaccaaagaatttcacctggtgtacagacccaaggggttgttcagtggtgctcgtcgcagtaggtgcacccttttctggagattttgtaggctcgatggtgagttggtttgaagatctcttcttgtttgtagttgtctttgttcttttgggttctttggtagaacatgaggcttcatttgcctaagctacacattttttggattttttgttcataagggtggggctgttgaacatgtcttccgaatcgagatccatatctgcgaggcaaaagagacacatcaacacttgctcaaaaatagataatagaaagatggggaataaactcccacttaaaggaagttaccataattatcataagatgacgaggaagaactatgataattactaaactccctagacccggttattacatatatatcatgagggtttattggagacaaatcccaatctgaatccagatgactcgccctatccaagttggtaccatattgctatgaaattccgaagtacgaactagtgcaactaagttgtacatgagacataggataccaactatcaaacctatgtgttatgcgatctatacagaaattatcccaggtatagaagttatattggctatcctaaaaggttactagcgaggtacattctgttctaagtacggtaggtgaccatccacattgattaccttaggatgcttcttcttcagcctcccgaggggttactttcttgagatagtggatgcaagcaacataatcctggtcttcctcattggctgggactaggaccctctctcactaagagtattttggaaccttgtagtcataggtgaactgatctgagccaaggagcttgacggtcctcagattggccttgttcaattggaaatctactgaccacaatctgaaaggaagacccagcaagattttatgacactcagccatctcgggggtggggattggtctttaggtaaccgatgtcaacacagtaattgtaataagtacgcgacctcaattttataaatataaaaagaactctaaaccaagtttttgagatagaaatcacttacgtataatgcgaaacacagttgtgttgataggggaaagactagtagtctagaagaaatcatccttgaactcgttcttgttcggtaaccgcacaatgatgtgggtaccaaggtaataaaaacctcctgaaccttgcttccttgcgggaaaaactttgacggaataaaaataaactatctcgaggggagtgggacactcccagcctaaaatatggtataagaattttaggcctggcagaattctgtaagaaattggaatcaattgaaaaggggaaattccaagataattactgaattctttgtagtactctctcaaggggaggtgctccagccttgatgtgctcgag

SEQ ID NO: 31274 - DNA, 1588 bp, Cannabis sativa
tctttaatatcatgtattttggattgttagcacatattttcacttcgttcttcattgtgtaaaaattataatttactttgattacgtgtgcttcattagattgctcacacctaattcttagaatataaaaattatatttttacctaaaaataatatttttgatttgttgtagttttattaacttgtttcacaactaatgctttgaaattatacgtttataagtgaagaaaattcctatcttatgaaaatactttgtgcttaaatggaaaatatattttaaaaatgatagttttattgagttcaactatcaatgaaacttgggagtcaatacactattaaatattatcaatacatattgtgagattctaaagtcttaataatcttttctctaccatttattcttcaaatcccttttaccttgtttattttaaatcttcgttattttcttttattttatgaaacaatctcatcaattatttcgagctaggttagagtttaattaattttgagttttaaatataaatcaactcctttgggttcgacctcatacttacatgaacactatattccatatccgattcgtgcatttgcgagtataaatatttaaaatacacatcaccattgggtgtacaacatggagtcttaccagaagacaataatgaagcaaaaaagatgagaagaaaagttgctaggtatctaatcctagacgtggtaatgtagagacggagcttttccatgtcgctcttaagatgtgtcaccaaggctgaagctgagcggctaatgatagaagtgcatgaaagcttctgcggaaactatgttggggggcaaagcctatccaagaagatactccaacaggggtacttctagcaaataatgatcgaagactccatggactacgacaaaagatgtgacaagtgctagagattctgaaaaattctaagagctccacctaatgagcacactatgatgcagtctccttggcccttcacagtttgggggatagacctaattagtcaactcctaaagggaaaaggaggagtacagtttgttgtagtcgcagtagactacttcaccaaatgggctgaagctgaaccccttgcaacaatcacctccaaaaaactccttgactttgttgtcaagagcatcatatgtcaattcaaacttcaccagaagattgtgtcagacaatgggaagcagtttgacaatgacatgttcactgatttctgtaatagatatggcatcatcaaaagcttctcttctgtagtcatttctcaagcaaatgggcaggtagaagctgtcaacaaaatccccaaggacaccttgaagaagcacattaaggaagcaaaaggaaactcacctgaatttctcccagaactactgagaagatggccacgggaaaactccattcgctctagcttatggctatgagatgatgtttcttatagagctggtgccaacgcctcacaggagaacaacctatgactaagatgcaaacaccatcctgctggcagaatcccttgacgaagtcaaagaaagaagagatcaagccaacctaaagctgcatgcctaccagcaaaaggtagcaagg

SEQ ID NO: 31275 - DNA, 2510 bp, Cannabis sativa
tgagtctggttcaggcgaggtttatactcgaggagtctctcattgacaactcagctttcctcaaggaaattgaatacacgtgtccttttaaataggagtctggtctcaagtttctaggtgacaaaaatctcactataacacatgcccctagtttcgtgattgacagatgcggtcatgagggaaactataatctagagggaggcgaagagatgtcacaaggaggtgacctttggttgtcccatcaagggtttaaaaaaaatgacagctgtaattattgcattttatgctgcttatggtgccacgtcacgaaactcttcagttttcgtgtagtcgtgcccatggttaaccgttggatgggatgaccttaggcattcctgttgccacgtgtcacgatcccaatttttgagggttattggtatttaagccttctgatactaaatgattcccttattttccctctcattttcattttctccttttcctcctcttcgaaacttcaaagataaaagccctctcttagatagatttctactttcccctcttgaatcttcaaggcttctgaaacaactggaactattcacagggggaatcgtcaaatctcaaggttagtttttgaaactactttcgaatttagtttctgattttgagaaacactctgtattttcgaaattttgaggaatagaaaatgcatgcttattcgtagggaatacacatagggccttattcttctattagaactgggtaattctcagaaaatagacctgaaatttgtataaccgtgaattctaggaagaacactttgaatattcgtgtctttttacttgccattttgaatacttgcgagtattgagatgaacatcttgaatactcgcatgtatacttccttaggaattctggagatttggtcattctgacccattatttagaacttagggttttctttatactctctgtgtattttgtgtgggaataatggttaggtctttcaaatggtgggtgtgtcgccgtagcccaatgttcatgagtgcgatcgcatgtccggtgagttactacgatacaccccgccatttgcaacataaagtcagtgttccccctttctgcatcaccacggatttcaactagtaggttttctcaaaatagtgaggagtttctgttagctcaatgtctgcgcgagaagggcacatgccttgggatacaagagactcctcagcagtttcttgaggtacggcactagttggatatgcgtgatgtgttcacaggttgtgattagctggatttcttgagatggtgggtgtttcccagtaactccatggtcataattaagagcgcatgccccttgggtcattgggatacactcagccattttttaagaagttctgctaattgcacacgtgcaatttacaccttgggagggttggctggatttctcgaaatggtgggtgtttcctagtaactccatggtcatgcttaaggacgcatgccccttgggttacggggatacccccagccattttttgagaagccaaaccaaatttccaaggaaatcttatattttgtgtgcaggtgaggtcacttctattattctcccactttcaccacactgaaaagatcttatatctttcacatgagcgacttatcagacagccaattgcttggctctagaggtgatgtttttgctggtgacagagaccaagaagataactttattccaacctctatctctgaggaagaaactctagtcgctagagcggcgactatgggtccactgtcctccgaggacgtagaaaggatggttcaggagctcactgaactggggacaatcgagattcgtgatagcaaatccacggtatctgctcgtgagcacattgttcactctaggcatgcacctgacatttaagtagaggagatgggcgaggactagaaggttcctgaccgcgagtcagatgaggaggagggcgctgaagggagtggaactgattcagtggataacactcaactgaacgagcccttctcatgcgaggagttcgttttacgagtcaccaaatctgacctcaccacttttacgaggttaaatttgctacgacttagcaccatgcatccccgctctactcagagagtgcatctttctttcaccaatcctgcgataatccctacagagaatgtggttgtttctatacccattcttcgttgtggagtatcgcgtcctttccaccctttcatcgctgctatccttaagcggtatgacgtatctcccttccagctaaccccaaatagctatcgcatagctcttgggttttatgcgatgtacatggagtacgcgcatagggagccttcaattgaggatttcaactatttttatgacataaagaatgtgggccttcataacggtttctattgcttcagcaagtgggccacttctgaaattaacggagtggaaggcatggtttctaatatgggatattggaaatctaagtggttctatgtatttaaagtgttggaaattattttac

SEQ ID NO: 31276 - DNA, 2179 bp, Cannabis sativa
actaaaggagcagcagtattttcaaagctttgaacttgattttgttggctgtcatcttcctgatcttgagagttcgtatgagcttcagacccttcattttgaatttcaacattttcaaggacataattactgtcatgatcattaggtgcaaccagatcagagttaatactacctgaaagtgcttcatccgtgtcaagattaggtgctctatcagtttgaggaaagttgctgttgtgtgttggtgactgacattgatttgtggctggtgtactgaaagatgcagaccatgaggggagctgaacttggacagatttttcagtgtggaaattattaaggaaaccatttttaaaaggaaattcagtttcattgaaaaccacatttctagatatataaatccttcctgtagaacttaggcatttatatcctttgaaattcactataccctagatttacacacttggtggagtggtattgaaatttatgcgattgatagggtcttaggcaaggatagcaagcaacaccaaaggtcttgaggtatttgtaattaggttttctagaaaataaagtttcaatgggtgatatatttcctaaaataggtgtaggcagcctgtttataagataaacaaccgttagaaaagcatcacaccagaatttcagaggcatacttgcaagtagagtaagacccatttcaacaatgtgtctatgttttctctcagcccttccattttgggcttaggtgtgaggacaagaatgctgaaagtcaatgccactttcaataactaagtttgagaaaggttgatattcacctccataatcagattttagtttcttaatttttctatcaaactggttttccacaaggtttttaaattgagtaaaagcttggaaagcatcagatttggctttcaaagggtaaagccaagtgtacctactaaaatcgtctatgaagtgaatataaaacttgaaattggtgtttgacataattggggctggaccccaaatgccagtgttaactaactcaagtggaaacttagctttgtcatgatttaatttaaaaggcagagcatgtgacttgccatattggcatgcctcacagaaatgaaactcatcattcttagaacttttcatattcatttgatttaaaacaagattcaaaacatgattggatgggtggccaagtttcctatgccacttatccttgattgaatttaaactaggctgggttacatttgaatttaaaacagatgacaaagcagagaaactagtggaatatggctgctgaacttgagaaatggcagaactgtgagaggttttggtggatgacttgacacaactcgaatcaaactgatagagcccttctttaagcttcccttgaagcactttcttctttgtttggttgtccttcacacaacaatcattaggtgagaactcgacagtaacatcattatcagtggttaattttgaaatgctaataagatttttggttatcttagggacatgtaacatttcttttaaaacaagtggactgctattattagtactcatgaaaccagaaccaatgtgtttaataataagtctactaccatcaccaacagtaagagaatctttacccttgtatttggttttctggttcatgtttccagcttcagatgtgacatggttgcttgcaccactgtctgcataccatgcatcatcttgcagcttctcaggtgttgccacaaacgcagtagcattatgcccaggtttattgttgttgtctccagcacttccaggttgtgttgttcccatgtaagtctcatcgaatcggttgtaacagtaagcagcagagtgcccatacctaccacaaacttgacaagtaggtttggagccacctctgccacctcttcctcttccagtaaaccttccacgattgctgttgtttgtgcctcctctgcctctgttaccactgttccctggactgtaatttcaagcaggagaagagtctttgttagcaagattagcagtaggagaagcattattagagtgcttactattgccagaaaaagagctgagtctatccagcttgctgtcaaaactgagaagcaagtcttgtagagtttgccatgtggtcttttcccttgcttcaatctgcaatactataggtaggtactctatgtctaacccagacaaaacatttgaa

SEQ ID NO: 31277 - DNA, 1206 bp, Cannabis sativa
tgttagtacaataagcaagaataagtaaataccttcaatttataaattgaaaactcaaaaccaagtttttgagaaaaggtaatacttacgtattaagcaaaatgcagttgtattgatgggggaaagaccggatgtccagaagaaatcatccttgaattcagttttgttgggtagcctcacgataatcctccgatcattcgtgtgggtcccgaggtaataaaaaccaccggatcctcgcttctttgtgggataggccttcatagaataaaaatataagatcttgagtggagttggacactcccactccatactttgatataagacctttaaataggccaatatcctataagaactcgaaattaactaaaaggggcgattctgagataattgaaaaattccttgtagtaatctctcaaagggagtactgctccagctgtgatgtgctcgaggctccaagcacctatcccagacgatccactagtgttacacccctcttctcgaattattctttcagggggaaacaactaaattcccctggaactacagacctaacgcgacatcctttctcgtatttgatgccacataaccttaatacgtcgccaacattatggacctaacctttgatttaataagttcgacctcgaatgtaactgtgggatcttgaggggtcttggatttcagacttgtgaagtcataatttttgaagtttaagtcacctggtgaaaaatcaacagtgactcgagataaaaataagggtctcgctaaaggaataaaagataaaatttggggttcaggccaagttgcactcacagaaaatgacgtttaccctcgattatttattgcaaaaatcatctacaatgacttgaaatctcgtcctgattggtttttattagatgatctctaatcttggcatcgtttatctcaagaatagttttaagaacataagtttttgattcgaaggaaaaacaaaatttttaggacaatcaatttctaagaattctggggttgtaatttcagaaaagattgggtcatgtttgtgaacaaatgttatccagtttttggaaaatctgaatacaatttaatctaagaatttatgaactgaataacctaaacttttccttaaaatcctaaaaattattcaaaccaccaaaacaaaattacctaaaaataaccaaactaaggagataaaggagacaatcaatcaca

SEQ ID NO: 31278 - DNA, 1308 bp, Cannabis sativa
atctaagcaagccttgtttactttcccaccaaacaaggcttgggggtaaatgttgcccctaattttgtccaaaatacgtggaccaactgttttacatattttgtgacttaggggcctgtaaaccatcgagcaacattttccactcaggatgaccacacacctaaatttagaatcaaggtaagattagtataataaatacatttataaatacatgtttagcatgcatgcatgtcagttgccagcagaataacatatcagggtatcggtgaggtgtatatagagttgcactgagatatcaacagatatatgttaggcataaaagtagccattagattagcatattagggtatcagtgaggtgtagatagagttgcactgagataccaatagatatatgctaggctttgtcgtacaaacattctagactcaatatatgtgggacgtgagatctgtttacaatcgggtgtatgggtgcctaattataatctagttcatgatatgttatgtttatgcctttcttactgagtctgttgactcacaggttttgttcatatatgtaggtaaaggcaaagctaaggttgaatagcaatgagtatgagcagataaagattgtacatattagagcagttagacctggagtgtttaatctttgggacaacaggattcattttgatagtcgctaggcgacaacttttataactaagcattttgtaaaatatattataactttaaaaaaatggatcccagattatgtaaactatttatttattcaagtttaaagtttaattaagaaaattttaattattcatgattttccataaaccctttgattagcaaacgagtgcaaatgagtgtactgtattaattaatcacgatcagattgtcacgatatgtacaatcatcatcaaagttatgctcaactcacggtttagtaagccatttgatgctttagtagtttattttattagtatattatgagaaaagcttaataggaagcatgttagtagcatgatcgctgaataggcgcatgttttattttctcaagtaagcaattattagaatttaatcttggtcgcgatctaactaggctagctcactgtttcgcaggctactttaatagaatgggtgccaagtggaacacgagaaaccagggtagttcatttagatctagtggcagtcagagagtctagtttcccccaaatatttgtggccaaggtggaggcctaagaggtagggcacgcaatcagggaggtgttaacccactgcaggctgctcagaattgggaacataggtttactgaaatgcaaga

SEQ ID NO: 31279 - DNA, 1452 bp, Cannabis sativa
  modified_base (27)..(43): a, c, t, g, unknown or other
gtacccgtgtataagagccattagtcnnnnnnnnnnnnnnnnnaatggaggcttaaagcggggacgttacattgtttgtgcatcagatttattttttataagatggatccaagtgtacctagagaaatcatcaacaatggtaatgaagtacttaaaaccctcaacagtttgaatatgataaggaccccaaatgtcaatatgaagtaaatcaaaatgatgtttggaaatattatgattgctaacaaaaaaggcaattttctttgtttggcaagatgacatatggagcagtgaaaatcagaacaattagaatactgaaattccaaagctttattcaataaatggttctttatacaagaagcatggccaagtctataatgtcataatgtttcattactaattatggaatcaaaaatagaacatgctataggagttttctgctcaatcaagtagtaaagattgacaattctttcacccatcccaatcactcgattcttggtgatatcctgaatcacacatttagtgggaaaaatgagaaagaataattaaaggaatcagacaaagcacaaacaaatataagattatgatggaactcgggaacacaaaggatattggtcaaggtaatttggaaactttaaccttaccaacaaaagaaactctagtattggttccatttggcaaaccaacaatggtgatcttggtgttactttcagtagaggaaaataaagagggattggagcaaacatgatgtgtggcaccaatttcaataatctaactagatttagggacaaaagaaacaataccaaatatgttggacatgacaagttgctctagttgctgaggctgaaccgtggtttcttgcaattttttgtgctaacatagccatgattttttgacactgagcagccaaatcatgctcctctcctgcattttcacctgtttcatttcctaatgtgtaattagcagaagattgaccctggtggtttcctagtttatagggtgtttcccttggaaatctaccatacaatcgatatgtccaagagaatatccatgaattttgtagcacttgctaattgtatgtccaggcactccacaatgtgaacatacaggtctattatcttgatattattgcaccaatttgcttgagtatttccagcaaattgccatgtgttatcattgggagattgattgctttcaatctgaggtatgataatccctctctgcttttcttcttatattatgctagcataagctttattcacatttgggagtggatcttgaaacaagatttgagattgggcatttaggtaggattcattaagaccaatgaggaattcaagaactttgtcttcatcttgatattcatgtatagtcttcattgcgccacaagtacaatcaggttgtggtctgtattcttgcaacaagtcccagagtcccttaagctttgtgtaatag

SEQ ID NO: 31280 - DNA, 1879 bp, Cannabis sativa
tttacttggaaaaggctattaacaatgaaatgctcaaggcccggcacaacaggaattagagtggctcgatcaacaatgggaagccacggatctgatgtaatttgcacggacaaacccccaccagtccttttcctcaagcccactttaacaacatcccttgcagcaaagatactactccaaacaaaacttggatttgacccaagctccgcagatagataatcaccttgtggataatatctcgctttatagacttttccaaccatggaatcatgtcgaaacaataatctccaaccttgcttaccaagcatagcaagattgaaatccctcaaacatcgaaagcccatgccaccttcaaacttatgttttgtcattctatcccaattcatccagatgataccacttccattaccagaagagttgttagatttccaccaaaaactagccatcatcttctcaagttctttgcaggttccaaccgggaataggaagacattcatagcgtatgaggggagcgattgaaccactgacttaatctctttcccagcccgagagagaaatttaccctcccaactattgatccttttcctcatcttctctttgaggaaacccaagacagcatttttgttgcgtcccacaatactaggaagacccaaatacatgctatccaccccagcttcttgaatacgcatcaaactgcagatacgacttcttgtagccgtactagtattggaactgaagaaagctgaagatttatggagattaactttctggcccgaggagtcttcaaacaaacgaaggagagaaagaacatgattggcttcttcatcagtggcttgacaataaatgtaactatcgtctgcaaaaagaagatgagatatggtaggtgcacttctagccactttacaaccggttagccatctagatgactcataagaccttatcaaagatgagaacccttccgcacagacaatgaacaagtacggagataaaggacatccttggcggattcctctagttggggtaatcggccccaatttttggccactatttataacatgatatctaaccgagttaacacaacttagaaccaagccaatccatcgagtattgaatcccatcacccgtagtatggcctccaagaaaccccactcaacacgatcgtaagtcttgctcatatcgagtttaagtgccatgtatcccttcttttcactagtcgttcttttcagatagtgcattacttcgaaagccaccatgatattatccgaaattaaccttcccgccacaaacacgctttgaatttctgagatagcatagtttaggacattcttcattctattggcaactacttttgaggcaattttgtagatgacattacaaagcgaaaatgaggtaaagaaccatgctaaacaaaaggtaaggtaaaacaaagagtaaaacatttatgctcctggaagattctacataatttgtttttttttttttgaataagattctacataatattaaaaagaagaagaagaagaagaagaagtaggcgcatgtatataaaaaaatacgatgactaacaaacaaaaaataaataatatgttggtcctctaccaattattcttaggaaatatagacataaataaaattcaaagagcttgcaatctataaaggcatacaaatttcagttctcattcatatccctatcaacaattcacttgaaaatcttagtatagattagcatttaactcgtactcatcaataaatgttcttaatcaaattccaaattgtagagaaaattgcttataatcaagttcttcactttacaattatatacactcaaagatctaaatttcaatagttactattaaatgtttataattaagttcttcac

SEQ ID NO: 31281 - DNA, 1835 bp, Cannabis sativa
cgagccaccatgcctgccccaaacctttcctcttgttgaaaaatggccccatcaacattaaccttaagcttttgaaacgaaggaggagtccaatgctcattgttagctaccctgctgtgacttgtaggggtagtttgaaaacgattttgagcatttatccaattagctaaggtgagtttcgctgatgtgacaatttcttccaccaaaggtgactttgcattccagactttatcattcctgaacttccatagagaccaacacagcatagatacttcaatttttgttacagcatcccatttagcaagacccgattggaaccaagctgcaaaagttacatcagttgagtctatacttctaattcccatattactccagcaagcctttgcaacagagcagtgcacaaacaagtgaagagaagtttctgcagtcgtattacaccatgggcatcgagtatcaaggtgtacatgcctttgccgaagctgtgaacgagtaggcaaacacctcgaacatgttcgccaaagaaaattcttgactttagggggtaccttaagatgccataaagccctccaaaaacccgagttgttgtcttgagaccaattttctttcaattcttgaagacaatggtatccactctttacggtatacataccagatttttctttacaccagtaccagccatcgttaattcttgtagaatttagaggaatacttagcactagttttttatccctttcattcaacacatcctccaaaacttctttatcccattccctcacacctattttcatcagagaacttaccgtagcgttattcaacacaggatgaattgatgaaatgaatggatcatcatcatgcataagccacggctcctttaggacagtaaccgaatcacctgatcctataagccttctcatacccaccttaatgagatctcttgatgctagaacacttctccatatgtagcttggattggctcccacttcagcagataagaacgagccctctgggaaatatctagctttgaatattcgagtaacaaggctctcgggattagtcatgagtctccatccttgtttgcccaacaatgcaatattgaaatcccgaagatctcggaatcccataccgcctacgcccttgtgcttgctcagatttttccaactaagccaatgaataccattcttttgggatgatttcgaatgccaccagaaattacacatacttctctcaatatccttacaagtatcctgaggcaattggaacacattcatagcatacgaaggaagtgcctgaaccacagctttgattaacacttctttgcctgctctagataacaacttcccatcccaactttgaatcttctttctcactttgtctttcagatagccaaacactacagacttattcctagacaaagtacttggcagccccaaatacttactatcctcccctgcttcgataatgcccaaagtctgacatatacgatctctgtcttgacttgtggtgtttgtgctgaagaaagctgaagatttagcaaaattaaccttctgacctgaagccatttcgaagacccgaagcaattgctgaactctttgaacgtcactatcatttgccttgcaatacagatagctatcatccgcgaagagcatgtgcgacaccaccggggctttgtttgcaaccttgcacccatgaatccactttctttcttcatatttccttatcaaggtcgaaaatccttcggcgcatatcagaaataaataaggcgagataggatccccctgtcgaagtcctcgagacggaacaataggcccaacctcatgccccccactaaccactgt

SEQ ID NO: 31282 - DNA, 2143 bp, Cannabis sativa
tgaataacccagaattcttccatcgtgttggtttgtccacagtaaggctaggcccccaacactcccttgggtctctacagtaaacagaccttcaaagcccaaagcacggcccactctttgcatcttgtttttatcacttttagtttcacagaggaaaatgaaattaggtttcttttgagatacaatctccttaaggaattgaaaagcccgttggttcccaagcccccggcaattccaacttaacacattcataatgctcggcgggtctgtgaaacagaacccgccccaaacaagttttttgtgttattacccatctcagtatccatctccacatctactacattgactggcccatttgggtttatgtcatttttgttaatacctatctgttgcacctctacaggcccaagatgactttcaaggcccattcttcttttcttattttctaagaatagaagggcatcttcagcattaactaataacgtgtggtcaatctccacatcagtaccagctatatgttctctcccataaccttccttatttatctcttcgattgacttagtggagatttctttcatatttcttgtagcttgattgatcacatttattgctgaatttgctccctgattttttgtagaggatgtccctgattggccgtcccctgatctcacgctggtctgagttgtcccagttccaaaattattgggattggatacagttgtcttcccgtagctagaatcggcaccggacttgttcatgcttcccgacctcagccatttcgcaccagtagcatagttcttccgtcttggggctgccttcatctccaatccatatggttttgcaatttgatctaagggggtatcaaaaagtctatcacaaaacctctcggagtgtcccaaaattccacagatgaagcagaaggtagggaggtcttcgtatttgaataaagcataacaccacatacctccttgtttaaccacctttttctttctttttaatggttgatcaatgcttattttgacacggatgcgcagataatctctccaaacgcctatgaagttgttaggatcagacttcacatatgttccaatgtaattcccaagtcgttgaatcactgtttccgacatgaacccagtagtcatgttgtgaatttgcacccaaaattcaatcttattgagaaccactaaccggggattttcgccttgcttcaacctctcaaatatcaaaagaactcgatcaaacgtccatgggctgccctctattaccctagcaatgtcaacttcatgataaaattggaagagatataggttgttttccaattctttcacatacattcctcttcctggctgccataactgtgccattttgttttgcattgcttgaaaatctattgaacgatgtgttagaaatcgtccaaccaagcaccacctatcgtcgatgtcaaccgattcatcatttcccccgtcaaagatcaatccatcttcctcatcttcctcaatattaaacgctgcatactgatcttccagatttgattcgttattcatcttcacagtacacaagaacagaatagcaaccgcacttttaaacaaatcaactagaccaaaaccagaacaatttcacaaacagagccacttctcacaaaacagaccaaacactcacaaaacagagcaacaaatccaccatgtcatacgacaagacaattatactgaaaacgttatctatgcaatgttttattacatgggctatcttaacagtttctaaaatgttataaaatacatttgattacactttttcagtgttatcgtaaatgttttttttcttgtagtgaccagtatgtaccacaaacacaaagattttctcaaagagaattgagaattgagaattgagattaggccaccatgtccaccttaagcttgcttagttccacatagattgtgaatgaattttgactattattaaatcctacatatattaaaagagccaataactactaccattcatgaaaatgtcaaccaaaactattcatttaatgagattgcaccttttgttccttccatgcacctatatatatcaataaaatattaataaaattattcaacaataaaaaagttactgccctcactttccgcacttatatacccca

SEQ ID NO: 31283 - DNA, 2578 bp, Cannabis sativa
tcacagtcccagttctggtttgggtttttgtcctagtctaggttcgggtttgagtcctagtcttggttcaggtttgggtctcggtctgggtttttatctcagttcgggttccggtttaggtcctggtcttggtccgagtcctagtccgattctagttgtagttatgattcggagtttgagtttggattagagttcaggtcggggttcaatccctggtttgagtttgggttcgggtccggattttggtctaggtttggatcaggctcctggtgtgtgttcgggtccttggtgtgggtacaggtccaagttcacatatcaggatccctatctacgtcagagttagggtctgcgattgggtcctaggtctaggttcggttccaggttcgggttcgggtctcggtcctggtctgggtacacgatcgtgtctgggcccgagtttctgtctcagttaaggtctggggctatgttcaagttcggtcctaggtctaggtctggcccgagttccaaatcccgatctcgggtcttggtctggttcaagtctaggtcttgggtcgggtcttgggtcttggtccttgtttcgttgccctagtccctatctcgattatgggtctaggtcctacttttggtctaggttcaagtttgggtcctagtcgcggtttgggtttgggtctcggtctgggttgttatttgggtttgggttcgtgtctcaatcctggtccttgtcctggtcttggtcgtagtcctagtctgcttccagttccacttgtgattctaagctcaagttttggttcgagtttgggtcagggttcgtgttcgtgtcggcgtttgagtcctggtcttagtttgggtttgggttcggatcttgttctaggtctggatcggctccgggtgtgggttagggtcctgggtcttggtctaggttctggttcgagtcccagtttttgatctcgatatgagtctgggatttgttccgggtctaagtcttgggtttcgatcccggtctgggtttaagttcagatccgggtgcaggtcccaggttcgggtccaattttgggtttgagtccaggttcgggtttggtcgtggtatgggttcgtgtctaagttcctatccttttttgggttcagggaaggtttcggctccaggtctaggtctgacttcggattctcaggtctaggtcaagtcctgggttgggttcgagtcctggatttagattggggtctgggtttcggggcctaggtccatggtctagctcccctatccaagtctggttcttaggtcctggtctaggtccaagttcgggtttgggtcctaagtcttggttttagtccaggtcttggtctggatttgggtccaggtctcggtcctagtccaggttcaggttcaggtccttgtcagggtctagatcctggtctgtgttgcgggtctcaggtcccgacgagggtttaggaccaggtcaggtctaggtcccggtctgggtcccggtccaggttcgggtcccaggtcacgtatcccagtcctagtccaggtctcagtctaagtttgggttattgtttgggttcagttcttgtcttagcttcgggtccgagcctgagttccgaggctgggttctagtttagtttcgggtcccggtctaggtccaggtcctggtcacagtctcggtcttgttccagggtcctggtcacgttctggttcaagtttcccttttgggtcccaggtctgggtttgggtccatgtcctggtccagctttgggtccttctctgagtcccaaatcaagacactgactatgggtcttgtccaagccctagttcccggatcccagggcaagatctgaatcccaatcacgggtcacagtctggtttcgattcatgtcccaagtctcgatctggttctcagtctaggtccgagactgagacttgcatgcaattcttggtcttaatcccaattctgggtcctgagtcctgttccatgttcgggtctaagtttaggtcttggttttggtcccgcatcccggttcgggtttgggacccaatcccaaggtgggtttgtgtctgagtgtgggtcctggttcggttatagtttaaggtatgggtccaggtcctggtcctgttcctaagtcctgacccgcttctggttttggttctagtttcaagtcacaggtatgggttcaggtcgagtttgggttcgagtctgggtttgcgtcctaatttttgtctagggcgaggttcaagtctgggttttggtcgttagggttcggttgggtctggtgccgggtttatgtccgagtctaggttccggtcatattccaagatcccagtctggctccagttcaagttttgattttggttcccgagtgtgggtctcaatttggggtcaggtcatggatctcgatccaagttctgaggccaaagttcttgtcctagtttgtgggcccaattcccaggtctggatccccaatctatgttcaagtcctaggtcctggtccgggtccatgttcgtgttccggttcaggttcgggtctcgagtctcgatctgagtccacgtcccagtttgggttatggtcccagtttgggtcccag

SEQ ID NO: 31284 - DNA, 1437 bp, Cannabis sativa
aaaatattttttttattgtttttactgtataataacaatacgatttatcttcttcatttatttttttatgcactgagtaatataattggattagacatagttaagggtaggggcggagggatgttctgctatacaggggccatggctccctcatctttctatgaaatatatacatatatacaatatgttatagctccctggtgtatatatgtatactagcaaaaagctacgtgcaagacacatatactaaattttatgttagtttttttctatgttagttgaaagtgatacaattaaaaaattatagaaaaaatattattagttattaggtgagattattattatatgtatctaaatattatagtttattaaacaaaatcagagagcaatatcatacaaagaggaattatacaagacaaacattctcagtttgttagagcaaaaaaagaactttcaccacatcaaaataacataaattcattttgcatatattagtggatggacatatctttctctacaaaagaagatagctaaaaatatataactcaacaatacacaaacacatagacacagacacacacatatataaaatttatttttttctaacaattcaacagagagtagagtacaaagacaaatactacctgaaatatccaacaatgagttaagaagaggagagcctcaatattccaagagtgaaactgagaaaccaaggattagaagtaaaactaaaactattacacatattaaaacgacactaatacattgttaagctatgagaggtcaaactaggaaaccataagtttgtgctaaaacctataccatacattgatcaccaacataagaaagctttgaacccattttacaaaagaaaagaatcacattcaaatataaaaacatgaaaattatatatagtctttacaggaaagacaacataaagtagcaggaatcttgaggaattgtgaaaaaaaaaaatcattaatctatatagtcaatctcaatctggtctaatcaccattactgaatattaatacaaaaattcatattcttattggtgcgatatcgttagttttctcggagacatatgcattgattctcggcaagtcactattgaaaaataaaaagatctctaccacacctaatttttcccatcatcaatcaacaaattaatatctaattaataattttgtggactccacccatttttattattaatcttttctttttttttactaaatttaaccgagtcttcacataaatattttaaataatttgttgcataattatatgtatactcgatattggttagagcttagaaggttcttaaatttgtccacgcatatcaaaacttcatttaattatatgaactcggtgatattaaaatcataccacttaatttaccagttatttgttaagaaattaagtgatgattattat

SEQ ID NO: 31285 - DNA, 2112 bp, Cannabis sativa
tgattttttataccatttgaaattgtaaatgactgtttaaaactattggggacacctaattattactgaaggttttaaacaatcacattttcaatagcaatagttttaaaaaaaaattgaatttcaaaccgacaagaatcgtacattttgcagtagtgtgatcctaactacaatgtggtgtctaaaaatggggtgacattgaattggttgctgctatcactctataaaaggtccctctcttgtatttgtaaagttagttcagaagataataaaatcattacagagtattttattctgtccttcttctcctcttcatttgtttttcactcatatgatatcagcagaaattcaagattctccttcaatggctacacccaccacccgttctcaggacggcattcccccgcccacttccgagaatcatcaaacggagtctaatcctgacacaacttctacaccaccactcatggatacttcagttgttgctcgacgaaatgccaacccaagatctcagacctagaacgaaccagacacgattgcaccatcgaattcatcccccgctcctgttgctgatgttcccattcaggctcgatgctccttagccgatcgattggctcacgaagatgtttccagcccgttctttcttagcaccgcagatcaccctggtctggttttagtttccaccgtgctcaatggcgccaattatcaatcttggaaacggggaataatgatggctctcacggcaaagaacaaatccacattcattgacgactaccttcctcgcccagccaccggtaacattctcctctcttcttggattcattgcaataacatggtcatgtcttggcttatcaataccgtttcttctaagatagcacaaagcattatgtacattgatcttgctaccgatatgtggtatgattttcaagaaacattcaatgagggaaatggtcctcgaatctttcagcttcaaacacaattaacacatcttcaacaaggtgatcaatccgtcacctcttatttcaccaagctcaaaactatttgggatgagctaaaagaattccaacccaacactacatgcacttgtggtgcaatgaaattgtttttggaatattacaatcaaaactaggttcttcagtttcttactggtttaaacgagtcctatgcatctgttcaggctcagattctccttaatgaacccatccctaacctctctagggtgtttgaaatgattgttcaagaagagaggcaatgcactcttggttcttcaaaaattccttcactagctacctctgcccgtgcacctttgaacaatcccccccaaaatccaagaagccaagagcctcttgcaccaattgtggcaaaccgggtcattatgtagataaatgctattttcttcatggctttcctcccgactatggtgataaaaagaaacaagaaaaggaaaaacctactgcaaaccacacaagcaccaactcgaatgtggttcctactctcacaacaaatagggacttaactacccaatgccaacacctcatttctcttctcagccaagaattgagccaagctacatctcgagaggacaccaacaacctctctgctgcctcaaacatggctggtaagtcctcttcttctcgtgcatttacatggattattgatagtggggaaacacatcacatgtgtactacgcgaagctgttttcacactttctccaacattttttttcctcaaactgttgtacttcctactggtgcgaacatccctgtaaaaggcatgggaacagtccgattaaaccagcacatcactcttcaaaatgtgttatttgttccaacatttcacattaatctcttttctcttattgccttcattgaaaatagcctcaatacaattattttttctaatgattcttgttctatacaggctccttcttcgaacattgtgattgggaaagctaaacggcttgggaaactctatgcaattcaacaagagctcaaccccataatacagcctagttgttgtctttctttacacaataatgtagatcaatggcactcacgccttggtcatccttcaatgtatatttcatatacattcaataaaaaaatcaaattt

SEQ ID NO: 31286 - DNA, 2096 bp, Cannabis sativa
caaactctatcattgatatgattcttgaggttgtttccacgaggtcttgcctttttgcctctagctcgttcttactttgcatttaaacgttcttagaggtcatttattggaaaactaccttctgaaattgggtgaaccgcctttactccattgtgattaatagaattactaggacagttttttcttcccttagaggtaggcctttgtacctgagtactcgccttatcgcccaatgcaactcttcctcacagatcaattggatggttttgccccggagcattaccttctttctctacaaaggttggttggcaatattcatattgttccatggagcagtgggagcagtctttttccttgttttccatggcacctttttctttgtccctacaagatttgaagttccaggtcttttggatttgttttctttgtagcattgttttcctaacgagcaggatcatcaagaatattttcatcatgagctacttccctttattcaattgtagcctctaatctgatgaaagttttttagcattcaattggagaagtcctccttactgccaacttcttcttatttttagtgagttctttagccatttcagcgactgtagggtctggctcataataatattcctcttctttgtcttttccatcctctttaggatcatcgtcctcaggatcatcctttggatcttcatcgatgggattttcatcaacatattttttgatatatgttgagtcttcttggtaggatgactgatcacttctcatgggtttccattcactcctgttttttcctgagtagtaggattcacattctccatggcagtatccccatcacaaataccagatttgtcgacggtggttcggatggctaccatggttccatggttgcagtatacaatatttttggtatcacttctttcttcacctctatttaccgagatttttgaaaatcgataaaatataataaagcttaaagaaatatactgtagacaaagaataagatcagagtttttacgtagttggggcattaaagagtcttagtcctaaaaaaaaagctttgtagatttacacaagtgattttccttagctcttaagtatcgagattctaaccccttgcatgaatgagcttttatatttatagtactagggttctaatatgtacacattgtccactaatgggggaaatacaaataatatattgacttcgggcacatttggtaaagcctgacccatgaggtattgatcttttgctaacgtggatgccacaccacgtttatagttatcaaatcatgtcctacttttgtggataataaagacacattaatgcttgattgataattactttattttattattcggaacatacgaatcttggacatgatcctagtaataatgtcctgatattgtgagatttgataataaattgttgtcatacggaactggatatctagaggctcgtttattacctttccggaagcactattttgatgctatcttgagccctaatgtgctgaaggcttatctcactcgaacaaatcatcttttcgtcatctggaagatctattcgatattatccgaagatatgttgtgctgaaggtatcctttttctggatgaaccatccgcgcttgactttgctaatggatccagtctattggttaagcttgtgattaggcctagaactactaaactaaaattttcttaaaattacacgtatcctctactcaaaaacacgaataacaaccaccataataatataataatttaagtccctacaaaaaaatttactcttagtcacaacaaaatttgtgactaaaagttaagttgtgactaattataaatatttattatttttatgttgtgactgaaaagtccgtgataaaagtattagtcacaaaaattataatttgttgtgaccaaatgtgttttcagttacaatacttattgcgactataaataaattggtgagaacttgtatctaaaaactaggttttagttacaagtaattttatgttgtgactaaaagtgatatttagtcacaaaaaatttatattgtgattaaaaagttatcactaaaagattttttttttttttt

SEQ ID NO: 31287 - DNA, 1953 bp, Cannabis sativa
attttaatattttttatggtaatataaatgacatatcccatatatatattaagttttttattttaaataccatattttttcctattaaatttacttaccttatttatgtaaactaggtttcatattaccatattttataaatatcctaattaacaataggggtttttttttaccattggactaagattggaagcttattgggccaacaaatggactgaaatgggtagtaattagtgtttagtgtttactttataactttgtgctttattttttttttcttaatatttttactattttgagaagaaagtgattttgaagagtcggaaagtgttacactatgaaatagtgtatgtgtttattagtaaattgtaaaggatgtgaagacctataaatatgtaattgtacagctattgtgatatataaaatgagaaaatataactttggttcaatcaattggagtttgatattgactgacttgcttgaaagtgcattttaggagatttgtcctgtctcgaagagattattatctatcccctcgccaatccatccatcaaccactaccaattagtccccctttgtgttcaacattatttttacgactcatttgtgacaaaatattaaggaaaaaaattgaagaataccctcttttttatatacaataactaaatttacctccaaataaattttaattcaaatatatctcttacgagtattgtatctaaattatcctcacacagttacataactaagacattattgaaaatataattaatttgtattctttgtagatagatgtgtaggtttgtgagaaattttgggcaaaattttgattagagaaaagtgaaaaactatcgtgaagtgataggagtaaaattggtagaatgagtgaaaaaagaagtaaacataatagattttaaaaaagagggtaaaaattaaaggcatcaaattaaaagaggtatgtagtgtaatcttctcaagtattaatgatataaattgagaaaaaaaagaagaaaaaaaataatggtataaactataaaaggattcaatatataaaatatgaatgaaagacattttgctgtaaataaattggatacagtgaaacaaatataagagtataccctttgatttgataaatttagtgtttttctttcttttcctttcaattaaggataaaacaaagaaaatccatgagaaagttataaaaatactacaatttaaattaatgtttacaaaaatactgtcatagagaattttttcaaaaatattgtctttttataaaataatcgtaaaataaccaaacaaaacaatcaaaaataacagtggaacaactaaaaaataacagtggaacaactaaaaaataatagtggaacaacggtgaaaacttaacatagtatacagtatttttttaaaaaattcccccccacagtaaaaaagaaaaaaagctggaaactttagtatgtggtgtaaaaactccaaaattcatttcatttgttatccaatggatatggaacaccaagtataagaatattcccttgacaatgctattttttattgttttttcttttaatatatctactaaggaactaatttgtgcttcacgcgttattgcacaataattattgttaaactcactttttcataaaataaaaaaagtcaaactttaagacattgaccaagactcaagaggaccaaacatggttaggacttgatctacgactacatggtatactattagagtgccccatgtcataactagaagatcatgtgagcattgaccattcattggtgtcatagctcgcaccgtagggtttcgtgaatctaaagtaggatttttgctccaaaatcctaatttgagaagaaatccaacaagtacatgacttattgaagtatagggataccaaggcttgaacatagagccaaagttgcacaagaatggctcctctaatgtgttac

SEQ ID NO: 31288 - DNA, 1772 bp, Cannabis sativa
aaaacctcctaaaagtgtctctatagtggaataactcctttatttatagtcataaaaatcaatttctaagttcggactagttatagtaaattcaaataaatttcatgttgtataagttataatatttttaattttacatcaaatactaatttttctttaaattttaaataatttttcatttatattcttttatttaattttttacttattaaagctttaaatttttttatcttctttatatcatttttctagtcaattttaattgacttcttttatttatttttcttctctctttatttttctttttcatttttctctaattctttctctctaatatcttttccctcaatttttttttttattttgtataaatatatataacatgtacatttttgtatatcatttttaacacttttgcattctcttacaaattttattttattattattttttaaataaataaaatacgaacatttattctatttttttctctccttttcattttcttactattctcactctaactatatttcaaatgtttttctttaattaagcacattttataaaaagttcttaattaattttttttaacctgtacgaaaatatgattcttttacttttatcaattttctcatatttttttaacactctttttctctcttacaaaaaaattaagagcactcctatatatatttttttttttatcttttacatgattaataaaagtagtatatattattttggatgtgttatagtttattgagaattgatttatgaataattttcgtattttaaccagactgatattttgttattattctgttgattcgtaattgtctttttgttatttatagttatttttaattatattgtttgtttaatttatgtgtatttttattgtgtatattcttagtttattctaaacaattatatatatatatgtgtgtgcatttattttactatttttatattattttaaagttatttttgagtgatttccataatttgttttgtcgaacaatttttttagttattttttttattcagatatattttctatggtgtatatttttagtttattcttaatatttttttttttattgtatgtgtgttgtttttgtagatgtagatacatatatttaatttatttttttacacatttttttttttaaaataaatcatttatactcttataattaacttttatttatttatactttataattaattttttattcatttatacttttataattgactttttattcatttataaaaatagaaatagcataactttaaaatagaaagagcataacatcaaatgaaaacaacttttataaaatgaaaacaacataacctcaaaatagatacaacctttgtaaaaataaaaaaaaaacgtatatgtaaaaaaaaaataatgaaaaatactgtatacattgcaatttctctctctctctttttttttttttttttataatacaacactaagattttttattttattttttaatttgacactaagtgaatcagattcatgtacgtagtatacatattgcgtatagatagaaatatgtagtatcaattatacttttaaaaggggtgttcatccaatccaatctgtactattttgttcatagtgcatccgatccgcactaagtgcggattccatttttttgattcaatcaaatccgcacaatagctcaaattcaatccaatccgatccgtaaaagtacggattagatcggttattttggattagttactttttaata

SEQ ID NO: 31289 - DNA, 2903 bp, Cannabis sativa
atttcaaaacccaaatccaaattagagataaatgatgcaaaaattagggaccacctaataaaaagccaccaagatgatatttctagtcttcataggcgtttcttacaaaaaataacaaagtgtaaacctcatttcttgcgagatgttgcttagcttgaacctccgagtttatcatctattccttttgctaggcctttatttttacccagagtcacaattgctttttcactaggtgagctggattttgaaatcatgactttcaagcctcgtaaatcaaagactccccaagacaccaacattaccttttaggccgacttatcaagtcgagagtacgagccattggggactatgtaggtagcatcctaaggacttgaggcattaaccaaaaataaaaacgccaggttagatttgtagcccctggtgagtttagctgttacccactagaacgacttacatgcgaggcactcgaggggaccagtggcgaggcaagtacgagtggctctactgtaataggcacttggagcctcgagcatatcagggctggagcaattctcgccctgcgtgattactttaaggacttccttaacaatcttgaaattccccattctagctggtccctatttcgtacagatccttgcaagtttaaaggttctgtacaaaattttaggatgggagtgaaccactcccctagaaatagtgtatctctctactcggtcaaggaagtccctacgaggaagaatgctgcaggaggcttttattatcttgggactcacacaggcgatcgtaagatcattgttgggttgccaaacaagactcctttcaaggaggacttcttctagacgactggcctctccccaatcaacacaaccacgtttcacataatacgtaaatgactatctacctcaaacttggtttttaaattattccatgcttttaactttagtctcgttgacttgtgatcttattattttaacagtggtgtcaaaaagaccaactcctactcccgagatggccgagcgacgcaggctcctactgggtcttccctatgatctctgatcagccgagttccttttgaacaaggccaaccttaggtccgtgggcctccttgctgagaatgagtatactagtgattataaatatcccaagtatacgtcgtgccattaggtttcggtcccagccaacgagtaaactaaggactatgtggcttgggcgcattaccttccgaacgcagccctcgggaagctgaagaaggagaatcccgaggtaatcaatgtggatggtcacgtggatggtcacccacggtcacccacagtgtcacccacagtgccccacagtgcttaccacagtgcttagggccgagcgtaccacattagtgtgtttcagagatagtcagtacaatttttacacctggaatctctttctcatagatcgcattgcacagaggttcgatagttggtacccagaattccacgttcaaattagctgtactaactcctactatgggatagttgagcagtagaggactatgctggataggtcaggtcatatagattcgagctgggatttagaaccaattaattcctatgacatgttcaggaacacaggatctggagaatttagtgaatgctataatcctccttcttcgtcttgttatgattatggtaaatcccttaggtgggaaataatttcccattgtccactttacttgtttttaaacaaatgttaacacattattttgtcttgcagaaatgaatctcgaggacgttcttcattcttcaagcaagaagggaaagaaaaggttaactgcctcgaaaacttcctcagatgtcaacgtggagcccctcaaaaggcctaagaagacaattgccaataagaaacaagccttgcagaccatagacctcgagattcatgagaaccaacttcaaactcaccctcttgccttcgcacatactgaagagcccgtgcacaaaacaaatcaggttgcagcttcttcgagccaagcgcctaagactctgcccatcgaggctgggagtgtttgctcggagcattcttcgtagtacgctacgacctattggtgtcaccttcgatccttcctacccaaggactgggatttgatcaataatggaaacttgaacgacatgctcgagaggagtgtcgcctttggcctctcagtaaatttctttatccttctcggtttgcttttccctttaacaaccctcaaaaacactcatgcatttttgtttatttaattttagcaaaccttcatctcctttgtcacccaatccttgggtctagacaggatcaagcaacaggagggcaagatctaaaaggtgattggtcagcgcgaggtcgtgtctagggaatggaatggggctcagtcggagatctctcacctaaacaaagaggacaaggaggtaaagagggccaacaaagcttaacttgaagcagctcagaaagaggccaaggacaagtccgagctgtgccagaaactccaggaagaactcaacggagtcactgcaaagctcgagggggtcgaggccaacaccaaggagcaatgcaacgccattgccaaatgctccatctaccgagcctggatggcgaatgaagaaatgcatttgagtttcctgggaaagggcctggaggaagtccttgcctactgcgagcaagctaaaaaggcaaaagtggaagccgatgcagcgagagaagaggaagaggaaccatccaagtctcctactgtgtaggcttggtttttaattatttactcttttttttggaaaatggccatatggccgagacaatggttttctctttgtggctctttttgtaaagaaaaatttgcgtcgttggatggccaacttccctttttatctcaactttctaattattacctcgtattatgcgtt

SEQ ID NO: 31290 - DNA, 2681 bp, Cannabis sativa
ttggtggaggttggattggtttttaaggcgaaaaaccagaaattaccatggctgccaggaaaaaacggcaggccgtttttcaggcacccaaaaaaacgaccgaccgtttttgcctgtaaggggggatttcgggtttttctcctcaagtctgatttgattcggggtgtcttttagagtggaattctgggtgttttagagactgttaagctagtttgaaccgggggaaagtagggtgtgtcccattgtgagaattagagtcgattattagaaatttgattaagatttttattgagttttttgcacacacgtggcatccctgttggacagggcgttacaggttaatcattaaggccagttagagatgaagtaacatagggatgagaggcatcatgaatccacggatcccttagaaaatttatatctaaactagatccaaccgccctacaatcaccaaattatattaatgcttgagtttcaaaaatgttcgtccaaataaaaattgggttatttcctaacgtagcagtaaggaaagaacacccaaaataattgcgggctttatataagcgagcaaaaagagaagaatcatttgataaaagatgccaagcttgctttcctaacatggacaaattgaaacctctcaaattacaaaaatcgagtcccccatggtgtttatgagtactcaaattgtaacaccctcactctctgggacgccacgtgtgtgcttttacaatcttattatcactaatctattaatttaggaaaagtgtggtttaattaaaacctttggttaaatttaaattaaaacttttattcaaaattctatcataatatggggatcctttgctaataaaattcatttacaattaattacaaaaccattaatacaaaagtagattacatttccaaacatagaaaaggattgatcctgcttctcaaaagccaagactacacagttgatatgtacaccactggaagacctctgaatcatggctgagcataactttttaatctttttacctgcatcatgaagcacccgtgagtcaaaatgactcagcaagagaagctattaaatccaaagcaataaaaatgcaaatattcttatcataacgtacatacatactcgtgattcattatctattcagcatgcatatatatatatatagtataacgtctatacgaacctgtatattacccaatataaaaatatcatagcatcttgccatgaatatctttatcattacactaatcaaatattcattcattacacaatcacctattttaagaacctcgtaaagcactctaatcttacacccatgtaaacacgtattcttacatcctgtgagtcattgagactctgcaagaaaaaaagactaatttcataggcaatatgaaattcattcagtaacattataacaaagatgcatccgattacaactcatcacataataacatgcttaattcatttcacaacatcataatcacacaatcctgatactttataaagtacccttaccactcgttaaccacgagctacatatgtcagtatcgttgcccgatacagcaaacgataagtaagaaacctatctacggttttaagaataattactcataacggtaatgatcattaccaatcctcaccactcgttatccacgagctgcgtatgtactatcgttgcccgataaagcgaacaataagtaaaaaacctaaccgcggtctcaacgaataattactcataacggtaatgatcatttcttcattcattcacaacatcggtgataaccgtgttcttccctcaatcataaagaattcacaaacgacaataatatcattacctcgattaccatcaagtcacaacaaattcatattatataataatctcaatgaagatcgagtcacaaccaacacataccgggatctcgatcataatcgagatcattacaatcatatcgttaaccataaatagtgctttatacttttcttacctaagtccagagattaagcgtgcatgtcagcctaagttgaaaaacaaagcttgatgatcccgggtcctgtgtcacgtcaacaaagctcaataaacaacttattcctaaccttggaataaccctaaattcataaccagacatatctaactctctactaattcggaataactcaaacatcattaaaatatcctattctaagctttaggaaataccccaaacaaaaccagtttcgaagcctaaaactagggtttcccctattgccaaaaccggttgactggtttcactatgcctgtgaaaccagttaaccaattttccctactgcggaaacgggaaaactcttgtttgttgctccaaaacccaaccaaatctcttccaaacctgttcaaactttctagaacagtttaatattacaaatacaacatgttcaaagcattcattcatattaattcatccaattacacaattcaccatgcttgagtgaaccttgagttcataaactcaattctttcatattcaaacctaacagccctagaatcatcaaattccaacttaaataaccttgaatcaaacatagaaatcatgctctaaattcaatttaaacctacagccccaaaatcacaaaaaccttaacctaaaatcatcttaaaacttagaacaaagcatttaatttaccttagttgcttctaggttgggcttag

SEQ ID NO: 31291 - DNA, 2136 bp, Cannabis sativa
ggacccacacaaatgaccgaaggattattgtgagattggctaataaaactgaatttaaggatgaattcttctggacatctgctctctcccccatcaacacaacatcatttcaccttatacataagtattaccttttctcaaaagcttgattttgagattttcatttataaattgaaggcatttatttattttacttattgtgttgaaaacgatcacgaaaaggccaattccaactactaaaatggtagagcggcacaaagctctcttaggtcttccatttggactgcaatcaactgatttttctactgaacaagatcaatctgaagacttgtaatcttctcggcagtaaacaatccacctgagactataagaatccaaagtattctaaatggcagcaagtcccagttccagctgacgaggaagatagagactatgtggctcgcatccatttcttgaggaatgtatcccctcaagaagctaaagaagaagcatcccaagataataattgtggatggtctcctattgtgctcagggctaagtgtacctcgctagttaagttgaaggatagctagtataacttctatatttgggatcgtttctgtgtagatcatatagctcataggtttaagagttggtatccccaatatcatgtccaattaagttgtaataactcctactttagaattatcgaacagtatggtactaacttggatagagtgagccatttggattctgattgggatatgtctccaataaaccattatgacatatatataattactggttctagggaatttagtaactactatagttcttcctcatcctcgtctaattattatggtaaatttctataagtgggagttaattccccaccttctttttgtttattttggataagtgttgatatactttctttttgtctcgcagccatgaattttgaaaaccttttctcaagaccatctggttctaaaaaggggaagaaatgcgtcgttggctcggaaacttcctcgagagcgaaccctaaactagtgaagagagccaaaaaggctatagcaaataggaaaagctcctctaaacaaattgtcatcgagcttgacaatccttaggttccttctccaatcccagtagttgtaaacaaggaagaacgagtccttgaatctgttcaccaagttaaattctcaagttctcaacccgagatggttttcttagagcctacctgccctttgttgaatcatgccggcattatgggctcataggcttgttcgtaacttgccacatcttgttggcgtaacttctaatcttaccaacaagatgactgagatttcatcaaaaacggggattttgagagctaatgtcaaaggagtttaaatctctctttcttggtaagcattaatctccattttgtttttcaaaatttttctttctctcccttatctatcctcttcctgaattacttttgtcttgtaggcttctctcttttctcagctagctcaccaaagaggccttcagagaatcaagcaactggggtcgagcttcatacaattgttgagcaacatgaggttgttgtgaagcaatagaatgactcccaaggtgaagttactcgtttattgaaggaagctaaggattagaagaagagccataagactgagctcgatggtgataaacaagaggcaaaggatctccacaaacctcattagaagaccattgaagaacttagcgaggccaaccaaaagctcaatgaggcaaaccaaaatcttgatgaagtccagaagaattttgacggggttgaagaggatgctatagccagagttaattcaatggctaaacgttctatctatcacgcctggttaagcaatcccaacatggatttaagctttttgggaaaaggagttgcagagattctggcctattttgagcaaaccaagaaggacaaggctgtagaggacgaggaagaagaagaagaagaagaagaaccatccaagtctccaaccatgtagacttggtttttatctttattttgtttcctgtctttttttactaaaatggccatttcgcctagacaatggttgcccctagtagcattttgtaaaaacttttacatcgttggatggtcaactttgcttatttatatatata

SEQ ID NO: 31292 - DNA, 1200 bp, Cannabis sativa
  modified_base (311)..(320): a, c, t, g, unknown or other
tagaaaatttatataaatattttaaaaaaaaaattaatatttatattaaattagtgtttaagataaacaattttatgttattaaagtatttttaataaaaatttatataaataattaaaaaatttaattatttattaaataaaaaatatgataaaatattttattatatatttacgatatatacttgattagataaaatatattattttattttattttataatttaattattttttattttttgctgcgaattatttatttttatttatttattattatatatttaattttaatttattattatatattnnnnnnnnnntttaagtttttctttttctaaaagaaaataaataaaatagtgtcgtctattcttaaaccaaatacaggattacttttagtataatctaattttgtccagtccagtccaatcttttagtataagaccgtacgacctcgtcttacatagccttcactaacacgattaatcgaagatgtgaaaaaaaataactagatggcaatgaatcctcaaaatatgtttcgatgttaagcgccagattaggtgtttataacattaccctgttagaaatagattgaacaaaaagtggatccgtaatcttgatttctacgatattcataacctacgaaaattaatacatttataaagcagatcttaagaccaatacaacaagctcaaaagtgtttttttttatgtaattgttttatcagtcattagtactaagtactaaccatatgatagagtaacgggtcctcttcgagaccagataaatctactaaaatgcactcttcaagacagtgccagtctcccgattgaactgaaattctattttctcatttcatatcgattaatgactatccaattacatatccattaatgactatacattaatgattaatttgcgtattaataattcttaaattaattctttaaattattgattagtgtgattttaatttgttaggctattttaaaaactattcatgcatttagagtctttggagagattttagcatattttggtggaaaatagtggaagtcggcgagctcgattgtacgaggcgaaacttaattgccaatttggaaacccttagaggtagaactagacttggagctcaacataaaagttttagatctcattcttaactttctagaatatcttgaatcgtccaattccgagtaa

SEQ ID NO: 31293 - DNA, 1206 bp, Cannabis sativa
ttttaagaaacatcctacggcgtcagttatttacaaataacaaacgccataaaatactacgacgtcaattaattacaaataactgacgccataaaagtatcatcatacaaaataatcccaattaaccctttatgtcgtctgttattttttaataaccgatgatatatagtctctttatactatcggttattaatacttgaacagcgaaagcctcttaaaaattatctccaaaatccaattttctagtagtatataatataaactctctaggtacagaaaatagaaaatgcttataataccattttagaagttcctatatttatacaaataacatatggcagattttggtggcaatgctactgttagtaaatttccaaactttccaagaaaaataaattaaatttgaattttgtgtcttaaagttgaaaataatgttcgagtagtttccaatataaatattaatataacaatgctaatgttaaatgcaaattttagataaaatattataattcgtaatccttatgtttttactaaatatcaattcatcttattttttttcttaaaaaatattgtaatttcaaaacctactaaaatcaaatatagcttaagtaaattttgtaatccttttcgttaaaatatgtttaataaatattatatttcctccttaactatcactctagtaaaatttaatttatctcttgattttttgttgtcctctagaaatataacaaaactattacaataaattggtccctctacttgtgatgtgttcatttttcccaattgtttgctaatgaagcagtaatgtgatcattactacaaaaatgagtttttgtgtcgattaacgtacctagttaactcgttgaccaaggcaaaagttaacccccactcttttgcatcaattgttaatcgatgctaatcattttttttttacgttagttactacttcgacactaaaacgaaaactaatgctaaaaatgaaactttaaaataaaaattacagggtccaaattttgcatctgctttgctcaaacacaccttttaacatcgattatagggtttttgcgtcagttgtgcactgacgcaaattttgtgtcagtgcacaactgacgctaatttacttataagaaaatcacagatttcaggcccatttcaaaaaccctaaaattaaaacttaaataagtcaacctcatgagccgaccctaa

SEQ ID NO: 31294 - DNA, 6470 bp, Cannabis sativa
  modified_base (6214)..(6217): a, c, t, g, unknown or other
caaaaacaaaacaaaaaaaaaagacacttgtatctaaaaagtaattattataggcttttcctttttaaaaaataaaaaaagttcgaaaaaaaatatgttaccacaaaattatacaatgtagcatattatttttttaagcatacttaataatcctactgcctatattcttttataattttcccataacaaaattaaattaaaaataaaatattaattagttattccaacttaaaaaagccaatgtagctaacttctatacactactactacaacaactatatatataagttttttttttttcttctgtcttcgatcaattataatttaactttattattaattatttatattttaataattatattttgaaattcttttgtccaaataaaaacactttttgacagaagaaatcatctggctaaagggccactttctcttgttaattaaattgaatatgaataaacattaaagagagatcatataaatataaacatttacataaatataatgtaccatatatgatatatctaatctaaccatctcattattctcataaaaaagataaataatattaatgtatttaattaattaagaacgtacataatattttgcatgtgatcacgacagattactacattcataaaattatagaatattttatatatttaatattattaattgaagaaacaacttgcattattgagacaaagaaattaataacaattagaatatattcacctgtaaagtatttaaatttaattaaaaaaaaaaaaaacacacccactatacctggaaaatgttgcaaaaaaaggatacaccacacttgatcaaccacaattcaacatatatctaccaagtcattattattttcttcacctttataaataaaataacatgttatatattacattatatatataaaaatatttaaaaccatatattttactaactatacatacagatttaagtctttttcctttcagaaaaataaataaatgcctgactcttgaactaccaatgtcctatcagaatttactacaaaaaacaaaaacagaagcattatttatatgccttgatttttcaacacaatattgtgtcatgcatggccattaattataatattattatattacttaattgtaaataaaatattattattattattattgaaagattgaaatttgaacttgctacttggttctttaggggtgcaatttaagtctagatctgaaaatagagttatacacttgatagataaacaaaacattcgtcttaaattcgagattggatatgtcttgccaaattaatttgttgtttgtactgattattatattttaaaattaaagaagatgaagaagagaaacttaatacaacatattagtaacacatttattacatttattaacacaagatctctctcttgacaagtcaataatgatgtgatattaatataacatgtaatatcgttattgatgcaatttatattgaatctcatatattttattttaataaaaactatagagaattactaaccaattataaaacatcactttatagtggtgatcatagtcatcttggtgttggggtttataccctaaataaaactcatttcaatattaacttatttactaattaatcaataaaagatcataatatatttttatgttacttggtttacatgttatttttataattatatgttaatctcgaacatgtagttactcatgattgttgtcttgtcgatacagtaaaaaataactattattatatgcttcaaactatttagtccataatttatcagtacactacattgatgtgataatcaacgatattgtagtttgcttacactcttataagtgaaatatcttttacagggcattaaaaacgtaattatcaatgtatcggctatacatcagactgtaacgatattaacagtggaaaagatactataaacttaccgttatattttttctaagtcaatgtcattaagttgatcttaggtcattgatctcaatcttaagatgattaaactttaacttaattgtactatacaagttctttgatgacttgttcgttaccagcttatctttaggactagcccgtatttacatcttaggaaattggtagtgtaaatgagttggagtttaatcataaatatataatatgtaacttctataattatttagaagtgaaataatagttttcttagagcttgactaaacgatataaatgaaagagttcttatttcggtatttatattagtttactgaaatatcatttataagaagctaagtgttttaaggataaaatatacatcgaagggtaacacagtagttttgtctactcgatgtaaattgtctatagaggatcattgattatttagattgaaacaattagggatcattcataatgtatctatattttgtatatagagcattctatgtaatagtgcaatttcaaatctatatagtagagtcgggaggaattaataagttaggaaatttacttagtaaattttagatgatttgcttattgagagcttaatttcataggtctatggttcccacattatctaaaataatattgtcttatagactcatttaattgatttaataagtcaactagaattcaaacatagaatgtcttacttgagaattttcattaagtttggaaaaatttgagaagatttgagaagaaaagagaaatacatatttatttgttaattaagacactttgtggatctaattgataaatatatttaaattatgattttgtttgttaattattaaatgaaaatcgatatttaaataattagataagattaatagtaaaattggaaaaagaaaatttattttatttaaacttaattgaaataagatggagaaatcaaagtccatgggccactatgtccattttggccatggcttggattttaggcccatttgtctttaattttggcccatctcatctaactctaatcttatggaaagcccatataaagaataagatgacaagcttatcagggaacttattagcctgattcaattgaaataattgataattcatagcgtatctatatttagtttatagagtgttctatgtaatcaatagtgcaatttcaaatctatagtagagtcaggagaaattaataagttaaaaaatttacttagtaaatgtcagatttacttatttgaagcttgatttcataggtccatggtctccacattatttgagataatattatattgtagacttaattaatttatttaataagtcaactagtataaaccgagattttcagaaacaagattaagtaagagcttaagaaattaaatagtgattaagtaaattagatggatgatttttatgttgtttggtaattatccctagttcacgagtcagtgtattggtcttttaagctttgaaatatattacaaatgagctttacaataaggaacgctaacccttgctataaagttatttctctaggtttctcttagagaagtagaaagcttagaataaaaccagcaaagcttcggctaaaatcccctccccctctgcatgaaggagtatggtttatatagggtagagttcaggcccgagcatactcgtgcccatttgggttttttgtcaaagtaagcccactaatggggtaaaatacacaaatacataactatgaggaccactaaggatattcagctcgtggggcaaaggttctttactgatgagggaaccgtttggtgcatgacacatgttgctcggagagcacgcctagtaggcaaagttgtcaggggagccatcagacaaaaggggtatacagtggtgcacacattaccatgctttgacgcatgggaccgtatctgatcttgtgtcaaatatgtggacacaccattctaggtagacatctgatactcacctctggttgtgtcgtgatcatcattcgaaggtctttgttccttccgtgtctcggaatactaggtgcctactgggtcttggaagaatgctatgccctagaggtagagcccttagtctttgttaggcttgggcccattccaagtctggcttgggcttccacaagctagaagccttaggcctaattttaaatgatgattaccttctggttatggcacgtgtctatcttttgaaaatatggataacatttactcccaagcttttgggacttaagagtggcagaagcttgtagctttctttctggatgaccttggagttttaggcacgtgggcacttctgaaagaaaatgaagcatctttctcttttcgaaacttgacagttgaagattcaaaaattggcttggtaaacaattgacaccacctacgtgttcccacttattgggttcatggttgccacacgctttatgaaggcgtaatttgtgcaaaatgatgggatgacagctatttaatgtcagcctcgacccctaggtgagtattaatgatgtaaaaatgtctcgattctaataaaggaatttaatgtttactccttagttacctatttattggatcgtaatttgtgtttttttatagggagatcttggccctttatctcaaagcacatggatctccatctttgcttatatatagaagcaagggaactaattttaccacttttgtatttttgaacctttgagctttcatcttcgaatttgagcaaaaatctctttttttactagagaagaaaagacctttgaggaatcttagaaatctcgagttttcatcatttggtgaatgaatgagctctttgacgttcttatccacctcttattgtgaatctgagcgagggagttttgaggagcgccacccttgaatcctattgtgagccacccccagtcgtccaaaaatattgacatttaggcaggctgcgaccaagttctttgttgggctcttaagttcaagaccaaccaccttcaccttccttaatcctcgtgtcgtattacaagtaagtttctctaaacctttgaactttttaattctacattgtgatagaaatttagattcgagtatcgatttgagaaaccactatttgcatgcaaatactaagagaattaaataggtaattcttgggttatccgataattataggcctattgaactgccaatgcatgctatttttctgggtatgttagtttgataactcctgtttgtgtaaataagttttgaatcggattaggcactgggtcttctcatctaaggtcattagggctttggacaaatctttttaagttttcccctagtttttcttaagttcatgacctgctactcggaggtgttgttctgcaagagttgatgagagccttttaggctctaaaattgttgatttcttcatatttagaaggtgtttcttgatatttttagtatttttcatcgttctatgaattttttaggttttggaagtaaattaaattatgagtaaaaattaatggatttattgtttttatgagtaggtgatgttggaggatgaaaagacctaccaaaataatgtgttccttgagttttaaaaatccatgaagacccgaaactcatggtttgtcactgcaatgagggctagaggttcgttgccatgagcaaataaaagctccctggtagggaagtgtcgccacgacgaggaggatgtgtggtcgcagcaaagacactatcatcgtggcgagcctcaagtgtggctgcggtgagggcgcgattcttgggctttttcaattttttttcttttctttaaactgagatattcttaggggtatttataggccatttagggttcaaattttagtacctttgaattacgctttttgagagagaaagaagaagaaggagattgcggcaccaattgttttatatcattgttctttttcttctccctaaactcatgctttttattatgattcctattataatgtcgagtttagagtagtttatttttagttaaaggttatttcaaaatccaagacatgatttttttttttttgagtcacaagatatgaatttttaatttctatgatttatgttaatttcttagtttccattatattgagttgcttctattcttctatatatttaatgtcatgataattgttttaatcttgtttagataatcactaaattaggttttactttaatctattttcatcttaggattactattcacctaatagtctaggattctgttgtgatattttgcacacgcaagtgcacgtatcgtttacaannnntaaactcatcaagagtgaggtcgatctcacgaagattgtagttaagtacattaaaattaaacttttacttctatttgattaaataaaaattaagaatacgttaaaactagaaaataataaaaacagtgataggagaaacaatttaagaaaattaacagtaaataaaaataagggcttcaatttcaattgtatctattgaatatggattaatatgattatcttcctattatcaatttctatgcaatagcaggtt

SEQ ID NO: 31295 - DNA, 4112 bp, Cannabis sativa
aattgatttagtggaattggggttggtggatttaagtatcatacttggaatgaatttcttgtccaagtactcagctagtattgatcgtaagcaaaagatggtgatcttccaactcgaggacgaggaaccatttgtttttgtgggatgtattcagggatcccaaattatagtaatctcgatattaatagttagagatttattataagagagatgcgtagggtttttggtagtggtatgggataccacacagcctgagtcaatttggccagaagacatcatggttgttcaggaatttttagatgtatttcctaatgaactttcgatttaccactgcagcgggaaatagattttgttattaacttagcacttagagaagaatcagtttctaaagcaccttgcagaatggcttccgcatagcttaaagaattgaagattcaacttcaggggttcctatttttagttgcatataactttacaactttcaggctttcagagacatgagcttcctttcacatacttgggagtcccaatttgtgctaagaagatatctaggaaagaaagtgagattctagtggagaaaatgacagcaagaatcagatcttggagctcaaggaacctatcatttgctgggagaacaatacttatcaactcagttttgattacaattcaagcgtactagagtcaaatcataatcatgccgaaaagaatcctgaattccatagaagctatatgtagagctttcttatggaaaggtcaagcagtttcatgggcaggtgctgtggcctgggacaatgtatgtcaacctaaagctactgggggtttaggcatcactaagcttgaaacttggaacaaggctgctatgtccaagtatatttgggcaatttcgaactaacaagagagcttatggctgaggtgggtgaatagtgtatacatcaaaggacaaagctggtggagttacaatgcctctatccactgaagttggtattggaagaggcttgtagctctgaaaaaccagatcttatctttgaatgttaatgctgattttcacagggataaatatgctattaaggaaggctataagctattcagcaccccaaaactgaaaatccattggagcaaagaagtatggtcaagactgaatacgcccaagcactctatgatactttggcttgtgatgttgaataagctaaagaccaaagattgactgctcaaaatgggtttaaaggttcaagagaaatgtaacttgtgtgctgaatgtaatgagaatatacaccatctgttctttgaatgcaggataacgaaccattgcttggaagagatcaagtcatggctgaattggaaagctgtcacttgcaatattcagcagctagttaagtggattgggagggcaaaagtctcaagattcaagagggctgtatgtagtgctgcaattgcagccatggtgtatgctgcctggaaaatgagaaatgccgtgttgtggcagggattgcaagttgacaccaaccgtttgattgaagaggtgaaatggagtctaaggactcgggttcaaagtttcttgccaaagaaactttcaagtgtagatagagagtggttttttgctctatagtcatcatagaaatctggtgtaagcaaattgaaaaaaaaaacagcaacaaagaattgtatagatttagacctctttcgttttggggtgctcttagcttgtaaatttagtttgtgcaatacaactcattgatttatcaaaaaaaaaaaacttcaggggctccttgacctagggttttcacaaccttgtgtgtcaccctgggagctcctgcattgtttattaagaagaaagagggatccctacgcatgtgcattgattaccgggaagtaaacaaattgactatgaagaataagtatcctttgcctaggatcgacgacttgttcaatcgactttaggggaaaacgattttttcgaagattgatctctaatcaggctatcatcagttgagaatccaagaggacgacattccaaagactgctttccgcactaggtatatgaatttcttgttaggtcttttggactaactaatgctctggtagattttatggatctaatgaatagggtattcaaggatttcctcaatgtatgtgttatagtatttatcgacaacatccttgtgaactgtaaatcagaagtggagcatgagcaacatctccagtttgttctgcagcgattacaagagcataaactatatgccaagtttcaaaagtgtgaattttggttatcccaggtgtctttccttggacacattggaagtaaggatgggatcaaggtcgatcctggaaaggttgaatatgtcaaggattggacaataccaaagatagttacaaaagtcagaagcttttttggtttggctggttattatggttggtttgttgagggattttctaagatctcaacacctctaactgaattcagtaaaaagaatcggcagtatttgtggaagtgtgaaacaagcttttaagagcttaagtagttgttgattgcagctccggtgttagccccaccatcttattaagagaagttcgtggtttactatgatgcatccaaacaaggtctggggtgtgtgttgatgtaagccgatcggatcatcgcttatgcctcccattcgttaaaggagtatgaataacgatatgcaactcatgatttagaacttgtcgcaatagtttttactttgaaaatttggaagcattatttatacagagaaaagtgtgagatttacatttatcacaagaacctcaaatatttctttacccataatgatttgaatatgagatagaggcgatggttggaatcggtcaaggactacgactgtaaaattctttaccatcccgagaaggccaatgttgcagcagatgccctgagtagaaagggtcccgggcaagtaactagtatgattaaaatttcaccccagctggaagatgatatggtcagatcaggtattaaatttgttgtaggaaaacttaataatctgacattataaaatgatttgttagaaaaaattaaagttgcttagttaactgatccagaatctgtgaagatccatgtagaggttttaactagtcaagctaaagattttactatgtcaggtaatgggatgttgttgtatagaactagagtttgtgttccaaacaatgcaaaacttaggattgaaattctcaaggaacctcaaactactccttattcactgcatcctagcactaccaaaatgtaccaagatttaaaacccttctactagtggtgcgggatgaagaaagatgtgatagaatttgtatcttgatgcttgacttgtcagaagattaaggctgaaaagcagacacttgtcgagttgttacaacatctgactattcccgagtggaagtgggaagatgtcaccatggatttttttgttgggttacctagatccacagggttgtacaactctctttgggttgtggtggatcgatttactaagtctgcacattttttaccagtgaaaataatctttacagtggatcaatatgcagacctatacgtgaaataaattgtgaggttacatggggctctgaagtccattatataagatagggatccagagtttacttcaaaattttggcagagccaccagcaagccatgggtaccaaactgaagtttagtactttccatcttcagactgaggacaatccgagaggacaattcaaatacttaaatatatgttacatgcctttgtgatggatttccatggctcctaaagcaagtacctaccactggcagaattatcatacaacaataattattagagtaccatagtgatggctccttatgagattttgtacggcaggaagtgctgatctcatatttactaggatgagattggagatggaaatacctaggtccagaatcagtgcaacagataaaggctatagaaaagatcaaggctagaatgcttgcctcttagagtaggcgaaagagctaagcaaatctgaagcacaaaaatgtagaatttcaagtaggagatcatgtattcctacgagtgtctccgatgaaggggattaaatgctttgggaaaaaggccaagttatgccctag

SEQ ID NO: 31296 - DNA, 1098 bp, Cannabis sativa
gacagtagttggagtcagcgactctcgtagggttctctcatctagaattcctagagatgagaattaagttggcccttgcgtatgtataccgaaaatatataaaaatatctattattaattaaaaagaattattactataatataaacttaattctttcaattatttgtttttgatgaacattcttttttttggtcgccgacatttaacaacatccaataaactcaaaactcctcatcttcttatctttatatattggcccccaaggaaatatatccaaatgactctaatctaaacttgtccacttaataatcttaatggttgatttttttttttttttgtataattaataactatatatatataaatagcaaaaatttaaaatataaccgacccttaaaatagctattttgtagattcttcatgaatttagatatccaagagaatttgtagtttaattttattttataatcgggtatgttgtacttgtaaattttcaaaatattatgaataatactatatgtattaaaaataaaattcaaacagttaccataaaaattaaaaaacagtatgaatattttggcactgtaaattattttagatttttttaaaaatttacagatcattttaaatatatacgtattgttataaaaaaaaattgactaaaaaactctttagtaccctatataatcatgtatacatttataatacattgtacttgaataatactatttcttgcaaaaatccaacaacaacatatgtggtttaattttgccaaaatactatatagtactagctagcttgctagggttaggttggctatcaatttcagcaaattcagtttatcttgaaatctcttgatcttttatttgtgcatacataataatgatttaatttgtttgcccatgaagatacaaaaaaacatggcatagaaattaaatgtctcttaataatatgtatgttataagcatgcatatatatatatatgatttttatattttgatttttttagtggtgctatcgtcaacattttatttcaatctttgcgtctgaaaatatatgccatttgtttttttttttagttttgttttcatggtgat

SEQ ID NO: 31297 - DNA, 3152 bp, Cannabis sativa
  modified_base (688)..(690): a, c, t, g, unknown or other
aagccacaagagaagcaagcaaattgagaggaaataccatatactaagagatcatattaaagagagaggtgatgtggtcgtcttaaatattacgttagaacataacctagttgatccatccacaaatacactaccagcaacatcttttatgggtcatattacgaatatgggattaagggagatgccaagtttacttttaggtcaagtgggagattgttaggttttatgctctgaaaaacctgtaaagacattttttgttataaatattagttgaacattttgatatatgcttgaatgttaaattattaatatttgatattgaataatttatatataaatattagaaaattatttattcatatatgagattgtgacttgtattgtacagagaattaagatcacttagtcatgaataaaatagtcgataatatattaaagttatagaatctttaattgacggttgctagaatggttcacttatgtctgttattcgatgcaagaaatctcgattatgattactgatgtggtatgacatctaagtgaagatgttgtatataatagagattatatatgacataaattgatatgtaattaagttatctttatcaaacatgtcatttactataaaaatctaattcatatcataacgataatcaatagtagattggcctaaatcctgagtaatcannnctcttgttcatgttattagtttttctgattcactcaacttttgttttgggaagcaaataatgtggatggctgtgaacttgattaacattatagaatcttgactttcataatggatcgaatgttagttctctttaagtgttaattctagaattaaaagttatgcacatatttagatttgatctatattatactttcactagtgaattaacagtactaaggataaaaaagtaataataagggtaaaacagaaatttaaacaaaactatttacaaattaacacaaggaggactaatcactggaattgattatatcaatggacacttccaataaactcagtaaatataattctatgtataatttaggaaacctaaaaaggttaataattacataattattcactcagagttcttgctcatgtgttgagagaaaaataagaacacattatatagttttatcataattagcctacactatttcttgtgtgtggtgatagatttagaagatcgtgatgtgagtttgtcatcaccatcttaaggatacaacttatgaaaagatacgaggatacactgattttcttcaagaggtaaatatatcctttcatcttttatcttagatttaacatatgtacatatggagatcttagaatgtggtaaaataataatcgttataaatgcttctgacacgtatctgatttagaaccacaaaactaacactttgcataactcttcttgccatacaatgataatcgttataaatacttccgacacatacttaatttagtaccacaaaatcaatgctttgcatagatttaatctttgactccatttgtgaacaaaaaaaaatgctctgataccaattaataagccccacagtacacacaaggaaaacatataaaatatagcagcaagaaaaaataaagagccaaaagaactagaatctaaattaatattgttgagaaaagaaaaatataataaaataatcttaggaatctgagtggcctagtctctcaaagatgcaaaaaaatactcaattctttgtacaatccttcatttattctttgtattctatatatactattgtattccctcctaaacactattcttaatacaaagacccatatatccttttattttctatgctctatattaccctattaattttgggtcctaacaacatttaattttagagttctggaaatatgtgttatgcttaacctcatattgtttaataatgatagtgcttagattaactccaacttgggtaagttgtttgtccctaacctagttggagtttttggtttgattaaaaaacttattttgcttatttggaaaagatctttaagtaggaattttaaataagatactttcgcggtcaaagaagaaaagatgaatgaagacgatttaattattttcttatatacacatcaaattattttaaaataaactaaacctccataggagtgtgatgacaaaagagattgatcataaaaagaatgatcatttttcaatattagattttttcacaaaagtcaatatctttctagccagcgtctttctttgactaactcacatctatttgaagaagatatataacaaataatattaattaatattaatatttatatatatttataataattaaatttagcaaaatattcttatattttgacaatattttattgaatcaaaaattgacgttaaatattacttttaatatataaaaatatatagatgtaaatataaaggaaatttcaacttgtccccctccaaatctctcacacacacactgacacatatttcttatattcaacaaagtcaagtaatcatatgctgaacattttaattaaatagaaaacacaaagggagaaaataccatatcaaagagatacaataaattattgttaatcatgcaattgtagcaagtgctcttattggtactgtcaaccgtttttattagtcctgccacattttcatcaggaggagtgctaccgtcagcctcctataccatcactttaacatgaccagtaaggatacaagtcatatccatcaataaataatacatacaaaatttctccaaaaaaataaataaataccaaaggaatatttatgaacagatataatatggagattttccacctaatcagtataaacctacgactaatttaatgatcaccatcttaaaaaaatcagaaaatgaaattctaaataaaccccaatcattttactaagagtaatttgcgacaaaaatacctaagttttataccgagtagcagataagtacctaaatcgtatttttggcagtaaaaataccttccgtcatattcctaaaacttccgtaggtacctctccgttttcttccccgtaagtgtccatgtgtcacccttttattagtccacatcataaatttttatttttcattttaaaattcattaaaacttatttaaaaatcattttaaaattaaa

SEQ ID NO: 31298 - DNA, 1605 bp, Cannabis sativa
ggtggtgcagctggagcaggatagggagtacgaccgtagttggtaggtctaggatatctggtttgggacagattagcctcagcttttgagatgtgaagacttttggcatttttctatattctagctgactgtgccattaacaaagcttccacttatgcaactgtataggtctcttttcttgtggtgatcgaagtgacaaacacatcacattcaggtggtagcccattgaatatagcctctatatgatcttgagctgtttgagcatggccaatggtagcaagtcgatccacaatacctttactcttgagaagataatcactaagagaccttgtcatctttgtgtttcgaagctgagttttgtaaaggcctatattggcagtattcaaagttgtgtaatactcagtgagattctcccaaatttgtgcagtggtgtcacatctaatcatttgattagttattttctcaaacatgaaagatagaagccaggaaacaagaagattatcttgttgttcccagtcttcaaactccggattaatagtattggatctttgatcaactgttgtcaagaattttgctggaacacgagtatcatcaagaaacttttaaaatttactacctttaatcgaggcaagaacctggtgtttccagggaagaaaattatgctcattgagttttattgacaaggaatggttgaatgaaataggatacaatctttgtagaggaacttgttgattgttgtgtggttgagcattgttcaatcttaatgcttcaccagttgctgaaatagaattcttcattaatgaacgattagctagagctctgataccatgtgagtgtttaacctttgagagggaaagagtagaagaagagagtttgttgtattgattcatgatcatgaatacaaggtttatatacagcaaagataatgaacaagcgaaagcaacaaaaccaactaactctaacagaatgaatacaactgaaacagaaaacagttaagacagttaacaactaactatcctaagtgacaatatccctgacaatatgtatatatgtctatactaatttgtgatgattttgttattaattagttagatcttggatacattagatacaaacataaaaaaaaatgaatatttaataataataattcattagttgaactactgtccaacaattaattatatataaatcattaataatcatagattaaatgttattatatagttcgatccacacaacttttcctaaattaagctatatatttaggctacattttccctgcttccaaacagctatatagctataacatatagaattatacatcaatcataatctctctgatctctctttattcaaataatataaatatacatatataataataaatataacagtatagctaagctagctagatacacgcatgtaatgtataatatataattgattataaaaagattctaagtatagaatcattctattgattatattcttctcccctaccttgccctattacaaattaagaattataatccgtacagttattccattagattatatatattattaattaatttgtatataatatattaaatatacacacataaa

SEQ ID NO: 31299 - DNA, 2452 bp, Cannabis sativa
atctttaaaaatctctggcatttatcacatttcttaatgcaggccttggaatcttcaatcattgttggccagaaataaccttgccttagaattttcatggataaactctgtctggcagcgtggttgccacaaaatctgtcatgcacttctgacaaaagtcgtacagcttcttcttgtgtgacacacttaagtaatggcatggagaatcctcttcaatacataactccctctacaatgatgtaccgtgtagcctttctcctcattttttgagctttgtttctgttatctgggagttccccaatgttgaggtaggctgctattggcgtcatccagtttggggatgtatcaatcatttcaatctctcccgtgccgttgatactgggtttttccagaaattggatggggattagatttgctttatcatttatgttgttactcgcaagtcgggctagtgcatcaacagttgtgttttcttcccttggaatttgcttgagaacgtagcttttgaattgtgtgagcagatcatatattttgctcagatatgctatcatcttttccccttgagcctcatactctccagatacatgatttaccaccaactgtgagtcactgcagatctcaatgtgtttgggtttacccgtacattcaaccacaaaatctattaaggcttgccctttaatcgctgttcggggctgaaatataatttcgtactggcccaactccattgcccatttgagcaaccgtctaaaggcgtccaatttttgtaatacttggtgtaatggctggtcagtgtacacccaaacaacaagagcctaaaagtagggccttagctttcttgttgctaggattaggcaataagtgagcttttctatcaatgggcaccgaccctcagcttcgatgagtagaccgggtgttggatattgttctattctctgatcagtacggcacttatagcatgtttcgtgacagccaagtatattctttattcttctccgtccaaaggttttgagagcataggaggttttgcgagttgcatttttagctcttaaaaggctttttcgcattcccccgtccattctaattgcttatttcctcgcaggatgttgaagaatgggaaacacttctctgttgactttgaaacaaatctactgtgtgcgacaatccgaccagtcaaactttgaacttccttgatttttgttggcgatttcatatccaggagggcttgaattttatctggattggcttcaattcctcgagcattgacgataaagctcagaaacttacctgagctgactccaaaggagcactttaggggattgagtcttatgttgtatttcctaaggactttgaagcattcgtccaggtcatatatatgccccccaaccttcctggatttgacgagcatttcatccacgtacacttccatatttcgtccaatctggtctttgaacattttatttaccaatctttgttatgtagctccggcattctttagaccaaatggcatgaccttataaaagtacagacccatatctgttcggaaacttgtatgttcttggtgtggttgatgcatcttgatttgattataccccgaataggtgtccatgaagcttaatatctcttgtcctgctgttacatccacaagttgatctattcttggaagtggaaagcagtcttttgggcacgccttgttgaggtctgtgaagtcaatacatactcgccactttttgtttggcttgggtactagtacgggattagccacccaggtcgggtaaaaagcttcaattatgaaattgttgttgtgcagcttttctacctcttcttttagtgctagggcttgttccttgtccaacaatcttctttttgttggacatgccaaaaattaggatcaatattcaggacgtgtgagattatagaaggatcgattccgaccatgtcctcatgtgaccatgcaaaaatgtctaggtttgctcttagaaattttatcaatgctgattttacttcaagtagcaaaccttttccaattttgagtttcctggtcggaacatttgtgtaacaccctaactattatagacgtgttagcgtaatttttaacgcactgtgcagctcgttgctaatcagcgaaattataggaaatcgtgaataattaaaattttgcttatttaattaaaacataatatattacatttataaagttccgggattccattaacaaaatacagttacaaaagtttactattcatatacaaaatacttgtcgcctagcgaccaaacagcataagcactaatgtcccaaagatcgtacgctccagacctaaccaccccgacatgtacaatcttcacctgctcgctctcacggctcctcaacgttagcttgcccttacctacacatagcaatagcactgtgagtcgacagactcagtaagaaaagcataacataataaacatacta

SEQ ID NO: 31300 - DNA, 1573 bp, Cannabis sativa
agaaaatgaaaagagaatatgaattccttgctttattgaatagactaatccagtatttatacaaagagatagacaaagaaagaagaaaaccagataacagaaaaaccaaaaaattagttacaagacaccccaactaactgatttaacaactttacataaccacaattagttatctgttacaattaatagtacctttcataaaaacattagtctcttggagatttgtgattgagagcaaaaatcccttttatctatacaaaagggacatttctcgatgcatttgaaattaacatattgaacaagcgggatttaatctcaattattaaacatcatgtctctttacattattgaaagcttgaagaacaagttctagagtagtttatatgtggcgccagttccgacgatgagtcttgctttggtttcaaactcagtgtaattagttagtttggttatgtctataatttaatcagtttatttcttgtgttgtcgtattatgatttagaaaaatttgagagcctagaaatgagagagtgagaagagttagagaggattcgtagaaatttattaaataccatgtagttggtaattaatctaataagcatcaagaagctactcccaacggcccaattacatgtactgaattgttgcgcgaaacagattaatcaatgacttatgattcagtttattgaacgaataaacacacattacaatcaataaacaatataccaagagatctcaaaattcaagataataaattaagcaatagaacaaaaagaataacaccaggtttaacaagtttgagtcatgtgcaatgttttacatttcggttgaaacaacaacaaaccatatctttattgatatcagtgtttacaaggttacaagaattcttacaaacttctcagagattacgagaagaagtttctctctctagtttagactctaccttacactttcacgattttttactcaagcaaatatgatctaattctaacattgattacaaagatttacagctatttatagatttgcattgttgccaaaaatatctcctaaatttttgtgtcacatttataccgccttaaatgatccaactaatcaccagcaataataatccacgtcagcttaaatacgcactttcagtacggtcaatccagaagttttataaacacacaagccttctggatacgtacatagatcttcgggatacatacatggcttccttcctggatggacccttaagactgatagtaagctatccgggtgtcactactacaaatttcactattcacgttggtcaacacgactgttcattgcgttgaccgacatgaatagtgccagattaaataattcgacgttttaaaaacgacaaaaataagtaatggtttgtgtcggctctctctcccttgctaattacaaaattgacgaaaaaaggtagattttttttaaaaatatatatagaatttgcgtcaattttaaagcctcgcaaacccattttgtgactttttaaagatggcatttttggatttttcgtcaattttaaagccttgcgaacccatttactagtcagaaatgt

SEQ ID NO: 31301 - DNA, 1639 bp, Cannabis sativa
cactaagggtacgacacatcttcaaccctccttcccgaaagagaaggactaattgaagtctatcacatgcccagtgatgcttcaccctttagtctcttttaagcgaagtcatcgcttgattttctatgcaactttagcgttccctcatgaaaggtagagcttgcttcataaaaattcaacatgactctcccatgcacattgttcttcgtgcatgaaagatcactaggggtatggtacatcttcaaccatccttcccggaagagaaggactgcttgaagtctgtcacacacccagtgatgtttcaccctttggtctcttttaagcaaagtcatcgcttgaatttttatgcgactttagccttccttcacggaagccagagcttgcttcataaaaattcaacataactctcgcatgcacgttgttcttcatgcatgaaagatcactgggggtacgtcatgtcttcaaccatccttcttgaaagagaaggactgcttgaattctatcacacgcccaatgatgttttaccctttggtctcttttaagcaaagtcatcgtttgaatttttatgcaacttaagcctttccccacggaagctagagcttgcttcacaaaaattcaacatgactcttggatgcacattattcttcgtgtatgaaagatcactgggggtacgacacgtcttcaaccctccttctcggaagagaatgactgcttgaagtttgtcacatgcacagtgatgtttcaccatttcgtctcttttaagcgaagtcatcgcttgaatttttatgaaactttagccttccctcatagattccagagcttgcttcataaaaatttaatatgattctcgcaggcacgctgttcttcgtgcatgaaagatcactgggggtatgacacgtcttcaaccatccttcccagaagagaaggactgctagaagtctgtcacatgcccagtgatatttcaccctttggtcttttttaagcaaagtcatcgcttgaatttttatgcaactttagccttccctcacggaagctagagcttgcttcacaaaaattcaacatgactctcgcatgcacattgttcttcgtgcatgaaagatcactaagggtacgacacgtcttcaaccctccttcctagaagagaaggattgcttgaagtccatcacacgcccagtgatgtttcaccctttggtctcttttagccttccctcacagaagccagagcttgcttcataaaaaatcaatatgactcttgtatgcacattgttcttcgtgcaagaaaggtcactaggggtacgacacgtcttcaaccctccttcctagaagagaaggactgcttgaagtttgtcacacactcagtgtctcaccctttggccttttctaagcatggtcattgttcaaatttttgtgcagctttagactttccctgtgaaagccaaagtttgccactgcgaaatttaacatgagtctcgcttattggagcagaccttagcataagttaattgctcacgcaaggacataggcccaactttcccactgagaaactaaaagcatgccattctttgaaaacttatgctttcccttacgaggcctatatcagggcaaatgacatattataaacacttggatggaaatatgg

SEQ ID NO: 31302 - DNA, 1697 bp, Cannabis sativa
  modified_base (26)..(40): a, c, t, g, unknown or other
aggatgttaataaaacatacttggtnnnnnnnnnnnnnnntggtaaaatatttccaacagaagcatcatcttaatgattctagcatcatcttaatgaaaatatgtttggaattacaagaaaattcactctagaagtgtgatgatacaatagaaaatctatagtgattagcaatcacactttaaagaattaaatacaaattttggctcaaagtgtgtgaaaagcgtttattggtttttagacttgggagctcattaaactcacttgaataagttaggtgtatgaaattaatggtcaaccagcgtttacttttgagtaaaaattaagtttacatagtgttggggtgaaatatagccgttagatacgaaaaacaagactgcactggacaatccagttcaccatttccccaactagtaaaccgatttcaagagaaccagttaaccatatgggaaccagttaatcaaattcttggcagtggcaaaaagtccaatatttcgcactaaaacgaccataactctctactcaattattcaatttcagaaattctaattttgttctcgtagttaaatgctatgtgattcaaaaagtcaatttaaatttttttatatcatttggtgagaaaatttgtcgcgcaagttagtgacccaaaatttgtacttaaaactcttttaagtatggacttgaaaatcactatacaagactagggaatgtagataaaccttcatggagtcttgtcttgagtttcttgagtcttgaaatccacttcaggtcactttcgagaatcttgataaaattaccatttttctctccgagttaattttgccttagaaaaatttatttttcctttaattatgctacaaaatcaacaaatcattagtaacaaatattaatcaaatatttgttaatcatcaaaataaggagacctaaaagattgagttaacaatctctctcttttttatgatatcaaatatttaattattttgaaaagagagatgaaaaaattgaagcaatatatattagattagctccctcttaatgggtgcaagggtaaaaaaatttaccttttagttttacctggcatgattttgtaaactctctctcaattttatacttaggttaaagagcactagatataaaaaaaaattgagtttgttgctaaaaaaaataatcatagaatttttctcctttttgattcatcaaaaagggtggcaaaggaattcacaaaataaaagacaaatgaaaagataaaacaaagcataccgttcaccataaaaaaattcaaacacatagcattcaaaataataataaaaaaaaagtacaacaaactaacacataaaagtaaaaaggcactaagcctttgcaaataaactaaaaaaaataaaaatgagaaaatgtgctaaaaaaacaaatacaagagagttaatgtggtggaggtccaaattgatccatgtatgccctctattgtgccatctcctcttgagcattgacaaaaccgtgctccatgtcactcctcaaatttgattttattcaagatacttaattatatatttcttttatttaatatatttaattaaatagaaaaaaaagtatttaaattgattttaatctagacacttaaatattagttattttcaagaaatttaattagatagaaaattatatttaagtaggaaattttaatttcagaacagcttaaatt

SEQ ID NO: 31303 - DNA, 2741 bp, Cannabis sativa
  modified_base (726)..(727): a, c, t, g, unknown or other
  modified_base (1994)..(1996): a, c, t, g, unknown or other
tcttgggtgtcggttcacaaggtatgggtccaggtctgggtcagggtttaggttcgagtccgagttagggtttaagttcgggtatgggtcccagatccaaacatcgactatgggtcaggtccaagacacgggtccagatcaggatcccggtctcgaatcccaatctagttccacttcgggtcccaggtgctagtccgggtcctagttcagggtccgggtctagggtcacgtctttggtctcgatgccagttctgaagcccaggtcccaggtccaagtccccatctaggtccgagtcctaggtcccggttggggttcaagtcctagtccgagtttgggttcgagttttcgatcacggtccgggtctagatatgggttcgagtaccgagtttgagtccagatccaagttcgggtccgagtctcgggtttcgatctgggtcttggttctgaggcccaggtccaggtcccccatccaagtttgggtcctaggtcttagtccgggtccatgtttgggtttgggtcctagtccagttctgatttcgatttcgtgtttgggttcgggttcgggtcctggtctgggtcggggtctgagtcctggtccaagtccagcgtcgggtctcggtccaagttcggatcccgatctgggtctgggttttggtctagctccaagtccaagtcttgggtacaagtccaggtttgggtctaggtttcggtctgaatccaggtcnnaagtttcaatcccggtctgggcatgggtttgggttcgagtctaggtcagtatcaacatccatgtctaggtcagagtctgggtctaagatcgtctcccatgttaaagtccgacctgatcccggacccgaaactagaatcagacccgaacatggactagaacccagacatgggaccataacaggacccaaaccaaaaaccaaactaagaccacaaggaccccaacccaaatccgtacccagacctagacctacacccagactgggatccagacgcgatctaagacctagaatcagaatcggaccaggtctgcaactagaacccagacctgagaaaggaataacacccaaacctaaacccaaactcagaccagaagcgataccgggacttcgacccgaacctggacttgtgacttgcgacctaaaccaagaccgggactcggacccagacacagacccaaacccaaaaactggggtcggacctaagacctgagaaccagactcagacctaggacccgaaactaggacccacattgggactaggaccagaactcggaccgaaacctaaactcggagctggactcagaccgggactcaagacctgaacccgaaccaaaacacaaacttggaccaggaccaatacctaggacctgaatatagatgggggacccaaacccgggacttcggcctcagagcttggatcgggatacaggacccgaccccagacccaaacctggacctagaagtcacctcaggacctgagatccaagactcggtgcttggacccaacctcttatcagtgtcttgatttgggacttacaccaaagcccagacccaagctcgaactcaaaccaaggctcggacacataccaagacccagacccacactcgggaactaaatcgaaacttgaactagaaccggactgggatcttggaacgagaccgagaggtgcacccggacccgaacccagaaccagaccaaaccttagaccctaacgaagactgaaacctagaaataaacctcggcttgtacccaaatcaggacccgaacccaaactcggccagaacccataccgcgggacttgaaactgtaaccgaaactagaagcaaatcgagacccaggagaaggactaggactaggacctgaacccagacccaaaactttaaccggacgaggacccagacgaggacacagacccaccttgggatgggttcgaaaccttaatccaaacccgaacgaggacttgagacccgaacccaaacctgaactnnnacccaaacatggaacaagactcggggacacaaaattgggatcgagacccaaaactgcaactaagtctcggtcccagacctagaccgaaacatgggacatgaaccgaagccagaccaggatccatgattgggatccagatcttgtatcgggatctgggaaccgggcttagacaagacccgtagttaatgtcttaatctgggactaagagaaggacccgaagctggactaggacctggaacaagacccagacctgggacccaaaatggaaacttgaaccaaaacgtgaccaagaccctggaataggaccacgaccgtgaccctgaccaggacctggacttggattgggacctcgaactagagaagaacctagccccgacactctagctcagacctagtttctaacccggtcccaaaccaagactaagactgagactcatacctgaacccaaacatgaactcggtactcaatctcggacccagaccaagcacctcaccaaactgggattcagacttggacatggacattgacacgaacctgaatacttacctaggcccaggtcgggatcgaaacacgggacctggacccaaacccaggcgcagaccaagacccgaacttgggaccctgacctaagactcgaacctggacccagactcagacctggaccagaacgggatctaaaaaacctgtacctagactatgaccctgaccccaaccccaatgtggacccagacccgaacttggaac

SEQ ID NO: 31304 - DNA, 1717 bp, Cannabis sativa
ataattttatttatttggcatatattttaatgcatttcacatagtttttagggattatttcataaatacccaaaatgatgatttattacatatttacgaatctacttttatatatatatatatggatttttttttaaaaaaatatggagtattatttttttcttgttttctaaatgaagttgttttgacgttattgctacaagaaagaaatgtgattttgttttacaacaatacaaagtgttattttttttattatttcataataatgttgtttcgacgttgctactacctacgggaaaacagaatgaaagtaatgtttttctcttaaaaaaacaagtaaaaacctgtaaaccaaaatctgtaaaaacgtaaataaataataaaaatatccgtaaaaatataaaaaaaaaatcaattttaagtatatctaaatttccctaatttgtagtgtatttagtaatactcctattccaccatatccaaagtattatattttatatgtatatatatactaggttaatattacgtacttaactaattatatttttaatttttatttttgttaaatatatttttagttgtataatttatttttttggatgttattcaataaacatcattatttttagtgaaaaatatttaatttaagtgctatttataaaaagaacataatattgagtaaatactattttggatcatgtgttttgtaaaagttacatattggactatgttttgttaaatgacaatttggaccctaagctttttaaaatagtacaaattaaatagactctgaactcaatatttgttatttttttaatataaccaagctgaaactaattttaagcacgaatagatgcaagaaaaaaaaaagatgaaatcatatttgtcataatacctctaggtgaagttattattaagttttaatttgacgaaaattaagttcaggatctattttatactattttgaaaaatacaaggtctaaattgtcatttaacaaaatagaaggtctaatcagcaacttttgcgaaacatatagtccaaaatagtatttacccaataatatttaaaatttcttgttagttataattttagtttaaacataatacttttaattctataatacttttcattttttttaaaaaacatcttacagtttttctattttttttaaataataatagaaatatatatatttttttggtaattgcaatatttaatgacatcacaatagcaattctttatgaagcatcaacatttttttgtctatttatttgtttaaaaagaaaacaatgatataatgatattttttagatatgtgaattgagtaaaaaattgataatagaaatatagtttttaaatatgtacaatgagtttaaatttgaattgcaatgttgaaaaaatacattaagttatatagctacattaaatataagataaaagataagagagatatttatagtgagtttaaatttgaattgtaatattttttttaaaaaaaaacaccactttttattatataatcacatttaatataatatatgtaattacatgtaaaatatatattggatatataaatgtattattataataaatatattcattttagtttaattttttcaaaaaaaaaaaaatcatgattaatataattggaaaatttggatttctatactttatgtatactttatttaacacaaatataaaaaatctcaccctcta

SEQ ID NO: 31305 - DNA, 3758 bp, Cannabis sativa
  modified_base (1289)..(1304): a, c, t, g, unknown or other
  modified_base (1498)..(1504): a, c, t, g, unknown or other
  modified_base (1919)..(1919): a, c, t, g, unknown or other
ttttagtcacaatacttgttgtggctaaaattaaattaatgacaatttgtgtctaaatactatatttagtcacaagtaacttttctattgtaactaaaagttagtcacaattttttttgttgtgactaaaaaattatcactaaaagtgatatttttttgtagtgtttcttatattaaacgtaattatatatctaacaaaaattgttggttgaatattttttctaaaattaatatttaaaactaacacagttaaaccaatcaatttattatttttttaaaaacatagttttaaaaatataagtttaatgtatttattaaaatataacttagataatttaaagtatgaacaaaattaaataattattttttataaattttaatttaaatttgaattagacattaattcaattaattaatcatactttataacaaatttattagttataccgtttaaaatatttaaatttatttacttattttattgtttagtaaaattaattaaatatattttttataaataaatttaaaactatattaagttttatatatttaaaaaaatataattgaattgtattaaatttaatttttattattattatttaaattaataattaagtaatagcaactctgatatgcattacatgttatcatgttatactaaatgcggttataaaacataaaatattctttttacattatatttcaaatttaaacccattactcatatctaaaatataactttttattattttttttatccaatccacatatctaaaaaaatatatatttctattattattttccttttaaacaataaaaataaaaaagtgtttatgtttcttaaagaatcactgttataacgtcgttatcttttaaaataatatctttttattattttttaaaaaataaaataaaaaaatgtatggtatttttataaaaattaaaagtattataaaattaaaagtattataattaaattataattataattaaaattatttttgaatattattatatttttctataaatattactaaaattaaatattttttaataaaaaataatattatttattaaataacatctaaaaaaattatttttataattaaaaatatacataatcaaaataaaaactaaaaatatgattaatatacctttttagttagtgaacaaccaaacaagcattatagatggatagatctcttgtcataaagacaacctctgctctgaatcctgcatgtgacatatggttagattatgttaattgtgaaataataataataataatnnnnnnnnnnnnnnnnataataataataataataaatctagggacatgattttgtctcgtgatgtactttcacaaaatgtattccgtgatgtataacagccattaaatgggggagttatttgatctgagggtcgaggttgatctagaagtaattagggttaaaaaatagtaacgtactctgatacccatctaatgtaccacggaatacannnnnnnaaagtacatcacgggacaaaatcgtgtccctataaatctataacatattttatatatatagttaattaataatacaatatatatctcttgtcattacacctctctgaatgaaaaagttatatatacgtctttatgatttcatgcatacataatccttctttatgttttcttttctttttatttctgctttctccatacatagaaatatattactagttactagttaggtaatgtttactcatagtgataaattatatattagattttaatagttaaatcgatattcaataattgtaattattttaattattttttttctaacaacagatgatcaatatatgatgatgtggctacatttaaaaaaatatataatttacgccataaatacttaagtttaattttcagttgtaaatanatacttaagtttaatttttgataataataatacttaagtgatatttttgaaactctgtaaatatttggccgttaaatattaagtcattatctacgtgtcattttcttattagtatatttaaattattttttaaaaaattaataactcatgacctagaccaatcaagaattgtcacgtaacaatttagttaacacttaacaaccagatacctacataattccaaaaatataacttagttactattactgccgccaaaaattaaatttaagtatttatttgtaaccgatagttaaatttaaatatttataccgtaaattactcaaaaaaaaattatatagtataagtagtgtaaccatcctaaactataataataagaaaaactaataatataatgtttttcttttgatgaaacatgtagtataatgttgaattgtatacgaggtataaattattacttatttccttgtttatacataataaagtaatcaattaagaaaagaaaaagaatattaataataataaaaaaaaatgagaaggtgaaatgacccatgttaattggagtgaaacaatagcaagcaaaagcatgttttgagggaaagaaagtacagcttgggatttccccaaaccatggtcttccgtctttgtctttgtgtagggtatttatgtcataatccttctaaagtttattttttgacataaaaaatatccttctaaagtatttttttttcttttacaaagaccatgtgctatccatgtgagggtcctcactcctctccctattgcatggcaacttaaattgcataatttctcaccacaaaatttatgtaagagaaaattatataaaaatttatagtagactccttaaaaggagtgttgtggttagagttgtaaatatgagtgtagacccgacccgtattttgaaaagtctacctaaatacaagttgtgttgtgtcaagccaaaaaataatatgagtcgtgtcatgttgtaccgacaattttataaataggcatggcagagctcataagcctaatattttcgtattttgctcagattcatgcattatttactcaaaccagtccattatttcttaaacagactaagtcattttcttatatgagctcaaattcatgcatcataattttacagttttattacaatcaataagccaactactaaaggcgtctactgtggggatttaaaaaaaagaccagggatttaaaataaaatagattccattgcatcttgtgaatataaaggggagttcatggccactaaaatgtggtgtattgtaggagattagaattggcttttgctataagtttcactcatttaatgttatgtttgattgatataaaaaaatactcatttttctttttttaaaaattacacaataaattaaaacactcattttttttaaaaaaaaaaattaaataaaaaaactcatttgacaatctcgtgagccttaaatgctctgtgtgtttgagtaaactcatttttcttttttaatattacagtccaacgagttaatctattatcatatatcactaattatattctattaaagtaagaatagatcaagacctaattgagatttagattccaacacctaaatttaaatttattatatatgtcttgcagtttccatgcatagttgagtaattcaaaaaaaaaaaaaaaaaaaatttagtgatacatacatcaagtccctaaacaatattgattcttattttatatcactacaaaaaactgatatttttaatgacaactttttagttacaacataatttttttaggactaaatgtgacttttagtcacaacaaaatattacttgtgacta

SEQ ID NO: 31306 - DNA, 3563 bp, Cannabis sativa
cttaaaggttaaccaactataataacaagtctgctctcttaagagtttttcttttttcctttctttctatcctctctttatttatgtgttttttctcctttgtctttctagtgctttgaataactttattattactaaaataatcttatcaaacaggcaaaatattgggaactccatagcataacacaaagtaagtgttatgatatggagttccaaatcttgaacgcacttggatttactaagagcttaggagttgtcactcctttaagttttgcaagttattttgaatctctggtgggaatgcagttccattttcacgactacactgatttattctgtcaaactatagtacaattgcagtgtggtaagtcaaattaaaattatttattgaaaatttcatttttattattgctctcgtttaactaattgctttttttttcctatttttggcagaatattgggttgcaaagatgagaccctcacttattgcagcattagttgcattagtgatttccacactatttcctcggaaagtttttaaccagttttacaaggcgctccaagagaaccaaatcatcacagaggatgagttcttctccttttatcctgaaatgttgaaagcctttcagaaacgcaacataaagaatgaacacttgaggtggtctcactcgacagaaactttattaaactttccaatcaaatggaaggttggtgtcaaatgtgtaggaacattttcgatatttgaaaatgtaacaatagtcgaagagccaaaattagagccgaagttagaaagctgcagcacaaagaagaatgaatacttcaaagaattggacaaaaaaattgaggatatgcaaaataagtctaagatagtagatggtccatttgtagtaatagtttctttcacccttgccttacaaggatggtttggggccataattccagggtgtagcggtggtcttgcccttatagcatcagtactaactattatttcagggtgtctttattggcttacacacatcacaaatgagaagtggctggaacaaaaatatgctagtgaacttttaaggatgaatgagcatctcattagtgttgttgagagtgatgattcgaataatttcgagagttggtaccctagaaacactctcgagtcagctagcgttttgaaagccaagctttcaagcaaactcaaagaggacaaaatacgggaaaagaagaccaaaaaatggggcagccataagattgtagttgtgcttataatagttcatatatgtgctagtgtagtgaacattataggattttaccagtcttgtagcaagcattgaatcttgcttttagaaaccagattgttatagttttgtgttttgttctattttatgtctttgtgttttatactgtgtgatgttgaaagtcactactgacttagaaagttctagaatagttaagtactgtttaaatgaatgaagtgaattctaatacttggaccttaaactaaagctcaagcacaattgctaaaattttctagaacagttaaagtatatatatggaccttggggtcctcaaggtgtgaattatatataattgttgtaaaggtgtgagtgcttagtatattatggcttatgttcaagttttggtgtaattatttttgcaataataatagtaattacgttttcacgtgttgttgtgttgtcttacaagtggtattaaagttgggttgggttggtttatattaagagtcatttgttgagtttcttaaaatagttgtgtggagagttagttagagaaggctagatcagcttaatatagctagcacttcggtaaaaccaactcaactaactaaggcaacagctcgagtcacctggtaatgagctgaaccaattaatgaaacaaacttaaagttgacctggaaaagataaatgaagccagacaaaatagatgcatctaaggacaacttagataaacagctcaaacagctaggaaaggaaccaattcaaaacataactaacataatattaagcaacataatttaccatacaaagacatgacactcaaacacaatacattggaaggaatcaattgatagtactatctctagatttatgcattgaagcaaaatgattcttgattgattgtatgttcacttgtcactttagatactagtacatataaaataacatgctttgtttgagccaaatatgttcggtggttcaataatcttagtttcctcttgtatttatgtccaagataaatgtaaaggctcctctaattgcctgcaaagaaaaaggaacaacattaatcaataagattaatccttgctattcacttgtgaataaacaagcatttaatatttggagagaaagaaagaaaaaaccatttgagtttagccaaccaaacacttggtagtcaatcaatctaaagctaattttcagtcaaattttggactactagtatctgaattatgagttaatcatagtttttcaattatgagccatagctaagaagaagcccagcccaccaacagcaatatcaaatgcccattaagtcatttttaatttccatcaagccaactaattaactagtaggcaagtcatttgttactattagtagagtcactcggattagtgacttggcaggattcggttaactataaatacctgttttttcagttgtaatagagctagttcattcattgtatttttagtctagagagagagaggttaaacactagagatcagagaagatttgattaaagcttgaattgttcatagcttaatcttgtgtgcaatgctgtgttctttctatgtttacttgattgttcttaaatctaatctatccaattacttcctattatgtctttgatcaatctatgattgtgtttgtgtggattccttgagctgcaatagtgattgtttcacaacatttttattaaaacagtaagtattattgtagttgttctattaggggaccacactaacaaattacttcatttctcaagtaaacatatataacatttgcaaaagaattggtttatgaccaagaataattgttagaaaatacaattgtagatcttgatgcaaccaaaaaatttattgtgttaaacctcggagccatgaaccaaaaagaaagattaaagccagaataacaaagatgaacaaaggcagagaaagagagaaaaaggaaggagaagaaagaatgatctcattgaacagaattacagtacagcaatttatacaagttgattaaacaagaaaatatctaagacagctaggcaaaataacagaatacaaactgtcattagaatcctcattaccaagaagtctccttgtatattcacatttatgaaaccaccaagaagtaagagcaaaagcgatgagtaaaagaaaaacaaaagaatgatcaaatcacagcttaaagatttctttgtttaactttctctgaacaagttcactcagatcagaacaatcctcttaccttaaaagcctttctatatacaaatctcataaagcatacataacactcaaattaacacaagatcaaacataagatatgtaagatatacacatgat

SEQ ID NO: 31307 - DNA, 2896 bp, Cannabis sativa
ggcgttacagttttggtatcagagccgcaaggtttgtctgctgaagcttgccaagacatgtacaagcatcatcagagaaagctcagctcacggttcagttagtctgtatttgtttagtattgtatgcgattaatatagcatgttaggaagcatattattttatggttatttattttaatgtgttgccttaaaatccataggagcagtattaagtttttgtgatcgttgtctgacatgcatgtcttatgggttcgcaggataagtcctattaaatggacgcacaacaaaatacaaagagttagggtaatagggtcgagatcggaggcagtcagggaaatcagattccctagaatccccgtggtctcggtagaggctgtggcaagtttcagggtggtcgacatatgaacccagctcaagctcctccgaattgggagaacagatttgcggaaatgcaagatcgtatctgccaacaagatgaagaaattctgagattaaggtagcagggtcctcctgcagtgcctccatcgcaagctcaggccgttgtagctcctatggtgcccgtagaacaacctattgctggcaatcgtatggagtcgttatatgagaggtttcgcaagcaagcacctccagtgttcttgggaggtccagatttgatgaaggctgagtagtggctcatagtgatagaaaggattttgaatttcatgggggtagttggaaatgatcgggctacctgcgctactttttcagttataggaagatgcccttgtgtggtgggaattggtgtccctcgctcgagacatcactataatgacctgggaagagttttgagatttatttaacgacaaatattataatgaggcaatccgcagtgctaagcagaaagaatttacagaactggtgcagagtgagggtatgtcggtgactgaatacacgacaaagtttgatcgtatggccaagctggctttgggtattgtgcctacggacttcagcaagagcctcgaatgactccaagtgttgtgggacccccactcttcatactcttgtttatggtagggatggtggtgattctacaactgataagaaaagaaaggctaatccgacatttagtggttcgggacagagcaagcggttttgtgcaaactaaggcagaggtggaagccagggttactcttaccctcagtgcccacgttgtaagaaacatcatccaggagagtgtaactggaagacatgctttcaatgtggcatggtgggggatttcaagaaatattgccctcaaacaaagaaagaagagcagaagtcaaaggcaaaacccgtacctgctcgggtgtttaccatcactcaagctgatgctacaaccagtccttctatggtgacaggtcagcttttgtcaacaactccttttatactgtattatttgacttaggagctacacactcatatgtggcaacacagtaattgatcttttgggtaggccatgcgattttatcaaaagaaggttcagaaccctattgcctagcggggagttggttatctttaataggaaaattaggtttatactagttaggatcgaagatagggagttgagtgctgacgtagtagagctgtaattaacagaatttgacatcatacttgggatggattttctgtccaagtattcggccagcattgattgcaaacggaaaatggtaactttttagtcggagggtgaggatccatttgtttatgttggattagttcaggggtctcgaatcccgattatttcaattttaagggctagagatctactacacaatggatgtgtaggatttttaacggttgtgaatgactccagcatacctgaaacatttaggtctgaagtagtcagagttgtcaaagaatttcttgacgtatttcttaaagagttactgggaataccgccataatgagaaatagattttgtgattgacttggcacatggagttgaacctgtttcaaaggctccatatagaatggcaccaacggaactcaatgagctaaaattatagcttcagaggatgctaaacttagggtttattcgaccccgtgtatcgccttggggagctccggttctatttgtgaaaaagaaggatggttccctcagaatgtgtgttgctatcaggaactgaacaagcttactattaagaacaagtatatgttaccctaaattgatgatttgttcgatcagcttcaaggaacgactgtgttttcaaagattgacctacgatccggttatcatcagctcaaaattcgggaagaagatataccaaagactgcatttcgaaccatacacaagcactatgagtttttagtaatgtcattcggcttgacaaatgctctaacgaccttcatggatctcatgaatagggtattctgggatttcctcgataactgtgttatagtgtttatcgatgacatcctcgtatactctcagtcagaagacgagcatgaccatcatcttcgaatggtattacaatgactcagggatcataagttgtatgcaaagttcaagaagtgtgaattctggttgtcagaggtatctttctagggcatattgtcgaaaaagatggaattatggctgactcgggaaagattgaatcagtgaagaattggtcgaggccaaaatctatgatgacattctctcggtttagcagggtattatcgatgtttcgtcaaaggattctctaggatctctatgccactaaccgagttcactaagaaaaatcaacgtttcatatggtcagacaagtgtgaagcaagttttcaagaattgaaacagagattgataacaacaccggtgttagctttgccatcagatcgagaaaagtttgttgtttactgtgatgcatccagacaggatctgggatgtgttctgatgcaa

SEQ ID NO: 31308 - DNA, 1716 bp, Cannabis sativa
  modified_base (43)..(53): a, c, t, g, unknown or other
aatatgaattgaaagaataaagttaaaaaaacttagtacaatnnnnnnnnnnnattttatataaaataaaaattagtaaaatggggtgtatttataaatttttagtgtgtaaataaagttttccatataattattttgagttgtgataatattttttaattaaaacaaataataaattaaataataatgtgtgagatcataattattgagattcttacctccataaaaaaagttaaattggagatgctctaaggagctccttatattaatagtactactttttttactattatcttaaattaatttataccggacaaattcaaattataatagagtgccattggtgatgccatcataatatagaattatttaacattatactttgagtgtaaacattaaaggcattatccatttgaacaaagaaatacagtatggatatatttattcactcgaggtccatttttcaccattatattacattattgtattattggtaatatgaacaggtaatctttttgggaacataatgggtgggttacacgaaaagtttcatttttggcctcattaatgtcacattaattatgatatctcattgaaaacttaattggtgggttacgtctatttcttgaaattgttacttaattaatttataagtaatgagtaagatttttcttcattaatattgacataatcaattcgttttcttaaggtgtttctcacattatatttaagtgaaataactttcctctcgtgtaacaagtgtataatgggagaaaataacattagatcgaaaattgaagaagtaattcgtacgagatccctctcaatgaaaaaagaaaaatacttaagtggagagttgtatgttctaatggattaaatacaaatataagatttttcttcattaatatcgacataattgattcattttctcaatgtatttctcacattatatttaagtgaaacaactttcctctcgtgtaacaagtgtataatgggagagaataacattagatcgaagattaaacaagtaattcgtacgagatccctctcaatgaaaaaagaaaaattcttaagtggagagttgtatgttctaatggatcaaatacaaatacggcttaaaaaaaaaatagacgaacaattgtttgcaatgaaagaggtggttactcgtcattcgtttgtccacattggaagcatccatctccagagactctaaaagtttgtgatcttcaacaaaaatatggtaaaaaatacattgaagcgactgagaaggaacagagttattggatgagaaaagaagtggagaattcacgagaacttatttatcatgaatacttgttgtactcgttcctaggatatgtgctgtaatctattttatgatctaatgaatttattatcccttctggctaagcttctaactttgtcatattatacagtttggataactaatgtataaaaacctttttttttaatgaaaagtttttttgaaagtgtttcgatatcatttgtttaaaaaaatacacataaaatcttaaaggaaatttaaatgtctcatcactattgtagacggtctttctcgagctatgtgtagacggtctttctagattttatcagccctccttgtatttttcgtttaggaagacgacttaatggtttgcccctagtggcatttttgtaaagacaagtttgtaaaccacttggattttctcttatcttaaa

SEQ ID NO: 31309 - DNA, 1688 bp, Cannabis sativa
attactatcattttaattgaaaaataccattaaacaatttcttgtttagactaaactgacaccaacggtctctttcacaccatattacatgtgatgtgatttagcatagaaactccctcccaaataattaattaacaaataaaagtaatggaaaaagatcacatcacactagtcattacatgagttgatagtaccaccatactacacaaacttattcactttcttctattgttgcttcactacttcttttcctaactgaaaaatcatggcagttgatcttgtggctggtgctttgctttgtgcttcccttgatgttttgtttgaacgattggcttctgaggagataccccggctgttccaggggaagaaagtgattgtggagaagctagatgagttgaacactgtgttgctatcagctaatgtactgctcaatgatgctgaggagaagcaacttcgaaacgatgaggttaggaagtggttgttcaagcttcaagatgtcatctatcaagttgatgacttgctcgataggattgactatgaagctctgagatccaagcttgaagatgatcatcagtctagcagcagcagtgccggtaaggtactcatgaacttcattaagtcacctttcttgtccgcatttgataaatctgttaagcttgatatcatggagatccttcgaaagctgaagattctggttgatcaaaaggatactcttggcctaagagaattaggtgcactcaacaaaccttcaccaaggccacttgctcctctaatggaagaatctgatgtgtatgggagggatgttgaaaaagaagccattgttgatatgttgctaagagatgatgttgatggtggtaataagatttctgtgatcccgattgtagggatgggtggggtgggaaaaaccactcttgcacaattggtttacgatgatgaaagagttcaaagtcattttgagctaaaagtatgagttactgtatcagatgagtttaatatttcagagataacaaaagagatctatgaaggagtcactagcaatagatgcaatactcagagctcagacgaactgattagaaggagattgaagaaagcattgaaggggaagaagtatctgtttgttcacgatgatgtttggaacgagtcttactctttgtgggacagtttgaagagttcttttgagtctggagcaaatggaagcaaaattattgtaactacccgaagcacaattgtggcctcttctatggccactgaacatgttcatcatctacaaactttgttggatgatgattgttggcaattatttgtcaaacatgcctttggagataattttgaccagaataacttcaaagagttgcaagtacttggcaaaccaatagtggacaagtgcaaaggtcttccgttagcaataaaatctcttggtggattgctacgttcagaaggtaatgccaggaaatgggaggacatacttaacagtgacacatgggaagagttgtacaagaaggagggttccattctttcagctttatggttgagctatcgtcacttgcctacacatctcaagcaatgttttgcgtattgttccatctttcctaaagattatgaatttgaaagagaaaaattgattttgttatggatggcagaaggatttttgccaatggatacgaaaagtaaaaagatggaggaatttg

SEQ ID NO: 31310 - DNA, 2073 bp, Cannabis sativa
ggagttgtacaagaaggagggttctattcttccagctttatggttgagctaccatcacttacctacacgtctcaagcaatgttttgcgtattgttccataattcccaaagattatcaatttgaaaagaaaaaattgattttgttgtggatggcacagaattttctaccacttgataaaaacagcaaaaagatgaaggaacatggggaggaatacattgaagatctcttatcaagatcattgtttcaatattctaataaagaaaaatcattgctcctaatgcacgacttggtacatgatttggccatattcgtatcaaatattttttgctttaggttggatttgagtaatgatctacttaacctttcaacaaaaactcgtcacttgtcatatatgaagaggaaatacgacatggacaaagttaagggcttgtgtgaagccaagagcttgcgtacctttctagcattgccattcgatgaaaagtttgtcacatcagaaaacatatcatatatggagtatggtatgttgcttacaagtggaagttgcttaagagtactttctttaagtcaatgtctatctatgaagaagctgcctcattcaattgccaatcacaagcatttgaggtatctggacttgtctcacactcatattgaaaaattacctgattcagtttgtaatttgtacaatttacagactttattattacgtgggtgtgaagagcttcgtgaattaccaaagaagatgggaaggttaattaacttgcgatatctagatattgaaggtgtacgtctgaaagagcttccccaagaactgaatactatagaacacttgtatttcttatctgatgtgtttttgagtagtggaggatttaatatgaaaaaggtaggacagcttgagaacttacatagcattttttgggctggaaaatatcaaggatgcgagagaagcttcggaggctaatttgaaggataagaagtgtcttatgcaactaactttggagtgggatggtaatggtgtcgtggctaatagttcacaacaagaaaaggatatacttgatgcacttcgaccacatacaaacttggagcatcttaagattcaaggttacaaaggcacaagattttcagagtggattgtaagttctgcattttgtaagttagcatatatgacaattatcaattgtaagaattgttgtatgctacctccacttgggcagctaccatttctcaaaaatcttacaatccagggatgtgatagtgtgatctcaataggtaatgagattcttggtgacgagggttctctattcagatgtttagaatcgttagagatttccaatatgccggaatggaaagattggtcatttaatagtgaagctatgcaacaaactcaaatattattccctcttctcaaaagcctttttttgtgtagatgtccaaagcttaaagttgggttaccaagttgtcaccttccatccttggaacaagttggtgtaatgagatgtgaacaaatggtgagtttggtcccgataacagaaactcaacaaaccgtcacacccacagcccttcccaaactaaagcggattatgttattcaactccaaaagtgtctttgatctgcacacactctcatctttagaattcttaaatgtctattattgggaagatgattgttttcccgaagacgaagggctgcttccgaccactctgaagacacttcaaattcaattttctaataagcttgaaagcttaaatggcaaggcctttcaacaactcacatcccttcagagattgtatatttataattgtgaaaggctgcggtgcttgccagaagaagggctgcctacttccctatctcaattacatatagatcaatgtcctttgttaaagcaacagtgtgagaaagagaaaggagaagattggcctaagattcaacacatcacacatctgtcgttggatagggaacgtatcaattaaatggtctgtctgcattgatgtctcaagtttagcagcagttaaagcaagattagcagaagcagacagttgttgttctacttgttcttatccaagttcccaagtttct

SEQ ID NO: 31311 - DNA, 2601 bp, Cannabis sativa
  modified_base (1133)..(1135): a, c, t, g, unknown or other
aacggagccatcagcattgtatttgattatgtatacccatttgcagccaatggcatggtgaccatcaggaagagtgacaacgatccaattgtcattggcttcaagatcatcagtttcagtatccatggcttttttccatatgcgatcttttgctgccattttgtagctggtaggttctacaaaggtataggcaaaacaagacccctcaagttgttgtgttaacctattataagacaaatattgattattaggtgagcagtagaagaagcagcaatggtattgcaaatgtaatcagaaagacgtttaggtttagatgaaattcttcccattgttgaagtgataggagaagtagttgatatgttcctgggtgtggatggtacttcatcaggagtagtgttggtgacaggaaaactgttagaagatgaagtgtcatcaagtttgggaacaggtgagatgtcctcagagggagtatgtgactgtcctgtagaaggaagcaaagaatgtgagaataattcatttatagacgtggggatgtagtttctgaaagtagaaaaatatcttcatgaaagtaaacatctctagattgaatgatttcttgagtttcaatatttaaaagattataagctttcataccagggggataacctatgaagatataaggtcgagatctcgaggagaacttgtcccttttggtttctaatgtcgaagcaaaggcaagacagccaaagactttgaggtgatcatagttgggagctttgttataaagtatctcaaaggaagttattttgttaagtaatttagatggagtacgatttataagataaacagcataattaatgacatgactccataaggtaaggataaatgagattgaaataataaggctctagcaacatttaatatgtgttgatgttttcgctcaatgacagaattttgttgaggacgaccaacacaagaattattgattgaaattcccttggtagcgtagaaggctgttaaatttagctctttagcattatcacaacaaacagctttaatgttgactaaaaattgagtggcaatgagagaaaaaaaaattgaggaataatgaaagaaacatcagatttagaagtgagcatgtatacccaagtatnnnagaaaaatcatcaacaatagttaagaaatattggtaaccttcaatactagcaacatgaaaaggaccccatatatcaagatctattaaatcaaaagtagaagtgacaaaattattgttagatgtaaaaggaagtcacttttgtttggcaaaatgacatatagaacacataaaactgaaaggtttttcacaaaattgcaaacgattatttaagatagtagaaatgttcatagaaggatgaccaaggcgaaaatgccaggggtccatcaaattacatgtattgtttgcaaaaacagaaatatccgtagtaagaaaacgatgatcctcttcaaagaaaaacagttgtccaactttcttagctgttccaatcgtagaagtcagggagggatcctgaatcaaacattgatcaaaagtgaaagtagtttaataacacaatgttcaagataagcattaatagaaaataaattgaatttgaatttgggaaaatacaagacattcattaagacaagttggtcagatattttaacggttccagatttgttgatatgaatctgatgactattaggtaatgtaaccaagttagcaatattatttttatttgaagatgtaaagcaatgaagagagtgacatatgtgatgagttgcgccactatttacaatccataagaaaagaggaaaaaaattgtcattaccgaagacgttagaaaccacaggaagattttcactggtggaaggagcaccttggatttgttaattgagtagagagatcagttgttgactcagctgaagttgggaagagccagccacggaggcgtctagagtgggagtcaccgaggcgtgatttgcccgagcagtggtggtggtctttttcttgtctccatattcgggaggaaaactgtggaggaagtagcatttatcaacaagatgacctggtttaaggcagttagaacaagttagccgaggtttcttgctccaagatggttggttgggatttggtttggccgaagtagcagcaacaacaccagtattgccaagacagcattggcgctcttgttgaataatcatagagaacaccttggacagagaggggagtggatcatagagtataatctgaacccgaataccccagtaagactcattgagaccaatcaagaactgaaggatctggtctcttgtataataatcttgaactttttgcatcgcaccgcaagtacaaccataggtgcaggggatatttggttggtactcgttgagctcatcccaaagagcttgcaattgggtgaaataggtggtgaccgagttatcactccgtttaacattgccaacggaggttttgagttgtaagatacaggggccattgctttgattaaagggatcatggaggtttgtccacatctcacgagcagtggttttgaacatgatactagctgcgatctcacgagatacagactgaagaatccatgacataac

SEQ ID NO: 31312 - DNA, 2703 bp, Cannabis sativa
gatccgaattacccagctaagagacagaagaggtgacccttggattccgagagacaaggggcactcaagcaggaagtggataagttgttggtgaatgactttatacgcgagggattttatccgttgtggatatccaatcctattctcgtgccaaagtcaaatagaacttggagaacttgtattgacttttctgatttgaataaggtatgtccaaaggattactttccactaccaaggattgaccagttagtggatgtaactgttggacgtgagcttatgtcattcatggatgcatactttggatataaccagataaaaatacatgtcccagatcaggaacatacaagctttgtaaccaacatgggactttatttctataaagtcatgctatttgggttgaaaaatgctgaagaaacatatcaatgacttgtgaatgaaatgttcgtgaaacaaattggaggaaacatggaggtctacgtcgacgatatgttggtgaagtcggtaaagagtgaaagtcatactacagacctcgcggagtgcttcgaaatattaaggaaatacaatatgaagcttaacccgaaaaggtgttcctttggagtttccttgggaaagtttctaggattcatagtcagcgcgaggggcattgaagcaaaccctgggaaaattaaggctttgatagatatgccatcacatcactaaccaaaccaaaggaagttcaagccttagcaagaagaataccagcacttaacagattcattttgaagtcaactgataagtgtctaccatttttcaatatattgcgaggcaacaaaaaattagaatggacagaagactatgaggaggtctttaagagcaaaaaaatgcatttgtcgacacctccggttttggcaaaaccagtaactggagagacactactcctctacttggctgtcttggaaagtgcaatgagtgcatcaatagtgagagaagagggatagcaccaacaacttgtttactatgtcagtaaaagattactgggggtagaatcaaggtatccccctcttgaaaaactttccttgtgcctaatccatgcatctcgcaagctacaaccttactcccaggcacatccaattaaggtgttaactgatcaacccctgagacaagttttatcaaaaccatacgcttctggaagattgataaaatggtcaattaaactggggaagtttgacataaattatcacccacgaacatccatcaagggctaagccttggcagattttctgatagaaggaataactctagaggaaaattcgcttgtttagtgagacgcagatacttggagattatttgtggatggcgcatccaacaagaagggcttcggtgcaggggtgatattaatttcgccagaaggctttaagtttcattatgccttgaggtttcaatttgacgcatcaaacaacgaggctagatatgaagccttgatcgttagtttgaggatagctgaagcattgaaggtaaaaaatctcatatgtcatagtgattcacaactgatagtaaatcaggttctcggggaataccaggctaagggcctgaaaatggccaagtatctagagaaagttcgaaagaacttggaaaagttcgattatttcaaaattgagcaaatcccaagagaacaaaactctaacaacgatgccttagcaaaactggcctcgcaaaatgacttggatgaactaaacttggttccagtggaaatgttaaacgagccaagtatatgcgaagaggaagatgtcgagatgatagatagcttgctcacgtggatgactcccataatcaactatctactcaatggaaaatttccaactgacaagaacgaggcacgaaaactcctgtattcagtgcctcgctacacgatagtagatggcaagttgtacagaaggggttattcaatgcctatccttcagtgtgttcttcctgcagaagcaaacgagatcatcagggaaattcatgaaggcttttgcggagatcagtcaggttggcaaagtctatcaaaaaagatcattagacaaggatagtactggccaaccataaacaaggacacccatgaatttgtcaaaaagtgtgataagtgtcagagatttttgcatatacctcgtgtaccaccaatagaactgaggatgatgaccttgccttatccatttgcaatatgggggattgacttgattggggcacttcccacaaggcgaggaggagacaagtacgcagtggtggctatcgatttctttactattggaccgaggtttgaacctctattatatgcaagaaagtcctcgactttgttgtcaaaaacattttctgcaggtttggaattccaatgaaaatagtattcgataacggaactcagctgatggcgatttattcactgagttctgcgagaggaacaaaataattaaaagcttctcgttagtatccaggcctcaggcgaatggacaagtggaagctgctaacaagaccttgaaggatactatcaagaagaaattagacgttggtaagggtagatgggtcgacgaactacctcaagtactttgggctcataggacaactgagaagacagcaacgagatatactccattctcgttagcatttggctcggaggcaatgttgcctgtagaagtaaatatctcgactcacagacgagaattttataattaagaagaaaactaagaa

SEQ ID NO: 31313 - DNA, 5529 bp, Cannabis sativa
  modified_base (58)..(62): a, c, t, g, unknown or other
  modified_base (321)..(325): a, c, t, g, unknown or other
  modified_base (5356)..(5356): a, c, t, g, unknown or other
tttagaaagttcttatttaggatgtttaaacaacacacttgtgagtagatctaagatnnnnntaaaataatttccaacagtgtcaccattcataagatgccacgttagagtgcaaaaattgggataacacaaacccactccattctaaaaaaaaatattagttttcgaagtcatctatggacgatgcaaagtcaaaagtagcagttgtaaatgagatttaacacaaaaaaaaaaatactaagctacatgcgaagctgaatttttaacggctcgcattttataggaatgtattaaatgaggtaccaagatgccttgaaaaannnnntaacctaaggtgtgaatagaaagcttaactaatcatacaggccaatcaaaaatatacaaagtaattcacaggatgaattattcgaagtatgtttaagtttgcttaaatcatattataactctttacgcgaagtagaactgataaaatgctcgcgaatcgaaagcatggcagacgataacttctcgcgtgcatagtaaattattaactacttaggcagtatcaaaaggaaaacaagatcagtggaaatgtttacttaaagtattttaaattttatcaaagtataattgtttaagttgtgactaaaaacacaaacaagcaaatatattcagttcaaatttaaagatgtgaggcgataaataaaagataaaataaaaagcaaagttggccatccaacaatgcaaatttgtctttacaaagaagtgccacaaggggaaaaccattgtctatggccacttttctaaataaaaaaaaaggatagttaaaaaccaagcttacatagtaggagacttggatggatcttcttcttctccctctgcctcggcctcctcttctgctttcttagcctactcgcagtaggcaaggacttcctccttgccttctcccaagaaattcatatccatttttggatttgccatccaagctcgatagatggaacgcatggcaatagcattgcatcgctccttggtgtttgcctcggcaccctcgagcttcacggtggctgcattgagttcttcttgaagttttggacacagctcggacttgtccttggcctcattctaagctgcctcaagttcagctttttgagctctcttcatctccttggcctctttatttagaagagagatctctaagtgagtctcgttccattatttagcaatgcctttgtgtttcccaattgtcctttgaagctcgctctccagttgtttcaccctgtcgagaccccagcgttgggcgacaaaagagaggaaggtttgctgaaaataaatgaatgaaaatgcataagtatttttacggctcttgaaataaaaggcaaaacgagaaagagaaggaaactaactgagagactgaaggcgagactcctctcaagcatctcgttcaggttgccattgttgaccaagtcccaatcgcttggcagaaaggatcggaggtgatgctagtaggcaccagcatactgcgcggagtgttccgaccaaattctcccagcttcgatgggcaaagccttggcgcctgactcgaagaagttgtggcctgacttgtctttggaacacgctcctcggtaagtgtgagggccggaggatgagtctggacttggttctcaaaagcctcgagatttatggtctgcgaggcacgcttcttgttagtcgtcatcttcctagacctttttaggggctccacgttgacgtcggaagaggtttccgaggtagttatcctcttcttcccctttttggtcgaagtgtggagaaggtccgctagatccatatctgcgagataaagaactgtgttaacaattgtttaaaaacagataaaggcgaaaatgaaaaatgattttccacttaaggaaatttaccataatcataagatgacaaagaaaaaggactatagtattcactaaattccatagatcttgtgatcttaaatatgtcgtaagggtttagtggctctaaatcccaacttgaatctatatcatctgatctatccaacatagtctcatagtgctcggccatcacgtagtatgaactagtacagctaatcgaaacgtggaattcagggtcctaactatcgaacctatgcgttatgcgatctatgagaaagggattccaagtgtaaaaattgtattgactatctcggaaagacactaatgttttatgctcagccttaagcactgtgggtgaccatccacattgattacctcgggatgcttcttcttcatcttcctaagggactgtattttggagataaagcaatcgagctacgtattcttgagttttctcgtcagctaggactggaacctgctgccacgacgtatacttgggatacctataatcacaagtatagtcattttcagtgagtaggccaacagatctcagattggccttgttcaagagaaaatttgtagatcgaaggccaaaaggatgacctaacaggagcctgcgtcgctcagccatctcgggagtaggagttggccttttgagaccgctgtcaaaaggataaaattacaagtcaacgaggccaaaattaaaaacatggaataatttaaaaccaagtttggagcggatagctacttacgtattatgtgagaggcggttgtaattattggagagaggcatgtcgtccagaagaagtcttctttgaaaagggtcttgttcgataacccaacaataatcttgcaatcacctgtgtgagtcccaagatactaaaagcctcctgtagcatttttcctcacacggactgccttgaccgagtaaaggtagactatttcaagaggagtggggcactcccatcctaaaattttatacggaacccttaagcttgtaaggattctgtaggaaatgggaaccaactggaatggagctattccgagatggttgatgaactccttaaaataatctcgcagggggagaattgctccagccctgatatgctcgaggctccaagcacctatccctgccgaggcactagtactcgctccgccattggtgtcaccactggtcccctcgcgtgcctcgcgagtaagtcattctggtgggtaggagctaaactcaccaggggctacagatctaacacaatatttccatttctggtcaatgccacaagtccttaagataccacctacatagtctccaatggctcttatccttgactcattaagtttggcctcgaatgtgacattgggatcttgcggactctttgagttacaaggcttggaagtctttatttcaaagtccaggtcacctggtgaaaaagcaattgtgactttgggtaaaaataagggcttagccaaaggaatagatgataaatttgggggttcaggccaggtagcatctcgtaagaaacaacatttaccctccgttatttattgtaggaaacgactataatgactagcaatatcatcttggtgggtttcaattaagttgtccctaatttttgcatcatttatctctaatttggactggggttttgaagctctgggtttgtacgggatggcaagttcactaggatactctgtttctatggattctgaagaataaacttctgaaccagattgggacatttttacaaaaaaaaaatagagcaatcccaattcctggatgaaatttatcaaaccagaagcttaaagatatgagaaaactaaaaatttgtactatgcctaaaccctaaaaattacccaaaaaaatttaaaccaaaatcactaaaaccaaatggaatggtaaaaatgcagactatcaaaatagtgatcgaaacccagaaatgtaaaaagaaggaacaaagaaggatgggtcacttaccgtttgaagtcgagttgttgtgcgatgaatagttctgcaactggagatggagtgaacagcgtgatgatctttttgaattcttgaggttgaatagtaaatctgaatatacgtgcaagaagaatgtaagtgacagtgagggcatccaaagcttcgtaaaattaggatggagtttttcgtagaaaggctcaagaaattttgaaatggtgaaaaattatgaaaaggtggttctttttccagttttataccattgggtttgatctctgtcagattaaaaaaaaaggatccaacggataaaaatgagagagaagtggaaaagatggttaattaatgctcatgatgtgcctcgaaaccacaaaaccgccaaaatcaaaggcatgcattttttcaaaatagattatgacaaatataccctcaataattatttaaaaagcacttttcattgaaaagaacattttaaggggaaattgttatacccgaaatttggctgtactttataaggagacacgtgtcaatctcatggaatatgaatcaacaaatatattgataattatatcattaaatacaaaatagaattacttattaaatgcaaaattaatagagtatatttacaacttgctgactcgacggtcttaagcgaaatcagaatgtacaaactattgattcacgtattgacgagaaaccatttcggatcagaaggcataatcccgatcccgatggagacatagacaacgcataacgaggcatctacctcgctgtatgtgaagaagtattgatgaggtgaaatggttattagaacacttagcgtataatacgcattataataactaagtataataatttgaaggacatgattgtccagtctgcaaggccttatagtcaaagagcagttcttaagtttgctcagtacactgatgcacatgacattgctggaaggcttatcagtcaaccaagttgttcatgtactaggcgagatgcctcagccagatacattttgcagcgtgtcctaatccacgtcatcgttgacctccttaaaaatagtttaaatcacaattgtgtgatttccaaatattaactgcatttatttacgtggatcgtaattaaagcccaaaatttcgggaaatattgttatgagatttgaatttaaatgtaattaactcccaacctatgttggtataaataggggcaaattatacagaaaagggggacgaaaagtcttagagaaaaaaaaaggagtataatgattgtaaaaacctagttaatgtatcagaaatatctgaataagatagactcgtggactatgcatagttaactgcaaaactacgtaaaaacctagtgttatttttatttcaattagttttctcaaatttcttataatttttatgtcaaatatatttcaaaaataggctcataatcgttaacaaaaatatgcgttaacaggtagatacatagaagatggacaagcacctgatccatttgtgaagtttcttgaagaaaatgggattgttgcccattacaccatgcccgntacacccgagcaaaatggtattgctgaaaggagaaattaaacattaattgacattgcggagtattcttagtagcaactctaaccttcctaaatcgttctggattgaagctttaaagacatctgtgtacatattaaatcgagttccaacaaaggtagtctcaaaaactcctttt

SEQ ID NO: 31314 - DNA, 2786 bp, Cannabis sativa
ccgtttaaatcgatttttatttttattttttttatttcattcaaaaaaaatatatgtgaaaaaaaatatatatatattttttttttgaaatctgtttatttatttaaaagagaaaactacaccagtttaggcaagtctgctgttaaagaagcagacgcacaaaagggaaaacaaccctcccacaacttattacagtttgaaaccaaagcttctttggccaaagagtgagcagaccggttgcaatctctgctaatatgctgcacggcaaggcagtgaacaaattccggggtctctcttatatcgtctaataatgcactccagtccgttgtggcttgggaaatcctattcaggtagttcacaacacgaaggcaatcggtttggatgatgtaaggataggcagccattttgatagctaattggatgcccattcttagcgctagtacctcagccacttccaccgaataggtcccttgttgcagttggatttcggcagccaccacttcacccaggtggttacgaattagtgcacccagcccaccattaataccattctttggcacgctagtatcattgttgaggcagtaaacacctggtttaggcggctcccatctcttttctatatttggattcacctctaaggttgtttccttcgaatggtaatggttcaataactcctcagcttccaattgagcccaattagcccacaactcattgggcagtagtttgagattgaggcgttttttattcctcctattccatatcaaccaagtaaatatgatgaaaagaataaagttggggtaagttacctgttgatatgtttggagaagcatatctaatggtgttcctttgcaacgtttaatcactttccaaacttggagttctttccaaaaccattttattgaagggcagaaccataggctatgctcaattgtttcgtcttcagccccacaccaacaacattttgaatctattttcataccccgatatcttagtaccgtcttcacaggtatccatccattacataccctccaaatgaagtttctaactttgggagggacctccaacttccatatcttgttccaccaattccttgtgtgtttatctgtagatgcttcagcttctagttcatttgtggcagccactctatacccactttttactgtgtaaattccatttggtgtgaagtgccacacatgatcatcgttggcattattaaaacaaggagccaatcccagaataatggggatatcatccatatggaagctttgttcaattaactccttcttccaattaccttgctcatcttttatttgatcgagtgttgttccttggctgaactttgctgggattcggagggagaaagtggtcgggcgaggaagccatttatcttcattaatccgaacctctctacccgattgaaccctccatctaatgcctttgtcaataatttgtcttccccaaagaatacttctccacataaatgatccatatcctcctacttttgcttctaagaagttggagttggtgtagtagcatgccttgagaacccgagccagtaaagagtggggattattaattattttccatccttgttttgctagtaaggattggttgaatttctccaagtttttgaatcccattcctcctttgtccttgggtttgcaaagtttgtcccacttcccccaatgaattttgttctttgagtccgaagatccccaccaaaatctcgccatcattccatgaatgtcctttattagctccttagggaggcgaaagcaactcatcacataagtggggattgcttgaattacggctttcaataatacttccctacccgcttgagaaaataggcttgctttccaaccttgtagtttgtctcggatcttagaacggatactttcaaagacctcctttttcctttttcctatcgaagccggaagcccaaggtattttgtgtggcattcaactaattttactccgatttcagctgcgagaatggcgccttgttcttgcttgatcttgctgcctacacatagagaagatttggcaaagttgatttgttgtcctgaaagccatgaatattcctctaaaactgccttcatacttttgccttcctcaaccgttgcatctaagaaaacaaagctgtcatcggcgaaaaataggtgtgataatttgagtccctctttaccaaactttattccaatataatttatacttttaacgattgaatttgaattataatacatattaaattatctaaaatttaaaatcagcaccaattagattgaattaacacccccaaataccaagcatataatttcatttcatcctcctcctattttttttttgtttgtttgttagagtgatttttgtgtacacatgtatacataacaatttctaggagaaattgtgattttctttagttttataattgatatttaatgataatttttaattttttttataacgataacttttaagtgaattaatgactttggaaatattcatatataaccaaccgaataaaattaaaaataaattatcaattaactaattctttctcaaccggaaactgtaatggatatgatagcttttaattaatattagcaatgatcaaataaaacttaaatttggtatataatttttttcttttttgaaaaggttgctggcctacttacctatgttgctttataagactggaattattgaaaaccacaagcccggtatggaaattgaactttccaactaagctagatttcttcggaaaaaataataataataataat

SEQ ID NO: 31315 - DNA, 3885 bp, Cannabis sativa
tcaagtttcagttttgggtcccaggtctgggtttgggtccatgtcctggtccagcttcgggtccttctctgagtcccaaatcaagacaccgactaagggtcttgtccatgccctggttcccggaccccaggacaagatctgaatcccaattacaggtcacagtctggtttcggttcatgtcccaggtctagatctgggtctcagtctaggtccgagaccgagacttgcatgcaattcttggtctcgatcccaattctaggtcccgagtcctgttccatgttcgggtctaagtttatgtcttagttctggtcccgcatcccgattcgggcttggattcgggtttgggacccaatcccagggtgggtttgtgtctgagtgtgggtcctggtccggttacagtttaaggtatgggtccaggtcctggtcctattcctaagtcctgatccgcttctggttttggttctagtttcaagtcacaggtatgggctcaggtcgagtttgggttcgagtctgggttcgcgtcctgatttttgtctagggtgaggttgaggtctgggtttcggtctcggttagggttcgcggttgggtctggtgctgggtttatgtccgagtccaggttccggtcctattccaagatcccagtctggctccagttcaagttttgattttggttcccgagtgtgggtctcaatttggggtcagtcatggatctcgatccaagttctgaggccacagttttggtcctagtttgtgggcccaattcccgggtatgggtccctaatctatgttcaagttcaaggtcctagtcccaatctgagtccaagtcccaatttgggttacggttccagtttgggtcccaatcctagtgcgagtctgaggttcaggtccctggtctaagtctggttcttaggtcctaggtccgaccccagtttttggtttgggtctaggtctaggttccggttccggtcccggtctcagtcttggtttatgttctaagtcacaggtcccggtctaggtccaagtcccggtatgggttttggtctgagtttgggattaggtttgggtcctgttactgtcccaggtctgggttctagtccaggctttgttcgattccgatttcgggtccgggatcgggtctggatcccagtttgggtctgggtctaggtcagggtatggatccgggtatgggttatggattcaaacactgactacgggttaggtcgaagccacaggttaagattcggatctcagtcttgttccaattcggccctaggtctagcgtcggctcctaagtttgggtttcggtccgtgtttggggttgtgtccccgtagtcaggtcctgggttccaggtccagggtcgggtcctgtgtctcgagtctagggtcgagttttgggtcttagtccctgttccaaggcccggttttgggtccaatctcctatctatgtctgaatccttggtccaagtttgtgtctaggttcggttttggggcccaggtcccccatctaggtctggatcataggtctcggtgtaggtccaagtgcaagtttgggtttggatcccgagtttgggtctgagtctaggtcctagtacgagttcagttttgagtttgggtatgggtcggggtctcgatccgggtgccagtcaaggtctaggtctcgaaccaggttctggtctttggatccgggttcaggtcatgagtctgggtctaggttcgggtctagattcaggtttgggtctgggtcctaggtttcgatctcggtatgggtatgggtctaggcccatgtccacgttagggttttgggtctatagttttgggtttagtgtttagggatttaatgtttagggtttagggcttagggtttaggagtaagtgtacagagtttaggatttagggtttagggtttaagggtctacttctagttccagttcacattttgggtcatagggtaagatttaaggttcgggtgtgggtctaggtccgagtcctggtctaggtctaggttcgtgttttggtttaggtccgagtcttcgtcccaaatccagacaccaaccacatgtcgagtctagtttgagaactggtccgggtctgggtcggtgtccaagtctaattcccagatttagacattgactgtgggtcgggtccgagcctcgggtcttgggtcttgggtctcgggtctaaatcaagatcttagtctagttctagctcatgtcttgtgtcctggttcgggtctcaagtcaaggtttgggtctaggtttgggtcttgggtcctcagtcattgttccatgtccacgattcaagtcagggtcctaggtcccgatctaggttaggttcccactccaagtgcaggtcccggtccatgttccgtactattccttgtctcgggtcttgaccttgtcggggtataggtcacggttcggttctcaggtcctggtcccgatcctggtcgcgggtcccagtccgagtacttgtcccagtttcggttcaggtctcggtgcgagtttgggtctgggacccagtcctgatctcgatccaggtctgagtcatgggttcgagtctgagttatgttacaagttcgggtctaggtctgggtttgggtttgggtcttggtctaggtttcagtctttgtttggctctgggtcttgttcttgttcttggtctgggtctgggttctggtacgggtctaggttctggtcaatgtcctaagtcacgggtcctaggtcgcaggtcctagcgcaagtctgggttcaagttcaggtctgggtcttggaaatggttccaggttcgggtcttggtacgattccaagatctagacaccgactacgagtttcgttgaagcgttgagtgttgggtcaagatccgagtcctgggtccctgcccatgtctgtgtctgggtctgggaccaagaccggggtctaatcttggatcccagtcccagtcctgggtcctgatttagagtttgggcccccaatctaggtcttggtactgggtccaggtctgagtatccaatctcggtccgggtcctgggtccgggtatgggttcaactctgcgtctgggttcgggtttgtgtcctgagtcctgatttgagtttttattcgagtcagtgtcccggtcagggtttgggtctgggtcttattcaaattctagttcccagactcaaacctagactcagacttggacctaggtctggggtacgggtctgggtttgggtttggttctaggtccgagtttgggtctgggtttcagtccgggtatgggtcccagagccaaacactgactatgagttaggtccaagccccgggtcccagtctagtttcacttcgggtctaaggtcccagtccgagtccaaggttagggttagggtccgggtccgggattgggtcttgggtctcggtcccagttctgatgcccgtttcctgagtctaggtccctcatttgggtccaggtcctaggtcccagtccgagtctaagaaccggtaggggttcaactcctggtctgagtctgggttcaggttccgatctcggtttgggtcctgatttaggttcaagtcttggtccaggttcgggtttgagtctcgagttcttatctgggtctaggttccgaagcgtaggtccaggtccgggtaataggtctcagtctggatccatgttcgggtttgggtcctcgtcccattttcgatttcattcagtgtttgggttcaggtttgggtctgggtctcggtcggggtctgagtcctggtttgagtctgggtccgggtctgggttcaagctaggatcccggtctggatcttggttcaggtccaggtccgagttcgggccccgggtgttggtctaggtctaggtctgggtcagggtctcactccggatctaggtcccaagtttcg

SEQ ID NO: 31316 - DNA, 1394 bp, Cannabis sativa
atatatatatatgtgtttatatatgaatattatttgcagaacaaaaagcctctatggccggtgttcacagggagaagagacggaagagtgtcactggccacagaagcatcaagggacttgccttccgcatcatcaaacttcaacactctttctacccactttgccagatttaatcttgatgaaactgatctcgttgccttatctggtacatatatatatatttatacatacattcacacacgtacatagatatatataatattattttctcaatcttttttaatatccatgatattttataggtgcacacactcttggagtaacacattgtccattaatgtccggaggctgtacaacttcaccggaaaaggagacacagaccctgctttgaaccaggactacgcgacagagctgatggctaaatgccccgccaccggcaaacccctaggacgaactgtggagatggaccctaagagctctctgagctttgatagccattactacgttggtcttactgaatataaaggagccttctcatctgacgccgcacttctcactaaccgacgcgccgcccgccttgtgagaagctttcgtgactttaacactttcaagatcgcatttggtcgttccatggttcatatgggtgccattggagttcttactggtgatgaaggagagatcagaaccaattgccgagtcattaattaataattacctaataagtactaagtttaatttactctccttattaatatctttttatcatatcttattattgtatgctcaataaaacctagtaccttgtgcttcaaccaattaattgtattaattattatatcgctggtcatcagtattacaaactattaattataataaaatcatacactattctatttgattaagtgtagtaattaattacatatatatatatatatatatttcatatcgtgcgcttgctagttctactttctaaatgatatgtaccacatcactatttgattgtgtagtttttcttttaggaaaatactatgttttcataaattaataatcatgagataagtcatttataataatagagtccataggaatattctctaaggtccaaaagcaaacttcattcaaccctaaaatataactagccatgctatcagcagccatattagcagtaagcttgacatgagtaatagcacattagggagagaggaaataagacaagatatatcaacaattaaatttttattaaaagacaactcgttctctctagagtgttttgttctgtgctctctttatgagtattgctttttgtcattttggtctctttctagaacactatttttgtgttttactctttttgatactttattttggcccttttgtattctttgtttggcatc

SEQ ID NO: 31317 - DNA, 1228 bp, Cannabis sativa
  modified_base (1021)..(1021): a, c, t, g, unknown or other
ccaacctctttgtatcactgtccaggagatctcttccacggaccttgtcactcaagtggttcctaaggtcgttaccacatggcctcaccttctcacttttggctttttcatattttgcgtctaaacgccttttgaggtccacggtggactaactatcatcaaaatactatccttctaccctactgtcctggtttaacaaatcactagagcgatctctctttccttttggttttggtattttcgtaccagctcccttaggcgttacagggcctttctaggcagaaggacgtccaagcctggaggcattggccgtcttttgcacttaagaaagcttgttgggttgattcgtatatttccaaggaggttcaggggtacaagagttcttagggtcacccacttttgccttccccttatcctgtacacgagcaaaggttctagcattagcggggttttccttggtatttccttcgatgtactctagcgaagggtcatcatcaaaatcttggtaatctagatctccaaacttttctcgaaggcgagccatcattttttccatcttatgagtaaacttctcttgacgggctaactcttatttggtttcaagtaactcattgaacacttggaccacctcggggtcgtgatcatagtgttagttgtctttgtaatatccatccttgacgtaattatcttcgttttcttcctcttcatggttcttagtatcactatcgtcaccaacatggtcatgctagttgtttaggtcctttacttgatcattcacgttagacgtacctccatatctcgcatcggtcggctgggtgttctatgaaaagagggaaattacatcctccatgacagtctcgatgccaccttgaagggtctttttgagaactgtctttcgtgtgaacaccatggcagtaacagtgatctacgtctttcttcagctctcaataaaatcaccaaaatatttacgaagatatttagaaactagatatttaggagctaaagaaataataatttgcanaaattaagagaggaagattttttacgtggttcaggtattaataaaatttagtcacgagttagtctatttgtctctaagggcgatattgatgtgtttacactatttaacaggaaactctaactctttacccttaatttcttttcgaagaagaagaagatcaagggtaatctcaacaaaagtttagctatgtgtttttttggcttgacc

SEQ ID NO: 31318 - DNA, 2434 bp, Cannabis sativa
gaagttgcgcctgtaggaagaagaataagaaagaaatttttcttagtcctagaaaacaataggtcctcctgtgagaagagagtaggagaagagttttaaaatttttaattattttagaaaaattatggctatcgtaagtgatgttagagttagaagggaaattattttgtattaggttttcaatttaaggattctctcttcttttactgggctcattaaggttattggaccagtctttgcttttactattttttattgtagatgcataatacaaagtaaaattcaaaattactagaaaatgtattttatactaatttttatatatttttatcttttatgaattgaattttattatattgaaatacatttatattgaagtctatatgcattaatggtattaatgataagtttaaaacaatatattaaagatacgcattaatgaatatattattttaaatgcattattgttattattatttcacatatatatgatttatcttataaatttgatttatattagggtttacaaattaaagtatccctttcgctcatcttgtttattgggttgaaccattgattggttcaatttgtgagtttttagttttagtgacaatcctcttcaagtgaagagagtaagtcttcctttggttgttgcattttggtgttgggctttgggcttctcaaaaatatttcatgattgttagattttaataatatcattttttattgtagttgcaaaatagaaagtaaaattaaaaaataccacaatgtgcaatttgtagtaatttgtctataactttaacctttaattcatacacttatttgtcttgtccttcaattttactatatactatattagaatatacttatatggaagtgttatatgctgaaattttattatttatttattattttttacaacaatgacaaatacagatacaaattacaagcatacatggctaatgatgaggattggtttccatttacggataatgctgaaattataatatcttagcttaatgcttatttagttggagaaaatgataagtgtttaggtgaaaattgtcccgtatgcttaaaagaatttgaaataggaacaaatggtgcaaaaatgctcacatgtatgcatttattttcatgtagattgtattgctaattggcttcgtaggaatccaagttgtcctgtttgtaggtctcagttatattatttaatttggttgtaacttgtaacaattaatattacttatttagatgaaagttattttgttaaatttggttgtaacttgtaacaattaatattagttatttagatcaaagttattccatttaatttagttgtaacttgtaataattaattcaagtatttagaaacatatcatcttatatactattatcatttaaatatgtaagaaataaaggttataattttgtgcagaataaataaaaaatttcagtgaaaaacaaatatttattctcgtaaataaaaatagtaatttcaaaatatattaagaaaaggtaatatttgaccattattattacttaaatttttttaaagataataactaaattttatttaatagtgtttatatttttaaatgaggaaaagaaaatgaaaaaaaaaaagaaaaatttataaagatctttcacaagaaatgaaagaaacaatttgttgaagaaaaagagaaatatatgttcaaaaaaaattgcaacaaataatgtagtttctatggatgaatcatcatcaagcatccaaaatcaatttcatgaggctaataataatacaatgagaacgaagaaagttactaatgtcatgagtaatatttgtgaaacgtctacacaactatcaataatgaatggaggtaattaatttttatttacatacaaagtatttaagtttatatactaagtttttatttgttagtaacgttttcttttttattgttaattatttagatttagaagataagagtatagaaaagcaaaaaagaaaattgtacaaagatttaccaaagaaaaaaatagataataagtatttaatttataatattctttttttgtgtgtgtatgtgtgtataaacagatccaaacaccaaatcatatcccaactcaaaaattagaaaatttctcaataatgtcccatatgaagcttctactgtaaaattaatgccaatatgtgacattgcaaacaagaaagataccctcatgaaacatctgaattttgttgtgctaatggaaagattcgcttagctaaaaccaatattcctgaaaagcttcgtgatttgttaacaagtaacacatatgaatctacccaatttagaacatatattcgtgcttacaacaataatttgcatttacatcatttggagtaaaagttgataaaatctttgtcgaaggaataaaggaatctacacactttcagaagtcaaggacaaat

SEQ ID NO: 31319 - DNA, 2460 bp, Cannabis sativa
ggagaataccaagcaaagggaccaaggatgggggcatacttggccaaggttaggagttatctggaacaactgcaacatttcacgattgagcaaatcccaagggaaagcaatgacaatgtcgatgcccttgctaagctagcatccactcgagaaattgatgttctagaatccgtaccagtggaattcttagcctaaccaactatcgagtgtgacctggttttgcaagtggaagatgaagcaccctcctggatgacactatacattgagtacatccaagaggggaggttgcccgcggataataaagaggctcaaagaatccagtataaagccgctaggtatgtcttgatggatggagttctttataagagaggatactccacgccactcctgtgctgcataaaagaaagtgaagcgcatcgagtgttagagaatgcggtaaccacgcaagaggatattcaatgtcaaggaaggtattaaaacaaggatactactggcctagcttggagatagatgtgacggtgcttgcaaaaaaatgtgataaatgccaatggcatgctagctacaacaagcgtcccccggttgaactcacaagcatgaccagcccgtggccttttgccatgtggggaattgacttgattggggccttgccaacaagaaaggctaggataaagtacgcagtagtggcaatagactactacaccaagtcggtagaggctaaggcactagttagcatcaccgctaagcaagtggtgtccttcatcaacaaatccccgatatgtagatttaaagtgccttacaggatcatcactgacaatgggacccaatttgaaggagacttattgagttcttactgcgcagagaggggtattgagaggggattctcagcggtagtgcacccacaagctaacgggcaagttgaggtagcgaacaagataatcaagaaaaacctcaaaatgaagttggataaacttaaaggttgattggtagatgaactatcaaatgtgctctgggtgtatagcatcatgccccgctccaccacaggtgagacgcccttctccttggcatacagatgcaaggctatgcttcccatcgagatgaagctcaacttgtttcgtgtgatgaatttcaatgaggagtccaacaaaaaagccatagtagaaaacttggacctttaggaagaaaggagggacgtaacccaaatgaggttggcagtgtatcaacaaagggcagtgcggtactataatttgagagtctggatgcatgccttcaagaccggagacttggtactgagaaaggtccttctaaatactagggatccaaaagcaagagttttgggagccaattggaaaggcccttatcggatcgctaaagtcatcccacctgggacctacaagtttgcccgcatcgatgacacggtggtaccaagggcgtggaaagcagcacacttgaagaaatatcattgttgagaaggcaagtctagtttattattgtttagccctttaggccaaaaatctaaggagataacctgttggggcactagagtgagattcctctcatctcttcttatccatcttgatattctaatgtaatgaaataaaaggccacccgaatggcatcaatattgttctctggaatataagaatattaccttggagttagtcaaccacactttgctgcagaacggcaaggcaatgtccgctctcttaaaataatgaatgacgacaacggcaaatgaggaagtaaggtacaaaaatttcttagctggcaaggattagctacccttgcttcacaaaagaaatatgcctctccttgtaaaaatcgtcgagcctaaagggctctggaaagatgctcgtggcataatgctgaaatgagagagacacctctcaaatataagcagatattcataaattaaggggggacacagtcaagtacaataagtcccctcccatccgagtaaaagaatgaagaaataataagaggttgaggatgctcaaagagccatactcccttaaatggatgctcgcctaccacagtaaaaaaatggcttggctagagagtgaccccagagtcgctcggccaacgccgcttacgaagatggggtagccagagagtgactctagagtcgctcgaccaatgccggttacaaagatggcttggccagagagtgaccctagagttgcttggccaatgtcagttacgaaaagggcttggccaaagagtggtctccagattcgctcgaccaatgtcagttacgaagatggcttggccagagagtgagcctagagttgctcggccaatgtcagttatgaaaagggcctggccaaagagtggtctccagattcgctcatccaacgccaattacgaaacttattggaccaaatatccatcctcggagtcgttcagttaatgccaagtaaaattgttgcttgtcatattagcacgaagtaaagtttaaccaag

SEQ ID NO: 31320 - DNA, 1702 bp, Cannabis sativa
aagggagggaactgctctgataccatgttgaagttgcgagccattgatgaacacaaaaccagaaatagagagaggaaagagagaagacgaagaagaaggaaagagaagaaaagattgaagaaagattcttattgattgaaatgaagtgttacagcttatataacaacactgagctaagatacaataacaaaattctacaactaactcataatagaattaagcacgtgtttaacaacaccaacagctccaacaaacactaacggttctaactgtcttcaacagaagggatttcttctaactacttacaatcattatccaacactaaagcctgtttagccaagccatgagctgcttggttagcatcccgtctaatatgagatacacaagctgaagagagataagataattgatgtgaaatatctgtcaccaggtcttgaaaacaagaatggttagatgtagagccatttagagagttggcgagaatcaaggaatccatttctacaaaatcaagttggaagcgaagatgtttatcctaacaaagaccataaaacatgacttttgcatcaatttcttgtggtttgaaattgcctattactggtttagcaaggtctgcctgaatgtgtccatgagaatcccttataatagcaccgacaattaattttattcctcgaagaatcaatagcggcatcgacatttaattttaatttgttctctggaggaggtaaccaatgatgatgtgcaataggacaattactgctcattgcagcaggtattgcagcaatattatactgctggaaattgtgaatgtatgctacaactttagaagcaacctgcaacagagtctgaagcattttttcatgcacaaaattatttctattagaccaaatatgccacctaatacacaatatcttctccatttcagcagtagaatagattgtaaaaaggtgaattagataatctccatctcacatttgatttaccaagctatagtcaatcgaaaacccagcttctttccaaaaaaccctacaatagcattatgtttgtcaatagcatttagaacccaataccaattatagatattaaagatacatatgattatgtttgtgtagggatattaaaaataataaacaatacaaattcaaggaataatataaacttatctctatccaatttttctgtttacagttaaacgttattttatctataagctaaataaaatcaatattaaaactaaataaatctaaactaataataaaaaaaaaggaaattttcaaaaatactatttttttttacaattttacagtttaaagtttttatttacaaaaatacacttataaaattttaaaattataaaaatacactttacttaacaaaaataagaaacaactaaaaaacaacgagaaatcaaccttatgataactataaatctataaataaactataaaacaaccaaaaataattataaaataaataaattataaaacaacaaaaaaattattattttattgaagatgtatttttataaataaaatttttacagcctaaatataaaaaaaaatttgtattaatatatttttgtaatttttagtttatgtaaatttttcaaaaaaataaaaatccattacctaatgacatgaccaaattggtcaaagtgacaactgtttgtatcttgtttatagtggttttgacaagatcattctct

SEQ ID NO: 31321 - DNA, 979 bp, Cannabis sativa
attaagtttcaataatacaataatgagtaggcttttttgaattggacattcacatattgaacctaaataaatataaaaaattaatatttttataatgtgcaatgccatttgaaccgcatactaacaattcaaaactgcagtgtattgcgcagtttaagaaaaattcaaaccgcaccgcaaaacatttcttttgtaatgcggtgcagtacaagcggtttgatgaacacttccaataattttacatgtctcaagctcaaatctccctcccaatatcaaagattgtctattattttttttatttatttatctttttttttcaatcatattcaatttataagctactaaaaataaaaatggaaaatttaagaacacattagatggtctgacaattctgtgggcatataatcattatgacaaaaagttagtaattggcaagagaatctgattacgttttcagcctaaagattccagtctatacaaaagaaaatcaagtaggctttctcgcactatcaaagtattgatagtacaaattacaaaaagggtaatatgctacgttatacgcacacaactaaaaacacttgcacagctttgatcaaagtaccagaacatcatggaagaaactctcaagttcattcagattaatcatcatgaatactcgcatatatgtttctcagaatcattattatatattgctttaccaggagaagaaccccatcaatgccaagaagagggggttttcctagagaggaaaaaaatgcaatcaatgggcaatggcagccgaaaaaagaaatgtttccctggtttaaagaattgtacacgaacatgaattaatcttttgcatgtcctcctgatttttatctgcacaaaatccaactaaagatatataaggaaagaactgaaaatgaattttggaagacagtatgtggccagtagtgacgagaaaagcaaatgtaagggcatcatgaatgaacacacactc

SEQ ID NO: 31322 - DNA, 1949 bp, Cannabis sativa
gaacaactttgtaccaccctctactaaaaatccattggaatctctcgccacaaacccaacaccaaaggtagagttatcactaaacacagctgcatcgacattaaccttaatactattgccgcttggaacacactattggccccatcccccggaatgaaaccagtgaatagcagctcattgtttgaattttgagcaacacgccattgattaaggtagtttgatgcagatgccacaatgcttttgacccccatcactttgttttgccaaactttatcattcctagcattccaaattgcccaacacaaggccaccagtaagcttgagttatctgaatcaagcaaaacaaattggtgcatacaccagtccataaaaaagacgtcctgctgcattgccttatcaatacccacgcgatcccataccgctgctgcaactggacaagataagagagagtgctcaatggtttcaggagccacagtatagaccggacaaatatggtttacattcactctctttgattgaagctgagtcattgatggaagacatccttttgccgcgcgccacaccagattcttcattttcggaggggttttgagttgccacagcttcctccaaaacctgtcttcagctgaggtatccagcctgtactcaccattaagttgctgcaaaagtttatagacactcttaaccgagtacaagccagaaagatcaagtgaccaatttagagaatcatgagtaggcggagacaagacagggatagactgcaccaacaatctgtcacggggcagcagcaaatcctaaaggatctcctcttcccagcctgatccatcaattttcatcaagttgcacactttagcattagtcatgctcggatgagtagagattatcataggattctcgacatccggaagccacggtttgccaagaatagatatacttttaccatccccaacaacccatctggtccccttttttaccaatgtttgagcctccaacatactcctccacacaaaactcggattcggaccaatagttgcagtttggaacgatccctaagggaaatatctagccttaaacacctttgacataagagaatcaggattaatcaaaagtcgccatccttgctttcccaagagagagagagattaaaatctcgaaggtttttgaatcccataccacccttatctttgtgcccacaaagacgcttccaagacatccaatgtatgcctgaggatgaatgattagacaatttccaccaatacctggccatcatactctccatgtctcgaacaatctcaagagaaagcaaaaaaacactcatagcataactcgggagggcttgtgccactgttttaataaggatctccttgcccgcccgagaaaggaattttgaaccccaagattgaaggcgttttcgcaacttttctttcaagaaacccaatgctgcagttttgttttgacccatagaacttggaagacccagatacatactcccctctgcagcaataggcatccccaatagctcctccagcctcgttttcatatcatctgtagtattggcactaaaaaagattgaagactttgtaaaattaactttctgacccctgacgcgccacaattcaaacttttgtagaacttctttgattcatagtgcttcctcataagtagctttacaatacaagtagctatcgtctgcaaagagcatatgtgaaatacgaggggccccattagcaactttacactcatgcaaccatccccgattctcatacttctgcagaagggccgaaaaaccttctgcacacaaaatgaataaatatggagacagtggatccccctgacgaatacctctggtcggaaaaataggacctatctcatgagccccatgaataaccttgtaactggcagaagtcacccacctaagaatcaattgcacccaataattagcaaatccc

SEQ ID NO: 31323 - DNA, 1365 bp, Cannabis sativa
  modified_base (816)..(820): a, c, t, g, unknown or other
cttaggcctccttcaggttgggtccttcttgatcgagtgatctgcatggatcgtgagttgggaggcctccgggagcccattggctcttttccgacacgatgatgggtggtctcttcaggatgagtatcaacattttctctgttatcagccatggagaaagggttttcttttgatcaagaggattttttctgagcgtttttcacaaaggctctcaatgaaaacaccaaacggttaacgtagattttcgttaactaaattaaagcctattttgtgatggtttgtacagaaataatagtagtaaaaggaaaagaaataacacaaagctttttttacgtggttttgaagttaaaattctgcatagtccatgagtctatcttattagatttttgatacaacactaggtctctttctctaaaggattttttgtccctttttcagtgtatcctgcccctatttatagttacaaaggagggaaattaattacaatctgattgatttcccacaacaataatcccctaaaattgtgggatttgattgtgtcccacgtaaattaaatgcggttattatttgaaaatcacacacctgtgatttatcggctattaccaggtcaatgctgacgtagatttaaacacgctccaaattgtatctcatagagttaccgcgctgggatagcaacaataaccctaacagcgagctgaatcgtttctcatgtcttttcgaggttgataatataaatactgtcgtttcggctattgaaggtataacacttcatctgacaatcgcaattcttggtgacaaggtgaacttcagcagtcnnnnncatttgaatgtcaggttctatctgcgagagctgactcgacggagtagtggatctcattgaaagatgtctgaagctgattagtaaaggtaccatgagtatgtcttcctatagcgagatggatgcctcgctatccgttgctaagattcatgaaactattatgcttagtttgtataatgaatattatacgctaagtactttgacaatcatgatgtctcttcatgcgtagtgaggttgatgcctcgctttgcattattgagtccgtccttatgatcgtgtcttcacataagaaataatttctcgtcaatatatgaggaaatagttcgtacatccgtgtctcgctcaagacttttcagtcaacgagttatagatatactctatcagctctgtattaatgagttattccattttgatatctctaatataattatcattgggaaatttcaaattccatgcttaaattacttaataatttttcccctaaatgcaaagttagtaaaattggtgatatatgacaacatttctaaatttcctaaactacccctctc

SEQ ID NO: 31324 - DNA, 1409 bp, Cannabis sativa
tactattcattaaagtgcatccatatattataagtaatgattaataaaaatcctacaaagcgtatggggctataacacccactaaaaaaatcttatagtgttcattggcatatataatctaatggtttacacctccctaattcgaatcccttcaaaaaaaaaatcatttaatttaataattgtacgttttatataacaagtataaatattttttataacaaatagagtaaaaatcctggatgtaatccgtctaaaactactacgtacaatgtaaaagtgtgtgtaatataactatacatctaccattatacgtgcatcaatttttggtaaaactcttttatatagagataatttctcaatatcataactgcatatatgtactacattataactactcaaaataataataaactctaaatatctcataagatatattataacagtgattatgaatttgatgaattaattaataaaaagtacgtaccatcctaactcagtcattgcgtaaggaagactcaaaacaccagcaccaaccatggcagttacattatgaaaagcagaataccaccatttagcattcctagacgatgttattggtaaccattcatcgattgatttctgcttattattattttcaacattattattattaactctttctctacttgaaacttcaactccttctcttcttgaatcagccatagtagatactacgtactcaataatattctcactctttttacttttctgattttccactctctcaaatctctcaatctcaggtcaaacttgaaagccctagctataaaatacaactactcaccactcacgttatatctcttgtatatatagttgctcttttaaattttaaattataaaatccatataatatgagaaatagattatatcattctatttttaaatttggtaatttatatatctttttcaatattcagatatttttaaatattttaatatcattcgattgctgccattataaagatatttattttagttgttttctaaatattcaaaaccaaatatcggtaggatatttacccaaattaattaaatctcaaaactaaaaatatatataataataactttttaaaataaattgaaaaaaaaaaaaaattgaaacacgtggttgctggttgtggactgagatggagagaaaggaaatcaaaaaagatttgtttgtttttttttttgattaatgaaattaaaaaagattttaataataataaattatttatccaattatcaaaattttatggtggcttataaaaaatgccaaataaaaaagataaaaaaaaataataaaatgttttccaaacaatgttgtatgcaacaactgttaaactttctacagattatgagctaacaaaacacattaaatgctaatcttt

SEQ ID NO: 31325 - DNA, 3054 bp, Cannabis sativa
ttattttaagagtgattattataagttgaatatgttataattttgtataagtataattattgctttaaaaataaatttaattaaaatattttttttatgtaaattcaaaatttaaaaaatatataattataactaaattttaaatagacataaaatagaaagtaaaaaaaaattaagtttggagttaggtttggagtttgttagttaaacatataattgataatattcaagattaattataaactaggtaatatatttgcgcttcgcgcggttttgtattagagttaatataattttggaccatacatcttgtaaaagaaaacataatgatattttgagtctgattttagaccaacatttttaatcttaattctaaaatttatttttaataattttagtaatataattctaatactaaaatatttcgatgaatatcacgctcataatatcattttgttttatggtgtgaaacataaagtgttaatgataattatcttttgtaataaggtaacattatatatatatttaatttatattaaaagtaattaatttcaaatataatagactatttttttcagtaatattatttgtaaacatgtataagaatttacaaatacgtaaaagttatttttcatgtcaaattactttatttttcatgatgtcaaattacttaaaaatttgtgtttatagatataataaaacttctataaaattaatatcaattttgctataaataattttagtctggacgattataaataaaaaataatatttaaattataatttgttattaaaatttaaataccatgttaagaaaatatataactttttagtaataattagaataattatatgtacacacaaaatatgcaccaacctactatatctaaccattttcacgctattaagtgtaatgccaattcagtgttaaactaatttatgtaaagttttattttccttgaatatgtttagtgttactgaacatgattatttttagatgtaaaatatatgataaattaaacttatataaaaaatatatactgcaaaaattaaatatacatataaaataattaaaatatatattgataattttttttaaaaaatatatattgaaagtaattataaaataaaaaagaaaattataaaattattaataattaagaaaaataatcaaatgcatagaaaaaaatactaattattggatatcttactgggcaagattgaggctgtaatgactgcttaactttaatatgagaagcagataattagggtctaatttcataagtggacttttaattattatttttatgattttgaagatatatttgaattctaggtggtttagagagttgaataacgatttaggattgaattgagatgcttgtgaggttttttaggggttcttacactaaatcggtcgaccggttcagtttggtcctgtagaaccggtctaccggttcccccaggcagaattcttagaactagtttttcggttaggatttattttaccggttggggcaatttcgaaaaccctagattttcatgttttagcgatattttgggtattgccacgttatccattgatagggaaactgttagttttggttctaagtccccaaaaagtgatttagcgtatcattcatcaattttaaaaatattgtgacttaggggcctataaatcatcgagcagcagttccactcaggttgatcgacacacttaaattcagaatcgaggaaagattagtataatgatatgcatatgtgattacatatttagtatacatatttatgattgcttgttagattacattgaaatagcagtatcaatatacatagagttatattgattactgatgaatgtatgtttggcataagtattgattgacgctaccacattggtacgactagaataccgagtataggctgatactatagtcaatagtactgtcgtacaaacgttctagactcagtacgcatgagacgcgggatagggttatgatttggtgtatgggcgcctaattgtaatctgtgtaatgtttatggtatgattatacttttcataccgagttcgtcgactcacaaataccgtttacatgtgtaggaaagggcaaagcgaaagctgaacagcagtgagtgcgagcagatgaagattgtacatgtcgagacggttaaacctggagcgtacaatctttggggtagcaggccgtattttgattagtcgctagatgataatttttgtatctataatattttgtaatacaattataaatattttaaatacaggatccggtatattcaaaggatatgtgttttcaataaaaggataattcagtaaagttttaattaattacaatttttaacaaacccattgattagcaatagattgcacaattaatataaaatcacaatgatacgtctaaactagtagggtgttacaattcggtatcaaagccaacaggttgtctttcgaagatcgtcacgttatgcacaatcatcatcagagataagctcgactcacggttcagtaagcctttattgctttagtaattgttttattagtatgttataaaaaaagcctgataggaagcatgttagtagcctgatagctgaataggtgcatgttttaatttcttaaataagcgataattagaaatttattcttgatcgcgatctgaccaggctagttcttgatttcgtaggttgttctattaaagtggatgctaggcggaacacgagaagctagggtaattcggtcagatccagtggcgttcagggagttcagtatctcctgaatattcatggctgaggtagaggctcaagaggtagggcacgcggtcgggactcggggagatgttaacccaccgcaagctgcccaggaatgggagaataggtttgtaacaatccaagccatgattagtgagcaagacgaagagatttggtgtctgaggcagcagggtgctcatacaatacctgcatctgaagtgcaggtggctcctgcccttgttgttctggcagggccggttgctgttgtgaatcagatggaaccactgtacg

SEQ ID NO: 31326 - DNA, 1666 bp, Cannabis sativa
aatttaattagaatcagttaaaactaaaattagcaatgatcaaagtaatatttaattttaaaaaatgacttgaaaataaagttaccttttgtctatcactcatcacacaccaaggaagaccattatatgtttctccaatttcacgtcaaagtagatgaatgaaccacttccatgaatctgtattttcagcctcaacaatggcatatgcaattggataaaaatgaaggtttgcatctaatcctatggcagaaagtaagatccccttataagggcctttcaaatgacaaccatccaatccaaaaaaaggtcgacatccaaccaaaaatccttgttttaccccattataacatataaatattctttgaaactgaggtctccaaattggcactcgagatttaggtggaacttcctcttctacctcctcagatggtttatttatgtccacaagctgactttgaataattgcagcactacctggattagtttgcatcaccataaatgcatatctcctaagttttccataggactgaacatgattaccctcaacttcccccctagcaattgctctagctctccagagccttttattattcacctcaattccccaagtatccttcaactcttctcgcatacctttgagactcatatctggatgtctactgattgggccaaccatcttctttgctatccaaccactattggttgccctatttgtccttacacattgacatgtgtgggtgttgttaaaggttttgatgatgaacaacctttcgttaggagacaacgacgcatgtatgcgccatggacaagcatctgccctacaaacaaatgtgacacgaattctttcttgttttactttttgcaattcaaaaccttcttgcactgcatagtctctcattacctgtgcaaattgtctatggtcactaaatcttagaaactgtctcaaaacaatttttccattgatatacacctcatcagtttctggatttggaatgttgctgttagggtcaagaaaattatctcttcttgaagtgtgtgggtttctatgacctgcttcatcactatcataatattctccaatgtcaaggtcaacatcactatctacataatcaccctcatcttcatttgtatcatcatcttcttcactgtaatgccttcctgttttccactctaaatcactatcatcggtaggtgatgatagtgtctcaccctcctctgtttcaccttgttccccaaaatgtaatttttttcttgtctcatagttgtgtctagcagctacacttggtcctgcaacatcttgaccaaaaccttctattcccttatcagcatattgaacttgcaatgcattcatctcagtggatttcaccatgttcaccctatttgcaaatacaaaaaataagtacatgcatttgaaaaaataatacacaaccagttaataaagagtcaagaacgcttaaaaatgtttttataacaattgacatcatttgtaaagaaaaatctagttttttttctttttaattttatgattcatgtttattttaaataaagagccaacaaaggttttaatataaaatacacatgctgaaaactaatttttactagctatagcaattagttagatatttcacaatatatatactagaatatatatactcaagtgttaaaa

SEQ ID NO: 31327 - DNA, 2218 bp, Cannabis sativa
  modified_base (1549)..(1552): a, c, t, g, unknown or other
ctaatctatttcaacataaaatttgaattttctataagtgaataaataagcgtaatttataaagtatggagatttatatagcatgtgtgaatataatatgagctgtacgtagaataaaaatatttttaggtttggcgatcatgaagactcgataagtggataaataagtgtaatttgtcaattacagagatttatttcaaatacgtagatataatatgaattatttgtgaaataatattatttttaagttcagcgaccttggagacccgattagaggccaaaatgtcacaacagtattagtaagaaatattgatagaattattgaggtaagttgattttaaaaatatggagatattttggggtactcaaaattgaccaaatagcttagaatttaaaatttcttagtggctaaaaaataataagataactattaataataaaattttattaatattactattaatattattatattattatcaatttaaaatatattatatatattaaaaacgtataagttatatatatatgttaagttataaacggaagaatagaagaattatgaaactctctcttgttttttcgttcaacgaaaccctaatcttttttgatccattttctttgattctcaacccgaaacctagcgatctaagctctagtagtagcggaatagcaaatctttaagaggaaaagcttaaggtatggtcgaatttcattttaagtttagaacaatttgttttatataagggtttcgtgaattcgaatagttatggagatgctgacttatagaattgttctttggtagctatggaactagtttcgatgtttacttgttgaatttggggtgattttgagttagaaatcgagtttagaaatttttaaagcttagtctcaacgttaatcgcatttttttatttaagggctcaattttaatttctgttaagcaaagatagtaatatttatggtatatatgtgccctgttgtgtttggagtgatttggataagttttggtagtgtttcggtgagtgagaaatttggtattttcatatttcaccatttttgaaaattcctaggacatcagaaattgtatttttttcataacttcttactcgggtgtccgttttggacgttctatatactgtttcgaagcttgcaatgagatctaaaatatggtatatactttagagctaaaatataagttttattttaatatatttttactacagtgtttggtagaaaaccttaagttgtcttttgcaactataaaatagtgttttggtataaacactgattggtttaccattggtgtgacatagggccgagttcatcggggaagtttctccatttggtttggccaacgtgcatgaatctagattcaaggtaagaaaattataatgtaccacatgacatgacaggttttgtaattattggctgtctgattagacagtaaaaatgcgaatgtgacatacgattttacctgattaggtgatatgatatatggattttagattatgaaatgggttggcctgattaggcaatatgatatatnnnnacacctgattaggtgatatggtgctaagttatgacataggtgtagctagcctaataaggcaatgcgatatacgaatgttaggttatgatatgagctttcctgattaggaaatgcaatatacgaatgtatatgattactgtcaggccgtggcataatcttgcttgagtaggtaatgtgatatatgtgtattggcatttaggttgtacctgtggggcaaccgttataaagtcatgactttgaatcgaaaccgctatttgccaggtcctaaaattatcaattatctgattaggcaatcataatgtgatgatactatggagatgatgtacgtgctcacctgattaggtgatgcgatattccttgcgatgtatcgtgcgtaggtacgggcctcagtgatagaatgaaactgttgtagcatttcttcctgtcgacgtatcgggtgtaggtacgggcatcagtgatagaatggaaccgtgtagggtttttccattgccagctatggcacaaaatgaaactattgtaaggtttcttcttggcaacgtatcgggtgtaggtacgggcgtcagtgacagaatggagccgtgtacggtttccccattgccaggatatggcatagattgaaaccattgttgggtttcttccttgcaacgtatcaggcgtaggtacggg

SEQ ID NO: 31328 - DNA, 2784 bp, Cannabis sativa
agggtgatatatggtgtcgataattttgtactgatctactaggctgatcatgagtaggtcatatctctcggcctcatctaccccgacatgccctaaatgttcccaattttctcttagactacgttggacatgtggcatattgagagtgtgcatcagagctatgtacttctcatgtgacttcaataaacaattccaacggtctattacattatccatctcctcatgtattttgttaattctatcaaagactttgttttcttctcgcatgggtggggtcttggggactctctttaaggctttaatatgcctaacaatgtgttttacttgctctggtcttatgatgttggtgcttagttgattctgttctgtaaataaaaaaaaaatgaaattactaaaatgcacataaaatacaatcatgcaaaaataatacttggtatcgagtggaacctttttagtcgatatgtgtaactcgtgagaatgttcaggaccaatataactgtggctctgataccaactgtaacgcctatacttttacataaatcactaatttatttataagctttaaaatgcagaaaaacctataatgtcgcttttatttataaacataaaatatttcatatttgaacttagtttggacttaaaaggcgtaataattaataaataaaaataaatacgacattaatttaataactcttaataaaataaatagagtgtgccctagaccaccctcatttatatggtcctcaacgagtaacacacaagcctccaaggtcttacttgccaccggctttctaagtttttcaaccttaatatgcacatggtaagtttgataagggtgagctactaaactcactaaggaaatgcttgtcacgtagtcacataaaataaaagagaacatataactaaaacttagatgcacatatttagacaaatagcaatacataaacttaatttgatcattagtaactaataactagtttctaagctaagtcacataataataattacgcccgagtccgattttggcaaagaaacctgaactattattagcacaagttagtgttaagttaatatttacttaacactaacttgtgctaataatagtaatgttacatcctaattctataagtccaacacctaatggactaaacctaaaagcccatagtaatctataaaagtctagcttattaaaatgacaaaaattttcataacttaaggaaatactatttaaggaccaaataacatattctaagcaagcaagtatttccacatcgagttaactaacgataataataaaatatatagtagaaaataataacaaaatatttatggttattacaatttccaatcagttttgcgaaaaagggttttcaggcatttttctatcattagagataacaaagatacaagcaaactcggggagaaaaccacaatcacaagggcatgaaaaatgagcctagcgcctacctggtgcaatagttttgatcattcaaatgtcaattttactccaagcattctctccgaaatagtcaaaaatggggtaggagacctcatcatcaagttctagaaccttggaattatcaagacgacatccccgaagctctgaaaatgagcacccaacgcctaggttgacaaatggcctggtgctttggattcttgcttatccgattttgattctgtcttgactgttcgtctagattttcataataactgagagttataaagtcagaatagtcaaattcacaacttcatattttcactttttcgacaaagtgattcactcaaaaattggatagtttcgagtatctcgtttctgcagaatagcaatatctctgagaactggtgactagcttcaccagaatacaaaaatagtctaagtgatgtcaaaatatcacttaggcatacatctctggtacgttttcccactcacccagcactcaagttgacatcacatgtcaacctaggcgttggatgttaacttgggcgctgggatatgaacctgggtgctaggcccagaacaacctttagtaaaattgtcataactcactcaatattgatctgagtgttgcggtttaacttgagtttcgaagctatttcaatgctctatcaagtcatgtctcacatttcaatcgcagttctaaagctatcaactccaaatttcacctcaagggagttacgaatttaagcaacaacttacccggagcgatcctgccgtcgcgactcgaactctgaaaattgacgatcaaccttagaagttaattttcaccgttagatcatcatctacggcaaaaatatcctaatatatttttccatattttttggattattttattcacaattaataggacctccttcacctataaaaagagatctcctctaactcatttttcatattcagaaaagtagccataaggtcagagcatctctctctagtttttttctctctagaaattagagcatccacacttagccatttttttgtactccatctcgtaagaataaaaactcgaagtagacgtagctcaattactatcgcgatacaggtagtgaactactataaattgttctctctattaatgcgtaatatatatctcatttctcgccaatctagtaagcaggtatggcttaaaagtctctgtccagatttttgagtcaacatcagtgttgcaagaaagtggagccatcttttttaattggactttatttccatccttcatttcgttttctggttaggattctcctgtttgtttaatctttagatgaaatttcacgtctgacagctac

SEQ ID NO: 31329 - DNA, 2879 bp, Cannabis sativa
  modified_base (28)..(43): a, c, t, g, unknown or other
  modified_base (1693)..(1694): a, c, t, g, unknown or other
  modified_base (2640)..(2641): a, c, t, g, unknown or other
tagggtgttaatcaaacatacttggtannnnnnnnnnnnnnnngtaaaatatttccaacagtcaccccctgcgcgtattgccagcagtaacccggggaccagcagtgagactagtaccagtagttcgactagtatgggcgtctggagccttgaacatattagtgcaggggccacgcttcctctctgggactacttcaaagattatataaatcacattggagttgccccattctagttgactcccatctcttataggattctcgctagtttgaaagtcttatacaaaattctgaactgggggtgtcccacaccagtagagattgagtatctttactcagttaaggccattccgtcaaggaagaacgccgtaggggactttttctatctcggtactcattctaattattgtgacttgccaaataaagtatccttcaagaagaagttcttctagacgtctggtctttcccccatcgacacaaccatgttttgtaaacttcgtaagtgattgttctcttcttgctcatttacatcaatctttgtttttcaggtttatgactgatgttttatttattttgacagctctcatgacgaggcctactcctaccctcgagatggttagtaggcataggcgactgataactctttcctacggtcttcggtcatgcaatttccttttgagtgaggccaacctgcgatcagtgggccttcttgctgataaggaatatacttgtgattacaagattcccaagtattcttcttggtagctgattactattttgagcgaggaccaggcctgggatctcttggctcaagcacaataccttcaaaatactgcccctcaagaatccggtgaaggagcatcccgaggtaatcaatgtggttggtctcctactgtacttaggactgaacgtaatacattagtcaccttccaaggctcccaccttaatttatatgtttggaattcccttctcctttatcgcattgctcataagtttgacattggtatcctagattccacttccaggttaactgtcacgagtcatattatggtatagctgatcaatacggtactattaaagatagggcaggtcacatagatgtgagctgagatttataaccaatcgagccttttgatatattcaagattacaggctgtagggattttagtggttattatggtccctctaccccttcatctagtgatagcttgccttctagtgactttggtatatcccttaggtggaaaattatatttctccctttttcatcagcctttttaataattgtaacaccttgtcctgttttgcagacatgagttatgaagatatcatggactagaaggggaagaaaaggacaacaaaccctggggtccctacagctgctaaagttgttcctcccaagaggcaaaggaaaaccaccacccataagaagaaataactagccgaacccattgatctcgaggcctctatcaacaaaatctaagaacaagctcctcctccagtcattttcgatgcgaatgcacctcgccccgagacaacccctgctactgcttcttcaagaagaccattgagaccttgtcgggcgcagcaggagaggttgcgtctgaattggcccaagcatatggagttgcctgctggtgcaaacttcaaactcttcttccccttgattgggattttctcaatcttaggagtcnnaaagagatgctttcaaggagcttggactataacttcatggtacattggattttgttattataattatattattctttttatacctctttcatattcatttgtttgcaattctccaggcttcttttgcttccaattgactactctctgagcggcttgaatacttggagggtgaggtccacaaattactatcccaatgcaaggttatgagtaagcattgggacgacgcccaacaggacaatacccaccttaagcaagaagctgagaaagatatggaggaagccgagaaggcaaaagaggaagccgagaaggcaaaaaaggaaactgaaaaggcaaaagaggaagtcgagaagaccgtcaaagcccaagccgatgagtttgagaagaagcttgctgaaaaagaagccaagaccgtagagcgatgcgacaaggttggttttcgcactgtatatcgggcctggatggtgaaccctaatatggtgcaggaagaggaaactttagctctttgctagaagaccatgatggaggaagaagatggcgaggtcgaggaagaagaagaagaagatttgtccaagtctcccagcatgtagacttggttatttatttatctccttttttccttttagaaaatggccctttggccgagacaatggtttgcccatggtgacactttttttttttgtaaagacagatttgcaaggtttgatggccaactttgttttttttatgcctcatacttttaagtttaaagtttaatgtgtagatgtttgcttgcgtttcattcacaatctaaataatcacatgcataaagtttattaggggtttccattgctcgtattttcctctgatgctaagtagtttatttcctactttacgcgcaagcaacttatctgcccaaccctcaacctgcgagctatcattgattccacctcgcgatcatcagaaatgnncttattttaagcaaactcaaatatatttttattgaacttgtcattttctatatattttcattgcttacatgagtagttagatcttctacccacgtgttaggtttaagtattgttttaagacactttgacatctcgtttaatacttttccttagcgtgagccgttagtatatagctttatgcgctaatcataacttttgattttcctttcttgtcagataggttttaaaccaaaaatta

SEQ ID NO: 31330 - DNA, 1322 bp, Cannabis sativa
taacaatctcaataattcgggagaatttaatttttttttaagtaattatttattataatacttaaaaaaaaattaaattaacttcgactatattacctagtactcattatacataccacacatgatatataacgtacgtgtacagtattcgtaatgtaacatcatatttggcgatattattgtagttagtacagttagaaaataagaaagtatctgttgttttgttttaaatgtagagagaggtcgtcgatgacttgacataaagaagcgaacatttgtcaccattcatttggaagagcacctagttttgatggcatataatctgaaccgaacacgtggccacttacgattgctttgtaagctctctttctctctctctatagtcctcgatacgatttcttgttaagcagggcagggcagggcaagggcaagggcctagccacccatatccccatatgcatctatatatatgtatcattttttttgcagaaacagcgggcgcggactgtgtgaagcaaaaaccaaaaccacttaattggattgatctcttaaatagaaaaatttagagagagtacgtggtatttcattttggaattggaccccatccacatcaaaatattgaacactacacgcacttttgttttatcttggctataattaaacttacatgtattatgtctctatttaagtacatgcagttccattttcaaaaaaaaaaagtacacagttcatttcgattctttttttctgaggctgaccgacgttgacgtttatatgtctctttatctcgatacatatatattaatacgaaatattagggtaagatttcggtatggtgcactttgataatgcattattattttaatttttgcctatgagatagaggttcattgtaatcacagattattcacagtgagctagcttcttgctggttaagcatgattccaaacttctagtacaactatcaatgcacataattatgttctttcaacatgtttttaacaatataaatgaattataatatttaaaaatatatatgggagtttgtataatattagtatgtgcatttacaactacttcaaaaaactacctttacttatcaatgtgaatcaaaattttcgttaaccaataactaaatcttaaagtaatatcgaggattgtagaggaggaagagaaatcttaaagtaataaataataataataaatggtaagaagatttttaaggtggttaagtttatttttcatacttcatcactacacaaaacatctagttatagtaacaactttttagtcataacataaattttttgtaactaaatttg

SEQ ID NO: 31331 - DNA, 2691 bp, Cannabis sativa
ttcttctctggctcttgcctttctcctgagtcttgagggatctcaagagttgagttggtgcattcaaccacaaagtctgcaagggcatgaccctttatggcagttcttggttggtatgtcatctcgaactggccaagctcaatggcccatttgagtagtcgacctgatgcttcaagtttttgtaaaacctatcagaatggttaatcggtgtacacctttatggtgtgtgcatggaagtagggccttacctatctggaccccaaaagcaaattgtaagtcaatttttccatgagtggatacaaactttcgtcatcgaaaagacttttgtttatgtagtatacaaggtgttgtacactgtcttcttttcttgtgaggataacactcatagcatgttctatgactatcaggtacacgcctagctcttcattgtctataggtttagacaacacaggtggctaagccaattatttcttcagctcctggaatgcattttcacattcctcagtccactcaaattttttgttcgctctaagaatgttgaagaagggtacacatttgtctgtagacttggacataaatatgcttaatgtagcattgcgtcttgtcagactttgtacttccttgactgttgtgggcgacttcatatccaaaagggcttggatcttgtctcaacgtgcccccaccctttttggacttgacaagcatgtcatccacatacacctccatattgcagccaatgagatctttaaacatcatgttcaccagcctttatatgtggcccctgtgtttcttagcctgaagggcatgactttgtagcagtacaggcctagatcagtcatgaagctagtgtgctcctgatctggtggatgcatctttatttgattgtagcctgagtatgcatccatgaaactcaagatttcatggacagctatggcatctacaagctagtcaattctaggaagcagaaagtagtcctttggacatgctttgttcaggttggtaaagtcgatgcatactctccacttcttgttaggtttgggcaccagtactggattggacacatatagtggatagaatgcctctgttatgaagtcatgggctcgtagcctctcgacctcatctttgagtgcttaggcgcactccttgtccaacaactgccttttttactgaacaggccggatgcttggatcgatgttgagtgcatgggtcatcacagatgggtcaattctgacagtgaccatgcaaaaaggtccaagtttgcccttataaattttatcagtattgatttaatttctagtgctaaacctttcctgatcttcagtcttcttgttgataaagggggatcgacctccacttcctccaactcttttagaggccgaaacatttctgcaggatccccagagcaaggatctatgtatgtgtccccactttgggccagacttcattgtcctttgttgggcgtgtcttttgggcccttagcgggcatcttctctttcttggctttggatagagccaagttttaacagtgacgagcagactgttggtcccccctcacacacgccaccccatgccttgttggaaattcgaggcataggtcgtagattgatgttaccacctttaggtcattgagggtcgatcggcttatcatggcgttgaaggctgagggaacatcaataatgacgaactatgccatcagagctctaagggttggattttctccaattgtgaggggtaatttgatatactcgacatgtgcgatgccttggccaaagaagccatatatcatttcattgaagggtgccaggttggtgagctggagccccatcttttcatatatttatttgaatagaatattagaggaggctctatcgtccaccatgcatcttgatacagtcatgtttctgatgtgtacagtaatgacctaagagtcattgtatgggaaactgccctgagcagcatcttcttttgtgaaggagatcgtgggctctataggcttttgttgcttagagctcctgtcttcgacaactaggacgtctcttttgggctcatgacaaagtgtccaagcatagcgctccctagtgttgctggtctcgcctgtaatgtggggtccgccaaatgacccctaaatgtcctgcactggtggtggcattggatctccgttctgggcaccctatgcctgagtttggtcatcttgcacataacaatgcaggtggggattgttacacattatgaggaattcaataaccctcgtactattttgacactcattggtgtcatggctgaagtcgttgtgatgccagtagaagttcgacatgtcccttttgctcatgtcccttttgatagggaagggcttttggtatgggattgttccctgagtggccatgaagatggcctcatctttctctgtcaagagggtgaagcaggtgtacttctcctctctattcttttgtggcatgggagaagtgttcatctttccctttttgccactattcctcacagagctattggtgttgtgcttgtttctagtgtttttgccactagaagtctgggcagagttattggtgtctacatgtgcgtatggtaggtcaggagactactggatgtctcgtggatgcctgttattgacatgcctgttattaacacatacatacattcgaatattcatatcacacattatacacagttcttacc

SEQ ID NO: 31332 - DNA, 3755 bp, Cannabis sativa
  modified_base (142)..(142): a, c, t, g, unknown or other
  modified_base (3291)..(3291): a, c, t, g, unknown or other
cattgttttagaaattcatattgggatgttaatgaaacatacatgatagtaaatctagatcctcgtaaaatatttccaacactccactgcccacttaagtaaccatccagaggcatccagtttttgcaatatttggcgtaanggttggtcagtgtacacccgaataggatgagcttgaaaatagggccttaactttcttgttgctacaataaggcagatagcgagtttctctatcaatgggtaccggcctttggcctcaatgagtcttttattgatgtaatagactgggtgttgtatgctcttttcttctctgatcagcacgacactcacagcgtgctccgtgacagctaattatatccaaagttcttctccgtccagaggtttcaagagtacgggaagctttgtgagttgcgtttttagctcttgaaaagctttttcgcattcctttgtccactcgaattgcttatttcctatcaagatgttgaagaatggaacacacttgtccgttgattttgaaataaatctgcttagtgcgacgatccgaccagtcaaactttgcacttccttggctcttgttggcgacttcatatccaggagggcttgaatcttctttagattggcttcgattccttgggcattgacaataaaacccagaaactttcccgagctgactccaaaggagcactttaagggatttagtttcatattgtatttcctaaggactttgaagcattcgtccaggtcatctatgtgcccccctgccttcctagatttgacaagcacgtcatccacatatacttccatgtttcgtccgatttggtctttaaacattttgtttaccaacctttggtatgtggctccaacgttttttagaccaaatggcatgactttgtagcaatatagacccatatctgttcggaaacttgtatgttcttagtctggtggatgcattttgatttgattgtacactgaataagcatccatgaagcttaatatttcatgcccggctattgcgtccacgagctgatggattcttggaagtggaaaacagtttttggggcatgctttgttgaggtctgtaaagtcaatacacactcgccatttcttgttcggcttgggtaccagtgtgggatttacaacccaagctgggtagaaagcttcaattatgaaattattgttgcgtagcttctctacctcttccttcaaggctagtgctcgttctttgtccaatagcctttgctttcgttggattcgccagaagttgggatcaatatttaggacgtccgaaattatagaaggatcaattctgacaatatcttcatgtgaccaggcaaaaacgtctaggtttgctgttagaacatttatcaatgatgattttacttcgagcaacaaacattttccaatttttagtttcctggccaggatatccggatcgatcttgatctcttctaggttttccacctgtccaacattgttgcttgggtcgccaagttgaggatccacatcttcatcctcgccttgggaagttccctacatagaaatattttttcccttgtccgtgctttggctggaggatacttccttcttagccttggcgacctcaaggttataacattcccgagcaatctcctggtttcctctcagacaccctaccccattctttgttgggaacttcaggcatgaatggaatattgacgtaacaacctttaagtcagacaaagctggtcggcctagcatgacgctaaaggctgatggaacgtttaataccagaaattgtgccattatagtcatgctcgtcgaagcttgcccaaaagtgaggggtaggcgaatttgccctagaggtgcgactccttggccggagaaaccacatacaggcaagagacagggggttagatctttgagctggagccccatcttttcataagcggtcttgaataggatgttggaggatgctccattatctaccctagttctggccaccatcttattggctatctgaacctccacgactaactagtcgttgtgtggaaatctgattttgacaacatcttcatcattgaatgttatggtgggctctcctgcccgcgagattttaggctttctctcttctatggccaggatcacttcttcttgctcgtgctgtgatgttcgggcatacctctctcgagctttgcctgaatctccagctatgtgtggacctccaataattacttgtagatgcccatctattggtggaggcaacaagtcttggttgttatcacccctctgattctgatcggccttgacgtacttctgtacatgcgggttatttttccttattaggaattcaatttctcgcttcaaattgttgcattcattggtgtcgtggccgtagtctccatgaaattgagaaaacttggtcatgtctctcttgctgacatcttttctcatcggtacatgcttcttgtacggggctagtgactgagtggccatgtaaatactctctatgtcctccgtcaggatgataaatgcagtatatttggcttgattctctcggggagcctgttcggctttgccgacgaactttccctttttcccattcccttgcctattattgaaaggggttcgacgtgctcggtccaactcgagatcattatttctctgaccggccatgccttggaacatactctttagttcatccagctgtgcctgcacggctggactaacctgttcgacattttggccaatctgagttacatcagaatctttctgagcgggaatttgagcacgggttccgggctgcatgattggcgtgtcaagctgatcgtccactcctctcctcctattcagattgtttctaagatcatgagtcctccctaacctatcgaatacggaaacgcctggctgtctcagtgactgtttggtttggctaacgtgctaaccgacacccttaacctggttggaattgttgggtattacttctcccaatgaattactagacaaggtccgcccacctaccacttggcccacaggtggaacctgtaaccgaggatttggtggctgaccatttatagtctgaaagtattcattgctggatcttcgtctgtttcacccaaggggatgacattcgggggttgctgcccagcagattgataggcttttcgtatcagcacagtggcttgccgactatgattatcaatgactacatgatgagcccctaacgcctccatctctttgtccctccattcggcaaacatgcgcctctattcttcaaacgcgagatttaccacagcacggagttcctcctgatcntgatgtagggtgttggtatgaccttgcaagagtccaagggtagcacggaggttctggctctcagtgtcatctccaatggttgtttgagcatgggtagcgggcggaataactgtgttatgaatgccctggtcaactactgaactggtattctcagtctcttacacaccaggcctgatctcatctacaggagtcattacaccgtgacccgcagttgatggctgtccgggacttacggctggcggaacccttgtgtttcctgggttctatagtacaggatccaccatctgtggattttccagatcaaccacgcccctacgagtctgtactaccatcgtacttgtgattaaatttgcaataaagagcaatttttgagttcaactctcaatgaaagcaccaaaagtttgacctcacttttagccaatgacagtgagtctaattttgtaagcgacaagtagtttaatatg

SEQ ID NO: 31333 - DNA, 1900 bp, Cannabis sativa
gtagtatgtgaaacaagggtggttgaaggcaagggcttggtggatgcatcaacaagctggagagaactagctaatagaatgaggtgtatggtggaatgtttgatcttatctcggatgaagtaatagtctagtttaatatgttagtgcgtttgtggaaggtggggttgttggcaacatcaattgattgtcacaatagatgaagctaggtgagtcttagggaatttgagaatctttgagtaaatattgtagccacgtgatctcacaactagtagcagccaaggcatgatactttgcttcattagagcttctagagatggtaggttgtttcttggtacgccaggatatgagacagtcgcctaaaaatatgaaaaatcctgtggttgaacgcctagtgatgggacagaaggcccaatccaaatttgagaagccacgaagatgcaaggatgaatttgttgagtatagacgtccatgtcttgtactgccttttaaatagcaaagtaggtgatgtaatgcttgcatatgtggtgttcgaggatgcgccataaactgtctaaaaatgtttacaacataagtgatgccaaatctcaatagggtaagatatagtaattgtcctataagttgatgataagaagaaggctcttcaaggggagtgccttgtttgtcatctagtttgacacgagagtccattggcatgttttctggttcactgctgacatatcatgtgtcttcaatgagctgagtaatatatttgtgttgtgagagacaaagaccctctggtgcgcgacttatttaaaaacccaagaaatactttagtagtccaagagtcttgagtttgaaatgtttttcgagggaactttgcaattgtagaagaagaataaggttaggccttgtgatgatgatatcatccacttacactaataacgcaatgaatgtgttttagagcctttggtgaacaaggtgtagttggctagagatttggtgaatccttcatggatgagagcatcaaagagctttttgtaccactgccttgatgatagtaccaagaccatatattaaattatgtagtttgcacaccatattggtatcaggacaatcagaagagggaagagtgagtccttgtggaatggtcatgtacactttctcatggagatctccattgaggaaagtattattaatatcgagttgcagaatgggacattgtttaatggctgggattgcaagaagaagcttgaatgtgaccatcttggcaactagagagaaagtgtcaaagaagtataaactctcttgttgtgtgtatccttgaaaaacaaggcacgctttgtatctttttatgaatccgtcactattgtatttgattttttttatatatatccaatgacacccgattgcactcttgtttggaggaagtttcactattgtttaggttccatttgttagcagtacatataaatctgtcagcattgcatcgttccaaattttatgcaaaatcgcttggttgaaattatgtggttcgtagtgagctgtcactgcacaaataaaagctttgtgagttggagacaaattggtgtatgacatgaatatatggagagggtaaggagtagatgattggtcttgtatgaccaaattacattcataatcacgaagatatgttattggtttgatgtttctagttgtcctatgggataataggagctttgattggagaaggttgagctattgcgatcttttctacatcattgtcatgttgttctggtatagttctaggtatggaaatgttataagcagaatcactagcttgtaaatttgtatttgttcctgcaacaacaaatccttctaaagggtaattagtaataggggtattgttaatgatggaagtgggaagtaccatagtagagaaagg

SEQ ID NO: 31334 - DNA, 3056 bp, Cannabis sativa
  modified_base (2046)..(2046): a, c, t, g, unknown or other
tttggcttaggtcggctaagaaaagacttgtaatattttgtgaattatttttgggatcccgaaccatgtaaatttttgttgtaatgttaaaattattaccagttcattttcattccgttttgttaaaagtttaatttctcgcgctaaatttattagtaatcccgtttaggcgattagggtttcttaatcatctttggtagagtgcctaattgttagggcattacaatttgttatcagagcaccaaggtttttaaacttcctgtagaccggccgaacatgtacaatcatcgtcagagacaagctcgacttaatgtgtagtaactgttgagagtaaatgctttactgcttatgtgatcatttatttagcgctttccattttaggcaatatgtgagcatctgaagtatttatgtgatatatgatgccatgtttaaaatgctatatgttaagtgtttatttatatgaagtaaatagttgtattagggtttaaggcaataagtgcataagtgtggtattggtgcttaactcgctggggttgttgattacaggggtactagtaaaaaaaatggacccttcgcaatcatctagaccacagggcgaacaagtagagcctagggttgaccaaaccaatccaccggtactgcctgcacctgtgcaaaatctgggggataatgcaggggttggcaatgctaatccgcctgctgactggtagcagatgtttcaagaaatgtgaggtatcatacttcgtcaaaatgaagagttgtgtcgattaaggcaaccagcaccggctgcccctattgagcaagtgttgccaccaacacctatgccagtggtgggtaaccaggggttcatgatcccacataaggactccgtgtttgaacggtttgtgaagctgcaacctccaacttttttggggaggtactgacataatcaaagctgagcagtggatgagtacaatcccctgtatcctttatgatgtgggagtgacgagaacagagagagttaattgtgcaccatgcccgcatctagttggatattgtggaatagactcgagatgtcagtgtaatgacttgtgaggacttcacatatggaagattttgtgaagctaactcaagggaaaatgtatgtggccaaataaactctggagtttaactggctgtccaaatttgttagtgatttggtgcctacagatttcaacaggaaacagaagtatgtgagaggatcgaatgccataatcattcggaacttgaacattaccactactcatgacactttctacaagaaatttttagagctagccttaattgctgaggaggttgagcaacatgtaataaaggagcagattgcaaacgatgccgtcatggcatcgaatcctccttctagtggtaatgttagtaaagggaccgacggcggtaaccctgatcacaaacagaaggctaatgcgtttggaacaccaaggggtaatagaaatttttgaggaaacagaggtggccgtcagggccgtggatcttcattccaaccctatcctgagtgtcctaaatgtaagaaacaccatcagggtgaatgtcgggccaagacttgtttccaatgtggcatggtgggccactttatcagagattgtcctcaagccaagaaggaggagcctaagaagaatactactcagaacccaggatgactttttaccatgactcaggctgacgtagatgctagtccgtcagtgtgacaggtcagttatctataaatggcaattcttattctatattgtttgactcaggagctactcattcctacgtatcgagtagagtaattgaaagttttcataaaccttgtgatgcatatgcttcggggttcggtaccttgctaccttcgggagacccttatagtgtccacaaggtggattcgatccttgtctttctggattgacagttgtgaattaaccgccaatctaatagaattgcaactgtcttattttgatgtaatcctgggaatggattttccatccaagtatggggcaatgatcgactgcaaacggaagatggtggtgtttnagcccgatagtgctaacccagcagtgtttgtgggtaaatttcagggggcacgtataccaggaataacacttttgaaagctaaggtcctgatgagcagaggttgtctgggattcatcttcactgtagtggataccagccgacctgtgacatcttgacttgaaaatacaagattagtgtgcgagttctttaacgtctttccaaaacatttagtgggatcgccacctacctgggagattgaatttgtaattgagttggttccgggagcagaactagtatcaaaagcaccgtatcgaatggctccagtagaattgaaagaactaaagatacaattgcaagagttactgaacctaggattcattaggctgagctactctccttggggtgctccgctgttgtttgtaaagaagaaagacgggtctctgtaaatgtattgattaccaagagttaaacaagcttaccatcaagaacaagtatcctttacctcgaattgatgatcttttttatcaacgtaaggggaagacggtcttccctaagatcgatcttcccttaggctattatcagctgataattcgagaggaagatgtcccgaagactacgttccgtactcggtatggacattatggatttcttgtgatgtcttttggactcactaattgtaacaccctaacaattaggcacgctagcgaaggtgattaagaaccctaatcccttagtcaggattactaaacagaatagtacaggaactttaaactttaaacgataatagaattaaaataaaaacttgtaataactttaactttataaccaaaattacatggtttatgatcccaagaatatttttacaaaatattatcacaagtcttttcccaatagtcgacctaagcgacaaaacagagttagagaaaatcatcactggttgaccctaacccgcttggtctagtgtagcccaaacatgtatatacatcgaccgggacccgcactcatgcctgatcaaagatagatttaccctt

SEQ ID NO: 31335 - DNA, 3460 bp, Cannabis sativa
tttttttttccctaagaatgaatccccttttttttttttttcttttcttctttccataactttttttttattgaattgatgacacgtttactatataatcaaaataaactaataaaaaaaggtaaccaaataaatgagtattgccatttaaatattaaaaattatggtcactatatttactaataaaaatcaaatcaatggtgagataattattaatttccttgcattttttactttaatttattaaaattaagaaatagagaacttgattaaaagaaagggaatactttctcccactaatattctaatgaatgccgttagagataatgtcttctatttaattttatttatttattaaaaattaaatatataataacaattttatccttgaatatatgtcttacaaaataaatatcatatattatagtgttatacttatatttcgagcagcaatataatgctaacacatgtaatatagctggactatgaatcatctcgaattatggaataataaatacattagtcctaactaataagcactccacgataagtggaaatatataaacccacacatgtgggtctcaacatcaatgcacaaccaaaaagtgtataagaacaatagaattcaactttgttcacgacagaccttacttaccaaccaacttgagcaagagatttaactctaatcgaggatgagtttgagaaagggatataactctactcaacgctcaaaacttaagcaagagatttaaaattcaagaaaaagatataactctactaaaaattaaaaaatacaggcaaaaagttttaaccttgtaaaagtcttaaaatcgagcaagagacataactctactcgactaccacatgagatatgagatataactcagctcacattataaagagaaggcacatgctttaagaactctacacatacaagtctaaggatattggttatgcccatgcaaactcttcacaacaattaaggacattggtcgtgcccatgcacacatctccaaaaaagaagtaacattcatgccctctacgaagaagtattttttgtgcaagccttggggttagtgcaaaagcactacttgaaggcttacaagaaaatacttttgggaggcaaatgttatacctaatttttgtcaaaaaaaaaataaataaataaaatggctactcttgcacaagggctcacatgcaaggagtaccttgaagatacttaagtcaaccttgcgactttgaccaagagttataaatgtcaaataagttaagatatccaacttgagggccccatggcaccactaggagacttgaaaacattgaccaaccatttggtgctgggactcccacacccaagtgtacccagactagggtttatgggctcacacgagcattttcatcctagagaccttaattcaacaaggaaaccaacaaggacttaactcatttaggtataaaaaggcttagactgtacataaagtcaaaattacacaagaaccccatgcaatatggcctatgcgaccactgccacatgaagatgccagtgttctccttctttttggagagcactgccacaagaatatggaagctcttgccactcactaaataccaaaagggacttgtcaaaatgtgttccctcaacacccagtagtgcaaaacatgtgaaagaaaccatttctcactaaggaacatgcctagccgaccactgccatctttggggcacaaaaagtggtagtggttggccacatcaaatgagaatgagattttttttgccaagagttctttttcatcactaacatgtcaaaactaagtgagaaaagccaccaagtagtgtagaaaccacttggccaaccactaccgcctatttggcacaaatggtggcagtggtcgaccagaacataagagggggagtttctttggccaaagtttatttccaacatccatgtgtcaaatacaagtgagaaaagtcactcaagggtccatggccctcttatgcgaccattgccatctttttgacaaaagttgtgccagtgctctcttaaccaattggccaagacccagtgtgaccaaaatggttttctagcatccatatgacagaaataggcaaaagaaaacaccatccaaggcttcccataagccatggccgaccacttcacttacaaaaagcttattatgatactgtcgagtgggactttctggaagaaatgctccgagaattaaacttcccaaataagttagtaaaactgatcatgacttgtgttcgaactcccaggttctcactaatgttcacttgcgcaatgcatggatactttgaagctcaaagaggacttaggcaaggggatctgatgtctcctcttctatttgtcctaggaatggagtatctatcccgaataatgcagtgaattggaactaaacaagattttaagtttttggacaggtgtataactttgaaaataaatcatttgatctatgcaaaagatgttattcgagattataaaaacatctattatattctccaaggtttgaagttgttctcttgtacctccagcctacaaccaaactcgactaaattaatcagccatttgttgttgtaatatgcaagatagagaagtgcagcgtattgtagatgcatcgaatttcaacaggaaagagatgccatttcggtacctcggtatccccatctgttccaaaaggatctcaagcaaggagtgctcgattcttgcggaaaaaatgacaactagaatcaagacatggagcgcccaaaatttatcctatttgcaggtagagttgttcttattaattcagtgttgctatctatacattcttactggagccaaatcatgattttgcccaagaaaattattaaagaaatagaagctatttgccaagctttcttatggaaaggccagtatatgctacaaggagcgtggctgatttcatgggaatcagtttgtgaatccaaggcagatggaggggctggttttaagaagatagcagaatggaatgttgcaggactattcatgtacgtttgggttgttgctaacaaggaagataatctttgggtttgttgggtacctagtgtatatatcaaatatgaaggttggtggtcttatgaaccacctttgaatggaagtttgtactgtggagattggcagctgttaaaaatcaatttaaacaggttgatttgcaacagtttttaggggtcaaatattacatatcttaaggtcataaattgttatgtccttcccaaaataaagcgtgatggagcaatgaagtatgggtgagattcaacataccaaagcatagttttgtattgtggatcgcgatacaaaacaagttaagaacgaaagaaagattgctgaaatttcacatggtgactgatgcaaattaattgtgttttttgcaacacaaataatgagtcggttgatcatcttttctttcaatgttctcttcctcttag

SEQ ID NO: 31336 - DNA, 2427 bp, Cannabis sativa
aacttataacccacgcttgagttgaatgagctctttcttccactcggtatcaccagctcaacttggcttcaccttcttcttcttcttcttcttcttctccttcatgggcttcggtacaaaatcctctaggaagaacttgtacttcacaaagtttgcctcagtggtcaacaaagtgatattccgaacagcttctggagttggagaattctgtgtgccctctctgttagccccaatgtgaaaggaggacgacagtacgaaggaatctactggaactaagtgtggacggtatccatgccctgcacgaagtagtactcgtccacaaaatgccctattttgctgacatcagagtccactgtacccttcagccatttctcgtccaattaggagaagtagaagtaccccaacctactctgcttaggagttgacttcaggtcgaatacgccaattggtgtcgtgtggagatggctcactccatccttggcaggcatagaggatgaacagggaagataagtatttgatgccttttggtgtgaactgggtcaggcaaagatggtagtaatccgcaatcgtcttaaagtacagaagctagggcagcattgcaccctgcttagtatgggcacccgactaggcgttgctgtcttggactagttgcccggtgatttgtagaagataaaaatcactcgacacctcccaggtatccgtccttctccagactcctcatcttagcttgggttactatagatggaggagacacccaccgagctcctatggcaccttgccttctttgaggaacaagtttggtttactcctcagtccagtagtcatcgccctctaccatgacatcactagcctcagatactggttcccttgactcgttgtaaccgccaaagtgcaatggctgagcaactcgctcctccttagcttcagagggactgtcaagatggaccttgccctggtcctccatctcctggacttcaatatacccttcattatcctcctcctcagcagcacgccaagcttgttcagcgctcgacatcattgaaagtcgagtcacgtgaggattagtttaggcaattctctgcattgtttgtttagtgcgggccatcatcctaccgctggaaagtgtttggttagtatgcctagcaatatttatgacaaaagtggcaataggaatgccaaaggtagcagcacttggtcggcccatggggatagtatcagttatgtttggccagacaatgtgtgtccagctggacagcaagtatcgtctccaccccttcctgaggacaactagcacatggacgaggttggtcctcgtatagaagttgcaaaagatcctagttgatacaatgttctcctccccaaaactcaccaggcttcatctaaaaaagattggacacaagatgagtatttggccgggagctcgaacaaaaaacaaagtatatagaccagctctcatcaaaagataaaaaaagggaaatatcgtatgatttaggttcataacccagaatttcaaaactttagattaagggtcaattttcactgaaccccgaatgggtaagtgagaaccgaatatcgtgaaattaaagtcagaatgccacaacagtcaagttatctagtcaattacaagaataatttcatatttctaaacctagattctctacagttttcctagaacaagttcaagactattgaattttctacaatggaaacccagaaaatcagagattcaaatattcaagaggaaaaaggatgaagaacttactcactttttgaagctttgaggttgttcagatgacgataatcgacactttctggaaattcctcgaaggatttaagataaaaaggagttcttgctctaaaatcgccaaataagaaattgctgatagtggtttattaggactttttattctatttataagcaagttagtgaagggttgtaatcattttgaaatttaaatgcctctatttccccccaaaagcaaacgttggcaaatcaagtaatcaagtacttgaggaagagtaaccatcaatgcatgcgtatggttggggtgtttcgaggtacgaacaatcaccatttatgagtcgaatatttaagagacctttggccagaatcacatcggatcaccaataggcgcatcgaacacgtgccacccattcagacacaaattcaaactaagtgaagtttacgcgtgactttggaagttccgtgaagacttgggggcaaatgttatcccatttttttcactatgacgtggcggtagtggcacgtttctgttattccttatgcttgataagagaaatgcttgataagagaaatgttctataggcatttagaagtgaaacgatgatttcctttgagcttgctaagtagatataaatgatagagcgctcattttagtgatcgtattagttcactataatataatt

SEQ ID NO: 31337 - DNA, 1717 bp, Cannabis sativa
aatttcttattataatattaatattaatattttcttattagatatatagctgactaactacaaaaaatttaaaataattttaccgaaaaattaaaaatcacataaaatatatatacataataaaaaatattaatagatttattttaaaataattaacaaatcaatagtttgttgtgataattatatattttatacaaaaaaaaattgtttaatatatgttaaaaaatataatgaaaaagtgaactaacacttcacataaaatatatatatttcacatgtgcaaaaacattataaataaaattttccttaataaatatatagaaaacacataaagaaaataaaattttcaaataaaaattcataaacttacaataaaaataattttaagtgtgaattttaatcacataattatttgttcaaatattgttaaaactaagttgaagtattttgtggcaaatcttgtactttgagtggtagcttcttcttcttcttttctctctttttaagtgctagcttaattattttattgttgatttagttgaaagccacctccatgcaaaatttactttccttgatcatgaattgttagaaaatattaacaatatacaacataaatatcaaaatttaaataatattatttgttatgaagaaaattaaaatatttaaaatagaatctacctcttcttgctaagaaagtaatccatttaaattgaaattactgcttctttatttatagaaatcagagagataacattaaagaaagtaaaatctggttgctcggaataaataaaggtagaattcttatttatatctttggggagtagacttgttgcattaaattaaagagattgcctccatggatgggcctagagaaaaaaaattattagcatataaaaagttatataaaaacaagttaatacattatcaatacaaaccaatacaatataaaaacatcatcacgtgcatgtaaacaaaaaaaaaaacaaaattaattaattctaactaaagtgctttgaaaataaaaataatatggaagtaaaaaataatttttcccatacaaaaatatcttgaaaacagtaacaaaataatagagataggggaaaaaaaatcgaagagaatggtaaaatataattaggtttagaattaagtttatatataaatactttagttttgttaattaggttttaaaaattattagttattatagatattttggagtgattaattaattgttgtagatttttttttttttgaaaaattttagactgtagccgtatgaaactatgacttagtgattagatttttttattagtttttttttaaaattaattaatatgataataatgtgtaactgcgtataaattagtgtattagatttttttttatttagtttttttttaaaattaattaatgtgaaaaaatgaggaaaaaaaaaagtagaatgaagtcattttaaagcgccatgtcagatttatggctagaaaaataaattttatttgtatcataaaatttaaaatctttatcaaaaaaaattaaaaaaaatcagaaacataaatatctagtagatattatgataaaaagaaaagactacatatttaaaataaaatcaaaatttaaaacctgatgtattgtattgagtatataagtactcaatcgagattaatttacttcacatactatttgatcgactcagaaaagaaaaataataatgaggaag

SEQ ID NO: 31338 - DNA, 1874 bp, Cannabis sativa
agagagagagagagagagtagaagggaggaggtgttttcttaatttctaactagtaaaagataaacataataattctaagtatatactaacttataatctcattaataaagcttggaataatttactaagtcactagaagacaaaagccaacaaatggcaaaagactattttgcccttacaaacatcaaaaagcatacaggccacctaggggtatatggtcatttctaaatcctcgaatattccaaaatttctaactaagttgcactgctattacaaaaatactaaaatgtgattctattggcgacacgctgcgttctaatgttgccgggcacaaaacatgaaaaaaaatgtaaaattcatatacgacataaataatacaccctgaattcaaataaatctccataagaacataattcataattaatattctaatttaataattaagccatatctgctaattccaaataaaagttaagcggtctttacaattatccccctgttaaaaggatttcgtcctcgaaatctaacctgaaaaactctggatattgagccctcatgtttgactctagctcccagatggcttcctccaccttactatttctccatagtaccttgaccaaagctatggtattattctgaaagattttatcttttctgtctaagatctgaactggttgttcttcatacagtaaatcttactgaagttcaagattttcaaatggccctataaacctagggcataacttgccccttttttgaaatgtctaatcccctttatcggagacacccgtaggaatacatgatctcctacctgaatctctacatttctgtgtttcagatctgtgtagttcttttgcctactctgagaggcaagcattctggccttgatcttttctatggcttcattagtccattgcactgattctagacataggtatttcttttctcccatttcatcccaatgaataggatatctaaacttcttgccatacaacatctcgtagggagacatccctataatactctggtaactgttgttgtaggaaaactctatcagtggcaagtacttgctccatcagccttcgaaatccatcacataggcttgtaacatgtcttccaatatctgaattgttctttcagacccatcagttcagtttgaggatggaaggttgtactgaatttcaaggtaaactttggatccctattcgatatagtagactttggagtgccatgtaacctcactatttcattcatgtataactgtgcaaactgatccattgtaaaagttatttttactggtagaaaatgtgccgacttcgtaaattgatctaccacaaccaaaactgaatcatacattcctgtggttttaggtaatccaaccactaagtccatagtgatatcctccaacttccactcatgaagtgtcagtggctgcaatagtcctgtcggtctctgatgttcagccttgatctactgacaagttaagcatcagaatacaaatttcaccacacctttctttatcccacaccacaagtagtagggtcttagatcttggtacatcttggtagtaccaggatgcaatgaataaggattggcatgagcttcctcgagaatcttatttctaagttatgcactacttggaccacaaaccctggtcttatacaacagcatcccattatctgacaccgtaacatttttaacttcaccagcaaaaacctctgctcgaatcatcactaatttcagatcagttaactgagaagctttaattcgttccaacagatcagattgtaatgtcaaatcatgaagtttgcctacaacaaactcgatgcctgatctgactatgtcatcacctagctgaggtgaaatcttaatc

SEQ ID NO: 31339 - DNA, 2527 bp, Cannabis sativa
gagactatagtctccttttttcctcacaattaaataaagcttccaagtattcttcatcttctttactgttacattgctattgtactgctatagttgttaattccttaccaggtatttatcaattggtatcagagcttgacgttcttggtggatgccggtgattacgagaatggaatctcgtgttgaagaagtcgaagtggcggtgacgggagttcagtcggctgtgtcgggtgtgaacaaccagctcaatgatcacggggtgctactgaagactcacggggtggagcttcaatctctgaaagaagttttggatagattggttgtatcgaacggcagaattgttgatgagttagcatctctcagagaaagctcaaatggcaaccatggttcgggacgacgtcttcatggcgaaggctcaacggcgaccggaggtgcggggtctaatggaagaaacgttggcatcgggttcacggggagagacacggtgtttggggagcctcggaacgaatttcgtgctcggaaaattgaattaccgctataaagggaggtttttaaaatgctttttgattgagtcagatgtggcattgctgattcgagaacaggtactccggcgacgacccggatgaatgggcttactgagcgctacttcgggttgcagcgactatcaccaccggaacagttggaggcagcggtattgtgcctcgaaggagcggcgctaaactggtttcgctgggaaaaccagaggcaggccattaagtcgtgggaggagctcaaatcgcttcttctccggcgatttcgtccgaaggcagagggtacggtttttgacagattttttgttcttcatcaagtcacaactgtgcaagattacagacaaagatttaagcgctagcttcgacaatcgaaccgatgggagaccaagctcttcaggcggccttcctcaaaggtttgaagatagagatccaagccccattgagaattctggagcccaatggacttgtacacatgatggacttggctgaacaagtaaaagcaaatcaggccctaacaagactacacagaaatgggctgaatgggcccatgaggtcaagcccaagacctccattatccgctcttctcatacccgattccagcaaaggcacttatgtgacatcaccgatttcttcatcacactctactcaactttcaccaggggctagctccaaacaatcatcttctcaggcgacatctccggtgtaccgccggtacacggagtcggaaatacaagaaaagaaacgtaagggactatgcttcaaatgtgacggtcgatggagtcgtggtcatgagtgttctcaagcggaagtacaaatactccttcaacaggaagagctaatggaggagcaattatcggacccagtcgccgaagctcttgggttcgctgaattatcaaaagcagccgaagcccaaatggtagaagtctctttgaatgctgtggttggccttacttctcccaaaaccatgaagattttgggttcaattcatggccaagaagttgtggttctcgtcgatagtgatgccacccacaactttatcactacagaattggctgtgaagcttttgggttatgattttgatatccaatttcgtccgggaaagacaaacaaagcggctgatgccttgtctcgggttggccaagttgaatgttccctcttatcttcaacaacatggttggattgggagttggttcaaagggaagttgctcaagatgcctttttgtcaaagctaaaagctgatttggagcaaggcaaaacgattgctggtttttcggtggtgcacgaccgattgttgtacaatggcaggttggtgttgtcctctacctcctcaatgattcctcacttcttacaagagtatcattgctctccggttgggggtcattcgggtgagatacggacatatcagcgacttaaaggagatgtttattgggttggaatgaaggccaaagtattggcatttgtgcgagcttgtgacacttgccaacggaataagtatttggcaatgtttcccgggggtttgctacagcccctgtctttaccagcccaagtgtgggacgatcttaccatggatttcatcgaaggcttgccaaaatccgaaggcgtggatactattttggtcgtggtgggtcgcttgagcaagtacaaccactttattggcctcaagcatcccttcacggccaaaactgtggcggaaacattcatcaatcacgtggtcaagttacatggggtgccatcttccatcgtctccgatcgagatcgaatttttcttagccatttttggtcggaattgttcaaactcccagggactatgctccgtcacagcacctcgtaccacccccaaactgatggtcagtccgaagttgttaatcgttgccttgaaacttatctcctttgtttcgcttccaatcggccgaagggttgggccaaatggttggcttgggcagagtattggtaacaccacctatcattcttccttgggttgtaccccattcaaagtt

SEQ ID NO: 31340 - DNA, 1142 bp, Cannabis sativa
gagattatatttatcttaaaagagtctacaaagtcaatacccttaaagctggtgaaccatcctcatctgatgcaacaacaagctgagtagcaacatcaagattccattgtaaaatagaggagcggcgcctaactgaatcgaagaagctgctagttgacagagatttcagattatagaaggcactctattacataaaaagacaaataataatatgtaaacaaatccacaaaataaaagaagagttacctaatcacaggtttttgcttctttaagccattatacattgtctaatggctccactactactactatttagtctaaatctattttcagtgaagttttagatataggagaggttgttgaagtgttttgtgtttcatattttcatggaaggggttatcgaagagtacctgttggataaactcaaaaggagcctcaatggaaaggagagtagtaacagttccaaaatcccgatgcacagtaaattccgatacatacataattctcttgaaaaacttctcatcctcagctcaatccaacctgtgagacaacagggtcagtcttcatttaaagaaaagctttatatccttaacgattcgttaactaaatgctagattctatcaacaaaaaaacgcaccattcactttccttacatcaacatcaggaccaagctaaacaaaattaaggcagagctcgaatctacactatctcaaaacgggaatgtaaatcctcaacccaacggggctgccaattcatcagtgaacgctgatattttccagggatgaaccactcctactacggagcgcttcgtcgacccaaaataattcaagggttcgaagaacacttggcgacacttgagaggttagttgtccgacaaaaaagtgacgaagatgacgagttcaaggcgatcgccattgtcgaaacaaaagtaatcggcaaaacgtcactctgcgctgtagtttttgacaacaaaaaggtgaagaaaagattcttaccaagggtttgggtctccatgcccacaccatcggatgaaatacaaaaagagccacaagagagcgatagccaaacggatcttatcctcgctcggagtgggagaagaggtgactgagttggtggtagagaatcacggcctaaaagggctc

SEQ ID NO: 31341 - DNA, 3233 bp, Cannabis sativa
  modified_base (40)..(54): a, c, t, g, unknown or other
  modified_base (2293)..(2296): a, c, t, g, unknown or other
ttcctaattctagggtattacacactctctctctctctcnnnnnnnnnnnnnnnctctctctctctctctctttgtcgctcttctctatagatcattgacagagaggcttgctttggggttttcagagttggccagagtctgggttgccgaggcggtgggcgaggagatcgggatttactgggcttgagtttggttttgatatttaatttggttaatgttctgttggttgattttattttctctactttgattagactatgttgtgttttttatttgcttaattagttttcagatttgtgtgtttctagatttgtgtttttgttggttttcggtataaatcaagaaaattattgatgtacattttggacctgaaatttataattttttttaatttgttgagtacaatttattaaattaagaataaattataaagatgattttaaaaaaattgcactcctattttaccttttaatatcaaaataaaaaaaaaataataacaatcacctgaatatgttttttagatataacttagaaaaatagtattattgaaatatagtatttgtaaaatatagtgtattgttttggtttagaataaatgaaaaaatataaaaatatgatattgcttcttaattaaaaaaagttattaattttcgaaaaataaaatgataaaaattattttgagaaaatcatattattttttttaaataatatttaatatagtggcactttttgtgtgtcactatacctctaaaaataataataaagaataataaaaaaaaatatagtgacactttttgtgtgtagctgttacttttttagtcggacaaaacttgactatttagacgcctatagtgacgcacagtgagtgactgtaaaagggttaagtgacacgcgtgaagtatcactaaaaatttatttccaattaccctcattagtgatgtgcggtgaagtgtcactaaataattttagagtcactcaatgtgtatcactaaaacctatttttctagtagtgagaagaatttggtagaatgtgttttaactccatctccttcaatgtaccctccttttagttgagtgatgcaagtaatattatcttcatagagaactgcctgtgttgatacttctttattaagtgtaatttatatgtcttccgaatatgttatgtcaatgatctcacttccatatattctctacttgcttcataataaggaaagtatataacatgatttaaagttgtctcgttaaaaaccttgtcagaaaaatccagtgggacaaaacctgagctatggaagaaagagtacaatatatattttatattcataattatttacaagttgctttgttaaaaactttgccaagaaaatccagtgagacaaaacctgggccaaggaaaaaagagtgcaacatgaatatgtctccccattatgcacatatgatccacaatgcttatattaagtgtggggagagattaactgtcatgtctatccagttttttttcttagcaattagttatatatttatttatttttatcaattttatagtttatattattaatttttcttgctttaattttagtgagtgtgggttgaatgaaattttgttgacaatgattgctcgtgtttgatgtgtgattttactttgatgtcttatgcatggtcttgtggaaaataattttgttgatgataaaattcttgattgtgtgatagttataattctaggaaaatgatagattctcatgatttgtgtgcttaactcatgattaattactgctcaagtttgattttttttaaaacttttgcacatcagttgaaatatcatatttgctaatgtttggaaagataggtgcatgcttgacttttaatttaaagtctcaaccactctagaacttgtttgataattatttgaggcgcaattgataaattacacatagttttgagatgtgatataggtaaatttttttggatcgattgagcttttcaagcctaccctatttgttaatttcctagttttacccaatttgagcatagatgttaatatcttatttttttaactctatacactaacctttgagcctaaaaaaatccttattcatcttttttcacaccatagtatattgatgttttatgtatttgtaaatgtatgagagttttgttgaaggaaaaatattcatggttatgtgatgatgaagaaaataattactattcccttagaataaatgtttgtaagctgtaagtatttcattaaaaaaaactaaaaaaaaatgatgagaaatacgtcgaaaaataaatgannnnttgcaacaatttaagtgtgggggaatagtaagttttatgaaaaaaaagatacaagattgaattattgaggagattgattgagtaatacaaatagaaattatttgagagaatgttgtagatgtatacaatggtgtgatttgagcccaagttaaccttctttatctacctttcaccctagctttacattataagcctataaagtcctattgatctttaaattgtgtgtaattacattagtggagaatagtttgataattaagcttatagagtgaaaattcatcgaaatacacatttatttagagatgagcattgattgttggcatgcataaattggttagaatgttaataatatgatgagttgattgaacgcatatacaaaaaaattgagtttgaaaagtaattatcttgagttgaaattctaatgattgaagagtttagattttcttgaaattataaaggtatgtataatttttgaaactaaaattatttttgataaagacttgtttgtttaagtatcatttattttatcattaacttactcaagtgtgtagacatttgatgagttcacatttgtcttataaatatgattaatttatgtattaatactcttaaattaattttttaaattattgattagtgtgattttaattgttttggatattttaaagactaatcatgtatttagagccatttggaggaatgttagcatattttggtagaaaatagtggaagtcagtgagctcggttttacaagatgaagcttaattataaattttgacgaccttagaagtagaaatagacttggagctcaacataaaagttttagatcttgctcttacctttccaaaatatattgaattgtctaattttgagttgtattgaagaagctatggccaaaatactaatcagtagcgtcgtacttatctttttttttttt

SEQ ID NO: 31342 - DNA, 3335 bp, Cannabis sativa
agatcctggtaaaataacttccaacactatccaactggagtatcaagatatatacccggagcacagctctcggggacccttcctcaggttactccacaaatgagcggcatacaattctccacaaatgagcgttggctcccgcatcatcgcattacgggaatcccctaagtaacccctcaaggatgaacggacaagccccatctcactctgctcctcccacaggcctaaccggacctcctcagagctctcggagtaagaggtcctcaaaaggcagcaactggacagacgaccaatacatggagttgacggacacacaagagcgagtgtatttctccacgaggcaaaatacacattatcgaaaggctcctcctctgtacagggacagttcgttaagggatcgcaacaagagatgcgaataccacaacgatattggtcataataccaatgaatgcaaaaatctgaaagacaagatcgaaaacttgattcgattgggtcatttgtatgagtggattaagaactgggctgccccccatctcaacccggtttcggcagtaggcccgttgcctcaaggggtagcagggggtgcacccggagcggtggcacccgtggtaccccccgggggaacgatccctcagcagacccttgtactgccaccaagacccaacgggagagtggctatgatctccggtgggccccacattggcgggacacgacgaagtctgggaagtcaaccagcttccagcacaaaggccctgactcatggttcaacctattaccttcacggaggaagacgcgaaactggtgcgtttccctcttcatgaacccttggtcatagagactcccattggcaattaaattgtggctagaatattgatcgataatgggagttctgtgaacttattattcaaagatgacttcacagccataagcctcacagactgggatctattgcccagcggttcccaactcactggattcaatgaaaccacgcttatcccaataggaaaagtaaggttgccagtcaccctgtgcccagatacacctcaaagtaattttaagtactgcacctttgtggtggtagactgcccatatcttataacgcaatccttggccgaccgacctagttggattttggaacaattacatcaattcgacacttatgcctgaaattccttactgaggaggccggagtgggcacagtaaggggcaaccagggagaggtcagacattgttataatgtcgcaacccacttgccggtgctgatggtccgtgagaatattgagccaaagttggcagaagaagatgagttggatccctgtgtgggatccgaaaaaatagtagaacctatggaggatgtcgaggaagtgcaagtatgaaacctcgaccctaccaagatcctctgcttgggaaagagcctagagccggaggagggagagaaaatcattgaagcattaagggcggccatagatgtttttgcgtggtgccaaggagacatgaccagcagaagttcgcatgtgattacctacgttctgaacgtcaatcaagatatgccaccagtacagtagaagcggcgtccccttgacccaataaaggaggatgccatagaaaaagaagtggataagctgctagccaacaacttaatccgagaggtgtattaccgggaatggctggccaatccagaactagtgctaaagcaaaatgggacatggagggtatgtatagacctcaccgatctgaacaaggcctgcctaaaatactgcttccccctaccccaaattgacgagatggtagacgccacctccgggttcaagttattatccttcatggatgcctactccggctataaccagattaagatgcacgttgcagaacaagaatgcactagcttcaagaccaataaaggggtatactgcctcttggtcatgccttttagactaaagaatgttggtgcaacatatcaaagaataataaactggatgttgaagggccttctagggcagagtatgaaagtttacgtggacaacatgctagtcaagtctaaagtgtgcattagccatgcagatgatcttacagaatgcttcgaagtagtcggagatatggaatgaaagttaaaacccgaagaagtgcactttcggggtcaaatcagggaaatttttgggattcatcgtcagcaaaggggaatagacgaaaatcctaagaagcgcaaagacgtgcaaagcttgacgggaaaggttgccgccttgagctgattcatttctcgatcaacctacaagtacatccctttctttaacatcctaaagaaatgccaaaaatttgaatggactgaggaatgcgaggaggaatttagaaaactgaaagagcacatggccaaaccaccgattctatcaaagcaggttcacggagaagacttgttattgtacctggccgtcttcgagaatgctgtcagcgcaacactagtccgagaagaagaaaaagtccaacaccccgtgtactacgtcagcaagggtatgataaaggccgagatacggtatccattgatcgaaaaattagttttctgtcgcatgatggcttcaagaaagttaagaccctacttccaagctcaccccattaaggtgctaacaaaccatctgcttcggcaagtcctattgaagccagaagcgtcagggagactcctcaaatgggccatggaattaagccaatttgacatacactacgtaccacgcatttccttaaaaggacaagccctagctgacttcataacagagtgcaatgaagcagaggctagtgcaagcatgaccataccacaagccccgacgtggaaagtattcgtcaacggagcgtcaaacgaaaacggatttggagccgggataactatgatatctccgaacgggcttcgactccaggcggccctgcgttttgaatttccggcttctaataatgaagctaaatatgaagccctaattgtaaaattgaaattggcaaaagccgtgggagccacgagagtagaagtattcagcgatttgcaatcggtggtaaaccaagtctcgggacaatatcaaacttgtggagaaaaaatggctttgtatgtagttggcatcagacagcgagtttgagaaactggggatggtgcccattgagcacctcacagaaccaagcattagagttaaagatacggtggctacgatcgagccggagccaaactggatggaccccatcgtcaaatacataaccaaaggcgagttgccttaagaaagggcgctgtctagaaagatacagtatcaagcgcatcgatatgtgatgatggataatattctctaccgaagaggactcaacat

SEQ ID NO: 31343 - DNA, 1589 bp, Cannabis sativa
ttttttcttctaatatttttcttaattttttttaatgcatacaaatttggggtgttggagagattttgtggtccaattggtgagagagaaaacgttgattgggttgtaagattgacaagtaacagtcccaattaacaaatgtcaggctctttaaaatttggtgaactactctcctttggcagtcaaaaagttaatgcagcatccaaacttttaatcagaaactttcattaataatataatctctatcaacatctctctctctctctctcaattttttaatatggactatggaggagcttatcatgagctaaatataacctgtgtttagtggctcgtgggtcccacttttcctaactgggttcctccatctatctttatttacatttatttagcttttttccataatatgctctctgtctctctttataaatatatataaatatatatataaatatcttttctttactattttttttttggaagaactttcctttactaattgatgttaacttgcatggctctaaaaagttgtgattatttttacaccaccatatttatccctaattgtagaacctttaatccaatcaaaatccatttgacttagtgacaattaattcgaaagtaaaatcagtactattctaaggcatgcaattaaatccaacaaaggctgttatatatgttatccttgaccctttcattttaatttattatatttataatttacgatataaatatttaagtttaatttttaatgataataatatttaaattatatttctaaaaaaattttaagtacctaaacgttaaattttaagtcatttacattttattttttattattatattttaataattttttttaaaaaaataaaaatttaatcacttaaactaattagtgattgtcacctaacaacttaacacttatcagttacgtatttatcaaaattttataattataatttagttattattatcgtaaaaattaaacttaagtattaatttacaattaaaaaataatcttaaatattcataccacacattagtatattttataaataaaatttccttcattattacgattattatattgtattattgtactctttgaagcatgccaacaataataaagtacaatagctaccaacaaattataaaacaataaaattaaagtgagttaattaagctttggaattagtgggagaaataatgattaatttggagagttaattaagctttgaaacgtaggaaggttctatacatataactcgtgggatttcgtaggctttattttacattcttatctctctttttttatattatatataaaactgaaggtaaagaataaatccaacataatctgatattattgaaaataaacaaattagctaatgctttcattttatttattcactattatatttagattaaatttgtgacgtgtagtgtatatataatgatatatatctttttttttttacgtacaaatttgtagaatacatacagaccattatatattgcgcacttttgtttttatatatataatatatgaatatttgtttatagattaatgataataatgatgatgatga

SEQ ID NO: 31344 - DNA, 2924 bp, Cannabis sativa
gaagatgatagtatcaatccagctcaactgtttgcaatctgtttttttaatacccaattcaggaaagctcttgttcatcaagtcgactagactatccactccaccatggaaaatggaggagaagtaactgtgtattgttgtcttattcttcccttgattatctgtaatattcctggttataaagtgagtaaagagtaataattctttttcatacatgtaagcaatattttgccatttgttaactaacttgacaagctcatgtatctccatgttctttttaacactgaatatagtagacattgatgggacagcaacaagtctaattttccacgctgcaatgattccaaagttttctcctccaccaccacgtatagcccaaaacaaatcttcctccatggactttcgatctaaaacttttccatcaacattgactaagtgcgcatcaatgatattatcagccgcgaggccataatttcgcatcaatgctccatagcctcctccactaaagtgtccacccgcgccaacagtagggcagtacccagcaggaaaactaagattctcattgttctcattgatccaataataaacttctccaagggtagctccggcttcaacccatgcagtttggctatgaacatctattttgaccgaatgcatgtttctcaagtctactataacaaatgggacttgagatatgtaggacatgccctcagcatcatgaccaccgcttcgagttcgaatctgcaagccaactttcttggagcatagaatagtgccttggatatgggagacatttaaaggagtgatgataacaagtggttttggggttgtgtcagaggtaaatctaagattttgtatggtcgaatttaggatagacatataaaattggtcgtgttgagtgtatacgagttttgcatttgttacattggtgggaatatattgtgagaagcatttaaggaagttttcttgaggattagctattgaaatttggatattgaatgagagaaagaaaaatattatcttgcaaacataccaaaaacagaatgttgagtacttcatttttctttagtcgtaatgttggcaattactatgaatggaaaactatcctatttatagctttatagattggagtgggggtaaagaaattaactaaatattttgtaatttgatactcattaaatattcacatgccgtaatttcttttttaccaaaattaggcacctttgttaggtgcagcccttattaaaaataaatgtacatggtgcattgaataattgagcatcatttattgatgaaaaaaagttaagatgatttttttaaatttcctatggaaaaaaaatttgctatgacaagaaagcgcttgcaaatatttatctatggatctatttgtcttttttttaataaagttataagaatcactcatgaatttacaatgcagacatccacaaatagcacagaaatctccttgaactgatagctcattgtataaccgaatagcatgttttgtcaaactttgaacttctaaagtaagcgagcaacatgggacaaaactaccccaagaaatttagacaataaagctataacgtcttcaaacttcacaccaaaagagctagagattcaacacgtaacactaaaaaactacacgccaactcatatacaaaatggtccacaaaacatctacaaaaaaaaacatggataaaaaagagtaatttgcgacataaatatctaaatttaacttccagttgcaaataaatacctacgttttatttttggcgctaataatacctaagtaacattttgggaactctgtaggtactcgaccattaaatattaagtcattatccacgtgtcattttcttcttggtatatttaatttaatttttttaaaaaacaaaaatttaataacttagaccaattagaaatggtcacgtggtaatttacttaacacttaacagttaggtacttataaatatttcaaacttatagcttaggtattattatcgccaaaaaacacacttgcaattttattttccactcattaataattgtagctagaaatgtatagtatattcaagttatttaatcctataataatcaatacaatcaataatataatcatcctgtaagtggtaaaattatcttacatcaagtacaatgacttaagttccatcattcgaaaaaacatgataatttttttttattttatttgtattaatttaagctttcaaattaatttaataatttgaatttctttttttttttcatcaagtacaatgacttaagttcaatcatttgaaaaaacataataatttttattattttatttatatttaatttaagctttcaaattaatttaataatttaaatttatttcttttttctaaataataattttttttttaagattaattactatggaacaattcttatattataaaattttaaagtttataattattgtggtggaaagttttaagtttttatttgttaatatatattgatggatgtattacataaagtgtaatagtgaacaataaaatatcacatgcaataataatagtaatcaaatgaaaaaatttgtcaaataaaaaattgaatattaaattttgtcatataaaaaaatgcataataaatagatgaaaagttttgcagtaaaaaatatttaaatgatctcgattaccctcgatctcattaaaattgaatactctatgataactttgaataattataagacggtataacatggcattaatatcatcaaaatataatagtttattgttgaaaaatttattggatgtgtaagtgcacataattacaatttatttattatgcaagtacatacaataaaacaaaagttaatatttctttatatatataattttttttcttcccttgggttagttattttttgttttatttatttt

SEQ ID NO: 31345 - DNA, 3878 bp, Cannabis sativa
tcttcttgaaaatggggttcttgtataatctcagcataatcactaaaattaggattaggattagaagaacaagaagaagttgaagaaaacaaagcaatctcagctcttgtcatagccaattcagtctcaacatgctgtatttgttgttgtaactgagaaataatcccgacacatccataaactcgattctctattctacatgtcgcctcgaaatgcatagtatctgctgcttcaccacgcagttctaccggtaatcgctacaagaaaaaaaaaaacttattatttttgtcattataagttaacaacaatgaaaccgaaaacttaatagttatagtaagtaccttgagcattttcccgacattgctggccccgaaaactttatgaacaaaagaaaatcgttgaggattgttggaaggaaaatatggagagaaaatgcaatctgaagggcaactctttctcaaatacttacaagcagcacaacgagtatgatgtgatgatgatgataatgaactcatatttataaacaaatctatgctaaaatataatatgttattgtagccaaaatctttttttgaaaaaaatctaatgaaagatttgagaatctacttggtttgatttgatttacaagatatagtttatatatagattataaacctcctaagtgtaagtctaacggctagtagtaaaaatggaatttgactaaaattgctctgtttaaaaaggaaactttagataatgaatgtaaatggaaaaataattagcaaaaaaacatgagatgtcatttttgtttcaaatgacagcaaataatcttaaaagggtttgaagttggaacacttgttttctttgtccaataatcatatttctaaataaataaaattttgaagggaaaaaaaaaaacaaagtcagagattaaagacaaaagactaataaaatttcatttggtcatatattgattggaaatcaaggaaatcaaaatagcaagtaaatataactttgcaactatgaacataaatattattttgtttgcaaactgattttgaaacaaaatatgtaaccccaataagtaaatcaattcaatttttaacatagttttgaacaatattttttaagtattaaactaaacaacttatctaacgggactaagttgggactattatatcttgcttaaagcctctaatgatacatacaatctaaattatggattttttttatgtcaatgtcataaatcttaccagagaaccaaatcaaggtgatttttttttatacttaaaatcttccatgtcaagcaatgaaaaaatggtttgaagaaaaataacactgcatttgtttgtaggagcaacaacaacaacaggggcaatgacagtaaatgttgcagtagtgcttggagctgcatctcattctcaacacacttgatttgcttatatatattatatatagatatattgatatatgtaaagggttcacggcagaaatggaaaccaactcaaaagaacacaatgcatttgttccttaaaatttgtattgtgaatatagaagtttatggatgactctttatggcacaaactatcatcaagcatagtaacaatcaaacatgagaaaaatgcccattaaaagaggtttattacaaatatatagcagatcatttcttcaacaaaaaggagaaagaactacttacaaaattttcaagggtatagaatttggccggccggagcataatcgtcaagctcgatcggtcactgccatcgctccataatcataattgtctgcatagttttgataatgtgatggttttttcagcaaataagacagctaatacaaaatttggttaataaggtttaaaatgcatttattaagctagaaacctatgttggcatagaaacaaaatcaaattgcatcaaagagtttgtatttgctgtaagatgctccaatgtatcatggataagattacaatgaggatgagttttatcttcaacagagaatacatgaactctgctgtttaactcaatccaactacaaccgggaccctttttcgcttcgattaaccttagtctcttccttactttcatcttctcctcccattttcctagaacagcataaatgttagacaagataatgtaagcgtataacggtttcggttctaagctaaacatcttctctgcgaccctctcgccgagtttcatgtccatccaaaaccaacaagcattaagcaaagctccccagataacaccatctggttcaataggcatctcttcaatgaactctgaggcttcttgtagatggccagaccgcccgagcaggtcaactacacaagcatagtgttctaaagttgggactagtccatagtctttcctcatggaatggtaaattctcatcccttctttggttaaaccagcataacggcaagcacacataacagctacaaaagtagcagcatttgggatgatttcggtctttaacatattctcaaactgcaacaatgcctcggagccaaggccgtgatgggcatacgcgttaataagagccgtccaagctgctacattgggtgatgagatgcagatgaacgatttctgagcgtctataaggtttccacatttcgagtacatatcgataagggatgtcccgacataaacattggattcaaatggggtcttgttcaactggccatgaagtgattgtccaagtagaagtgatccaagacatgaacaagcatgaaatagaacagagaatgttgatcttgtacaatcaaccgatgattttcgcatcgacagatatagtttcaaagcttcttcatgttgataattgtgaacaaaacctgacatcattgagttccaagtcacagtatcctttttacctttggtttgttcaaaaagattcaaagccttatcaatttctccattccttgaatacacagagatcatagtgtttgatgaaattatggttttctgcttcattttctcaaacaatctctttgattcctccactttaccaatcattgcataccctttaatcatcaaattacaagacactggatctttttctttcagcccatcaaaaatcatctttgcctctttgatcctattcatggatataagccctgccataagtgaattagaagcatttacattaggatttcttattccctcataaactattttggcacaagtgatagctgcaaaaccagaataaaactctatcaacgcgccaccaatcgagtgctcgaattcaaaaccatgtttaatgacaagcccatgaacagacttccctgtacttatcacacccaatctgccacaagctctgataacacaatcaagagtaaattcatttggcaccacaccatcatccctcattgatttaaacaactccaaagccttctcacacccattttcgctctttgcataccccgaaatcaaagcagtccaccccacaacgtctctctttggcattttcataaacacatccaaagcatctctcaacaaactacactgaacatatccaacaagcatcacactccaaactaattcgttcccaccacgaagctcttcgaaaactcgcttggcatcctcaatctgataacaactcagatagaaaaacaacaacgcgctccctacaagctcaaaactttcgaaacccgacttcaaaaccagacaatgaacctcttttccttcatccatcgaccctgatcgcccgcatacactaaggattgtcgaaaaagtggtctcattcaatctcgtattccctctttgcatcatggaaacaagagacaaagcctcaaagtatcttccccgcttcgagtatccagaaatcattgtgttccacgatacaaccgttctgttgggcattctatcaaacacatcccgggcaacatcaagtcggccatt

SEQ ID NO: 31346 - DNA, 2659 bp, Cannabis sativa
ctccccatcaaattccatagtcaaggttccctcgtgaacatcaatcttagttcttgtagttttcatgaatggtcttcccaacaaaatcggagtggagcatggagtggagtcatctttcatattaagaacatagaagtctactggaaataccaattaattgacttgaactaacacatcttcaacgacacctctaggataagcattcgacctatcaataagttgaataattatcccagtttcttcaagtggacctagattcaaagagttgtatatgaagaaagagatgaaatttatagaggctccaaaatccaacacacaccactcaatccttttattgccaatggtgcaaggaatagtgaaagtaccaggatccttacactttggaggaagcttcttttgtaataccgtagaaacattctcccccacactaattttttcattacccttcaacttgcgcttataagtgcatagttctttcaaaaacttggcatagcatggcacttatttaatagcatcaagaagattgatattcacctccaccttgcaaaatgtctcaagaatttccttgtcagcttcttcctttttggtcttctttagtctgcttgggaaaggtggtggtgtgaccaaagtatgctttggttgtgaatgattagttggatttggtgacacttcttcatcaactgatctatcaacatgtggctttggtggcactatacttggtgttgggatgataggtggatcatatgctttccacttctcaaagttactgcactagcattcttcttgggattcttctcaggttgggaaggaaacttattgaatagatgagcttgcaatcaattatacgatactgagagttggctcacttgattctctaaactttacaatgaggcttcagttgtgtgctagaaccttaaagtattagtagccaaggaattaaatagatcttcagtatagggtttggcattttagggtggagcagcttatggtgcttgtgtttgcctcgatacaaaattctgttgaggctgttgttgaaagttgaaaccaggttttgaaggtgtagattgtggagcattttgttgatttccatagcaaatatttggatgattttgccagctaggtgtataagtttatgagaagggttcatagtacaactaacttagttgaccaggaaaattatctacaacgttcacatccttagtctccccctcaaatagtgtggacaagtattaatagcatgcctcacagtgtgacaaattccacatggtctcacttgttggcctaaagcgattcgttgtaccacagaggttaattgagctaattgctaactaagttggttctcaatgggtttgctcacttcattaacctgtcgtgatgatggagtagggtctcagtgaatgtaaaactattatgaattggcaactatgtttgaaattaagcttctagatgttgcaagagtattatctaccactgcacctccactagttgcatcaatcatactcctatccaatggtaacaagccttcatagaagtattggataaggagatattcacttatttggtgatgagagaaactagcacataactacttgaaccgttcccaatattcatataatgattctcctataacctgcctgataccatagatttattttctaatccttccaactttagaggctggaaagtagaactccaacaatacaattgtaaaatccatgcttcaagcttccattgggcccttacacccacgtaatgatggcgcttatacacgagtacgtcactctgactgcttcgtggactgacaactaaccctacataccaatacgagtgttttcaacatgctttgtcctcactcacacgcttcctgggaaaacttcctaggaggtcactcatcctaaaattaccccaggttaagcacgcttaactgcggagttctttcatgatgggctatcagaaaataagatgcaccttattgacataggcagtaccaatcaatctatttaagccctcttcaactgtgtagtcccatatctacaaagtctcaggatcatgacacttaagcttccccagtcgatgtgggattgcacagctcctgatctttccccttgaagatcacaagactttgacggtcacaatcaccccccttttgggggtctgatgtcctcgtcaaccacacttctgactaggtcaaggctctgataccatttgtaatgtccctacttcaagcctccattgggcccttacacccacagaatgacggctcttatacacgagtacgtcactctggctgcttcctagactaacgactagccctacaaatcaacacgagtgtttccagcatgctttgtccttactcgcacgcttcttgggaaaactctccaagagatcacccatcttgaaattaccctaagtcaagcacgtttaattgtggagttctttcatgatgggctaccagaaaataagatgcaccttattgacataggtagtaccaatcaattcatttaagccctcttcaattgtgtagtcccatacctacaaaatctcaagatcatgatacttaagcttccctaggcgatgtggaattgcacagctcctgatctttccccttgaagatcacaagactttgacagtcataatcaccctcctttgggggtttgac

SEQ ID NO: 31347 - DNA, 1270 bp, Cannabis sativa
ttttttttttttttatgaaatactaatgggtagttattagttaatatttttttttaaagatgctcaatactatattaatgtggtacttaataattagttagtatttattttaataattagttagtatttatgaataatttttgtattattttttttaattttttaataaataatttttttttatatttattacgctcatattttaaatattaaatataaacataacacgtaaagacataacacgtaaatataaatttaaaaaatagaaaataaaaaactataagcttgagaaatgagttgtgctacaattaatgatggggagaagcggagtccatatgatgtggtcatggccatccctaatacttcataataatgagttattaattattattttttttatttatttagagattttttcccacttttattatgtaatacaatggcctcccttatgtgtatataaataaaattgtgaagccacttttatcattagttctcatccttcactcgtgggggctactgtaaatcaattgatgctttgtgaggagatcaaatgggatgtggatgtggtaaatgatttgtttgaggacagagataaagatctcattctaagcattccattaaatactatcagaatagaggatcaatggtattggcttcatgagaattcaggctgctattcggtcaaatctagttacaaatggctacaagagactaaagggcagtggtctgctgctatggaatcaagtttctggcgtgtcttttggaaaactaaagtcccaccgaaggtattgcactttgcttggaaagctgtatgtggctgtctccctactcgtgttcagcttcaaacaaaacatgtccctgttcagctgcattgcgtgttatgtaacagggaagaggagtccatcatgcatgtcctggtacaatgccagtttgctcgttcctgctggtctcgttctgcagtctctctcggtcaagttgcagctgcaacgtttggtgattggctccaggatgtcttgagtcgtggccatgcaagcatgtttgaggaagcgctaatgatttcttggtccatttggaaagcgcgaaacgacttgctttggaataaaaaggttcaagttgcagctgatgttgttctttctgcacgaacagtccttaaccaatggaataatgcacgctcaaaccgttttgagccgctgcctgcaatagttcatacactttgcaccagcgagcattggattgcaccggagttgaattgggttaaggtaaatgt

SEQ ID NO: 31348 - DNA, 2591 bp, Cannabis sativa
gacctagaaccgttaccagacttgaacctagacccggaaccatagccggaccagaacccagacctagacctgaacctggaaccagacttggatctcaacccagatctggactcggtgccgaccctggacccgaactcagaacaaaacatggaaccagactcgggacacagaaatggaactcaggcctaaatttgggattcgatcccaaacatagactcagacctagatagggatccggataagaacctgaacttggacccaaacccagaccgggattgaaacttaggaccaagatctagtctgagagcttgacccaaacctaaacctagacccacacctgggacccgaactcagacccgcacctgggacccgaactcggaccttgacccgaacctagatccagagatccagactgggatccatccagacatccagacctccagacctagacccaaacccagacctagactcggaccaaaagtcataccccgaccgaaacccaaaatagatcctgaaccaagacacagaattcgagtgtgggtcagtgtttcagtccaggtccgagtcccgatatagttttgggtctgggtccaagtccttgtcttggtcctgttcttgggtcccaatccgcttctggtttcagttgtagtttcaactcacggggtacgggtcgagtccaagcatctagtcccggatctcaagtcttgaggtgggtcttaggttcaggtttgggtctgggtcgggtcccaaatctcgatccaagttcaggtcccagtttggggcccaattcctgggtctgggtcccccatctatgttggggcctaggtcccaatccaggtctaagtttatgttccggttcaggttcaggtctcgggtctcgattcgagtccaggtcttggtttgggttcaggttcgagttcgggtcccagtactagtctgagtctgggttttgggtcccaggtccgagtttggttctttggtcctgggtctgatctcgatttttgggtttaggtttgggtccgggtcccggtcttggtttaggtcgcagtcttggtttatgtcccaggtcacaggtcccgttccaggtccaagtcctagtatggattttggtttgagtttgggtcctactacagtcccaggtctgggttcttgtcccagtgctggttagattctgtgtccggaattaggtctggatcaaggttttggtccgggtctaggtacggatctgggttcaggtccttgattcaaacactgactatgggtatggtcgaagcctcaggtccagattaggatctcggtcttggatccctatcttgttccagtttgggtcctgggtcctgagccgagtcttaagtttgggtttgggttcgggtttggtgttgggtcccggtagttaggttctaggtccaagggcaggttctgtgtcatgagtctggggtcaagtttcgggtctcggtcccgattctggggcctagtttcgggtccaagtcccccatctaggtcgagatccttggtttaggtctaggtctaggttcgggtttggggcccaagtcccccatctaggtcacggttcggttctcaagtcccaggtccgagtcttgggtccgaggtcccgggtcccagtcccaattctggttctagtcccaatccaggtttagggctcggtcctagtctcggtctgggtcccattcttgatctcggtctaggtccgattcccaggtttgagtttgagtcctgggttcaagtctgatttctagtatgagtccgggtcttggtctgggttggggtttcagtccgggtctgggtctaggtcagagtcttggtttgggcctggttctgggtccgggtttgggttctgatatgggtctaggttttggtccaggtcctgggtcacgagtcctgggttccaggttctaggtcgcaggtcctggcacatctctaggtccgggttcgggttttggtccgggtattgatccctagtctaagtctgggtccatgtttggttctgcgtctagatcttgttctaggttgaggtccaattcatgttccaaggtcctaatttcggctcttattctgattttgggtcccgggtacgagtttgtttttggatcctggtctagaaatggttccaggttggggtcttggtactattcgaaaatctagacaccgactacgggttaggtccaagtcgtgggtcgtgggtcaagatctggatcccaatcttgggtcccagtctcgttctgattcagatcttgggtccaggtccgtgtctatgtttgtgtttgtgttcgggtccgggtctgggaccgagcactactacaaattacactattcatgtcggtcaatgctactattcatagtgttgaccgacgtgaatagtgtccaaataattggacctgtctatttaaaaacgtcactaataatatactatttgcgttgtttgattaaatgatgataaaaaagaaacccacaaaacaaaataaaaatttaaaaacttgtttttcattttgcgtcagttggtaatagtcgactattgtgcttgcaaagttttaaaaatgacgtgaaatataattgtgagagatagaaaccga

SEQ ID NO: 31349 - DNA, 1829 bp, Cannabis sativa
aaaaggaaaactaagaaaaagatgaatgttgattacaattaatggcaataaataaaagatttggacatccacataattattaatatttacaacaataaacaaattatatatatttattatcataataaacatattagattaataacagcattgtaaacattaataatactaatcaaatgtttaataaatatataaacatattagattaataatttataaacattatcaataattaatttttcctaagtcttatataaataaacaatgaacatgcatatttttccttacaaaaaaaaaaaaaaaaagtaaaataaaataaacatacatattttgtttataaatttatatattaaagatattagattaataatttataaatattatcaataaaaaatataaacataatatttatatataatttcatatttggttatagtttcgtttcttaaaacaaaataaatataaatgttttattttaaaacttatttatgaatttttaataaacaaattatattaatttcattaaaatattatcataataaacatattagatcaataatagtattataaacattattaatagtcaaatatttaataaatatgtatatacattatttataaaacataaacaaaaaattttaaatatgttcgtatatatatatataattttgtattaaattttagtaaacatattattttagtaatatatcaaaatataaatattgacttatatattttttatatttagctttatgcgttttaaaaaaaataataattaaaaataatcaacatgttaaaatggtaaacatttatgtttatttttattatataatgtgaatatgatgattatttgtaaatatttataaaattgtatagaattgtgtaattatgtctatttgcacattttttgtaatataattaatttacttgtataaaattaaaaattgccctttagtgtatttctttttaaatattttattataattatggattataatctaatgtaggtgttaaaaattattttagctataggtaaatatagactagataatttttcttattatttttctttttaggaatttgatttattgtatgttgaaattttggcaagacaaaaatattataatggatgatagagtaaattaaaaaaaaaaaaaatacaaatttgctaatttttatgatactttagaacttatttcaaatttttaatatttttttttacttttatatcatgaaatatagcatataattttttaaaatttatttatttattcatttattaaggagcttaaaattttttatcgtcttaggtctctattttttatcacaatttttttcttcgtaattattattttatcaatacaaataagaattttcgtaacattgtgaatcacaattttgtatattaatatatatattttcaataaaaacaaggtatgagaaatttaaaaagagctaaatgaaaagactatagagaagcactactatgattaattgacatctgatgaatgcatgggaggagaccaaaaataaagcaagaaaagacttaaaaagatatatgtatatgagttgtcactaataaaactatacttcttgataaagatttagtacaattaatgaatgttggagaagataaaaccaaaatacatgtgaaataaaagaataaacctattagaaagaaatagataagaaaaaagtaaataattttctaaagatcatttcttttgtttaaaaaagaaaagtgtaataactataagaatatttttattttaagaaatatatttctatttaaggaaataaaataaataattgattttgtgataaatgaa

SEQ ID NO: 31350 - DNA, 2369 bp, Cannabis sativa
  modified_base (36)..(56): a, c, t, g, unknown or other
  modified_base (2344)..(2344): a, c, t, g, unknown or other
tttggatctctatccgaaataatggactttgggacnnnnnnnnnnnnnnnnnnnnntctaacatataactcagcatactactcaatggagaagtttgtctgaacaagtaagaagtgtgctaactttgtaaacctgtccacgataacgcacacagagtcgtactgtctcgtggttctaggaaatcctaccacgaagtccatggaaatatcttcccatttccactccgggatattcaatggctgtagcaaccctacagacctctgatgctcagctttcacttgttggcatgtaagacatttaacaacatactcaacaatatcattcttcatgcttggccaccaaaacatggccttcaggtcttgatacatctttgttgaccctggatgaactgagtaaggagtcgtattggactcattcatgatctctcttttaatgtcatcatccataggcacacaaacacaattcataaatcgtggcattcctgcattatccactgtaaagtcaccagtcttcccagtcgaaaccctatctcaggattttgctaattcgggatcttgcaattgtgcttctctaattcgcttcaaaagagtagattgtagggtaatattagctaattgtcccacaaccaactcaattttagctcgaatcatttcatttgctaactactgggagatttgcttcactgtatttatatgactctggccttttttactcaaggcatcgacaacaatgttggccttcccagggtgataaaggatctaacaatcataatccttcaccaactctagccagcgtctctgtctcatgtttaggtccctctaggtaaagaagtatttcagactgttatgattagtatatatctcatatttcttgccatataagtaatgctgccaaatctttagtgcaaatactactactgctagttctaagtcgtgagtgggatacctctgctcgtactcctttaactgtcgaaaagcattggctattacctttccagcttggataagaacacagcccagaccctgtttcgaggcatcacaataaacaatgaacttttccttatcagaaggaagagttaacactgtagcagtaatcaagtgctactttaactctagaaaagttttctcacaccgattggtccaaacaaacttcaaattcttttgagtcagctctgttaagggtacaaaaatctttgagaaaccctcaacgaaccgacgataatacccagctaagcccagaaaacttctaacttcagtagctaattttggtgttagccaatcccgaacaacttcaatcttggcctaatcaaccatgatcccatctttatctactatgtgctctaagaaagagacacgagataactagaattcacactttttgaatttagcatacagcttgtggcctcgtaaccgttgcaatactaatctgagatgcaactcatgtccctcttctgattcagaataaaccaaaatgtcatcgatcacgatcacgcatctatccaagtaatccttgaacactcgattcataagatccataatgtccatacagagtacgaaacgcagtcttcagaacatcttcctctcgaattctcagctgatgatagcctgagtgaagatcgatcttggagaaaatagtcatccccttcaattgatcaaaaagatcattaattcaaggtaaaggatacttatttttgatggtaagcttattcaactctcggtaatcaatacacattcgcagtgacccatctttcttcatcacaaataataccagagcaccccaaggagagtaactcggtctaatgaaacccaggttcaataactcttgcaattgtatcttcaattctttcaattccgttggagccatttgatatggtgcttttgatattggttctgctcctggaactaactcaattacaaattcaatctcttgggtaggtggaaatccccgtaaatcttctagaaaggcgtcaaggaactcacacatcaattttgtgttctcagatccagatgtcactggttggctggtatccattgtagtgactatgaatcttagacaacctctgctcatcagatcttttgctttcaggagagttattcttagtatgcgtgtcccctgaactttacccacaaatgctatcggattagcactatcgggctcaaacacaccatcttccacttgcagtcgattgttgccccatacttagataaaaaatccattcccaggattatatcaaaatcagatagttacagctcgattagattggcggtttattcaaaatcgtcaatccaaaatgacaaagaccgaatccacctagtggatactataagtgttgggttttatgccntaaataaaactctgtttcaatgtaa

SEQ ID NO: 31351 - DNA, 2503 bp, Cannabis sativa
  modified_base (2182)..(2186): a, c, t, g, unknown or other
gggcacaaaactcaacagacgacacaccccatccttgaatggcgtagaggacgaacagggcggataagtatttgatgcccttgggtgtgaactaggtcagacaaaggtggaagtagtccacaaccctcttaaagtacgagtgcaaaggcagcattgctccttgctttgcgtgggcacctgaccaggcacggtaccctgccttcggacttgttgcccagtgatttagagaatggagataacactcaagtccgcccaagtaccctgccttctccaaatcttttaagtggccctcagttatgatggacggaggacacacccatctagcccctaaggcactttgttttttgtgggggaccgcctcggtaaactcttgagtgacagtatctacccccttgaccaagatgtcacccagctcagacactggcttcccggactcattataccctccaaaatgtagaggccgagccactccctcttcctcagcctcagaagggctatcaggacggacgccacctggtcctctatctcttggagctcaacgtccccctcataatcttcctcctctacagtgggcagatcctggtcggcacttggcagtgtggcaagctgggccacgtgaaggttagtcgcgttaattttctgcatcgtctatttggtgcagacctccctaagtatggaaaactactcctcacccaccaacaacaatacaaccatgtacattgacccatacgagtcatcttaggtatatgaaagcgaatgttggtattcctccttaaaatcaaaatccaagcgttggcaatatcttctattccaaattgcatcctcctagggacactcaaacaaaagctctccgaaggaacctcttggtcaaaaccaaattgacgagcaaatctgttgggataataaggttccatgtatatatcattgataactctaacgggtaacaaagcagagcgcatcgacattaacaattcaaaatttttgtcagacagatcttcattatccaaacagtcatgattttcctctgaagggaaataatatggtcgatgtataacataatcttccccccttaaaatgtgtcgagccttattcaaagtttggttcctagctggaattccagcatacttactcaaatgaggtaaatcgaaaacgagatcccaaccacgataaagatcatgaaaatgctcagctaaccacccaacacataatgcataggcaggaaacactcacctcgctcttgacaatgtgatgcagaattatataaagcacggtatatatagcccaaaacaaaaggtgcaagtgaaagttcgacctcatgtgccattatcgaagccatttaaaaagattcaggcctaatgttctgacttggggcaggaaaaatgaaacagcttagccataaagacaagaatgttgcaagaccactctcctttgttacattcaagggaatagaacgcagatcataaccttcaatagtattctgctggctaactttattttgagtcttagcggtcggattcatctttactccttcaaagacaattagacccatgtaaaagaattcaatccattacttccaggagacatccatacccttagaacggctatatacacccctgctctttaagtaatcacaaatgtgagcatggatccttaaaagctcttcagtagtagaataacatggatcacagctcaccagtttctcattaagagggataaattcttcataaggaactcctaaaatgggcaaaccaccaataaccttcaagtcatacaaagaaatactcatttcaccactactatgatggaatgtgttggacagaggaccccaaagttctgaaaaaggtcgccaaacatgaaaaacccataaaaaagggtacctagatacagaaatagcaccatatatcccagctttacttaagacaccttggtgttgaagtaacacttgatcagtccattcaatgagacacctcataaaaccagctcacccccaaaagagaaaatcgttatgcactttcttatcctttaagtaacggtaaagacatggaaagaaatccttgctcacttggtaagtcaaattcccatcctctttattatcaacatctcctaagaaatttgctcgaaaaaatggcaccataacctctgaaatggtgaacaatgttatcatcatcagaagaatggtatnnnnngtctcctgaactgacatcctcgatcttaaaaagagaaataggatcttggtggttattagatgcttgaacctctattaatgacatagagcgatgataatgcagtccaatgttgacttctttcccaaattcatcaggagctctttgagagcctagagccccgaacgtagacatgctgcaaacaaaatcagtatgttaaaaaaataataataaataaaaaacttctcaagcaagatacgtttacataaatgacacgcacttgcttgagggggcatctattgaatgaaaaaaaaatcaattattattataataataattat

SEQ ID NO: 31352 - DNA, 1665 bp, Cannabis sativa
catgtagtagaatgattgtgataaatttgtaataacaatctttccttgaatctagaatttcgcaacctaaattagattatatataatagttaggaatatttttttagataaaattaatttatgtaaagtaataaaattgagtttaccttaaatatttttgaaaattaaaatgcaaaaatttacctctgttagttgtaatgatgtcattaaatattgaatattttttatccttacaatttctctaattccaagagataatgaagaggcagatggatatgtacaactttttacaattatattttttattttgaatttatttttctctgccttaagaaatattataataatatattattataacgaatgaatgattaaattattatctataaaatctattgattatgacgttagtcatttttgtcgttgacaaagttaagcctttatataaaattaaaaaaaggaataaaattattatctataaaatcctattggcatatatatatatatatcttttatatagtggattgtagtaattacctttgaatggttttacagatatatttgttgcaagtatgattggtttttcatagatcatgtctgatactttttggactttatcattgacaaagcgaccccacatggttaaacaaattggcttgaaactaaacattataaatatttgttaagtttatataatataatttaattaagaaaatttaatttattttaataggaattgaaatttggtttagttaagtttgtttttacctcttatcaacaaaatatatttattggattctttttattccataagttgttacatctttcggttgcttgacttgtattgcgacgactaatatatctgtattttgattgttaattttgtttagatttaataagaaatttacatagaaagaaaatatattaaagtatattaatatatatttaccaatttcttctttagaagatatgtaggggtctatgtcattaaaattgactattttgtacaaggttgttggtttttgtcttcattttttgtcgattcttctaattttgttgtacaggtgattatctattgatatggataatctttgtatttaaaatagtcatgtgctttaataacacgtgcattactgatgtaataacattgatacatatttaatgtttctttcaaagtgtcgatatcaaattcaaaaattgtagcttctacttttattttcttgtagtaaagtaagtatacaattttaattaaatttaagaaataaaataaataatattttatgtttaattgaatattaaataaatcgatttacctttgtatcaataagagttaacttttgatattttttacgcttgtatggacttgtctgtaccaatgacttataactaactatcatctttactttccagttacttattgttggatcgatattgttaattatggtctccattttgtttaattctatcatttttaagatttactaacttaaaagctataatgtcaccaactgaaaaatttaataatagtataatttataaaatttattatatattatataatatacataaaaataaataagataaactatatataataataatacttattttattataacaaaatatatttattctagtgcttttaaaataatatattaattaatg

SEQ ID NO: 31353 - DNA, 6303 bp, Cannabis sativa
aaactcataaataagacatagtcttactcagaattctaatcgattaattaaaataattaattaattctacaagacaatattatctcaagtagtgtggaaaccatatgcctacataattaagctctcaacaagtagttttagaatttatcgaataaattccctatcttattaattcctcctgactcctctatagatttggaattgcactcttgattacatagaacgctctatactaagtatagatacgctataaattatccattgtttcaatctaaataatcaatgatcctctaaagataatatacatcgagtaaggagaattttatagttttaccctccagtatattttatccttaaaatacttagctacttgtaaatgatattccagtaaactaatataattattgaaatgagtactccaccatttaaactcgtttagccaaagttctaaggaaactatcgtttcacttctatgtgattatagaagttatagattccatatttatgactagtgttcctactcaattgcactattgtgttcccaagatgaaaatgctggaccaatctaattggttaactttaacgaacaagttaaaaaacacattgttatacatgacatgtccacatggtcaagactgaggacatgttaaatataatttgttaataataggacaaaatcatcttacacggcatgtcaactgtcaagagttctaaagaaatcgagaaaaactaccaaacaataagcaaaaggatttaagcaggccattaagaccttgactggccatgtctggctggccaaaagaagcctataggttggccagggtaagtttgtaggccgacaagccttgagaataagctgactagccaaaaagtgactgtcagaccaaagaggcctgtttgaccaaggaggcctgacctttgtaaggaaagttgtacaaagaaaataaaaaagcgggcaggcacatagaaatattggtagctatacaaagaagataaaaaagctggcacgcacataaaaatattggtagctgtacaaagaagataaaaaagctggcaggcacatagaaatattggtaggcacatagaaaggctgatagacacatagaaaggctgacatacacataaaaagactgagaggcacatagaaaggctggcaggcacataccgaggctggtaagaacatacctagctagccataagaggtcattggtcagccatgccctaaaaaatagggttggttggccaacatgtttgcacaactctaaacagctgatgtagaaagtattgtacatttgtaccccacttttgttttgcaagaacaatatgcttttaattgaatttccaaaacaaattacgcataaatgttttccgatgaaaaagaaaagatgattacttagaaacgttaaatatgatctctaccttcatgcaaaaatgtaaatagcattgattattgttgcttaacaattatgtttattatgagctaatgtacatgatttcaatgaaattgccttatgttcactatgcaaatacattcaatatatattagtaaataaaacaaaccttctacagaattttatcgtatactactatatattcaaaactttctggcgtgggggaaggaatgaatgcattagcagagaatatctgaactctagaagtcctttgcttttcttctgagttcattcaactccttctcaatatccgagtcgcgtaaaggaagcacggtgtttatggggacggcagttctcccaggtggaagctccactttctgaagaatgaaatgaataaacctcattaagttatctcaacagtccaaactccaaaccatcattgtttctctcattttcaacaactgaccatgacactatgatgtgattcacaagagaaagaacagaacactttctcttcaggatcaaattctcaaagattatttcaagtatcactgaaaggacactggcattggacagaacaaaacttggaaattaatgaatggagagtggtaagcaattaattacctttgagctcccagagagttccttttttaagtcttcaagatcaccatcaacagaagagccctctagcaaacggaactgtatataggtaaaaagtaatatccaagtaaacatcagactttagcgtattccatataaatagcagtcctaaaggtattaatttggtgtaatgaaagatcttgataaatttgtctatcttttccagctctatttcttaggggtaatacatacatacatacatatatataatcattcataacagagaggcttattgatggttgttacagtgaggtgattcttagtttagttgttcctgccctcaaacataaggatttttttacctttccctcaagatcatcggttgctaattggctataagcttcagcttgagactccatggtcagaactgcgaagggtagaaacaagatcaatttagctactctttaaatatgtcgtggaaacagaaggacaaaatcaaagtacttaaacactaccaaactatataaccatgagacgtgtcatattttataggaaaataataaagagatcgaaacaaacctttttcttccatcttgttgaaagcatcaagagcgctacttgtgtccacatcacccaacaattcactcactttagttgatgtcctataaggaatatactggattagtataaaattgaactgctggctacaccaaaggggaaaaaaatattaacagaatgaggagctagaaacaaactttgcagactgagctcgagccttgagtacatctttcttcgaccttgcctcctgtatcttgctctctaaaagctgttgaaagaaaatcttaaatgagaatcaaccatacacacaacatttcaagcactcagctcttccctattggcataggggtaaaaaccttaactagatgtatcaaaatgttttccccttcagcgcatcatctaaaactaaaaccaattataccattttaaccatctatgccttttctttttgcctcaataattcaagccattatgttcagatttggccagccagaaacacacattacaaaaataaaatcctggtactgacccttgtgttagagacgagattatcaacaacacttttctgctgatccagctgagtcttcaaagtattagcattgtcctgcatagaaacaaacaagcaaaagaaggctaaatcaaaacatcattcaaatgtaccaaaaaccaaattatacctattgttctatcatcgaaaaattcatacagcataagatttccgacgcttaagagcttcccgggcaagatcctcatctccttttccaagagccagttgtgcccgtctgtacctattatcagagaaagctttaagagaaaataggcgtataacatttacactactgagcaataaacagatcactacagaaaataaataaataaataaataaaaataccaatcttcagaggcttgctgggcagatttatatttgttctctaactgcttttgagatgccaaaaccttcataaattgaaaacaattgaggaattctcttagaaaatatacttgcattgcaccactgtgaaaacaacacaaattaatgtgataaacgtacttgtgcagtagcttgacgcatctttattaaatcattgttcatatcagtaacagcttggtccaaaatcttctcagggtcttcgaacgagcttatgatcgcattagcatatgactacatttgccagaaaattaatcacacaaactcaatatggcaaattgacatcaattatatctaaatatgtgtatgtatcttctttatctttgaattattaccttgataactctagcaaatcgactaaagagattcatctgagaaccaagagcaccacccccaccatgacaattacgcctaaatctagtcgagtgagctatacgtagcctagggacttttaatgcctcaactgcaataaaatggagactattacaatgttcaaaaaaaaaaaaatggagactattacagagaaaaacgaaaacccagctgctattttctcaaaaaacaaggcaaggcggtggtactcgtatcaatatcaaaattgaaactttcgagaaacccagaaaggaaataggaaaaagatagtaaataagaagtattaccaccataaccgagaaacaaagatttgcagggtggcagtccttgagaagaagaagaagaagaagaaggccttagtgaaagtatgcttgagcttacaaccggatgcactgtcgtactcgtagccattttaggaagacggagcaagaatgatccactttccagattctctttaatcaacccattcctctttcttatagcttcatttcattttaatctttttaccagatttttcctttttatttttctttctttacacattttgtgcaaatttatattcaattattattattattattttgtgaaaagaaagtcttttttttttttttttagaaagtcttttagtataactttttttggacatataaattttttgaatcttctgaatagtacttccaataaaaataaggttcgtagtttagtataagaaaaaatagtagtgaaacaaaatatttttgtatcgtaatctatttattttttttggaaaatttataaatgatttaaataattacaatataccaaatcattaaaaaaaattaaaaacctcctatatataccaaaacgacgaataatagtcaactttttataatttattaaatataaattaatttgttaaaataataaaaaaagtaatagttcttttattaaaataatattaaaaaaaattagcaaaaaaatatgaagttccctaatccctaagaggcccctatccatatagagagctcatttttcattttttcatagttagagctcatttttttttcttagttggagatgctatgagtatgagagaatcaaagttgattatttttattacaaaatctttcgtgcccctcatactaggttgattagttaaagcacaaaatggaagcaattgagagggctaacttgtaataaagtaaaggaattatgagttttcaaactcttcattttcctttctctctctcgcagccctttcacagtatgaacaaagtttcttctccattcccagtgagttcacacttcctaacatctcgtttccacatggtgaaacccttacccagctccagatcccacgatcatggtggctccgattcgtcctcaaccgaatcccaaggcagctcgtcgcttccgagccgcgtcgacgtcatctccctgatacagcccaaccaccctagtcgaatcagcaataactccagccacctccccaaattgcaaatccgtacagatataaatgaagctcttacaagtattgaattcctcttccaaaaatccctattcactgtcaaatcgcctcaggaaaactgggattttattgataaatttaggtatttcttcggatatcccattaaattgttgtctgatcaatgtactttcaaagttatgtgttgtaatgggaactctcttaaatcaatatatagtccgattgttattctctttgtcaaatgggatttgaatatctcattaactgctatctgtagcaattgtgttctgcatgatgttcttttccaaccctttgtgcagctaccctattccttattaaatgcaaaggatatgactgatactgacttagcttgccttagttatgtgagggttacgctatttaagggcaatttccttcaaaagccactcatcctcgtttcagccttttatagtctttgttccttacagagacatatacgaccctctttccatttatatgttatatttcctactctccctagctttgttaaaaatccacactctctaatcacccactcacaacacagttgcacacacaagaacacatcggttatagtcatctttaactcatatcctctgctaagttattttgtgtcctactccctgctgtgttttaccctccatacacctttggttacagttaaaatacttcactgcttcttctctcttttagcttacagccatgtacacttactcttgttgtgcttcaccctccatatacatttggttatagttaaaatccttcactgtttcttctctcttttagcttacagccgcatacacttagtcttatcaatggatgatttaaccaactcattatctgctgctctcaatctcacagaaactgaatgtaccatccaaactctccatgatcctactccttcaaaccttactaaaaccgagacccaacacactcccttgtaccttgttgccaaagttctcacggttaagtc

SEQ ID NO: 31354 - DNA, 1821 bp, Cannabis sativa
tagagaaattattgagaatactcttactttaatttatttatcatgtatatcaccaatttgttaaaaatcatatttgatattataaattcttatttgtataaaagaattcttaacattgttatcaaggatgattcatataatgccactatcctcattgacaaaaagcagcaatagtgcaatttatcgagactcatatttgcattaatttttatttagttatgttttaatgtgtaaaatcgagagatggctatgcttggaagctgctttgagaatcgagatctattgagtaattcatcgtgttaaaacatttatgaatacttaagtaataaatttataagagactatttatgtataaaaaaatgaatagttaactcattgtttaatttattttatgtacaaaataaatttaatagaaaagatagtgatgaataaaatgagatccagtaatgactacactacggtgataacattaattttgaatataacgacgactacaaatgaaatacaatgataacaataattttgaaatcatatgatgagttttctataaatctatcaattgtgtttttaaatctgtattttgtatgaaaattcataaatctctaatatttttttttattataacatttaaagatatctctttgtttgctttctttttctaataagagatttttgattaaaagaaattagtaaaataattactcttattattaaaaaaaattacattaaaaatattaaaatttgaaatttgatataaattgataatttactgatgactaaacaaaatactaccgtataagtactatttgtttcctagttagtaaataaataaataaaaataaaatttaatagcactctattgtagatgctccacatggtttcaattcaaagggttaatttagtaaataaaatcacaaaaagaggtaaatctgtgtaatattgttgattgtgtttattagatgctaaaaaaggtatttctttctgtatcccaaagttcacatagtccagtccaagtatctagacaaagactagagaagaatatctcaatcataactaaggtacaaaaatatgatgcataaagtaagtaacctgattactgcaccttcttcattataatcgtgcatttaagctattatggctatgttgatcttcactttcctccactttagaggttgagctttcattcttagcatgaaaacaaaggaaagacaatgattgtagccatgaaactaatgcagacttccgtgtaacatcgtcggattctgcaactagtgaatataactcatttagaaccatcacctgaccatcttttggtagctgtacaatcagttgtgccaacaacttcatcaactctggtagcacctgcgcaaataagtaaatacaattatcgaaattcgaacatgaaaatagatgtctatgtgtcttttcaactactgtttagtcaatatctcaattcaatgtaaagatcctaatagtatgaatagtttgatgcaatcagttctttatgcaaattgtaagcaaaatgacaagagagatcaaaccagtttccacaatggggatttaaaacagaaagcacagcagaacttctatttcccttctggaaattcattatatgaaggtaaattaaaattgagcttgcctgtatatcaaccatggaaataagccgtaagagcaaatccataatttttttacaaggttctgattccccttgccagttctgccatatatcagtctgctgggagaagtcttctctgcatagcctatctgttttttcaacgagacaatggatacagtaaaaaatggctggaattccagcaggaa

SEQ ID NO: 31355 - DNA, 2818 bp, Cannabis sativa
accagcacatttacgcgctgggaaaagtcttttttgccagcgcttttcattttatgctggaaaaagttctaataccaacattgatttgccaaccccctttcgaaaaacatcatgggtaaattctattttaccagcgcaataccaacttttgccaacacaaaaatgtgctagcaaaagtgacatttcttatagccttgagcttcatataaagcaattaaagcctttttctcttgtactccaacatcctcgaaactttccttattaagaatccttaaagcaaatgtaactctgcaaagtttagaatagattttatacattctagtaccttgaatcttattcacgaaatttcttgacagtaaaagaagttggaagagtcggagatttttctttatccttgtttttcatttttcttggcgccttgggttgtttcaaggacacttctgcatttgcagcaacttgtttccttccctttttcactggaagagtgaaaatgttaagtgcttctttgaaatccatctcatggtccatatctgcaaaggaaaaaggcgcaagtaagacaaattgacaagaaaagcaaggatacaattatgaagataaactcccacctaaactacacttaggaaaattatatgaggaagaattggcttgagtataaaaaaactccccagaaccagtaattttctaaagatataaggtgttaagtggagatagatcccaattttacagcttctgcaacttatagatgagagcaaccctaattttgttgttgaagtggggtctctcttctttgatgatactgaaaagcttcttcatgatccaagtgcaactctctaaggagccaaagcttccacctccttttctgttcctttttattatcagagttcttattatttttcatttatttattttctatttgttctgttattggtaactttgaatagttgatgccatatcacatgtttgagagtagcagctctaagtaaatacatataggagtcgtttggtacgcaggtttcattacatgggaatagccttcacattacttggagagtgatgaagggaatcataaatataggaaagtaacattacagtgtttggttgtacacagaaatattatgatgatgcctaggaataagaagattactttgcttggttggaatggaatgtgattgcttttttttttttacaacaataactgattttttgttttaaaaaaaaaaatacgaaaaattcaatactttttttcttttttatttatagatccaaacgtattaaaacaaaacaaaacactatgtggtgatgaatgtagtttgtttgattcttgagaaaatgtagaattcagagaaggaaaagtgcctagatttggaatatgcaacacgattaaagcgggacccaaaaaagttgaattaacaattcaacttttttcacgtcatttgacttttatattattgaagggttgagttttccaggaaaatgaaactctaatgtttgaagaggtggacattacctccgtataaagtcaaagagaacccctagtaaaatgaactctctaactaaaaaaattaaaaatgcaataccaaatcacaggttagactttaaatccccattcctaagtaaagaagacagtataccaaacaaccctattgaaccgtctagccattaacaaagaaactgagaaccaaagaaagggaaaggaagagaaagaaaacagaggaaagagatggagaagaaaaagtatctcaatgcaatatgaaagagaagagtacaacttatatacaaccaacataaacgaaaataacaactaacatgacagctaagattggtaacaaccagctaacaaactaagatagttaataactaacaaccatatttctaacagacacactaacagactgccttaacacctccccttaaactcataattggatgattcaattttgagttgaaatcagtgaatctttggcttgatatagctttggttagcccatttgcaagttggtcataagctgcaacatgtttgatttgcaccattttctttagaaccttttcacgaacaaagtacaaatcaagctctatgtgtttcgttcgagtgtgcaaaaccgggttctgtgtgagcattattgtactcagattatcacaccatattgtaggagcttgaggaagttcaatatgaagttcaaagaacaaataatgcagccaagttaactctgttgtgacatttacaacactgcaatactcggcttctgtgcttgaccgagatattatctgctgttttttgcttttccaggcaatgaggtttgatccaaggaagattgcaaagccaaaagtcgactttctatcatctggatttgatgcccaatcgacatcacagaaggcaaccaagtcataagaaactggttttgtgagatgaaggccatagttcattgtaccactaatgtacctcagtattctcttaacaacttgccaatgagtagttatagggttttgcatgaactgacaaaccttgttcacactaaatgataactcaggccgagtgatagttaggtacagcaaagcaccaacaatagaacgatacatttgaacatctacaaagggttccccttggtgagcttacaagcgaagactactaaccattggagcgggagagggtttacatcccatcatctgagcccttataagtagatcccttgcatactttgcttgacaaagatgcattccagtactagtgtacctcaatgccaagaaaataggagagaacccctaaatccttaagagaaaattacttattgaggtttgaaatcaatgttgtcacagcagt

SEQ ID NO: 31356 - DNA, 1251 bp, Cannabis sativa
acctgcaattgaaccttgcatcaaaattttccaatcaaaagatataagtacgaaattaaaaactaataataataataagaagaagaaaccttaattcccaaaatttaaaaagataatagccaatatctcttatctatataataaatgtctatctaactggcttaacagactaattttaaaaattatgttagttttcacataaacatgtcaaatactaaccacaatgctgaagagaggcaaatgaataaaccacaattgttcacagcttcactagacaggttatagcttttcaatgaagcattgttcattttggttcaaaacttgtacaggttattaattggtaactattcaatgaagcattgccaattttgcttctccttttaaattaccggataaaatttgaaacaactacaaagtacctctccaacgaaaaacgcagcattgttccaggtaacttaattgcgactgagtagttaaaataattacaaatcaaattgcctagaaagtagaaacaccattaatcagattttatttggagataagtttctcaatgtcaccaccaaaatcagaaaattatgaaagtttcttcggctctagccgccctaacgattcaaatggaaaaagatttgagagcgcatgattattaacacatattcatatcataaatcttagaactaaacatattataaactgacaaccagcaccttcttgtttatgcgagaggagtatgagtgttaagccaaagaagtccgaggattgctactgcctaattttgatatagatttgatggtgaggctggtcagatctgggttcgttggtgaggttcgtcgtggactggttttggggttggagtcgacagtagtaactggtgagggagatgtcaacaacagatttggttgataggctcgacagcaggagggagagcctacaatttcagatggtgctgcaatcaagaaatgtaatcatggccgtcgaagaaggtaatatcaggcaaaattaattaatttctgtaagctattgctttgcaggtgattggtaacatttttatcacaaaatattctttaaaatcatgttttacaaaattatttgtacttttttattttttaattaaaaattaaaaaaaatatttttacaattttaaataattttttatcttaattaatattttaaagggaaatttacatagtatactaactttttgttatttttttacaaaaatactgtcaggcggcattttttacttttttactg

SEQ ID NO: 31357 - DNA, 1891 bp, Cannabis sativa
ttaacaaaacagatggtccaattggtaacttttgtaaaatacagggtcgaaaatggtatttacccataaaaaaataactaaaaaataaaaaatgatgaaaaccacttaaaaataattaaaaaaaaaaacaaaaaaacagcaaaacaaatgcacatatatacaacaaaaatattgtctagaataaactgaaaatatacacgataaataatacacataaaataaacaacaactgtacaaaacacacacataaaaataacaaaataactataaaacaactatatagagcacctaaacaacaacatgaaaataactataaaataacaaaaagacagctataaataaatagaaaaatagaaaaataatatgacatcatgacatcatgacatcaattttgttaaaatatgcaaatcattcataaatcaactttgaatatactacaaaataccaaaaaaaaaatatactactttattaattacgtaaaagataaaaaaaaaaatatatatatatatatatataggaggtgtgctcttaatttttttgtaagagagataaagagtgttaaaaagaatatgagaaaaatgataaaagtataaaaatcatattatagtgaaagaaattaattaagattttttttaaaaaaaatataattaatcaacaaaaatagtctgaaatagttagggcaggaatagtaaggaaatgaataaaaaagaaaaaaaaaatagaataagtgtttgtgtttttttaaaaaatataataaaataaaatttgtgaaaaagtgtaaaaatattaaaaaaaaaacgagatataaaattataaatttattatatatatttatatggatatatacaaagataaaaaaaaaaaaaaaaaagaagttaatttgaaaaaagaaaaaagagagttggaaaaaaaaatgaaaaagaacaatagagaaagagaaaagaaagaaaaaaaatgtgactaaaaatatataaagaagagaataaaaaaaagttttttttgaaactttaataaataaaaaatattaaaagaagaaaaaaattaggtaaaaaaagtataaatgtaaaagttttcttgtcaaaatataaatgtaaagtttagaaaaaatttaattgtgtaaacataaagtaatacaaaatagactatttcaacactaacgctaaatttgtttatatttcaagtttttaattattttattatgttttaattatactaacacaaatattatatgtatttttttaaaaaagaaatatttctccaaccaaagaggaggctgctcccgaaaataaataaaacattacactaatacgaatattatatgttttctaaaaatatcaagaatgaataaacattctaaattataaaagtatagtctttttccttataatttttcatagtccaaaaaattttaatctatttttagcgagaaaatttcattatatacccactttattttatttgttttaatttttacttttatttttatattttttaagatacacctaattttatagataatgtttctattatacccttaggtgaatgtaaattatgtgctaaacttaagtgaagggtgaagatatattgaacaactcactcataaaagtagttactttttaatgaaatataatatgatagtatttttgattaattgatacaaaaaaagatattcttcaacttatctcgtttttaataatataagaaaatatttttttaaaaaaaatgagtgagaaaatgaatattgaataattaatagtataatttattatttttgttaaaattataattaaaaaaattaatcataattatatatgggaaatttgaaaaaatatcaatcaaataccttaatattttatccctaaactaatacatatcaccattgaaagcatat

SEQ ID NO: 31358 - DNA, 1919 bp, Cannabis sativa
  modified_base (751)..(755): a, c, t, g, unknown or other
  modified_base (1106)..(1108): a, c, t, g, unknown or other
tgtatcagtacatccctttgaaggaagtacattgtagaattaccccataatatatatagggagctaatacaattggtattgtaatttttacttatcaataggaatagtaatttgtagcatttatttaatcaaatggtttaaattaatctttgaaagctacatcataattaatatatttttttatttataattaatcttaaatattattgattacaaattcaactaacaaactccaaacctataatttttttttacttatttatcttatgactatttataatttttaattaattatttttttaatttgaaattttttatatttttaattaattttattttctacttaacacaataattgtaactagaaaagtacaaaatattcgagttatttaatcctacaataatcaatacaactaataatataacaatggtgtaagtggtaaaattgttgtatatcaagtacaatgacatgagttcaatcctttcaaaatttatgattttttttaatttaagattttaaattaatttaataatttgaatttctttaactttttttgtctaaacaatagttcattttttttttaatatttactaatacggaacaattcgtacactataaaaattttaaagtttgtaattattgtggtggaaagtcttaaacttttatttgttaatatatattgatggttgtattacataaaatatactagtgaacaataaaataacagatacaataataataataataatnnnnnaataaaaagtttgtcaaataaaaattgaataataaattttgtctaataaaaaaaatacattataaatagatgaaaaaatttgtactaaaaaaatatctgaacgattttgatttactgttgatctcatccaaattttatggtttatgacaactttaattataaggtgcttcaaacgtactatagatgatcgaattggtaagacataatttttttattatttattattaatttaacttttaaattaatttaataatttaaaatttttgttttaaacaataatgtatggaatatactataaaaattttaaggttgcaattataatagtgaacaataaaataatacatgcattannnaataatattcaaatgaaaagttattactctttgtcaaagaaaattgtgcataataaatagataaaaagttttgcactaaaaaaaatttaaatgatctcaattgccgttgatctcattcaaattagatagtatatgataactttgaataactatgagatttttcagatgtatagaatgatcgaattgctacccttatattttaagatcaacaattgcacaatataattgttatcccaaattttaggttgtataacatatagcaagacaggtcatcataaaattatacatcatcgatacattaagattgtacagagaagtaaactattttaaatttttatgatagtatattatttattattattgaaaactcttatacacattgtttttttaaattttataatttttgtatacaatataatataacaattacacaatataatcgttatcccaaattttggtcttgatgacgtgcgaaccaaattgtaactgttattcacgtttttggtattgaacacgtggactccaagtcagcaccgcaaacctatcagtgggaccctcagcaaaggagaagtgggccaatcccacctggatatgtccttccatgaaaatatattggttccgcattcgtaaagtcttccaccttcagtaatttgtacccggaagacatgtccggtaccacaagactggagagataaaaccgtgcgttcccagaaggcccttctgagtttcctttatattccaatacacaaataaggaaactacaattgttagatcacaacagagtatcgtatcaagattaaagggaaaactt

SEQ ID NO: 31359 - DNA, 1237 bp, Cannabis sativa
gaaaaaaattgttatattaatttttaaggtggaataataaaacttgtattagattttcatagaaaaaggtatgtgaacaacgcgaactcacttatgatgtgctggaagttatattttcaaatttgacagttatggactatggtggatgtagaattaaattaagatatgctattatagtattatgggttcatttaaaggctacaatataaatgaacagcttttacggtgagttatgttcaaaacaaatgtgggatttttatttgataccattttaacaaatagattttattttaaattaatttttaggtgaatataaataaaaaaaaaatagagtaatctattagtgttcattaaattaacataacagagtattattaccgcaattttacggttaaactctcttaactattatttattttgcacttaactctctaagctcaaattttaacagtaaaattcttcaaactactgaactgcttgcatatttaaggttttatctattttttacaattaactgtcgatatagactgtttatgtgtttgttcatgtgtcaaatttatattggtacacctaatattattattttaaaaatattaaaattatttcaaacttgataatattttttatttttatttaatttttaaataaattttgaaaataatttttaaataataatattaattgaactaatataaacgtgttatgtgtacaagagtgtacacataaacaatccatagtgacagttaatcaaatgacactttaaatttactactagttcagtagtttggaaggttttaccgttaaaatttatgcttagagagtttaatgcaagtgaaacgacagttgaaagagtttagtcgcaaaaaaactcaaaaattaatacttattaacaataaaataaataaataagtatttatacaacaaatatacattattattattattattttattatatattttagaataattattactttttttcctaaattttttacactataataatatcactcaaataataagcgctcccaaaagattaaagaatctacatatcattttatgattactcattttacaataaaatttaacatagtaagatagaaaaatcatcttattgtaaaaattatatttttaagaatattattaacaaacactacattataagggcacaactctagtgtaaaaactaaaaagctaagaaatgaaattgctaattattgggtattttatttaaa

SEQ ID NO: 31360 - DNA, 1584 bp, Cannabis sativa
tttatgccaaagtgtaaaggaattatgcatttctctagaagcaacagaaattagatttgagggagaattaccttttaagatgtaaacaccattcattatagcacctgtcatgatgatcttttcatctcttttgacattaagaacaccattttccaccttgattgagcatccatctttgtctagcatagccactgaaatgaggtttttctttatttctggtacatgtctgacgtaacaactcattttcgattccacctgatgactgaacctttactgatccaattccaactatagcacaggatctgttgtctcccaatctcactgttcctccatcaatctttctgtagttggaaaattgatttctgtttggacaaacatgaaatgaacaaccagaatcaatgatccaatctactccagagtcttcatttgtaacaactaacacccctgcactttcatatccatcactgtcatcccaaacaccaacaacatctgcacttccatgtttttggtgatagttgtttctttgattcatattcaggttcttgagttcaggacagtctttcttaaaatgagtagtcttgtgacaaatgtagcatttctttttgtactttcctttctgttttcctttcttttggttttgattgtactggttttccctttgatcagtccttcctcgaacaatcaacaatccttctccaggttgttcttctcttaactcagattttcttttcaattcctttgacataagagcactttgaacctcttccaaagtcaaggaatctctcccatacatcatagtatctatgaagtgttcataactttccatgggaagtgagttaagaacaataattgcttgatcttcatcctctatgctgatatcaatattttccaaatcaagaatgattttattgaaatcatcaagatgatcttcaattccctttccaggttgcatcttgaaggaatacaacttttgtttcaagaacaatcgatttgcaagggatttagtcatgtacagaccttcgagttttgtccaaagaccagcagctgtagtttcctttgaaacttccctcaagactttgtcaccaagactcaagattatagcactgtgtgctttctccataatctcgatcttttctttctcagtcttgtctctgatcttctcaactccaagaagagcatcttgaattccctgttgtaccagtaatgctctcatcttcaccctccataatccgaagtcgttcttccctgtgaatttctccaaatcgaacttagcacttcccattaattttccctggatggttctttcacgtcttgtcacgcttggcctctcgaatcaagcctaagaacccgtccagctctgataccaaactgttaggaatgcagcttcgaattgttgcctcatgcaacctgagttcttggacagaactctaactcagtaaccaaaaccagaaaacagagtaacgaaccaacacaagttgtaaaatgtatgaaatcttattgaatgaatcaaattgtatttacatatatacaagtgtcttgattaagagtaagctaactaaactaggattaactaatgccttatat

SEQ ID NO: 31361 - DNA, 1131 bp, Cannabis sativa
  modified_base (800)..(805): a, c, t, g, unknown or other
ctttcacaggaaatttttgattggatatgttttgtcatttatattttgatcttaactcatcaaacatcatttcatcatcatcctaagaatttgtttaatattgagtttgagatgaagatgaagtttatttagaggatcggttttgtttttctttttttaaagtgttaatgtttctctagtactaattttccttcaactgtatagtgttctttattttagtacttgaaaaatataagacatggatttaaattaatattgactttgtatttcatttcttttaaatctaatattgattacatgcaattgtaccaatttctctctcacacacacacagcagtttcaaaaatactgaattgaaccattaagaagtgaggaggttttgaacctgagatattgaaggtctttcaattttggcctattttcataggaattgaaccattaagagaatctgtctaaataagtgattacatattttgattagggaggaaagaaaagttgtaaatctggtgagattgataagtataattaggtccctttagtaaagaaaatttccagactaaaagggaccttattattcttgctgaagtttaagaatattaacatccttaaacggagagaattgtaaaatatgtgtatttcatatgattaaattgttcattttttgtttggcaatttgcccatgaccaaattgacaatgttcttacaaaaataattttaagtattttttaaaaacttatgtattatgatataatttgaacaatattaactatggatgattattaaataaatttaattataannnnnnattttaaaaatattaaattattaaattttgattaaagatgtataataaaagaaaatgtttgaattagctacttaattaaaaaaatatttttttacactatattaaaaaatatatttatatacaaaatatttaaattaatttacattttatttttacattaggagattcttagccccattagggattcctagatgggaactcccggcaaattttccgtcccctacattcctaattatatactcttcaacatatttttttgtattaatttagaaatattaattttgtaatcaaagttatagaatgtaatctgtatttatgttgagtaa

SEQ ID NO: 31362 - DNA, 1470 bp, Cannabis sativa
taggttatatattgttttttttttaaggctaatagatttttatctcttgaactttaattaatatgtactaaatcatgcccctgaatttatctggccgttaaaaatttctcttctattgagattgttagatttaaggacttttatttaatttcattcagtttgactattttagtgattcttatgtactaaaccatgctccctagactttgatatttaccatatcaagcccctcgaacttttacatgtactaaatcatgctctcggaacttaaattcatgttagacttttttttttattaaaattggacgaaagtccttaaatcgaataatctcaatagttcagtgggcatttttaacaaccttaaaaatttcaaatagcatgatttgatatatgtcaaaatttgagaggtaaaaatcctaatcaaatagaactaacactctttattttttctaacattttttattttaaaaattaactaaaaatatctgtgccaatccaatttaactctaaacacatatttttatatgaactaataagaacctattatgttagccaaatcaaaaaataactttaatagttattacaagctaatatttatcaaaattgatctccataattcaaataataaaactataaatcaaataggtgtaaacacatactaaaagcatttctatgaaagttaagcggcagatgctaagttcatggcctctaatataaaatttttttcaaagaaagacataatttatcaagataaatttacatttatagtagagtttaaaaattgaggacaaacatctgtctaaacacgatcttttaaattagtaataaaggttgccggtgtgtgggcatgcaacaccattcgccgatcgcagaatggcgcttcaagaaccaccaccaacagtagttaataaagaataaatatctaataaaatagactgaaaactaaaattaatgtaaagtttattaattcaattaattaccacagtaaaattagtattagtaatggatatactaaaaacaaaattaatctgctagagtcaaacgagacaaaagttaataaaatattcgtatcttgtctcttcattttgaactaatattaattttacttattttagctggtccaataattattaaaataataattgtcagttcctaatttttttttattgttattgtataaaataattttttttacaaaaatttacataaaaatgaaatagtaatttaaattacaattaaaatttaaattataaattaaaaaaaaatatcaaaaaataatgtatgaggtaattttttttattattatttttatactttaaaataatttatttttcacatttttatgaaaatcctaaccaaaataatttaaatcccaattaaaatttatttaagaactcagtgtagaaactaccaaaataactcgaaaggatcaattaaaaaaatattaaaaataatataaaggtagttttc

SEQ ID NO: 31363 - DNA, 1924 bp, Cannabis sativa
tataaaaataaaaagataaaaggagaagtgtttaaacagctggagtcctaggctcttggttcgagtcttctgggccagtaggagctggaggatctgttgtttgtacgggaggtacatcagcatcttgaccggaggtagaagcagccgcctcggttgcaccataagccacttgagaagcgcaaaactcgaggtacatgcccttagcatcacccaagtactcgaagtttgcctgaggattagccttccaaaagtcgtagaagagctctagaccggctgtctccagggcattgactttctctttcagcctcgccacctctaccgtaacctcctcctcgttggagttcttcttctcctccacccgacgaagaagcgctcgaagagaagtcctttcatcttgaagactgttcacttcagcaaataaggtctcgatggtctcttcaagacggtcagaagcctcaagatccttagctagctcaactatctttttctgggcggtaaaaagcttcttgttggcttcacccagctccatccaaacagctccaagttccaccctggcatcatcagcgtccttcatggccaagtccacctctgccctcatggtgttggatagagccatgttcctggaagtagtagacttagcctgggagtaggtgcaggccaacttcagaccggcctgcacaaaggaaaaacttaagtattcaagccaagtaaagaggcttaaagaagagtgtcaaggaagacttacccaggtgaattccttcaagactcctcccatcaccagctccagagaagagtcgttgtcagcaccggccagttgctcactaacctcaggaaacaaccggttcatatagttagcgagcacctcttcacccttcttggcctttggaagcaccgacaaaggtggagtaggggctcgcatctgctcgggtccactcttagtcagctcagacccactcctcggttgttcaggtttgtccgaactccctcctcgagacttcttggactttgcaacttttggagtacaggggtttgcaactgctagctcctcagaaagatcaatgacctcctcgacgtgcgtcttttccttggaagaagacccctcactatctttacacttcttcgctggaggagatgcgctagaacttctgccaattctcctcttcagagcgtcaagcatcttctgagacatgtctgcacggaataaaaacacaatggttagagaaaacagacatcataaacataaggcataatagtcaagaagcttaaaaataagatgaagtaatatgcaaggtgattgcccaaacaagcctcaaaagtccatcatcacctgacatgcctcttattttgaacataatagctttcccttttctaagcacaggagaaggcagccgagcaggcgagatgggctccccaatgcgaaaagcatgttcaataggcctgggcggggctggaagtttcttcctcctcttgagtggagtcacctgctcttcctcagcctcatcttaacgattcaagggctcctgaacatactgcttggcccttccacctcccttaaactttgcttcgcgcttaagttgaatgagttcattctcctgatgagctcattcagcccgcccagcatcagatttcctcttcctccccttcacttgtttgggaatgaagtcctttggatcgagcatgtacttcacaaaattatcttcggaggtcaaccggataatatttcggtcttcccccggcagtcgagaaagactttgagccccatcccggagagtagagtaagagttaggggaggggaggggagggcagtgatatgttggaatctgctggaactgggtacaaatgatgcccgcgccatccaacatgaagtactcatcaacaaaatgctcaattttgctgatgaccgaatcatcggtgcccgtcaacc

SEQ ID NO: 31364 - DNA, 1540 bp, Cannabis sativa
tatatgtatatgtgtggatttttgaaaggtggggtttggagaaagagttggtttttgttgttgttgttggaaagagagaaaagatatgtgaaaaagatgagtagtgttggtttttaaaaacatgggaacgaaaaacacttatatatatatatatatatgaggttgactagctaaattctaaaggaagagagagagaaagagagagagtagagagagaaaaaggaagagagagagagagagaagggagggaagcgtggaattctgggaggttattgggagtagggaatgaaaaacgacgtgacgatgatgagagccttatcataaccatctcatctctcttatttattgttctcctcttgtctcgtgcttttcacacttattctaaatccgaactgcccctacttacctatatatatttttatatatatatatgaatattaatgttatatatatagtggtggtgtttagtaccttctcgatatgttttattgtgattggttagtgatactttctaaaagttattatattaaactatatgagatataatacttaattgaactaatagcgatattgacatatcggaggatgttagacaccactgatgtactttaacatttttttatatatagatagagaaatgttaaaatggatattaaattgtattaataaggatattatactttataagagtgttagacattatgtgtacgtctctaatttttctcgtcaatattgcttttaagactgatcctaagtataagcggattaggcatgtgcctaagttcaaatttttcagggtacaaaattaaaaatagaggaattaccttatattttatttttaaccatttttttttttcatttttacattttgagttgctatttagttgctatgtgagttgctatatgtagatttgagtgagttaatttattagttgctatgtggatttatgtaaaaatacggaaaaaaaaacttctttgcaatgtaaaaattaaaacataaaaaaaaccttaaaatgaaagacttggtttttatttaagcaaaatcaagtattttatagataacaaatattaatagtttggttggttggattatatgacacattacctaatagtataagtttgagttccattacactctttttttttttaatatttttcgttcatatattctcagagtcggccttgattactataagtacagtctcaatataataatttttaaaaaatatcgctaattaattacaaaagtgacacaaatattaaatcccaccaatatctaataacaatactcctattgtatatatatatacactccactctctctcctctctctctctctatacacacacaatccactccatccatgcatgcatgtcatttatgttactttacataacaaaagatataaatatagccaaacatgaatccaaatacatgacaatatatttggtatatatatattgtggttaatacattattgtcttttcacttggaaaatttaatatatggtattttcttacactgttagggattatatata

SEQ ID NO: 31365 - DNA, 1512 bp, Cannabis sativa
ataaataattggattggatcggatcggatcggtccaaatccattgaatgtgatccaatgaacacccctagcagcaggtttaactttgtagcttgagcactcaattattgtgtaaggtacgtaattgtactactaataacccctttcagtcgccaaaaacttgttattcccaaccactaatagcaatactatggtgagtcattgaaaaccaacaacgaaataaaacaaaacaaaacaatatcacatcgacaagactaaaacacttagaaccatgtcataaaactaaaacactcaaaatcatatcacagagacaagactaaaatactctaaagattgttacagagacaagactaatcgcagtagcaaaaatcgaatggtagaagcaaaacccactcccaaccaagccgcacctaagtccaaggaaggtcggcgagcctgactgaaggagaaagacaatattttatagctatagatttaagaacgataaaccttaattcaatattattgtaaaattattttttttttaaatcatgcaatatttaagtagcaaatatatcttatgaataaattttgtaatatgtaggaaaaaaaattaataatttctgtgaaactgcatattatagtcttgtttttttttttaggaattaattgtttgtgaagttttgttttccttttatcaaattggggcagttaaatttctttgtcaattttttcattcttatttcttcaaagaaatttcttctgttaaagtactatatatattttctatatacatattacgtttttttataggttttgatacaaatacatatatgttattgttaattgtttttttatccttaattgttatggtgatatattattgttattatataaattatatgatcatgtattttatattacgatatacaattttactatctttcagtttcatgatattagtgatcattatctttcaaaaaaagaaaaaagaaattaactttcttttatagttttgatcaattttttttaataaaaatcataagatatattaattaataaattcgtttaaaacaatagaacgcacacgacatgtagagaaacaagagtctcttgccaagcaatgagcttgcggatcgttttacaaaacacaaatcaacaaaaaataaagccaaaagcaaatttcgaacatattgagcaataagaccaaactgtgaaggcataaaaataccgcactggatcgcttggacacacaccaagctatttgtttccaacatgactctatcccacgaatgagttgcaatccaactcaaggcttctttaatgcctattatctcagcaatttcgggttgaacgtatccaatctttcccttcttgaatgcttctaccatagcaccatgatgattccgagctacacaacccatgccaaaagacaagactcgaagcagaaaaactaaaacgaaaagactaaagaatcatgtcaaaagacaagactaatgggaaaaactaaaaggaaaagactaaagaaccatgt

SEQ ID NO: 31366 - DNA, 2118 bp, Cannabis sativa
gttgcagcgttagttgcaatagagatttctatatagaatttcgtaaaaatggaaaaaaaaaatatattttgaagtgtaaaaataaagaagcctctaaaaaatattattttcccatataattattaactattttgccaaacaagatattaggaattcatatgtaattaccacctcatatccaaacacaccttgtattttaaaatataatataccctacctgtaattacacaatttcttccaaacatacagataaatattattttgaattttgtattttacaaaaaattattaattgaactttctaattaaattatttttttaacctcaattttaacttttagtattaaaataatattttttggaatgataaataataaaaaattattttttaatgagatttctagattctccaaaaaagtcttttaaaaaactattttttttattattttttagaaaataaaaattttcattaatagataaatcagacaaaattcattacaagaacatataatttataaagcaaaatcaacaataatattatgcataacaaggaaacaaaatcctaacagtaacctcaacgaaatatccaataaaccactaacaatcaagcataaaaaaagtgtgaagcaaaatgaatttttaactcaaatgaatatctgataaattatacctatcaataataatcacctcgtgatctttcaataaaaactgagacataacactattattgacacatgaaataagagaaataatcaacaaccaactaagcacccaaaaacaagaaaattggataccacataacacaaggccaatagataaatctagcagataaagagacatatatcaaccttgctaaagtaaattgatccatacaataaaataccgatgcaccaattgagaacaagacccgctccaaccgctagaataataaaaaaactctactaatccagtaaatcagtgacaaatcaccattactatgaaataaaattaacataaaataacattaaaattaaaacaattgaaactagacacaaaaatagacaaaccaataacgaatcaacccaaaacaatcaccaatctccaccgaactcacaaaccaagaagatgatagtgaacttttgccacagatttgtgcccactgaccaacaccacacgcgacatccctggaccccgacaatccaggacccaataccagccaaaccccctgccaaaatctagaaccatcccgacccacagcctctcacaacctccacaacaccaaacaagagctaagacactactgcccaacaactccatacgagatcagagatcacacccaaaccaacgacaactagaggaagactaggagagaagaaagacaacgagaggagaatcaattcgtgaagcccaccccaggaggggccagcagcctggctggactgagagatcaaataagaactttaaggaataataattaattaacaacttatattttatgtaattttatagttaaatctatgtagtccacgtgtctctcttatttttgggttttttttttatttacatagtacagaattcaagaatgcaagaaataaatgaagattttctctctaggtgatcacttgaaagattggtcatccgccgcacggtaatttcttcccctatttataggatttttaaagtgacagttattccttttggtcttatcttgataactgctcctaaaatatggataatccccacatttcattttatttacaacatgtgataaattacataactgcttaaaatccgtcttttgtcattatctacaaaaacagttattttaacgagaagctcatctatttcatgttgctcgcaattgactttgattattcttcgtgtgcatttcttaagtgcttctcatgaagggtttgtatcgtgatccacataatctagcttatcttatatattttctctgtcatacatttattttgtactcaattattcttaaaatgactgttatatatatgttatttgacctgacttgtcttttattttacaattaattagggctgaacatcgggcgggtttaccgggttttgggttcgcgggtttcgggttcaaaaaattgaaaccgaacccggacccgaatagggc

SEQ ID NO: 31367 - DNA, 1557 bp, Cannabis sativa
ttagaatattttcacaatcaattaaaaacctaaattgggtaattaagtgtataaattaatccaatctaattacaattgtgaataaatatatttaattgtgacagaattggattagatgttatttttaaatatccaattagatcagattggatgattaatagagcgtctaaaaatctaatacattaaatgattaattagattttatgttgttttatttaaaatatataaaaaattaaaattaaaattttatctttttttattagatggattaaatctaaaacattagatggatgattcaaaaaaaatacactaatctaaagtattaaataaatgggagcaatgtaatagatatacatgaaatatttttagtggatagaaatggttcaaccaatttatacatctaacatttgttagattttgatcggaattaattgaatgggatcgaattgtaaaatttaatatctaatatatatatatcttaaatttggtctaataaataattctacgattaacaaataaatataatatattaaattaattaaaattaaaaattaattaattgtaattggtttgattaaaaatatttaacatttaatttgatgatgatgatgattccactggaaggagtcatattttgcatgaccttgtctctcttgaattaaacccactcttactaatactatgataagtgatgatgtgcataaaacaacaacaagtgaagttagtaactactaatttatatataatatatgtgatagtttattagaaaagtgtttgattgaaataaatgtgaggtaacggccgagggagtgcacgtgtgcaactgaacaattcacctgacacacacgtgcacaaggttggaactgaaatagatgatgcttctgttctgtctatgtatttccaatccattttccaatagagtttggccacgttgttgatcatgatcgttgaatactgttctgttaccgtgtgctacacacctggatggaatgatatgatcaaccccactctctctttctatcttcaatattaattatatttacacgagtagtgatgatatttgcacacgtagtagttcaaagatgcgccctacgttttcgttttcacttttagaatccaacacttggagccataaaacaagttcatttattgatatatagtatctacaaattgctaaacaccgttgccataaagcaaccacttatgacatgacaatatctttgtatataccttaatctaaaattaataaatgcttcttaccatttctcattactaaaatcctctagttgttcccaatactctaaattatatgcatgcatctttttataaagagtgaattttttatttatttttagaacattttctacaattataactccctttcccaccatttatggaatggaaatggagaaacagaaccaggtgtgaacttatccttccctatttgagttatcctctttgtctatatttagggtttgtttagaatgccgtattagatcgtattgtattatattgaattggattatatatcatatttttatataatactatgttaaa

SEQ ID NO: 31368 - DNA, 2220 bp, Cannabis sativa
taaggaacttgtaatcgggtattttgttgtaaagtaattcgaatggtgttttgtgatcaaggacaggtgtgggaagtctattaattaaatagacagcagttgagaatgcatcccaccaatatttgagtggcatgctagattgagctaacaaggttaaccccatttctactatatgcctatgttttcgttcagctctcccattttgggaagaggtgtgagggcatgagtgatggaaattaatgccatgagtgacaacaaaatccgacaacacttgatactctcccccaccatctgtcctaagtcccttaattttcctttcaaattgattttcagccaaggatttaaaagcaagaaaagcatcacaagcttcagatttatttttcaatgggtatatccatgtgtatctagtgcaatcatcaacaaagtgaatgtaatatttaaagccatggttggaagtgatgggagagggtccccataaatcagtatgcactagatctaaaactttcaaagccctactgttggaatgcttaaaaggaagagagtgagatttgccatattgacatgcatcacaaaaatgatcaacttcattcttagaaaatttaacattgcatgtatttaaaacttgatgtaaaactctagaggatggatggcctagtctcctatgccaaacatcttttgtggaaatgacaaacttatcagttttagactgatttacatgagacttggttttaaaagctaaaccagtaaaaggattgttcttaaaaccagtagacttaggtgataaaaaactgaaataggctgacttgttttgaggcacttgaagttgataaagtccatccttaagcatcccttgaagtagaaccctccttgttgctttgtccttcacaaaacaaaaattggaatggaattcaataatcacatcattatcggtggtgagtttagaaacactaagaagatttttagcaatagtaggaacaagcaacatttcatttagtttaagatattgtcctgtttttgtgcataacttgccattcccaaagtgagaaatgacaagtttatcaccattccctactgtcactttctccttaccaccatattcttgcttctggggtatcacagatggatcagctgtgatgtgattacttgcaccactatctgcaaaccaagcttcactgtcaagaatctcaggtgtagcaatgaaagccgaagggttgttggtgttttggctggttttgttctggtttgaggagtgtggatcagaccccataaagctgtcatcgaatcggttatagcaaatggcagctgagtggccatatttcccacacacttggcatgtaggtttagagttgttggttcttccacggccacgagatctacctccaccgcctctgttgaagtgtctccctccattgttgttgctatttcctctgcctctgcttccttgagtgggtcgatgtgcatagttggcatgaggatcagagaaagttgtgtggtttttatttagagatgaacctccttgcaacctttccactttgctgtcaaaactgagaagcagctcctgaagttcttgccagctggtttttgcacgagcttcaatttgcagaacaatggttaggtagttaatatcaagaccagaaaggacatttgttaccagttgagcttcaggatatggctctcctgcaagggccagagaatctgcccaactcttcttttgcctgagataatcgatcatggaggtgtttcctttctttgttgtctgtatgagagtttgcgtatcatccattttggatttcgaatgtgcaccatagagctgttccagggcacgccataaacctgatgcacttgttgatctcatcacctcagtggctattgtttcagtcatagagttgtacaaccagcccatgagtaactggtcattaacaatccagttctcatactcaggattgagtgtggtgataacttcggaaccatctttagtgtgggacctgtagagacacacatattcagagggacaaacattagaaccatttagaaaaccgtcaagacgatgaccccttacactatatggtggagaccattgtcttccacaaactgtagttgttcatgtcaagctttaaagaaaatggctggtttagagtgctgaaatggtgtgggacatggagctgggtattgctggaaccagctccagcatttgtggagattgcagcagtaacagcagga

SEQ ID NO: 31369 - DNA, 1231 bp, Cannabis sativa
caggcacacatcttctaattatctgatcagcacagtgcttgtagaggattggctcttcccaatagtaatgttttacctcagaaagaacttctttaattgttgacgatcaatatgctataaattatctattgttttaatctaaataatcaacgatcctttatatattgtctacattgaataaagactaaaactaccatactacccttcaatatattttatccttaaaacagttggcttcctatagtatacgactcgttaataatggtgatgtttggtaacacttttatttttaaatttttgtttttgaaaaacaaaaatgtgtcttacaaccactttatttttttaattttaaaacaaaaaccaaaagtgtgttctgtagttttcatttgttgattttatttaagttgggtctgggtccggttttggggcaggggctagggttggagtccaggtctggggcaggggcaggggttagggctggggtttggggctaaaatcctagtttggggtgaggtacgggttaagggccgggtccgaggctagggtctggggtctagagccagggtcgggttcaggttcgcttttgggttcgagatctagggtcagggtttaggtctagggtcgagtccaaggctggattctggggtcggggtttaagtccgggctagaatttgggtctaggtctgggttcaggttcgtgtctaggcttagggtcagggttcgggtctagggttgagtctagggccggagtctggggtcagggtttaggtctagggttgagtctagggtcgaggtctggggccggtgttcgggtttaggatttgggtcccaaggttcaagttggggtcggagtccaaaatattgattaagaaaaaaatttgtttaaaaaattttaaaattaattttttctcaaaattttgattcttaattaaaaaattgaaaagtacaaataattttatagaacatatttttttaaaaaaatcaattttctaattaagaaaaataaaaaattaattaaaaaagtgttatcaaacaaacctactactagagtcggtcctaaagtatatggggctaagacaaaattaaattttggagcccctatataaatatgttaattattattaaaagggtaaattctattttggaccctgtatgttgcaaaagttaccaattggaccctctattttgttaaatgacaaaatggaccctgaattttccaaaatggtaaaaa

SEQ ID NO: 31370 - DNA, 1230 bp, Cannabis sativa
  modified_base (28)..(42): a, c, t, g, unknown or other
  modified_base (697)..(702): a, c, t, g, unknown or other
aaaagaggtatgtttcaattaaatatannnnnnnnnnnnnnnttgattaattgattaataaaagtgatattttttaacataacccaattttatactacttgtgtaaaaatataattttacaaaaaaaaataattttatgggaatattttaataaaaagattaaatatatgaaaacccaaataatctgatggacttaggataaccagaggggtaacgaagttacattatacaatttttcccatattgtttaactttctttttttttaaaaaaaaaaaaaaaaaattctcataacatcatattttgataataagccatattcttacaaatgtataccttaaaaccatacatataaaaattctttctttattaaaagggcagctatgtgtgtgaaaaatgatacatcccctaaaaattgagttcttttgaaattgatggggcagacaatctaggtttcggggaaatcgagcattggccccaaattttttgaagaaaatgaatttattatttattttttttggagaatcacttatctattattattttttaattttatttttatttttaacggtttgagttgctccaattgttgctctagtaggtattatgtagattgctaagtagatttggattgcaatttatttgtcccgttggttgctataagagttattatctaaatttctgtaaaaatacaaaaannnnnnaaaaaaaaaaaattaaaaatgtaaaaataaaaaaaaaattctttatttcctcttccaattatttctatttcttttaaaattttaaatatctcgcccatcatttgaaattttttgtcttagtcctcgggatgcaaaaccattatggaaaacttaaaaatatcacctaaaactatgtgtaaaattaaaaattaatacattattttggttcatctaaattaacatatcacagtaatgaaaagtgacataacgtccttgcttcaaacttccattaggcctttacacctactgaatgatggctcttatacacgagtacgtcactctggctgcttcctagaatgacgactgactctacaaaccaacacgggtacttccagcgtactttgtcctcactcgcacagttcttgtgaaaaattcctagaaggtcacccatctaaaattacctcaggtaaagtacgcttaaccatggagttctttcgtgatgggctactgaaaaataatatgcaccttgttgatataggtagtgccaat

SEQ ID NO: 31371 - DNA, 997 bp, Cannabis sativa
  modified_base (769)..(782): a, c, t, g, unknown or other
acagatcatcctttttaggcacatacaagctagtacacatagatgacacagtgatttccccagcttggaatgtagaatacttaaaaaaatattaccagtgaggagatgccaatggtccctgaaatccaagtaaggagttagtttgattttagagttgtttatttttaattaatggatacatcctagatgccttccagttgcatgtgtgtgccttttatgtagatgtgaaaaggggagctagaagcaacctcacattttaatatggtgtaacatggaattttaatgtcaagtttcaaatcatcaacatacttacagcaaccaaaaaaagttggactatgactcaagtgcccacctggcacacatttaggggcataagatattacatagaaaaaaaaagctcttaggaccacagggattagctacccctacagcctgataaagagtgaacatttaaagacaactttttaatcaaaatgaacaactctagaatgacaggagtcgtttaaccaaagagtgtttgaaagacactcacaatattgtggaatatgacaagcttaagccaccattttatactcaaagtccattaacaagaaggccaaaggttgggaaatctaatggttgggagtgaggtagaagatgagaagatagttcataatgacccttgaaactgtacaaccgccaaaatcaagggacgcgtttttctgaaaagggattatgacgaaaatgccctctataattattcaaaagcactttttattaaaaagaactnnnnnnnnnnnnnntgttatacccgaaatttggctaccatttcaatagaggacacgtgccaagttaaggggaatatggatcgatgaaatctcttttgatggaataactcattaattgcgtaaataacagagtataattgcgactcgttgactataaggtcttatgtgaggtaaagatatacaaactgttgcctcgtgtattaatgagaaaccatacgtcattggatgca

SEQ ID NO: 31372 - DNA, 1095 bp, Cannabis sativa
  modified_base (229)..(233): a, c, t, g, unknown or other
aagaatacaataacaaaaaaagcttgaacaagttaaggaaaactttattaaaacacatatttaattattagtatatatatttacaagtgatgaaaatttaatgtttattgatttattcatggtttagagtgtgttattatttatttatttattttctttttcggagttgaacttattaattcattttggacatagctaaacttgttgacaaatatatatatatatatannnnnatatatatgaaaatttatacttcctcaaaatgcatactcaatactcatgttgtgtgtataaaattccatattttttaatatatttctaaattctttcaacacattacttagtatttcttataataaattaatacaatcaacaaaatttcacgcgtatctttatccaattcaaaattgttagatatataaatttaacgtatattattattattagaataaattggattttattatcttatgaactatgatctttgtagagttttttcttataaatttgtttttattgtaaatattctctcgaattatacaaattgttacaaatatatcattctccattttaaaacaatttatttatctaactataagtgattagtataattatattacaataatttatttaataactttaaactacttaaaatctaatttattaacattaaatatacaaacaataactctaagaatagatatatatactctcataatccatcattatactgttattaatatatttattttttgtctagacccttaaactattaatgttatgttagtactatattaacaaaatattcaaagaaacgaatacaatgcaactgcatgagaatatttgtaactatttttatagttcatgaagaatttttgcaagagagaaaaattcaggggcaaaactttactagggccatagttccgtgggaagggggcgggggggaatcttatttattcttctcattattattgggtattcctacaagacactataatgtatccaataatatactaatatagcacattgctagtactaagtagttagcgatttcttattagttacccaaatttttagtaactaataacaaaaaat

SEQ ID NO: 31373 - DNA, 6824 bp, Cannabis sativa
  modified_base (6429)..(6432): a, c, t, g, unknown or other
  modified_base (6484)..(6491): a, c, t, g, unknown or other
aaaaaaaaaaaaaaaaatctaggtacagaatcattgcaatttattttttaattaatcattgtaataagtgtgaaacaaaattttctcttactctcaatagataaaatattcaaaatcaaaaataattttttattttattttattttatattttgttaacaaatacatatatttataaaatactatattttagaaagataatagattaagtaaaatactaattggtttatgaatatctcatatatatttttattacttatttcggtaaaactataattttgtttttaaattatataatgttgttgatcaagttatatttatgtgacatttttatatacttatttatatattaatttctacattacttttaatatattttaaatttaataatttacaataaaattaaaaaatatatataccaaatagcttatattagcaaatgagatatttttttaaaaaaatataatccttatttgatgttattaataataactctgtaaaataagtttatatagaatatatactatatggtaacttttagatataaaattataaataatttgtaattagtaacctataaaattagttgacatgcacattgaattccgtttatgttattggttgcttttttttttttttcattaacaaaacataaaaaaactataaggttacttttgatttcgaacaatttatccagcaaaaagtgataaaacttatatgcttctcatatatcaaaatgattatttggaaagaaaaaaatagttcgcaatagtactactcttgagatcaaacgataacggtatagctagaattattttttacgggttaatttctttctaaattatttagcagtctattaaatatttttttagaaaatacatttatgaaaatacaatttagtaacttttaaatttgaaatgtatataaaaatacttttcagtaaactataaatttagttagtataattttttttttttttttttgggagttttgaaaaaagcaactatttagttgcttttgatgtgaataagatatcaattagttacttttccattaaaattttattttagaattttacatatatataaataataaaataactattttaatatgtgataaatatatatttttttaaaaaaaatactattcggttactttatatataaaaaaaaatatattaaaatagctttattaaatagatttcttcaaagtataacttttagtgacttttaaatatgaaataacaaaaattagtgtaatgtatgatgttggttgttgtattgaattataagatattacgtggtttctttaagttattttagaaatttagcaaaattgttataaaataagctaggtataatataatctagaaaattttttaaatatgaaatatcaaactattttttagtaactaaaaaaattgattaacatattaaattttgttaactaaataaacaagaaacttttaaaatataatttttcatatgttaaaatgattaccttgaaaaataaattataaaagtataactcttgagctcaggcggccaaatttttctttaaacctttaaagaaaaaaaaaaaacaaaaaggaagaaagtgaaagagaattacatctaaatttatcaaagaaaacaaaaacaaagagaaaaagtaaaaagtgcctaaaaaaattaaagtgaatggctaatagtataaacccttaaaaaaaattgagaacatgcaaaaatatataaacttgattgaatagtaatgagcatgggagtttaatatcggtacacgtttcaaaactattagccacatttcatgaataaactttgcagcagtaattatacaaataatttaataattacgttgtggaacgtaatttcctctaataaattttacaaaacataacttccaaaataatatttacacataaatttaacattagatagaacctctcaccaagaccgagtagatcgcaaaataacataacaaccttaccaagtagacttttttcgctgttatggcctattagaacaatttaacataattttgtctcacaatgatgtggcattgcatatcaattatcaaaggctatatttcgttgttccaattggaatttggatgtgccaattctgagaaaaagacgtgcatgaatcaagcacgtggcccaaaatactttatttacatttttacataatcaacatatataaataactatattatatatataaaatataaatattgtaactggcaaacccagaccaagtaatcaaggagagtttggaggggacacactgacacaagcttctctaccaatgcaccaaactcgacgtcgacttggtgtggagctcacagatgggcttggttttgtatcacagtaggagttaaattctgattcacaggtaccactgctaatactcatgctactgctactacttctactactgttactagtagcactagtagctgttgatgaagtagaattggaatgtggactgcattttacaccatcatcaaatcttattgatgagtagttgttagtgacattgagtaatatccctgcaaagcaacttgttgatgcattaggattgcttgcagcatcttccctcataacatctccaattctacaaagtatgctgaatgccaagtttccaagaactcgggaatatgcttctaggattgaatgcccaatatcctacattacacacacagctcttcaatcaaaaaccatattcaaactaatctgcatgtatgtgtacagcttcttaaatgcttgatctataggatataagcatggaactcaccttgccatacttgatttttgtaacatcaagaaatgtttggggtaggttcggatatttggccttgagctgctgtataaggaattctgcttggtccaatagtaattccatcctatcaacctcagacatgggatcctttatgaaggtcgaccatgatgctcgtagaggcgaatcaacgcttccttgttcccgaattctctcattccatgaaaacacagcagcctccaacctgttaatcacctcaagggcattgtgttcggatttcaaattgagggacttgagcatttcctctgctgactttgattctgctgtcaacagcttgtacagatcttcgtttaagcttgcttttcctgactgcaacaagtatacacagccgcctatgatttagtcactcaactttgattgtttaacttttcttattcacaatgttgttaggaagttttggtttaccttgggaagtgcatcccctataatgtcgggaacaggcatttcaaacaaaacactttgattgattaattttgctgctttgaatacttgatgaaccacccctccctgcttaattaacttgttccttgctgaatcagacaggccagagtccggcacttggggtgtggggagccaccatcgtttgctgccctttggtgcacttttgctccttccttctgccctgctaccacattcggcataccagaactcagtactcaccattgaatcaagagcctcctgtatgatacaaaactaatatgttaagctaaaacagctttgattgaataatgaataccaatgttcaaaaatatcatgcaagtgaaggatcacctacaataagcatggagtctaacttttgaagtgcaggaagattcatgtggatgtctgcacgagcttttggggtcattatctgcgccaacaaaatacagaatataaaataaaatactcttttgaatggaaaattcaactggatattccaaatattcaaactaataataataatacctctagcatccgaccgttggcaccattttgtttagctggaactaactcaaccatatatttggtaggagatagcaaccagtccatttcccttctccacatgctcttcctttcatctgttagaggttctaatttccacaactctccaaacactctagctgcacacataattttacttatttcagatggtattgtactattatataatatcactgacttgttgttctctctcttcccttttttcaatatgtaaaatgtataaatgaatttaaaagataagatatttgtgttttaatcaatggaacacctgctagatttgtaatagcattagacaaagctaaagcagaggtgaggcccttgcagcctcctgtaacgtcttcacccaacaagagatgtgcaaatttttctttcatggcatccacctctgacaaattaatggaataatcaggattcttctctttgagagagatatgattgggcctctctgatgacatctcccatttggaatggaataatccaaaagcatcttttgtggaagaacaactcaagtcatcatcaccatcatcctcaaaagagtcagtttcattttcatatgtttgattgttgcgaatgcaattttcaaggccatcataagtcataattcctgtttatgttaattgaagagcatagttataagaataattgtcaaaagaattctgaataggtttatcaacattaattatatgactaaaatgtgcttgcgaatttcaaacaacaaaaccacaatacgatgactttagagttaggacttggaatgaagaattgagtcatcttaaagattgaggaatagtgacttgcttgattgtctcaatcttcttaagggcccatgagtcatgaaatgaatatgattagagagtatgtggccatgtgggtgggggagacttgaggaagggatgggctcattgactgactcttccaaaggttaaaaagagaatttgaaaaatctcaatcacctttttgtttatatgttattggatcatctcatctatattttattctatgccctctaccaaaagctatacatgtagcccgcgtgtggggtacttttatttaattatgagacgaaatagtgataaagttttaaattttgaaattaaaaaaggaggaaaaaaatgcgttgttatgaggatgtatgaggtggggctggtggtcctttaatgaataaatgttttcacttcaatgcagcacatatgtatgagcctctttttctctcctggtgtgggagtaggtagtatgaccttttcatttcatatgtagaagaacaagagaaaagaaaagagatactctttattttttgacacttgactgtacatcccatgtggtagtaacgttaaagctttaaaaatcaaggcaaacaaaattaattgtatataaaatgcataaacaaacttaccctcatttccattctcatgctcatcaaagtccatgctaatttctctctctccgctgcaacatgcaagtcttcttctccttctcatcatcatcatcatcattatcctatctttccctacatatatcatcatttttatatttaaaatgcgttttggtttttgcagataatgttagagttattattttttttttcttcaaggcaaaaagaagaaaaaataataataataataatataaagctaaggttgaaaagtcatgtatttagatagactcacacgagctcacgcactattaatctcacaaataaataaacaatataatatatacatatattaaaggaaaagaatggaaagataacttttctttaacttggtatggaaaagaagctgaacgcaaatgttaatagaaaaatacagtatcaaaaaatggagatagaaacgcaaacctggaaatcaacaatatatatttatatataaagagttctttctttgttgttgagctgaagtcgagcctgagaaagagagaaagaaatttgaggagggtttttggttggttgggtttgagtaatgtgtttttatgtgtgaagatggagaatatgaagcttcagtggtggtcccacccactcacctaatagtaatagtactggcccccacttcaacttagtaagctccaatttcaaatcttcccaacattttcataataatgtgtatcaattgtctcactctccctttccctctctccatatatctaccttttttggtttctttagttttgttactaaaagctctcacttcctgtacattctattcttctctacttctcttctataaattactactgtttgtcccaacgcaacggaacgcacaccaccacaaccaattaatattatttatatattttgctgaaaccaattaatcatatttcaatacattatttcttagaatcataaaaataaaaacgtaagcgtaattcttcgttgacaactaaggcttaattttaaaatatgtgcaaaagtcacggggattcgatttatgattgaaaatttgaactgcactgctcaagatatggaagcaaaatgaatagagtaatttgtcttataaatatttaaatttaatttttaattataaataaatagtattctaaaaaaaaaatatataaataaatagttaagcttaaggggctttttcatttttacacctcaaaacagtttttttttttttatatatnnnnttacggaattctacctagaaactcctaatgcaactagcgctgcaacctaaannnnnnnnaaaaatcgtatagaaacccctattgcaactagcgctgcaaccactttggaaactcaaactgtaaatttgaaaaagaaaaattaagaaaacagtatatgggataattcccttaagtttaatttaacggtaataattataattctagaacttactatttgataatttgattcgtctaaattattattttttttaaattaatttaaatataccaataaaaaaaaggagacgtataattaaggctaattaggatttttgcccctgaactttaacatgtaccaaatcatgctccctgaacttttaaggtcattgaaaatacccctgaattattgagat

SEQ ID NO: 31374 - DNA, 2796 bp, Cannabis sativa
atatgcaccaatgaaatagtgagcacatgtgtatatataagatatgaaacaaaacaataatgttaatatataatacctttttttttaaccatgtactgaaatttcgataatgttcatcttgtacccatttttgattccttgccttagtcggattattactcttaatccaattaaaatgttcccttcaacataataaagcattcgattgattttagtttcaattgaatattattaatttgttttaagtatgaatagttgatttaatcttactcaatgtatggttggacctcgtcaatattttgcaagacgagcgatgcgcttcttcacgatcagctcgacttacaccgcaaacagaaacacccctactccctttacttatttcactattgacccgagtaggacaagcgccaatagttgtaacctctgacaagtagtctgaacagaattcaatcgtctcttcaacaatgtatgattcaacaatacaaccctcgggcctacttctatttctcacataaccctttaagattttcatgtatcgttcaaatgggtacatccacctcatgtacactggtccacacaactttacctctctcaccaaatgcactgttaggtgaaccattatgtcaaaaaaagaaggcggaaaaaattgctccaaataacacaacacttctacgatttctaacccgaggttctctaactttgtgacatcaatcactttacaacaaagagatttgaagaacaaacacaaccttgtgattgcatatcgaacttttttaggcaacacagaacggatactcactggtagaatgtgttgaattaatatatgatgatcatgagatttcagaccactcaaaattaacttactcatatctacccagtcggagacatttgaggagtacccttccggtaccttcacattggagatagaactacacaaagattgtttttctactttagtcagagcatgacaagccggtggtaaaaatgtacgtccaccaacaacttgtgggtgtaaattggcccgtattcctaattctttcaaatctaggcgagatttaattccatctttactccgcccgggaatattgaataaggtattaagcaagctgtctgacacattcttctcaatatgcatcacgtctagattatgacgcaacgccaaatgcttccaatattcgagctcaaaaaatattgacttctttttccatggcccctgatgttcacttgcagcaacgtcacttttctcacgctgaccttttcttttcttcgaagtcaattttcgctttccaaggtggaattgaactttattcaacttttctaacaattcttctccttgcaaaggtgacggcggcatttctaattcttgcttaccatcgaatgcttttttccaagtcctaaatacatgtcctgtaggcaaaaactttcggtgtcccatataactcattttcttcgagtgttttaaccacatagaacatgttctctcctcacaaatcgggcatgcattgtaccctttcacactgtatccagaaagatttccaaaagctggaaaatcatttatggtccacagtaatatagccttaagattaaagtcttcattcctaaaggcatcgtatgcaggaacaccctcataccataattgactcaaatcatcaactagaggagctaaatacacatcaatgttattaccaggctgtgaagggccagatatcaacaatgtgagcatagtgaactttctcttcattaccaaccaaggcggtaaattatacatcacaagcaaaactggccaacaactatacttactactaagggtggtatgtggattaattccatctgcagaaagaccaagacggatattcctaggttcatttgcaaattcaggccacctagcatcgattgttttccaagcaggggagtcagctggatgtctcatcttaccatctagttttctatcggtggcatgccaggtcaaattttttgcatgattgacatttcgaaagaatcgaaccaaacgaggtattgggggtaagtaccataatacctttgcagggacaccaatctttacctcatcagaattctttttcttttgccacctagactcaccgcacgtgggacacgatattgcatccacaaaactcttacgatatagaatgcaatcattaggacatgcatgtatcttttcatattgcatacctaaggaagacagtgtcttctttgcctcgtagaaagacaaaggcatctcattaccttcaggtaataactctactagaaaagctagtaaatccgtaaaacttttatcactccacccatgtttcgcttttatattgtataatctaacaagcgtagacaatttagtaaacctattacaattagggtaaataggtttctcagcatcctctacaaaattttgaaattccaatggatcgacatttgattgaaattgtgcatctcctatcatttctggaatgtgaccatcctaataatccaagttaacactcttaaccttcttagacttagacgtttcctcgccatgaactctaatattttccccgtggtaacaccaaaccttataactcttgtctattccgttcctaaataaatgctcctttattttactagtattcatacgctccatgttaccacatttaagacaaggacaaagaatcaactttggattttttgcgtgcttatgacaaaaatccaaaaaaaagtcaacaccttccttatactctgctgataatctattcgcactcatccaatttctatccattttgcaacttctaaaaaagaaaaaaaaaa

SEQ ID NO: 31375 - DNA, 888 bp, Cannabis sativa
aatagatcaggcactttggtagcggaatagtgaattggtaaggtaccaaagtgagcatatttggtgaatcaattaataaccaccaagatattagtagctccctgtgtatttgggagacaagttatgaaattcatgcctaaatcctcccaaactcgttctggcagttctaatggttgcaacaattcatgaggtgttgttgttgagtatttgattatttggcacaccacacatgatgaaacaaacttacggacatccttgcgcataccaagctaaaataatttgcgctcagccttagaaaagttctatgacacctgcattaccacccatgggcaatgagtgaaattccaaaagtagccattgctttaaattggaatgttggctgataacaagcttatgatgatggtaaggcagaccatctgccagtgtataaggggtacctgccaactcaccatgttgtagtcgatcgtgcaaaagttgaagatcaggtcaagaaatgttttcttgtcgtagttcctctgagaaattaaagcgagccacactcatgaccacttggagagctaaaaatgaatactgggattgttgtgaaagggcatctgctgctgaattttgagtccttgccttatattcaatggtgaagtggaatcccaacaacttgcggataactaaatttaacctaaattaactcatgcaaaaattaacctaaaactaaatttttcttcaaaaaaaaaaaataacataaataacactagggttaccttgagttctttcaactcaacaccacttttaatagaaattaatggttgaattatgaggtttgctttgattttttttttttttagtttggggtgggtttttcttgggtctaagctagttgagagtgagagaaag

SEQ ID NO: 31376 - DNA, 2385 bp, Cannabis sativa
aaaagagtgcaacatgaatatgtctctccctcatgcacatatgatctataattattttggtgataatatatctcacaaagttattattatcgcttttaaaatatcaccgtatattatctatgatcatatgttttctataactctttcagagtatgtctgagcttctaaattatggatgagaggttcctggaacatcagtatttatccaacttattgatcatttatgcatgtgtatatgcaatgttgttcataccaaagtttaaaattttaagtaatatgatcataacacattacatataatataaatttttatttgtgacaatgatgatactccaagaccatatatttgttctattcttattgtatgatcttaatttctatatcaaataatcatatatctatacttattaatgcatatggagtactttaggacttctctactaatgaacaaactatatacatttaatatttctcaatataaaaaagaaataaaaatttgttcttcaattatttataatataatcaaaaactcatcaaaagtctatcgcaatgtatatttacgaatttatatattacatagataatcatacgtgttttttaactaataacttacttacatgatcatatatctataattattgatacatatgaagtacttttatgaagtactttaggacttctctactaatgaacaaactttatacatttaatatttcttaatatacaaaaagaaataaaagtttgtcttcaatcatttataatgtaatcaaaaactcgccaagtgtctatcacaacgtataatttatgaatttatattacacaaacaatcatacgtgttttttaactaataatttacttacatgtttttgtttcatacaaagatctttgtcatatagtgcgcgcgattttgaatttatatcacttaagacatgtattaaattcttctagaatttttagaaaaaacatatttcaaattcttctacatttattataaaataaaatatcttgattgtagattttttttggttttgagaaatactagaaggtattactagtggtgtgcatcaccagtgtgaggtgtcatactattttaatgtaattaaatatcgagttttatatattttaatttaataactattatataatatcataaattatttacaacacgctattatatggttgatatttggcaaaatatgaacttagatttttttcttctatttaattatttttatgagataaaattttattatcttataaaatttccacatgtttatatttactcaaaaatatttattaattgatgtaatatttatttagaagaaaaaattagtgtatattgtattattttattttaaatatttaatttgtaggacctacacttcaaatgaatacccatcacgtattctctagtggttagtttctactatctcatttgtttctcttatttttatttttatttatttatttattttaatggaaagagtcaatgaactacttagcatattattttttgtactacttcaaaacttcttatatatattttggaaaattaaagggggtcaaggccacccttatcccaatgtacatccaccactgtatatgtatatatatataggtaatatgcatgtatatcattaggttacttatgtgtgagtacatatatatttgatgctcgaatctatatatgcattctgacattttataatttcttaacgaagacaaatacaaatatcaaattataagcatacataactaatggggattggtttctctttataatgtgggattgcagtttcttattttatttagttggagaaaataataagtttttaagtgaaaattatcctgagtgcaaaaatgtccacatgtatgcatttttgtttcatgtagattgtattactataacaaataaagataaaaaatacaacaaagaataactaattataacaatatatattattttaagatagacaaaaataaattaaaaatgaaaaatataattacaaaaaattgtacatatccatattttcatcttcatcatcaattggagttaaaatattataaagatagggaatatccaatatttaatgataacattataactaacagaagtaaatttttgtattttaaattttttcaaatccatttaaggtaaattcaattttattattaaaaattagttataagtttataactattatatataatctaatttaggttgcaaaattctggatataagaaaagattgttatcataaatttatatcacaattattctactatatgtcatatcctgaatgtaacaaaggagctcaaaaaaaaaaaaaagggaggggggatcatttcacaaatacacaaaaacaacaaaaaaattaaaaaaata

SEQ ID NO: 31377 - DNA, 2409 bp, Cannabis sativa
  modified_base (550)..(553): a, c, t, g, unknown or other
gtaaataactatatacacaataaatttttaagacataagtaattgtgccactacactatttttctatttgatatagacctgcgtgttacactcacacgcctaaatatgtttgtgtggcatagacccacgtgttacactcacatgtctatttatgtctatgtagcatagacccacgtgctacgctcacccgtctatgtatgtccttgtagcatagacccatgtcgtatatttatgtctatgtagcatagacccatgtgttacgctcacacgtctatttacaataaggccttagtagaatttatgtcggttatagctaccgagtctaaattaattatgtcttgcccacataagcctatttataaatatgtaattcatatgttatgttctttcaatggtttatcctgatgatatatatcaggtctaacccaattattgcttatacacataactcttgaaatatatgcgtacattcaatatatactataatatataaaatcttagggtaataaccgtaactcgcatactaaataattactcaaataacatattnnnncatgctcaaaataacacttatagagggtaataactctaattcatgccttcacctgctagcaatattattggacataatttctttcttaccttcatataaattctaaggtagtaacgctaaaccgcattattatcaaactcaaggtactaatttagcgagtttaacttaattatgcctaaggtgcataattctttactccaacatatttaacatggcatacactaaaaatcatttaattactaggataataaccctagaccatataaccgctcattttaggttaataaccctaatcccaattcttagcgaatcacaacaataatataaaacttgagcaccactacacttaactctaagtgcaaactactgtcttacctgttgtgccaagtacgtggagactccaaatccccgagtgctcctgacaaagtgtcggtaatccaagtcacaatttctggcattcccaaatagggttaatccgtaaattcatcttcaaataattataaaattagcattcgaaatccaaatcagcatatagagctcggaacgagctttctgacaatataaagaacgtcccaaacagtaccccgagtcaaaacatatggcgaaaacaaaagcccaaaataattaataaactcccattgtcatggtcgcgaccatacctatgatgttcacaaccactgggttgaaaaacctaaaaaaccaactttttagcttcgaaaattatgcagaaacacacccaaattcagtcaaaagcatgcacaacaaccagaattaatcccacaataattatcaacataacagaaagctaacacacatattttaagctctaatccaccataagcgtgcttgatttacaacaaaaattaaagctccaaacattgagctaggattcaacaaattcctaggaaatgcatgaattccaaaatcaaaacctcatactcaaacattactgaaaaataaatccaataatcagaatctcacacataaactcaaccttacaatcccatgaaaagcatggtaaaataaacacaactaagcacaatttaacaaaatcattccttcttctacacacatgcatctcaagaacctaacaacccaaaaacatgattttattcaagaattctagcaatataaacttaaaattagagctgtagaaagctacctcaaacttcgaaataaaatcaagcttcaattacatcccaaatccaagctcaacaatgcgattccttaatcaattcaacaaaatgaaaagatggacaaagagagagaggatggtcggttttagggtatgagaaacaactagaaaagtcatatcctttttactcaaaattccattttgttaaaaataatcaaaaataagctaaattacaataatgcctgtagggccatataacactcatttaggaatttaagggaaattatgtcataataacataacacacaattcaattttcagactaatcacacatctacaaaatgcaaataaataatcttgaaaatgaatttcagccccgaacctagttcagcccgaaatttccaattgtgattataccgcgccgacttatcagaaaatacctaaaaaaggacacaacaagtacactatataataatatagtccataagcacgcatttaaattaaattcacagttttacccttctctggtcaaaattacaaaattgcccctggctcaccaacagggtcttaacatgtaatttatcaatttaattcacatataataaattttataacaatataattctataataatacatatttaactagttagggtttactaatccatttccttaatcttagggtattacaattacctccttcttatagaaatttcgtcgcg

SEQ ID NO: 31378 - DNA, 1569 bp, Cannabis sativa
agcaaacgtacgcttcttattttttccaatgacagtgggcagccccagatatttgtcatgagtggccactgaccccaagcctaatatacccagttacactcgcaacgatctgcaggctgaaacattcggactgaatgtgattgcagatttatctaaattgacttgttgaccagaagctctctcataacactgcagaatccgacgaatagactccgcctctcctccattagccctaccaaagatcaggctatcatcagcaaaaaataggtgagacacccgcggaccagagcgagaacaccgaaatcccatcagatcaccattaagctcagcctgttgaagaagcgttgacagtgcctcagcacaaaatagaaacaaataaggtgaaagaggacacccctgtctcaaccctctcgacggcaccacactaccccgaggccttccatttaccaaaaaagcgtactcagccgaagtaacacaatccataaccaagtctacccaccgcctaggaaacccaaacttggacataatggcccgcaaaaagcaccactcaactctatcgtaggccttactcatatccaatttcaatgccataaaaccacgaacaccattattcttcttgaacagagaatgtagcaactcaaaccccaccataacattatcatggatagctcggccaggcacaaaagcactctgaaatgaagaaatcaacggagacaaagtacccttcaatcgtaaagcgacagccttagcaacaatcttatacatcacactacaaagactgataggccggtattccttaaccaatccaggcttactaactttcgggatcaaaacaacatgcgacttattgaacttcttgacggattgctccccatttaaaatggcaaggcacaccgcagtaacccgaggaccaacaatatcccaatacttatggaagaagatggcatggaacccatccggcccaggcgccttcgtagcacctatagctttaaccgcacatagcacatcatcagcagtaaaccgggccacaagcaaatcactctcagcctgagaaattctggcatcaatattactaataccctcctccacctgttgcgaagtaggcgacatagatgaaaatattgtaccaaaataacgctcaatttcacacacaatatcctcttcagtacttaacttgcgaccatcctccgtcataatctccacaatagcgttcttccttttcctacccgtagccttattgtggaaatacttcgtatttctatccccgtgagccagccactccgcacgagatcttatcttccaataacactcctcgcgagataaaaggtcattcaatttgacctcaatcctcctcacctcctccatacggaccaaaggcgctgaaacactaagaagatcatccagctgtttctgagtttctctcacctgtctaggaagcgacccatacttactcttattccacatccccagctgatcagcacataagccaaaaatatcaataagactatcttgattagctaaaggacaatccaatgacaaccaggacctattaataatttcttgacattc

SEQ ID NO: 31379 - DNA, 3040 bp, Cannabis sativa
agtaagaaaagcataaacaataatataactatatttcggattataatcaggtgcccatacacccaatcataaccctatccccgtgtccgacacggttaagagtcaagaaagttcgtacgatagtactattaaccataatatcagcctatactcggtacgctagtcatactctattcattcccatgcgatactgtcaaatagtatagtactattgaccataatatcagcctatactcagtacgctagtcatactctagtcgtaccaaagtgatactgacaaatagtacttaagccaatatacattcactgatatccaacataatactaaatatactgataccgctattataatgtaatctaacaggcttaactaacatatatgctaaacatacaaacacatatgtatatcattatactaatcttacctcatttccaaattcaagtgcgtcggccaacctaaatggaacagttgtttgacgatttacaggccccttgaattagatcactaaaaccttgctaattactctgatttgcagcaaagaaaatcccaattgttgctggttccttgagagttagaaaaggagagagagaaaaagatggtttctcttgattttttttcctatttctttctattttcaaaaattcataaaaaggaatgataaaccaaagtcattactcacatagtggccagatcccacactaaaaatcaaccacctcacgcaagataaaaatgacaaaaatactcttctccaaaaagcttaactagatagtttaagaaaaagcttattttccctcttctctgtcttccatggtgaagaaacaaagggtgattcgcaagccagttacttggacggatttgattgatccaagatcgattaagcaagatgaaactgatgtagtcgaagactcatagtcagcttcaggattggatttgattgttgagatgttgatagagaactcgcaccaagtaaatttgcgatctagaatgaaggtcgaaacagagaaagaggaccaaagaaatatgaattgggccaaagaggtggaagatgagaccgaacatgatgaagaaagggagaaatttcaggattcagcgaggaatcaccggaaatcgtttaaggaggaaaagatggtctatcgagacctaatgttggtttatacagaacctatgattaaaaatggatgcaaaatagctcatgttgatccagaggaagtgaaacaataaactacaaattggaatacaaccgtgatttgtatcgtccttagggctaaccttcctatggctgtttttgaaggctacatcaagagaatttggggacattggggaatttctcaaatagtcaggatgacagtgggtttgacaatgatcaagtttaacgatgaggcatcgagggatcaagtcctagaagcatgtgttctccaattcaataaaaaaaccagttatagtgagaccgttgtcaactgatctgaacgccatcatactgatttgttcagtttccttgtggatttggcttcaagatttgggtctccaatactggggaaacaaattcttgagtgcgctagttagtacgattagaaaacctataatggtagaccaacatactaaggatcgcacaagggttcaatttccaagggtcttagttgagatggacataactgatactccccccaagtcaattcagttcataaatgagtatggccagcttattgaacaaagcatcgattatgaatggctcccggtcaagtgtaaaaattgtcaaggttatggccagatcatggcagattgtcgaaaggaagagataaaaaagaggaatcagaaagctaaggtggataggccagcagcaactaagaacaacagagcagatgtggaggaaaaaattgagaaggaagaagagaaaactacagtgcctaataaggaagcaaaccaggaaaaggaagctggaagtgagaatgataacaaaagattggttacacataaaagaacagctcctcaaaagcaccttcgtgctacctctgctccaagggaggaacaaggtgctagtaataacttcatagttttagaagagatggaacagaagaaaaatagaacaaagggccaagtcgaaatagaaggttcaggtatagactctttttatcatggatagctgaaacatttcttgatggaacgttagaaaattaataaaaaggagaaacaagatactgttttagagttctgtagtatcaatatattagagttggtgcttttgttgaaacaaagttaaaagaaaataaggttacggagatgatggagagtaaatttgttatttgggatcacttttcgagtctgactattgagggacgtattctaattgtttggaggagatcttttgtcaaggttattgttatagctaaaactccatagctaattcactgttatgttaaaatggctggccatctacatgcttgctgcattacctttgtttaaggtttcaataccattgatgataggaaaagcctttcgagggatctatctcggttgaagcaccttattaaaccctggttaatattaggtgattttaatgcaatgttcaacttcgacgataggtctagaggcagccctatcaacagtagtgatttggtgggttctaatgattggatatctaaggcttatgttgaagctctcatgagtacgggatcgagatatacatggacaaacaaccatgattgggctagtagaatttattcaaagattgatcatgtctttgcgaatgaggattggtatgatatgtttactaattctatagcacattttggttgggagactatatccaatcattgctcttgtgttgttactactagagtcgaagtgtctattggggttaaaccttttagatcaatttttgggctattcactcgaagtttaaggatctagttttatccagttaggagaagcctatgtcctcaaatagcctaaagggtgtgtatctcaaacttatgtgattgaagcatagccttaagagattcaatcatgagattataggagatgtggggaagagtttttagc

SEQ ID NO: 31380 - DNA, 1467 bp, Cannabis sativa
ctttcattgagagcagaatcaacaatcgctcttcattctaaatttaaccacaagtacgatggtggtacaaactcgtaggggtatggttgatctgacaaatccacagacggtggatcgtgcattgtagaacccaggaaacactagagttccgccagctattgatcctaaatagccgtcaaacgcgggttatggtgtgatgactcatgtggatgaaatcgctcctagtgtgcaagagacttggaataccagctcagcacccagccagggcattcataacacagtcgttccgcctgccaccaacgtccgaacgatcattggagatgatactgagatccaacacctcggcgctgctcttggactcatgcaaggtcataccaacaccctacatcatgattaggaggaactccgcgctgcggtaaatcttgcattcgaggaacaaagatgcatgtttgctgagtggagagacaaggagatggaagtgttaagggctcatcatgcaaaggttgacaatcatagtcggaaagctactatgctaatacagaaagcctaccaaattgtcgggcagcaacccccgagtgtcatccacctgggtgaaacttacgaagatccagtgatgaatacttcccagactataaatggtcacctgttgaatccccggtcataagttccgcttgtgggcctagtggtaggtgggcagaccttgtctagtaattcatcaggagaagtcatacctgatagttccaaccaggcttatagtgccaatgcacctatcaaccaagtcaatcaatcactgacgcagccaggcatttctgtattcgaaaggttagggatgacccatgatctcagaaatgatttgaacagaaggaggacagtagacgatcaacttggcacgacgatcgtacaacgcggaacctgtgctcaaattcctgctctgaaagatactgacgtgacttaaattggccaaaatgctgagcaggttagtccagttgtgcaagcacaactagatgaactaaagagtatgttccaaggcatggccaggcagagaaacaatgatcttgagttggaccaatcacgtggaacccctttctctcccgtaatcaatctcctggcgttgccccacaagttcaaaatgccaacctggaaactgtacactggaagagaagatcctctttcccacctcaagtatttcgagatgcaaatggatctgtagggagtacaaggtgacgtatgctgcagaatatttcctgctactctctcggaagccacccaacaatgatatttcaagctggcccttagaaagttcaactcatggaaagacttttgctcagaattccatgcacaattctcctcctctcgtcaacttctgttgcatttaagagacctggtccaagtcaagcaaagaccaggtgagcctctccgagcataaattagcagatttatgacggaggcgaccaaggtttcacgggt

SEQ ID NO: 31381 - DNA, 1107 bp, Cannabis sativa
  modified_base (211)..(218): a, c, t, g, unknown or other
aacgtactatgcagtacaatatacttttcttgccttttaatcaaggttcatacatttcagccaacccaagtggagaactatccccgatgatcatggccctatgtcacaacacaataaaccaacaagtgtttataccaaaacactgtttaatattcacataagacaatctagggttttctacaacatactgcggtataaatacactaaaatnnnnnnnntattttggctctaaaacatacaccatactgtagagctcgttgcaagcttcaaaaagatatatacaatgtccaaaacagacacccgagtcaaaagttatgacagaaatacgatttcaaatctcctatgaatttctaaaaaccattaaactcgaaaattccaatttttgcactcactgaaacactacaaaaaattatccaaatcactccaaacttcacagggtgcatatataccataaatattaccatacttatgtaaaagaaatataaatcgagcccttaaattaaaaacgcctttaacgttcaaactaagctttaaaaagttccaaatcgatttctaactcaaaatcatctcaaattcaacaagtaaacatataaactagtcacatagttgccaaagaataattctaagaagtcagaatctccataacctttttaaatcataaagcccctatataaaaccaatcgtttttagcttaaaacgtaattaaaccataccttaagctttttctcttcaaggatttgctatcctgctactaccagagcttagatcactaaattttagattgaaaatcgaagaaaatagatatagagggagaaggttttatcgaaagggagagaacgagggttcgttcgtttattcttttctgtttatatgtaaacttaatatatataatcaaaacgaaacaatgtgtttcgtttatatgtatatatatgataataataatattatattaataagaataatataatataatattaataaaaactttattattaaaaatttatgttatcatttcttagccactaagatatatttaaggtatttggccaactttgagtatcctaaaataccccaatatttctaaaatcaacttatcccaataatctc

SEQ ID NO: 31382 - DNA, 2046 bp, Cannabis sativa
  modified_base (545)..(556): a, c, t, g, unknown or other
  modified_base (1351)..(1363): a, c, t, g, unknown or other
aatctagatccttgtaaaataatttccaacagttctcccaaagattgttgctcgatacctagtggagtttctccaatatatacctggctactatttcaagtttcttgtgtggaaggagtaagcccagccagaggggttgtcactcctggcattgttggtaagggaactcgtggaggtagtcaatgtaattgggtgaggatcaccattgaatcccttaaatggtgggaacttgaacattggggtccgtcaccatcagattagttgatttagtggactgagaccttcttgttaagaccatcttttactgagttgaggagaatcagagaattatgaaatcgtatctttttgttcttaatgaaagtacaaaaatattgacctcacttttagctcaccgttatccccgaaatttggcttgcacttctgaggaggacacgtgtcactttgggagaatacaaatcaacaaatataatagtaattatattaagtgaaattaaaagggaataactcattaaatgcggagatgatagagtatatttacaacttgnnnnnnnnnnnntcttaagcgagataaggatatacaaactattgtctcacgtattgacgagaaaccatttaacgtgagaagtataaaacgaggcactaacctcactaagtatggaagagaatgtaaataggacattgactgttagaacacttagcgtataacgtacattatacaaactaagcataacagttgaatgaacttggacaacggatagcgaagtatccatctcgctataagaacgcatactctcggtatcttcactaatcagcttcagacatctttcaatgagattcactgctccgtcgagttagctctcttagatagaagctgacattcaaatgatgttaactgctaaagttcatcttgtcaccaagaactgagattctcagatggagcattatgtcttcaatcgtagaagcgacgagatttacattatcaacctcaaaaagatgggaaaagctctagctcgctacaacggttattgttgctatgttcccagagagatgtcccagaacgatatattttgcaacgtatttaatgcacatatgcattgacccagtaaaagcggaccaatcacagctgtgggattttcaaataataaccgcatttattttactcgggatgtgattaaatcccacaattttaggggattattgttgtaagatatcagtccaatttgtaattaactgccctcctatataactataaataggggcagggtacactgaaaaaaaggacaaaaaattcattagagagaaagccatagaactgtatcagaaatatttaataagatagactcgtggactnnnnnnnnnnnnnactgcaaaaccacgtaaaaaagccttgtgttcattctattttctttcttattattgttttctgtgcaaatccctcacgatataggcttttatttagttaacggatatttgtgttaacaatttggtgctttcattgagagcctttgcgaaaaagccttaaaaaaaaccctcttgatataaaaaaaatctttctccatggctgacaatggagaaaatgtggaaactcatcctaaagaaaccactcaccgtcctggaaaagagccaatgggctcccggaggcctcccaactcaagatctacacggaccactcactcaaggaggacccaacttgagggtggcccatgtacatggaccacttgtaccaggaggacccaacccgagggtcacctaagtacatggaccacatgttcaaggaggactcagaatcaacgaacagggtatgaagaacttaaaatgaacgtgggtggtgccctacccagaccaattattgaggatggtgcctacgatcctacaagatacgtaccaatcatcgagttggaaaactgccaactcagacgctacctagagaaggcaaactggtggaatgctgagttggaatgtgagctagccgctgccagggcggcacaggagaataatacacaaaattaacttgatcctagagtgagaagaccacaaggcagacct

SEQ ID NO: 31383 - DNA, 1463 bp, Cannabis sativa
tcaacagtaggagtctggttaaaaactatttagttacgtgacacacgaaaactagtttcttataaactagcagataaaaaccagtttcttgtaataactgaaacttaaaactcaattacgtaaagcagttaaattaaaaattaacacatagaaactaattacctaaaacaactaagtcataatgtgaaactaagaaattagttacgtaatatatacaacaaaatcaaaaattaaacatagaaactagctacctaatacaccaaactaaaaaaactaaaataaagacataagacacctacaaaaataaaatacaaaaactaaacttaaataaaaaaaaaaaaaaaaacataccacaataaaagtcttaacaaatgacttataaattaaattacaaaaattattagttatataaaataaccaattaaaaatctaatacaaagaaactactaacgtaaaataaccaaattaaaaactaacacacttacaaaaaccaattatctaaaacaaccaaatcaaaaattaaaacttaaaatcaaattatgtaaatcaataaaattaaaaaaaattaaaaaacataaactagttacctaatatgactaactaaaatcctaaataaacacataagaactttaaatataaataagataaattgaatacaagaatgttagatgtgatgattatataagaaatttatatgaaaagatgtaatttaattaaatctaatatcttattattaataatttttttgcatagataaagatattatttaagtcccttttaaaattgaatgcttcaaatactacattaaaataataataatataattatggtcgatttacatatcacatttattattttatttttgtttagtagtactagcagttcttattgtttttatttttgtatatatatgagatattgatcaaatgggtgttataatgttgagttgttagtaggtggaagtttactcttcttttttttttgtaatttggtggtggattgctaatgtggtcctttgatttcaaagggactaactaaaggaataatttcaaaaaaaaaaaaaaaaatagaaaaataataataaaaaaaaattacaaaaatatggtctatacgaaacttttaccgttttttagattttatttacatacaatacggtctttttatgtatttttatgttgtacttttgttattttgtatattatttttatgttgttttgatgttgttgctatgatgttattttttgtagttttcatgaaattttatgtaattatctcctagttaaactgtctccaataatttgagtctctctctctatctttgggtacttcaaattctattatgtaactttatatatacataggtgactattcaatagttatatttttattgtaactatcatgattatgtttttctttgacctgtaatagtaggttactaatagataaaaattctctttttagaa

SEQ ID NO: 31384 - DNA, 3980 bp, Cannabis sativa
gcatctccttcttttgcccatttgcatttagatttcagccaaatacttctttcttcttcaaaagtcagccgctgccattcctcttttaatttccttctttcatcatacagagattgattccaagatggagttccttcttgtctgtctaacacccccaatcttccttccaacgcattctttgtggctttattttgtccataggtaaatctactccactccttcgccttcccttgaagtgttttcagtttcttcatgaactttgtgcctggccacccgtcaataatttcctcctgccaccaactttcgaaacacttggaaaacgacttatgttctagccaatgattatcaaacctgaaggggccaggtccccactttggaggctttgagtcgatcacaacagggctatggtccgaaactagccttaccaacatttcttgtctcacaaatggaaagacgacgttccagttgtttgagaaaagaaatctatccaatctgctgcatatagggattgctctgaagttcgaccaagtaaagcttccgttctcaagtttggggtcgatcagctgtaattcccgaatcaaaccatcaaaaagcttcatactccttgtacttgagctgctattcaacttttcccccactcttctagtcacattgaagtctccccccacacaccacgactctccacatattgagcttaaccccgctaattcatcccagaacacatgtctgattttatacgagcatggtccgtacactcccgaaaaccaccaaggctctttaccttcggcattaatcagaactgagattgagaattcaccaaccaaagagtctagtaccgagatgatcctagtatcccaaattagtaacgtcccccctgatctccctatagctggaagaagaatccatgctttgaatctggatctccatatgcttccaatgaaccttctatccaccgtagctcttttcacttcttgtaatattaccatatctggattagctttacaaatggtagctttgatagctgctctttttcctttgtccccgctgcctctaatgttccacgttaggatcttcataatgaaccgtttggtgcccctggtttattataacttttctcataatttacattgaaagtcagtttgtttaattctctgaacttcttccttgccttcttgacctcttctatcttctcatcaccttcttcattttctagtgtaatttccaagcccatctcagccacggattcaacaatatttgaccaagagaatgcatcgttcaagttctcatttgcttcatccaatttcaccatctctagttcatcgttcttaacatcactaacaccatccaacatcatctcccctagtccctgtcttggagattcttcattctccactctccacagctcatgaatattacatataatatcatcggtttcttcccattcttcttgcgttacaacttctgcttccccctcagagtcctcatcatccgagctcaattcaaggaactcaaacccctttggatccacgtcagcctcctcaaaatcaaaagctgagttttcttcatagaattgggacacacaatcacggctgattgattttctttttctacagtaaactcgcttaacctcaggtctccttccctcctttggttccatctcccccttgtaatggagtactgattctgttgcttttcttttatgcagggcaaagtcttcccacaaatgaatgatcgccttcttgaaattctctcggcctttcgggttgatcgatcgaagacttccatggaaaaaattctgtaataattgatctgggctcaacttcttgaccacaacattcagctctctgctaagcccaaagaagtcggttatcacagaattcctagcccttttaattaaaaaatcttggagaccaaaattctggtccaaggaaatgttaaaaaggcctttttgaaaatatgctgagaccctccattgcttgtgattaatcggcccacccccagggttaacctcccagcccgatactccatcataagtaggagagagcttaacgggcccagaattgtgccagcccaccttaattggggccctaaaaaatcggcccaactcacccatgcccattttaaataagcactttttacctaattgacagctgtcattggaagagaccaacacatttaaattaggatttctgcacacacgtggcaccctcaagcttctcaataggcggttaaacacagtatggaggctcaccacctttcccatctcacgtacgcctgaatatggagccataccttctcgagaattgctgctgatatgactacactcaatctcggccgccgcaccctcatcaaaggacaataaagattttttggggagaagagtcttagactgtacaacttccataaccggctgctgttttcctgcaacctccatcttctccggtgccgataaagactctcccatcgtgctcgactcccttgagtatacttcctcagccccgtgttttcctgcatcttctttttctagatcttcattcgtttccccttcgccgaacaccttcccgtggtcaaaatcttgataccaacaagtgttaaagctgccatggaacctatagcttaggtcattaagcttaaaaaattttagttcaaaccttaggttaccgtggctcaaggttatggtttcaggaatgaagccgaattcgtcgcccatcaactgtaatctcatatgagacaacaagctagcttcagcagtgaccttatccacgtccagtagaccaccgcatctttcccctattttcttgaaggttttcatgttccataggttcaaaggcagaccttgaacccctatccaggaccctctacattctaccttaacataatccttttggttttccaaagtccacgctgaaaaagtgactaaggactgagccccagggacattcatactattaatcataataagttcctctctgtccttctcatccttgcaccaaatgatgcatctatcatcaaaaagttggctaaccatcagcttcctccctaactctctagatagattgtagaatatagtacaccaatccgcatgagtattattcctagtaagaataattgccaagttccaatctctaggcaaagccttggatctcatatattcgtagaattgaggctgagtgaatctcttcactggatagagattttttggtttgaatccgagattaacttctgggtaaaggtctttccattcaattttgcctctgtcacgagtagctgctggtccttgagctttcaccttgttgtgttgatcgttcctcactggtcttgccccctgcttcacacaacatttgcccatgaacgaaggttcgtggaccccccagtcttctgaagttctttcgtttggcagcttggatcaaacaatctcgtcctctttcttttcacaatcccgttgaggcattctcttaattctgaccatcctttctcgttttcttcttctggaacaattatcatctttaacttgttgttccttaatactgaaattttcaagaaggatcctttaatgtttgcaaaacattccatgaaacaactgatagtactattcctgaaagagcgtttgagactaattctatgtgtccctgttttctgaaaaagctcctccaaagtatctaagatccagacgacagcatcgatagttacagcaacttcatatccaaacagccttgttctttcgcaaatgcgaacagaccccccatcgttagacaaagtgagcataaacactttgtatttagttctaaaactccaatatttttggatgttctgatccatagaaggagcagaaagatttttccagccaaaaccagtggggtgatggccatgtttcttcccaaaaccagtagggttctggtgacttccatggccagaaggaccatggacacccctcgtatgcatgggcacaaatctcaaaaagaggagagagaagagagcat

SEQ ID NO: 31385 - DNA, 1831 bp, Cannabis sativa
aaagtaaaaaaagaaaaaaaaaatcaaattcctttaggggcgacacagtattgttgctttaaatatctttattattagaggtgactaaatgccacctctaaattagtcactcctaaaactttaatttgttgtagtgaatcttgaacatatagttattcacaattatagtgatgtcatcacagtgaaaaataattttaattaaatgatttcaacatattaagccctgagatttatcaatgcaccggatctacactaatgtgataatcaacgatgtggtgcacttacactatggcaagtggtatgtcttttctagagcatggtaaaattgacttgtattaaatcttgttaactgggaaaatatgtgcaagagaaatcctctgtcactcataaagaattaagaaagaaaagctaaaaaaagagtgcaaggaaggagtgaacgtgcgagggagacctcccttatggaggccccctacgaagacccctacggggagcccttgtagtgaatcctctacaatgactcgttgttggctcctcaagggtttggtcacctaaagtccccttactgcctctttcgtcctagtagtgctcaaacgatccaaaaagttggctttaggtctagacacttaatctttggcaaggaagtacgaacaatgagaaagcaaacttggacaagagagacggtacaaggtttgccatgcttggaccactaagtggggaccatatttgcatgctcatccatgatgttagacaaagcatggacacaaggtctgagtgagtaatgggatcaccatgcacttgcaacacctggtacacccgaccaacaatatgctacatgcatcaccctgcagccactactctaattttttccatttgaccaatgtaccatgtacttggctatccccatggggaccacatgtaacttaagccattagagctcacctataagtagagtcccaaccttcattcaaacgggttggaaattccttgtaaccatagctcttaagttgataatgtaagatactcactttttaccattgttcttctgcaaatttttcttaagtttctcttggatttcatctaccttcttactctttgatatacttgcattgattttccaacaattaacatcatttggcactgtctatggggacaggtcaaaactgcattgattccttaacatttcactaacaatcgaagatgtcaagactttcacagcgtctatgagacatggagatccccgttgatgacaaccagttggtccctactagaggagacccctattagggtttatgccctaaaaagcttgtaaaaacgctaccagtgaaatcttttatgggtcatataattaatataggattaaaggagatgcccgatttgcttttatggcaagtggaagattgtaagggtttatgtcctaaaaagtcagtaaagatatttttgattataaatgagagttgaacattttgatatatacataaatgttaaattattaatattaaatattgaataatttatatataaatattggaaaattccttattcatacacgaggttgtgaattgtaactgtacgaagaattaagatcacttagccatgaataaaacagtcagcaacatattaaagtttagtaatctttaattaatagttgctagtacggttcactgatgtctgttcttcggtgcaagtaatctcgattcaaattactgatgtagcatgacatctaagtgaaggtgttgtacataataaagagtatatatgacaatgaccgatatgaataaagttatctttatcaaacttgtcgtttactataaagtcctaattcatatcataa

SEQ ID NO: 31386 - DNA, 2780 bp, Cannabis sativa
aaatgaaatctaaaagagttgaatagaatggctgctctttaggttctatttatagaacataacaatcctagagatagccacaaagtcgactctacagctgtacaaatttttctaaatgaaaatcctattttgcaacattagagacaggttttgtaacaacaaactagactagaaaagaaaactttccaaaaacgtgtccgatcatgtatttggacttgatacctgccaaaaacaatgtgtttgatatggtcttattaagacacaatcgaactcattaagaagaaataagaatagtcaaagtttctataagagaatttcttctcttacaagaagttttcaaacaaagaaaatgacagctgaataaatttccagaaaagagcaataaaaacatttaattaaggcgagaaaatcggttttataaaagccaaaaaattgcaccataaataaaaaatattttggcatctaaattgccaaaaaaggaaaaaaggactttataatctcccaatctcccctttctttggcactttagataatcaaaatattttttaacagaaaagtacctgcaaaacaaagttagtcataccaaacaaaacttcccccgagaaacacaacataaaactgaaacataatgctaacttttaaaccaaagtttaacacaagtaccaatctcaactccccctggaaaaagggtctagagttgagaaaaacaaagcaagaaaataaaaactattacttcccctttttgtttatctatgtgccaaagacaagtagaaagtaaaataagtccaacaaaaagtcaaagaaagagaaaggaaaaaaacacttattatgccccgtataaagcttgatcagacagagtggacaattgcttggacatctcttgctgaacctcctccatggctgctaaacgattgttcaccagaaagacttctgcacatctgtagaagcaaaactgaaacatgcagcagcaacagcaggatttgcaccaacagatgccttaggacgcttaggaaaagctccatcaaagtactccaagggttgaaagatggtacctctttagaatgaaacaatttggtccaagatattagaagccaaattgatgaatgcccctaagttctttgtcttagccatgaaattctaaaaaagaaactgagagacaaagagacaagataccaacgaacaggaaatcgccccactcgttttcctttaaaaaaattcttcttttttataaaaaaaaaaataaaataaaaaaggaaacaagaataaactaatattctttccaaaaataggttaattaagaaaaaaaaaatcaagatcaacaaataattaaaatacaatgaataagatatcaaactttaaagggaaactcatcacaataaacaaagtagagcaaattatatcaaacttttggaaagttcaaagacttcaaagccatggctgaaaaagcaattaggtaaatcattgaagacattatgatcagatcgtggtggcgagtatttagattctgaattcaaagactacatgatggaagaagggatcttgttccaacttacaacacatggaacacctcagcaaaatggtgttgcagagagaagaaaccaaaccttgatagaaatggttagatcaatgatgtgttactcattactgccactaaacttctggggatacacacttctagcggctacctacattttgaatgtagtatcctcaaagagcataagcaatactccaatggaattatgaaatagaacaaaacccaatttgaaacatttttttatatttaggattgtcttgctcatgttcttaaactgaagactgggaaactttcttcgagaactaaagtgtgtatgtttgtgggatatttagaggaaacgcgaggtgcctatttctatagtcatcaaggcaacaaagtatttgcatagagaaatgctacttttcttgaacatgactatatgaaaagtcacaaaccataagtggttatcgaggaaataagaaattagaagatttttaaaacattaatttcatcaccattagttgaacgaccgacaacggttaccacaattcctaataaggaaaccctagtagattatcgtagtgggaggattgtgagacaacctgtctgctatgaacacgaagcacatgttcttacctctgacatagacaaggaagatttgttgacttatagagaagcaatggaagaccctgacttagacaagtggaacaatgccatgatcaagaaatggattccatgcgcaccaataaagtttgggaatatgaaactccacttgaggacattacaaccatatggtgtaagtggattttcaagaagaatagaaatattgaatggaaggtagagacctttaaagctaggcttgtagccaaaggctacacctagtgagaaggcactgattataacaaaaccttctctcctgtggcaatgcttaaatccattcccattcttctttccatatttgtcacttatgattgtgagatatggcaaatggacgtcaagaccgcttttttaaatggcgatcttaatgaattcatttatatggaacaactagaagggtatgtgttaccataggaagattgaaaaatgtgaaaattgcttagatccatttatgaattaaagcaagcctatagatcttggaatatcacctttaatacaactattaaagagtatggcttcaaacaaaacgaacatgaagtctgtgtatacaaatacattaaaggtaatgtagtggtattcctaattttttatgttgatgaaattctactta

SEQ ID NO: 31387 - DNA, 1684 bp, Cannabis sativa
ggtgccgggattgctcccccacccttatacccgctttctaaattcaccccatacccaccccaatacccgtttaaattaaagcgggggcggggcgaggattacccgacgagagaagaattcccatcaggtacccattacatatatattttttaaaaataaaaaaaatgtctcaaagagaatttagaaataaaaaaacaatcataaaagcttagtaaaataacaaacataagtaaaatagtgtgtatagtaataaatggagtaaataaatacaaaattggtaataaaaaataaatggttcagtatcattattttaaagcagttaagtgtgattataaatatgcatcaccacatacatttttatgaaaactaaaacatctaattactataatcaataaaaaaacctaaagcatgaagttattttcattgtagtagttatgattttaaaacttaaatatatacatatattatatcgagatgggttcggagcgggtatctattctcccgccctcgtcccgtttccgactcgggtatgaacatttaaatccatacccaccccgcccccgtcccattagaggcgagtacccgcagatagttgaacccgcaggtataattgtcattcttaaaaatatcagttaaaaaaaaaaaagagagagaaaataatttaatttgtgctaattttatttttttgtggtcgtggtggtattaaaatttaaagtatatataaccacgtgccattacttatgaatattaaaatcacccaataattgtaccaataataaaagtaggcttgacccttgactccaaagatgtctagtgatcttaccataacaaaaaagcaatggaaactaagtttagctatggaggttctctcccagttgagagtgttcaagatctagcttcaaaaaaccagacagaaatcccaactcgctatctccaacccgaacccgaactccatcaaattcctgtcctagaatcacttgagctgcctgtaattaatatgaccaaacttcttgatcatcaacatccattacaccatgatgaattggcaaaactccattcagcttgtaaggaatggggattctttcaggtaataataaactcactcagcttaatttataatattaataataatttacctcttagatgcaaattgaggattcaaagcatctccaatgaagatacaaattgatgatctattgttaaaatataactcattttgtaaaaatttgctctaatagtgtgccaaaagttatctaaatttgccacataacaaaagttgatccaaatttagatcacaatatgcattttgcatccaattatatatttacttttatgctatttttaatattttattaataaatttagttgatgcattcaattataaactttttatatttaatttttattaattaatataattaaattaataatagagttattatatttttatacttttaataaaagcattaaattaatagtgtgtttgaatgtaactgtgtaattactaagtagtgtaattagacagtttagtacttacactatattctaaatataaagtgtgtttggatatgaggtggtaattataatgaatttttaatattttattcgacaaattagttagtaattacacaaaaaataatactattagtagttaatatttaaatggaaagtttttagtaattac

SEQ ID NO: 31388 - DNA, 1524 bp, Cannabis sativa
atgtgtatttcttattatgccaaatactaatgagtgagagcgataacaaattaagagagagccatataggggacaagtaacaataatttccagattttgtattcaatgacacatactataaataaatatatatatatataatgtatatttatataaacatgattttctctaagaaagatccagatttgaagtactcttataaatttaaacagtatggcatattattaatttcagctatcaatcagaagattaatactcaatgtcaacttacattagctattataattaagtactctaagtattaacatttcttaaaggaaaatttgaattttgatgattgatattaaatttgatcccttactaatttgtaccaattaattcatttgattacatgaactttttattttacttttttttttaaattaaaaaaaaatagtaaaaacttaaatggtccaccccgctctctctcttccctcccgtgtggctctctctctctctctctctctcggtggtggaaaaccggaacacaccccccaatcactctagaatcattcaccattataataggtagattgtgttttaagcattttgttagacattagtaatagtatgtagtttactttcgttatatctgtagtatttgttagaaatagtattttttgatctgaaatggtagatttagttttctgtcggaatatcgacagtttgttgatataatatcgatgaaatgtcaaaattatgtgaaggaaggttagggatgactattatcgacatgatatcgacagtttgtcgatatcatgtcgatgaaaaagtaatttaaataatttcatttatttggccatgtatcgacaatttatcgatatttttcgacttatatttgtcgacaatatgtcgatagcatgtcgatatatattgtcgacgttaagacaaaaaaataaaaactttcaaacagttgacaggaaacaagtgaaattttttaaacataagtaaagactactcagatgctgactgggcaagctgtctagatgatcgaagatcaataagttgttgctcatacaagcacagaaagtgaattcgtgctttagcaaacacaacatttgaaattaagtggctctcctctgttttaaaagagcttcggattactcttcctccacttccaattatttgggttgacaaccaaggggtagcttctcttgcagcaaatccagtgtttcatgctagatcgaagcatatcgaaattgatctctattttgtaagagatcaaatactagttaaaaaggtggaagtttgatatgtcccttcaatcgatcaaacaacagacatactcacaaaacctctaacaaatcgttttctctacctcaaattcaagcttcaagcgtgcttctcatcctttcgcttgaagggggataaataacaaatttttgtcttttttattttgttagttataatgattgttgtaatatttgtttgttatttttttccatattagctctgtcctaacagagtttgttgcactggttttag

SEQ ID NO: 31389 - DNA, 1721 bp, Cannabis sativa
  modified_base (229)..(241): a, c, t, g, unknown or other
  modified_base (476)..(476): a, c, t, g, unknown or other
  modified_base (701)..(713): a, c, t, g, unknown or other
  modified_base (833)..(839): a, c, t, g, unknown or other
  modified_base (920)..(938): a, c, t, g, unknown or other
  modified_base (1141)..(1145): a, c, t, g, unknown or other
  modified_base (1480)..(1507): a, c, t, g, unknown or other
  modified_base (1652)..(1677): a, c, t, g, unknown or other
atacgcattgtaacgagaggggaaactcttcctctccaagtttattagccctataagtagtgatgcttattcactaggcaagaggttgaaaaagcagttgagctaagactataccctaagtatattatctaagaattatatatttagagatagtgttgtaagagctataagaaaaggaacctttctcccttatcttaagacaatacaagtaacgaggattaggctattnnnnnnnnnnnnngggctgaacctctataaaattcctttgtctttacattgctttattatatatttatggctatatatcatttatcgcttattaaaatagactcgttgtcgttggctaaaagcgagatcaacatatggtattattagaagaagaataagtagttgaaataaagttgcaaaattgtaactagagattggttcactttaagtgtacgaccatagttgaattttgcccaatattttattcntttttaatccatataattcagccctaatccctagttgaaacattataaaaggaacatgatactctcactcatccacttgataccttcaaccaaatcaaacctagttttctatatatgtcagacaactagtaagatgagagagttccttccttagtggattaaaacctccctcattgttcttcacctattcgaaccttgagtgaatgagtgtcatgcccacacatnnnnnnnnnnnnnctcaatcatagtgagtaagatggttgtaaccaaacctgaaggagaaaaagagacccatgtccagatcttgataatgctctgctacagaaaggaatgaagggctagagatcttgaacggannnnnnnattatattctgctgcaatcaatgtaaagttttcttaaacccgtatgtgtttattttcattgttttagataattcatatttnnnnnnnnnnnnnnnnnnnttgttagtaaatctagaacctagtaaaatattccaaacagttaaacacacaagggtttaagaaaaccttacattggttgcagcagaatataatgactccttcctttcagatttctagcccttgattcctttctatagcagagtattatgaagatctgaacctagatctctttctctcatttgggtttggttaccatcgtcttnnnnnctatgattgagtacttgacttgttgtcagagaaggaaaactagatgaaggttgaatagtcaaattgacaagagagtgagatgagagcatcatgttccttctatagtatttcaactagggcatagggctgaattatatggattaaaaaataataaagtattgggcaaaagtgaaccacattctagttacaattttgccactttatttcaacaacttattcttctttgaataatactatattttctaattcaattctataaatgccaaaactattatttgataattataattaattatcaaataaaattgctttttatattatttattaattagacnnnnnnnnnnnnnnnnnnnnnnnnnnnnaccccaaaacctcttttcttcataattaagcccttgcttagtaaaaattcataattaagacatagtctaattttagaattataattgatttattaaaatgaattgattgagtctgcaagttgtatcatctcaactagtgaggggnnnnnnnnnnnnnnnnnnnnnnnnnncaataagtagatctagaattcactaagtaaattctctaacttat

SEQ ID NO: 31390 - DNA, 4085 bp, Cannabis sativa
  modified_base (2571)..(2581): a, c, t, g, unknown or other
tagaattcatattaggatgttcatgaaacatacttgttagtaaatctagttcctggtaaaatatttccaacactatccaatgcattatttagagcatgatgttgtggtatttgctctaaaaatatgcatacactatctttacactgatcataagagtctcaaatattttttcacccaaaaagatttgaatatgagatagagaaggtggcaggaattggttaaagattacgactgcgagattttgtatatcctcgagaaagccaatcttgtggcagatgcactgagtagaagaggtcccgggcaagttttcaccactataatgatagctcctcaattggcttcagagatggttaatgtggggattaagtttgtagttggaaagttgcataacttgacactccaatctgatttgctagagagaatcagaaaggcgtagttagaagatcctaagttgattaagattcgagatgacgtgatggctggttgacctaaggacttttcaatctcgaataatgaaatgttgttgtataaagctcgggtttgtgttcctaatattgataagcttaagaaggaaatccttgatgaagcccacaccaaaccttattcattacatcggggaatcaccaagatgtaccaggatcataaaccctacttttggtggtatgggaagaaaagatatatggtagagtatgtctaaatgcttaaccagccagcaaatcaaagctaaacattagaggccggcaaggttattgcaacccttagcccttcttgagtggaagtgggaggacattccaatggatttcgttattggtttgccaagaaccacgagaaagtatgattcagtatgggtcatagtggaccgattcaaaaagatagcacatttcttgccagttaagattacttacacagtggattagtacgctgaactatattaaaaagagatagttcgtctccatggagctcctaaatctattgtttcagatagggatccaaactttacatcgaaattttgggtgagtcatcagagggctatgggtaccgaactgatgtttactatagctttccaccctcagattgataggcaattggagagaactattcagatactggaagatttattacgagcctgtgtcatggactttgagggttcgtggagtaagtactttcctttaattgaattctcctacaacaacagttaccaaagtacaatggggatggctccctatgagatgttgtatggtaggaaatatgttccccaattcattgggacgaaattggagaaaggaagtacttaggcctagaattgttcaggggaccaatgaagctatagacaagatcaaggctcggatgcttacttcccaaagaaggcagaaacgttatgctaattcgaagcgtaaagacattacatttcaggcaggagaacctgttttcctgcacgtttctccagtgaagggtattagacactttgggaagaggggtaagttaagccctaggttcattgggccattttagatactcaagaaagtcgggcaagtagcgtatcagctagccttaccaccagtgttattgactgtccataatgtatttcatgtttcaatgttgatgaaatatgtttgagacccgactcatgtcttgagttatgaagccctggaactactgtcagacttatcctacgaagaatagccagttcagatccttgatagaaaggaaaaaaatcttcgaaacaagaccatctccttggtcaaggtgctttagaggaacaacaaggtagaggaagccacctgggagttagagactgacatgagtactcaatatctagagctattcaggttagattttgaggacaaaatccttagaacgaggtattttcgtaaagacaagtttgtaacccgttttagcttttttcttatcttaaatgccttgtaatattttcattcaaacttaatacaattgtgtttgcttgcttttttattcacaatgtaaacaactatattttgattaaatgtacagtacttttgggtttttccattgctcatactcttcctatttaagtagttcgtagtctaccaaagttttggattttcgagcagttgttaattctgcttcgctatagcagttacaatttgccttaagcaaacttaaatatactttaatgattctattactatgtatatttttaattttctcttatgaatagttatattatctatcaattttctaggttcaagtacttttatcaaggcgtcgtgatacttcatttaatactttcctagcttgtgagaactgttagtattaagttttatacacgagttataaccttttattttccgttcccgttggataggttttaaatcaaaaaatatagttgtttgatcccttcttcgtaaaaaaagtttgatcaagatgttataacgattcaacccctctctcatgaaaagggttttgtcagggagttataacaattcgaatccactttcgtcaaagaggtttagtcgagaacctttgaatttcaattaatttgaaacgacgggtttgcattataccatgtatttccagatgaattttggttannnnnnnnnnnatgccccttaagtaatttttaaagtataaaactttgtatttacttaatataagtgattctctttattcttaacttaagtttaaagtttacatcagtcatgcgagttacatcatctatttattggtagtagggtcataaatgttctacgttccagtagttctttattagcgagccatcgagtcgaggcaatttataaacttcaactccaactactactttgatgtcatatggaccctcccaattcgggtcaaacactcctgtagatgcatctctcgtgtttgcaaagacttgtcttaccactgtctccaacattgaatagtattttcttgagttttttttttttgaagtttcttgtaactcgttgttggtatgccgcattgatgatttacaactcactttgtttttcctcaagtagatccaaggacaattttaaaagttcctggttttcttcttgattataaaactctcttttgtgagtcgatatgttcactttaataggtagcattgcttccgagccaagtgctagcgagataggagtgtgtcccatagctatcttctctatagttctgtgggcccagactacctgaggtaggtcgtcaacccatctaccttttgcagcgtctagcttcttcttgatggtatcctttaaggttttattaatagcttccactatcgcatactgatgagaagcttttgataattttattcctctcacattattcagtgaacaagtcaccatcaaattgggttccattatcggataatatctttaggggaattccaaacctacatataattttcttgacgactaagtcaaggactttcttacaggttatcgaaacatggggctcgacctccgtccatttagtgaagtagtcgactgctactaccgcatacttagctacatctcgcccagtgggtaatgccccaattaggtcaatcccccatatagcaattgggtagggcgaggtcatcattctaagttttgttggcggtacacaaggtatatgtgaaaatctctgacacttatctgatttcttgacaaactcgtgtgtgtccttattgatcattggccagtaatatctttgtctaatgatctttttagacaggttctgccagcccgcatgatccccatagaagccttcatgaatttctctgatgatttcatttgcttctacagagagaacacaccgaagtaagggcactgagtaccctcttctatatagtttgctttcgataattgtgtagcgaggcagtgaatacaatagttttcgtgcctcatttttgtcattcaaaagttgtacttcaagtaaaaaattgacaataggagtcatccatgtaggagagttatttatcatctcgacgtcttcagttcaacatatacttggctccctcagcatgtaaagaccgcttagtttaatttagaaatcagcagttaattatgattaattatggaaattatttatagatatttaaataattgtttatgctgttattattgaat

SEQ ID NO: 31391 - DNA, 1401 bp, Cannabis sativa
  modified_base (26)..(45): a, c, t, g, unknown or other
ttatggtgttaatcaacatacttgtnnnnnnnnnnnnnnnnnnnntaaaataatttccaacaattctaccttaccaaactctttatctgatcaactcacctcatcatttttattatacatttaaatcattttctatttatattaatctttagtggtaatttatctccatgtggatacgatatagcccgtttactactatgaccgtagattaactaattgggcgacatcagctacatttagatggtgccaagccttgttctagcccgataagctcaactaaaaaactgtctttgacagttgtagaaattatggaagatttgcatctctatagaagcacaattggcgcactgtagtatctaactcttagacgtcctaaggtcgccttcataatcaacaaacttagtcaactctttcatgctccaactaatcttcattgggaggccgcactctagacctccccaacatatttatcaaataaaagtaaaatattaaatatatacatataattatctttttcgttaagtttatgctggagattgtataaaattttatctcttttatcttcttttttagagaaattctaacttttcatttaagaaaagagtaatttacgacaaaaatatctaagttttatacctagtagcagataagtacctaagtcgtatttttggcagtaaaatacgttccgtcacactcctagaactttcgtaggtacctctctgttttcttccaagtaagtgtccatgtgtcacccttcattagtccacatcataaatttttatttttcattttgaaattcattaaaacttatttaaaaattattttaaaattaaaatagtatatttaaaatgtataaaaaataaaaataaaatattatgaaacgtaaaaaattattctaaacctaaataattaattctttttctttcttttttttttaaattaatttttcttttttccattcttttctctttgagtaaaaaaaaatccaacataaattaaattcagattttgaaacaaaactaagaccaaaagtgaataatcacaccacttcaagcaaacttagattttgaacaaacaaaacaaaaaagaataaaagaaacccaaatcttcaactgtccatcaacaatataaaatttgtttaataccctaaaactaacacaaaacttgtcaaaaacaaaaactttatacagaattctaaatcaaaatatattacaaacaaaatacaaatgctaccaccaaatttaaagtgaaaatcccaaaactaaaacccttgaatgaaaaaggtgaagagcaaatgtctattaagaccgtgcccgagccaaacccacaaacccagaattaaaaactcaaacccaaaaatagaacacagattacaaatccaaatgcccaaattcaagctca

SEQ ID NO: 31392 - DNA, 1624 bp, Cannabis sativa
atatttgttagtgatccaatataatctaatataatcaaagtgataaagaatcataaaatgattatttgaaaagcttcttgaagaagtcttacatacaattattatttgaagtggttaaatatttttggatgtacttacgtcggttcgtttggtcggtttacgttacattttaaataacccaatgtaaagatcgggttacaaaaatctaagtgcaacccgcccaattaagaaaaaaaaatttcaactcgcccaatgaattcgtcggtttagtcgggttagcccgtccaatccgagcactaatgtttatttattttttcacatataattgtatattttagttaaagtgataatgagataaatataaagattgaatttaaagttcaaatcatccgtcataaaaaaatatagtagtttgaactttttattttttataaatatatataaattatataatatatagattatatacatatatatatatataaaaactctcttaatcgggttgatcaggttagttcaggttaattgggcgggctgagattactttcaacccgcccaatataaagattgggcgggttatatttttatcgggtttttcagtttgtattttttgtcaagttatctcggtttggtttgagcaggttgttcgggttgggcattttacaaaaatttatgtacaaccctacctagatgtatagtttttatcaagtcatgaaagcgacaagtcatgataagtagaccgttgaataatctattaataaattagacaacttgttagaaagatacgagaaaaaatgaatgttatattaatctatttgaccattacaacaacatgattaagtacgtcttgtaccttttgaatgtacacatcactgaattgatgatgaagaaatataaaattttatatacataatagtaactcttgaagagtatatatattttggagaataatataattattttattcgtgtatataaaaatgaaacttataatgattacttatatgttgcagtaattttatattaccgtatgaaaatttcattgaaatacaaattatagtgaacttgaagttcatgaattgacttattttaacataatcaatcatatgcaataaattgtcaaaagatttgacataattttgttgaagaaccagaaaattcctctcattgttaatttataaggctcaaaagaagaatgtgcatatattttacacatggaaaaaatgaaagtatattttcatatttttttaattttaaaagcaatatatctataatttcatttagttactattttatacttgtttataagataaatttatatttttattaatagtaattttactaatataatttattttaatatatatgattttatttatttatctaaaaaataaatatgtattaaattatttttcaagaaaatatttaaattattattttttaataatcttgagccgctgttagatttttatcgcatagtttcttattgatgtgataagatcatatgattatagatttaaaaaaatttgtaaatttatgtatttctaattatacacgtatgactcattctaagaaatgaattaagttcataactattgaacttgaacctgaagtttatagaacct

SEQ ID NO: 31393 - DNA, 1948 bp, Cannabis sativa
  modified_base (191)..(198): a, c, t, g, unknown or other
  modified_base (1654)..(1674): a, c, t, g, unknown or other
gacggttaatggataatttataacatataacaatattgtttcaatcacaacaatcattgatcctctatagacggtttacattgaaacacttagctacttgtaaattactattttatcaatgtattttgtccttaaaacacatagctacttgtaaatgatattttatccttcaatgtattttgtccttaaannnnnnnnctacttgtaaatgatattttgggaaactaatataattaccgaaatgagcgctttcatttatcgcattaagccaaactctaagaaactgtcgttttacttctaatagacaaagaagctatagatgtccatatctacgattaacactcccactcaattgcactaccaagttcccaagatgtaagtattatgcctacatgtaagtcgtaacgaacaactcaaagaactcgtgcaatacatttaagttagacattaaccatctcaggattgagatcaaatgatctatgagaaactaagtgacattgacttagaaaggaaataacaacaagtttataatatattttccactatcaataccggtcaagttcgatgtatagccaatacatctgatcttggtttactttattaatgccatagaaaagacattccacttatctaagtataagtaaatcttatcgttgatcatcacatcagtataaatttagtgcactgataaatcttgggactaaataatttgaagcatataatcacaattactttccagtgttatgatatcactgtaattatgaataactatatgttcagaatttaatagaacttatatattaaaacctttaatcatgtataaaacatgtaaacaaagcatatgactaagtcatgatatgctttttggtctctcaaccattaatggataatttatagtatatttatatttggtatatagagtattctatgtaatcaagagtgcaattctgaatctatagtggagtaaggaggaattaataagatagaaaatttactctatagatttcaaatctacttattaggagcttggttacataggccaatggtcctaatattatctaggataatatcatcttgtggactcaattaattgacttaataattcaattagaattcagaaatagactatgtcttatttgagatttttcaccaagttttggcaattttaagaagaaaagagaaaaagggatttatttgttaattagtacactttctgggtctaattaataaatatatttaaattgtattttatttgataattatttataattataaaataaaattagtatttaaataattagatgagataagtggtaaaattagaaaagatactttagcttcatttgaaatgaagtggcaaaaatctaactctaaagcccatcatataattttggccttaagagattagattcaacttaagtctttattttaagcccactcttatctaaacctagccctaagtgaagtctatataaagaaagtgatgagaagagagaattaacctaagttttcaatgtcagacaactctcttctcttctttcttctatatttttcgaaattcactatgtaattatttcttttatatgtttgaaattcactatgtagttcaaaattcactttgtgggagactgtgtattaagagttagtcccacannnnnnnnnnnnnnnnnnnnnttgtgatatataagatgaaagggctactcctcccattgccaattggttttgcgatggaacctcattcatcttattcctcaaattctaacactgtgattaacacaatcaaaggaggagaagatccaagttcagatcttggtcattctctacggcaaaaagaatcaatggttagagatctgaacggaataagataatttattccgatgcaaccactgtaaggatttctacatccctttatatgtttctttactattttaagattttccatattagg

SEQ ID NO: 31394 - DNA, 1908 bp, Cannabis sativa
tttaggattctaagtagagtgataattaatttgtaattaaatagtaatgtcaaaggtattattgattgtgatgaaaaatagaacctaggttaaatgatatatatgcttcattaatttgatatctagattaacttatctccatagaaattaatgcttttcttaggttaaatagattgcatgcttcgtggatctattgcttagtaaaaagatttaattattgagtgtttcgccttgattaattgtaatagagagatttagaaaaattgattgcttcagctttttttgcggggttaatagtttaattaaaaaatcagaataatatttattattattgatctagaatgactgttgagggtggagattaattcttaactatttcttaatatcgtaatatctatctttatttgttttctaatttattgtttaatcttgaaaattaaaaacccccacttctcattcttgttactcatttttaaataataaatttataatagtcctcgtgggatcgacttgtatttaccattatactgaattaattgctaatataaaaataaaaattagtaaatttattgtagtaaacgacacacatcaaatttttagcgccgttgttagggactatttcattcaatttgttacatttttttttcgttctactaatttgttcttctagttgtggtttcaaatttcaggtcttgtgcttaaaacatggcaatgtactatcaatagtataatgatccatattatgtattgccacatgtgtatcaatatgatccctactatgacagttacacctcacaatggggggatcattctaatacattatatggcaaaattaatcaatatgttgaaccaaattactatgatcctctttcacaactacataatcaaggtcaagagactctggcgagtaaaaccatttagtttcagtatcaagctcacacatatactcaaaattatgtgccttattctcaacaacctactcatgttgcaccatatagtgaaaagccaactactgctgagctgattgacatgatagcaactaataacttgcagattcaacaaaataccttgtagttttagcaaagctttcatgaaactatccagagctttcaacaatctctacaaaagatataaaatcttgcagagccaatggaaacatctatgagtgggtatgaaattcaaaattcaaatactttacttgcacaaatagagagtagcccaatggagaatgtcaaggccataacacttcaaagtggtacacaacttgaatcaccatcacgccaagaagcacatgatttgattccaagtcatggagtcaacaattcatcccttgaaggatcatctccaccaaaggttgaatctcatactttagttggtccacaatcactgaaaaaactatacaaaccaattgtaccaacttatatcactccttcaccttttctaagtagattgaaaaaaattcgagaaagaggagcccatcaaggagatccttaaaactcttcccaaagttgaggtaaaaatttcatatcttgaggtaatcaaagaagagcctattaaatgagaaaattttgaatggtggtgagaaataagtgtgggggagaatgtttctattgttctctaaagaaagttgttgcctaagacaagtacaattcaatgcacaattggtaaaactaggtttgatcattgcatgatagatttaggagaaattattaatattatgtcttattccaattttgcttctttaaatcttagtctattaagagaaactctaagtgattcctacatgattgagatagaagatgaggaagatcccaattctacgtcaactctatttgggagactttttttactcaatgcgatcgagaagttgaatatgaaagtatggataattaaaatagaatttgatgg

SEQ ID NO: 31395 - DNA, 2130 bp, Cannabis sativa
  modified_base (1042)..(1045): a, c, t, g, unknown or other
agagagagagagagagagtagaagtgagaaaatcaattcctattttctctctctttgttaccgtatatcttaggctatttttgttgttgatttatgatactatatatcctatatgtagtgttataaacaactttttattcctttatttaaaataaaagtaaatatctaatttaatttgaattagaatccaaattcaaatataaatatctaataactgaatatcaaatatcaatagatcttttaatttaataattatccaataattcatttaattaataattaaaagataattagcttaaattaatttattattttaactaataaaataattaaattaaattaatcatgtacctttatatgtcaccctacacatgtagaatgggcatacacatgtgctacatattttaaggtttaaaattaatttctcaattttaccataaataagatttattatttattttgcaaataaataataattgaatgtttctcattaatctctaattttacaaggattaaaatagatattattttctctaaaataatatatttctttctaatattatttaagaataatattagatttaactaattaatatagttttattcaataaaacttaaatagttaaatactattaattatagaattcataattgccataattaattaaagcagtaatttcataaattactattttacccttaagaatttatttcccatataaattaattctcactcgaaatccattcatcaaataaaaccttctcctatacagtattgtatagaggtgactcggagatcatggacctatatttcaaagctccaatgaatccaagattaatattaatctcatcaatagaatcatgtggttattaattctattattactccactataaatatgaaattgcactctttgacaatatagattatatttacagaattcttacttgtagtccattgatgtaatcaagataagtagctcaccctctatttattagtttataattagagttggtaaaaataccattttacccttctaatnnnntcttgattccttatgtaccattaattcaatgtgaacagttaatcgataacttattatagatttcgatccaactgttaacatttctagaattaacactacaaaagaactaatattcgatctgttaggaaagctttagattccagtattgtataacatgttcctagccactcatgttattaagctctcaaaatagaagtcgtaagaattatcttctctaagaaaatttaacgagtgatcaaagaactcaatgaacataaataagagttcatgtatacttaggatttaggttgatctactattgatcattattgtgatatgaataactcttttcattataaataacaagttaataaaagatgtttattacatatcggtctaatcatgcataacctaattatacatagtacctttactacatttccatctacatatgtgatccgaatcaaaatcacacacactagaagtatagtgtatagtaaattgtacttagcagttccatattaaagattccctaaactttaatacactaccaacttgttttattgatatcgcgtaatcttaattatcttgtacatccttacaagattatacattctctatatgaataaggaattttcggatatttaataattatagttttgtaattaatatattattaatatatttcatatattatctaatatattatccattaattacttacttttaaggcataaatcctaacagtttgtaggtagggcatatgcactaccatggtctgacacaagggacaagatctggtcctatgtcaaacaaaggcataaccgtcgctggggtgatccaagtctctcttcatggtagacatccaacctcttttggggatcagtgtggtgataggcccttcgagtagccttccaggagttgcttggacataccctgggcatagctttctctaaattctagagggatagtaaggctttcagatttcggatggcaaggtgctacgagacaaatctccatgtagcttttgggtttgatttgtttccggatttgcacgccttctctgtaacccggtctaatagggggggggggggcttaattaaata

SEQ ID NO: 31396 - DNA, 8364 bp, Cannabis sativa
  modified_base (5292)..(5305): a, c, t, g, unknown or other
  modified_base (8331)..(8332): a, c, t, g, unknown or other
tttatcttgaagttttggcaggttcgtcgtggaaatgtttctgattagaaatttttaaatttctttctttagattttgttttggtagtacttgtgaagatcttgatttttcatattcagaaatttgaagtttgctatgtagttaaacttctaactaccataaatgaaagaagataaagtttgcataagaaatgaatttcattattgagtaaataaagttgatacattgatctctctatattctaataagaaactatcttagctaattaaagcgtaagacatgctcattacacaaaacaaactaaattaattgtctcaacacatatggtgtggtttactggattgaaggaataacggtatgagaatcacaaaacatgaggaatccaatctggaagaatgaaagctcattagaaaacattagtcagggttaagtaaattggtgttattttcctaaacaattagggttttaggatcatttataaaaaaatcaaaaattgaaaggaatgacggaaatcgtcgccaatggaaaaggtaaaaatgtttccaagcaaactgtttgagctttcatatgattgtggaggtcttgctaactccaagccaaactgatgtaaatcttttaattagcagctttcaataatctcagacctcaatccatctaattccaatattaaattacccttttgcaggtcttggagtattgggttggtagggggatgctgcagatcttgtaagtcttttaagaaatctctactgtgtttattgattgaagatgatgatagaatttgatttgactctataaactacttgattgttcccttcagtgttgcagtgatgacaagggcttttcctgactattctactgagaaaaggaaccttattttccttcagaacttagcaagctacatgcttcttgcttgtggtgtagtttatgttatttcggtaagcaaaactgaaatgcatcctattcctatctattcattaagccaataaagatgtatatataaatacatgattgtttttgcatggttgacttctaatcgaaatgggctttttcctatgttgggttacaatgtgttgacaaaacttgctctacccaaactgtcaatgtttatagtgcaagaatctgattaaaaatttgttactttgcaaatttgggcaaatatcttgattttgttttcttcttatatattaagggaatcctatgccttggcttcctcaaacgtgctcgtcagaagaaagaaattacaagggagcaggcagtaagagatctagaggtaagcactcatgttgagagtacaatgtgtagttttgtcaaaacaatgtgttcttcacttatcatgctcgcttgaattgaagctttttctttaagttttgtactgacctgtaagtgtttttcaaaacttaaggaattggagagacggaggggggaacttgaagaattgcttatcgaggaaagaggttgagagactacataatttgtaagagatgctaaaacaaaatctgtattgttttgttaaggtttggtagaataaatgaggtcaagatttgttaattttcatgaacttagttattgagtgagtaatctgttctgtttgttccagcatcgccttgtggatgagcctgtttttctgtaaataatttgtacagtgaatgtgaaatttcgtagccaaaaaagaaaaaaaggaattgaatttgaatagcagagctcataagtgatgaaattcttacttattggataacattgtatatagggatgacaatataacacattttaagttttaacacatacctatagccatgttttttttaataaataaaacagatacatatggttaaattatttgaaagggaaaaattactgagttggagaatacttgatttgcatatgttcggatatgatgcatgttgggttggatatttgattcaatctaatatttttattcttatttgatctaatttaattagtaattggatttagaaaatcattctttgatttgatccgaatagatttcaaaatctaatccgatctaatctaattactaattggattggatcatttttgtaattggaattacacactaaattttttatttaaacttaaaaatttgaagaaaatttcataaaacataattgatattgaaaacaatttaaggaaaaaagaaggagctattagatttttttcataaggatttaagactagacacatgttttaaaaattacaataagccaaacacgctttttgtttagttttaggtggagttaaattattttttaggaaaagtaattagcttaatgtattggtaaataaagagacagtttaaaaaaatataataaactatttttttaatattttttattatatataaataatgttttaatatatattaattgtaattaaattgaattgatttttaattgaattttgagatcaacattcaataatcgttgcaatctaaatagacatttaacttttgaaatctaatctagttcaattataattgtatattcatattttttgtaattagattggattttattgatttggttcaattgaatcagattagatcctatctagccctagatgcctgtacatgtgttgtcccgtctaacttgaaacgacacatattttcagagtagaaattacacaaagtatgagtttgtttagtatttatatttttttatggtatttttaaataaaactaatgtgacgtggttttttagttttgttttcaattgtatggatattatttatgccatatttttgtaaatatcttataaaatcctatattttatctttttcattcatttcttttgtttatattttttttttaaattaaattaaataagctgacaataggggtagtggtttacttgaggaaattgcattgtatacccactttactttatcaattttaatttttaccttcatttccatatcctttgagatatacccacttttatatatgatgttcctattatagcccttaggttaatgtaaatcatgtgctacaagtggagggtgagggtatattaggcaacccactcacaaaagtgggtagattttaataaaatataatatgagagtattttttattaatggatacaaaaaataggtattcctcaacttataccggtttactttttgtatgcacaactaccaccttgggcttgagtaccttaccgccattttcatccccatttcaatcaatcgtattccattattcatttttatttgtctttgctttttttttttctttcttctcacattcagtttttgcttaggttttttaggtttgtttgtttcttcttcggttttgtcttattttttccttgattttctttttcgtgtttgtcagagagctgatcattgtgcttgtgcttgtgttcgtctctttgaattgttggagcaatttttctgggtttgaagcctctctgttgaagtttttgtatttatttatttttttgtgtttttttatttttttttattttagagcttagaaagttttattttcgatttttgtatatatatttgaatgtatgtatttgtgtgatgatcagtgttgattttggttgtttttgttttgtgttttgtttcatctttttttttagttgatcatcttatttttttgtttatttatgcttaaattttttgttgtgtttattgtttgagttttttagatcttgtttcttgcttatttttaactgataaggaaaatttataacgcaagtctacgtctcgtttcaagtaataatagtgcataagtacgagtattttagccatagctctctcgatattgctcagaattggacgatttaagatgtttcgaaaaactgaaagagagatatagaactttttttcaaaaaataaaagtgaacgttttccttaacagtgaacgaatcatagttaaaaaatagcttgaaacttcagacttaattttcaaacacagacgaagcgtgttgagcatccaaagcttgaattttccactcaatatttcataaaacccccaaaatccatgataaatccaccatattcatattttgatcatgttttttttttcattttaacccatatgagttacttgacaattaaaacttggaataagaagaaaacaagctaaactcgaacaataaaacataaaaaactactaaaatatgttctaaactaccctaataaacgagtttacattttgttgatcaaactctcccaaacttaacatttactcgccctcgagtagttacactaaacactaaccccaacacaaaattaaaactgacaaaacacataaaaataaaattaattacataaaacaaaatttaagcctcaatctttccaacaagctagatatcacatttatcaaaatatctcacttttcatcaaatctaacttctcagctgaaccatatcataattcactccaatcttttttaaatatgcctacggaaccataactagtaaataataagcatttgagataatttatacatgctaagtcacactaacaatccatcagacccttaattccatatgcttgcaccacttactattctccactgatataaatgatgcatgctcaaaaatcaaaaggtcttttaggcttaagacgtggcttaggtaaaggtagatgatatagtcatttaggctaaaattataccataaacacaaaccaaacaaatcaacaactagaattaacattatgtacgtcttgtcatccacacttccaaaaaattgagaaaacaaaaataaattgatatagtatgtaaacactactcccccaaacttatttattattatactagtataaggggtatactttaatttttcttttctcttcttttgttttttaattttcacatatttttttctttcttggtatagaatacttaaagatagtgggttggaaatgagttatcgaaattctgaactttcatcctggagctctcgaaatcaacctaggcgaagggctagagacccctcctaagtcgactgttatgattcaggtctactcaacttcgtgatgtcatatttctcaccacgtgtcaaacattgatgttcacgtcaccaggaaaaatttctaggttaacaaaatagtatagagagaaatatagagaatgatgttatgtaaatgtgtgaagtaaaataataaaaaaagataaatatcattttagactctgtgttttacaaaagttactaattggaccatctgttttgttaaatgataaaatagactctatatttttcaaaatggtaaaaataggactctgagctcaacttttaacaattttattttttaatnnnnnnnnnnnnnngataatttctaacatgaacagatatagaaaatataatcagctttgtcataatatctctaaattagattatcattaagttttattttgacaaaaaatcagtttaggatcttatttgtacaattttagaaaatacaagttcattttgtcatttaacaaaatagagggtccgattgataatttttgcaaaatataagttctaaaatgatatttatcctactaaaaattaaaaaaaatattaataaaatattttgaaaaatagaatagagaataataatattgtctttttgtcatttgattttggcttggtagacctaattgacccgttcccaacactttttaacattactaataatatcttggaaaagattacaatgagtggatgtggatgtgtgcattattatttaatcttaataaagagtaaaatatgtatttatagatttgtaaatgttcccatgccaccactttacaataataatgccacgaaataaacgtttaattaattaattaattttcaaataattattttcgagaaatataggtgagaaggaaatacataattaaatataaattatgtgacatatgtatattaatcaattaataatgtttttatttaatagaaaattatcaagtgtgttggccacaaacgtgcttacacatttttgttacacatcatataatattgcatgtgtatatatggcatattatatatatatatatatatatatattatatgaaagatctgtcaattatttggtcattttcaataattttgagttttattttgttaatttatatatgatggagctaataataatggtgaaggaagtttaattattacgtgaaaacatattcgatagtacgaatcacaccctgtatttttattaattataatagaaaatcatcgttttatttaaggtgatatagtagttatattatatttataatatttaaataaatgcaataattagaaaaataatgtgtagaaaaaaaaaaatagaagaaaacatcgaccatgtattagaattagaaaggacgttgaaacaataaagaaaaacaacaataatatatagtttataaatatatttcaagagaaatttatctcgaattattaaattcttccaaattttgctttaattttttattttatttttaatcttcaatatatatatgaaatttttaatagttttgtgttattgtaattattactcacttttctctccatctaggtccctatatgggacattgtgtaagtagtgttgtaaatatgagcatgattttttgacacgttacgaaatcagtacgaacataagtaaacacaaaaaaatataggttcggatacaatatgacacgatacgacataaaaaatatgtgcttaagtacaatatgacacgagaagcatgaaatgcattaatagactaacccaaaaagcactatacacgacaaacccaaaaaatatgacatgaaatattaattaaaaaaacttgataattgagaaatttgaatttatatgcatacatttagtatatattaaatttttgaacacaagcttactaattaaaattaaaaaaataggcacactttatattcatactcataatacccttctctcttctcttctcttttaacttcaccatctatactctccattctcatttatactaatggtggtccaatgagggtccaatgctacctttatttttatttattttttatatatatatttttgtacataaaaaaaaaaagtagcatcaggccactatcgaaccaccgtcggactatattctacatttatagatgttaagctccatttattaagcttgtcaggaaggcatcggaccaccatcagactaccatcggaccatatcatcgagccaccatcggactttcgtcttcaatctttactcattttaacaataggaaggcattgaaccaccatcagaccaccatcgtgcctggtaaaaaaaccaattttttgcctaaaactcaaatctgaccattttcgaccctaaatataatatctactcacatataacaaacattaatcatacaatttattcctttgaaaatattatcgatggtgaagtcgtggctgatggaaaagtcgttgggtctgtaggtcgctgggtccacggtggtcattgggtccgtgagtcgttgggtctgtggtcatggtggtcgtggagagaagggactaaggttgtgagtggtgggttgtgggtcaaattcttgggtgagtttagagagcgagaaagataagggaggaagagagagggtagaatttgattttataaaatgttaacctattctaccaatataggttaacttaggtgtagaaaaataatgttaatctaataaatgcataaaaaatcaaattttctttataatttaataatcattattatttgaatttaatagttcgattcccggcccccggtcatctttcttctagcttttagttctgtctggcgattcctttaactttaaataaatatgttctacgtcccctgttagtgttggtcctgtcccgtactctatctatcgatcttatcttaactggatcaatcgctttgtcggaacttatatatgtatttgcaattataaatcaattaaaataataataaaacttaaatataatattcaatattataattaactaaaaaatgtaaaactaaaactatatgctaatttatttatagagtgtgctacaataaattgtaagtaaatatttaaattctaataattttttatatgattttttgtaaaatattattgaaaaattacataaatataattaaaattataaaatatatattgtagtttagtaattaacttatattaattgtaaaaaaatatgaaaaaaatataacacgaattaaaatttgaatataaaaaatggactgatctttgaaaatattagtacgacataatacaatttatatttaaaaaaaaatagaaagatataagtcggaccaacacaacatacatgaatttaaaacactacggtggcgtttggtaacacttttttnntcagttttctgtttttaaaagtagaaaagtga

SEQ ID NO: 31397 - DNA, 1717 bp, Cannabis sativa
gaaagacagatgaatcataccaacagttaccaatgtatcttcatatgttaaaagtagcaaatcctggaaccattactagcttgaccacagatgacaaagatcgattcaaatacttgtatctagcatatgcacattccatcaaaggatggcaacattgtagaccaattattgtggttgacggaaccttcatgaaatcttcatatcgaggcacattgttcacagcatctacaatggatgcaagtaacaatatttttccattagcatttggtgttggcgattcagagaatgatgaagcttgggaatatttcttcacaaagctcaaagaaacatatggagaacgtaaaggtaatctgttgtatttatcttatttttgtttctaattcttgtaaaatgtcacctatttaatttttttttgtaccaggttacttttactttcagaataaaattattattttgtccatgttaccaacagtaaaatcctaacactaaaattatttttgcagatctagtaatcatatctgatagacatcaaagcatcgaaaatgctgttcaaacagtataccctaatgtcttccatggagcatgcatttttcatctacttaacaacattaaggccaatcttcatatccatggagatgatttgactataaactttgttaaagcagcaaaagcatatacattggttgggtttgagtactatatggctgctcttgacaaaatagatgcccgtataaggccttacttagaaaaagtaggttaccatacatgggcgagatctcactcaccaaaaaggagatataccatgatgacatcaaatatagcggagtctattaatgcagcaaataaagcggcaaggaatttgccaataaccttaatgttggaatgcataagaagcgttgtacaaaaatgggtttggactaatggaaatgaggcgaatggaacctttacagcgatatcatcagaagctgaagctgtattgagagagaactatctaaaatctactaaatttgaggtatgttgtttgcttttaattgattaatactatattttgaaaactaaaataaagtaacctgatatattaatatactgaacaaatttgtaccaggtgacattatttgtaataccttttttttattgttattttacatatgtttgacaggtgagacaatgcaacactattttttcagaagtgattgaagaaagaggaacttatatagtcaatattcaagagaaaacatgcacatgtagaaggtttcaagaagatgaagtaccatgttcacatgcacttgctgtcattgcaaaaaaaaggctaaattgctatgagttttgttctgcttactacaaaactgaaacaatgaaagcaacttatgcagaaacagtttatcctttgccacatgaggatgaatggagtctaccagaagaattggacatacttgtcctacctccaaaaggaaaaattcctcccggtagaccaaggaggagaaggataagagcacggggagagccaagagtggttatgaagtgtggacgatgtggcaaatcaggtcataatagaaaaacgtgcagaaacccacctatggagaagccacacaagccaagagaatgattcatttacttttacttaaggatgttgctcgttatattcattcataaaaaaggaacaagttactatggacaccatactacataaggttgtaatgatttgttacattcttta

SEQ ID NO: 31398 - DNA, 1866 bp, Cannabis sativa
cagtttctcacattctccatttcaatattctcgaatagtatgttactcactgaacccgtaccaccttgccatgtcttgattcttaggccattgtctgattctcttatcattacgtttcgaactgatatgtttgatacacatgcttgtgagttatgcactcctaagctcccaatgctataaatatataacaacaacaacaacaacatcaaaataagtaaatatttgtatgtatgtagtgttatttaaggaaatttacataaaacatcaaaaacaaagttatttttatgttacaaaaacaacggttcttatttttgtaaaaaaaaaaaatagaaaacagtagatctgtaaaaatatacatttttgagcatttatgaaataatccctattatttattgaaaaaaataactaataattagttgattattttttaaaaattttaatatattattatttttttttatattggtgttataaatagctgtcatggattgagaattttgttggttaattagaaaatatctcatgtatatgataatatgatattatggtttttttaagagtatactacacttaaattgatgtagacattcttcccacttaaaaataatataattagtttgtatgataagtgtgtgcaattatttgagtatatatatgcttataatattattctttttttttctttttaaattaagttatatatattatttttaaataataaaatattgttttcgaaatttaatttgatttctataaagaaaaaaagttaaaaaaaaatgtataattattcttttatatgttttaataccaaaaaattattatatgtactgtattaattaataaaacaaaaatctaatttttatcatttgatgaaaacaactaagtgtttggttttagttgttttcatcaacttataaaatagatgaaaataataaaatatagttttgatttttcttttgtgaatgtttttataaaattatattcaaactgtataaaaaatataacttaataaatatcatagaatagatatttcaatatacatgaaagtataaattgattttcaacaaaatgagtacgcacctaatcccgtgacttgggccacaggtcacaccttcaatgtccacgtcagagcatccagtaccaatagaaatgcagtcatcacctttggtaattaattaataaataaaaatgtaattaattaatgaatgaattgaaaaagacaagactaaataaatggtagtgttgtaatagtatagggaggtaactataccattggctatcattgagttgtatatccccaccgatttagtattctctatgtggatcccatcagtgtttgggcttagctttggtgatgaaatggatatcccatcaattagcacaccttcacacccatcgaatttcatgtgaaacattggactgttttttatgctaagcccttttacaaccaagttgttgctcatgaagaatcgtattaactgcaccattattcaattatcacttcattaatttaaaaaaaaaaaaaaaaaacatacattgaaattgaactctctttagtaactaatagtagtactcacagctgggctatcacatggtcctgactttgttgatccattgggaccctgcattttcagttcaagttattaccaatgagcttaaaagtttggtttcttagtattaattcttctcggtgttgtattgttactagtaattaagtatcgggtgttatataatttaagaaaataacttttagagtatatcgcctaccaatcctaaaacgtcacaatgcccaatagcaatgctctatttaaagtgtctaataaaaagttaaattttgataaatttgactatattttgtgttaaatt

SEQ ID NO: 31399 - DNA, 4291 bp, Cannabis sativa
ttttttttacaaaaatatggcaaaaaaaaaaaccatataaatgtaaaaaaaacaaaaaacctgtaaccacttagctttatttatttatgccataaaaaagtaaactcttaaaattttcccatattttgggtaatttttacttaaataaatgattgttattaattgaataagcccaatactaattgagcctaaataaaactatcaaagtgattattttatttttagcaacatagtccatttaaatatctaaaattaaatgggctcatatatgcatctaaggccaatagcaaacatataggcaaacataaatatttatttggatgagccctatcatgttactaagtttatgacacagatgaaagaaaattacaaaattacttgttacaaattatttatttgatttattaacaattaactatgactaatttggatcattggatccatcaacaagttaatcatagtcatttaaatcaaatagataataagtttattaagaaaatttaaaatttaaataaacaaacaaacatgcagcaattaaggatagttggttaaaagatattatttgttttatatttaattaaaaaataaaataaataaaccttaattcaaaaattttgggttgttacaaccctatatatgtactaaaaaaattaaactaactatcaaaatttatgttatttaaaatatatatattaataaaataaatttttaataagataaaattttaaatgatcgtatttttctaatcttataatttaaagtaataaaatatatattaaaataaccaaattttgaaagctgatacttatggtttgaatgttttttttttaaaaaaaaatctagattatattttaaattgtattattattttaatgtcaaataagatcatttcatatatattaataaataaatacagtatgtaaatatccgaccttataattaaaattaataaaacaaaataatcaaattttgaaaataaccataatagaaaatttgtagaaaaaattatttttcaaatttaaagttttctaatatataaaattaattttaattaataataaaattaataaaaattaattttaaactaataattagatttaaagttgaaaaataagaatctacaaaaaaatttaccaaattttgaattttataacattgaacaataatctttaaaactggaaaaaattgaaaaattggaaaaattgacagcatgcaatgcatactgtccgtgcgctagggggagctggactgaggaaacaccatgcaagaatggtcatatgggcggcatttctcggccatgcattgtctgaagcatgtttgctcaaacttcagccgacgaaacttgagtttgtgttcccatccccgcgtgaatgctagggtttcaaccatagcatgtgcgatagccaaatttcaaaattagaaaaatcatatctttatcaattttattccaaaatcaattctgtaaaaggctaattttcttatttttttttcaccaacttaacaaataaaataattctagattgaaaatcaaattatttttcataaaaatttttgtaataacacaataaatgattaaactcacataaaccatcaggaacacattcaaatcaatcaaaaaattattttaaatcaatattttatgaaaataaacattaccgtggctttgaggctagtttttgaaaatcttttaccaagatctagatttactaacatgtatgttggattataattctataatcaaacatcctaaatatgaattccctaaacaatgaaataaacacataaaagttatagaaaactttatattgttggcagtgcaataatatgactccttctgttcagatctctaatccttgatcctttctgtttcagcgtatgatcaagatttgaacttggattctcctttagttaacaatttgaactacacaatatttctcattatgttgagtattgctttgaaatgtgtgggtaatttctcaacactaaggaccacgaatttttgtgaagaaacactaagagaattttgaaataatgaatagaaaataatagattttctttttgattcactttgttagacaagagagagtctaaaatgtcctctttaaaccaaaagttattatgttctatttatatggattcattaggttcagggttagaactaaatggactgatttgaaatatccaataacttaaaataaactcttatggctgaaccccttataaatgcccatgagttagattagttccattattttgctcccataatgaagcaaacttgtcttccttcaataatgtcgtatttttgctttagttatttaaatactagttctatctattttataattaaaattaattatcaaataaaattaccatttaaatatatttattaattagaccttccaaggtctcttaattataactaaaccttcaattctactttcttctcaattatgcccttcctttgtaaaattcacaaacaagacatagtctttatttagaatctattgacctcaaatttggctaaccaataacagagttgaataaaatgctattgcttgccacgtgttacacaattaaaagaaaaaagtaagtagacacaagattttatggaggttcggcccccttagttagtgggtaacgacctactccccttttagttgaattgatactagagataataccacttagatcactatagtgacaggatatgaagtggctctcttaagattataatgtgataaccagagttcgcaaatctcaagtgagaatagagtaatgggtatgtgagagagagatgagataagttatcaaacttagagcttgatgcttaggatttgagactttgggttttagggcttgactaatgatctttatataggagagcttacatccctaatatccctaaaaaataggtaaataagactattatttaaataataaattaataaaatacaaatgactaaatttcctctcaaaaatagggaagatactgatatttcccctctatttttgtgggttgttaaggcccaatttgtggtttgacttgttgtccacagatgaaatttgcacaccaaaacttaccagaccaaaggttggccgaccatgcacctgtagagtgcatgctggtcggccatatgatgtctaaaagatggctgacctatgctagccataggttcggtcaggtgtggccatccaaccccctttaggtggctagtttgtaatgtcgtcgtccttcctaagtactcagacccctcgtttaataaagtgatgagtagatgagttggccatcttattaacaagctatactcccacgtggcattaatgttggccacatggacatcccatgtcaggtgggaaaaattgggataacattttcctcccaagtccctgtgtagacgtttatgcgaatagggactttctagcttagttgggtctgttgtagccttagctgggaaaatattgcagtataattagcctttgaagtattttcccttgactgtctaatcatattccgtagcaatgagttaactgcatttctcttctgcatgttttttagttacatactgcatggcaagtgaaaaggggtcccaaaaaacctatataagcttatgggagggaaatcacttttcactttccacatttcaatctctctctataaaaagtaactctagatagatcttccatctctctagaggctgacgcttattgtgatccatctcttgggaattttgcaccattttcacgattcaagcttcccatcttcttcaacaacaacttctagtagtgtttaagctttataatctcgttatacactaatttatttgattttgccatggttttttgtagcttttctttactttgaatattttttgattcccacgttagattgtaatatttttcgtattttgatcgacatgagagttttaggacatataatgtgtgatttcttgacaaaagaatttaattttgacctttgttgtgattcttaactctttgagtcccgaagaacacaaaaaacatgtttaagctcttgaaaaacacacactttgatctataacaaaccctaactggccattgaggtcttgtgcaagacctggctggccatgggttcttcttttgggagttggtcgaaataggggtaccctaaagtttgggcggccaatgcctaggcttagggtccctgtcttacccttcactgcgtcatggtgttggattttgtgccctaaataaaactctattttaatgtaatctttaaaattcctttattaataaagaaatagatttatttcat

SEQ ID NO: 31400 - DNA, 4115 bp, Cannabis sativa
tggtaaaatatttccaacatagaggtggtcgtcaaggtcgcgggtctgcatccatatcatattcagagtgtcccaaatgtaagaagcaccatcaagatgagtgttgggcaaagacttgttttgagtgtggaatggtggtccacttcatccgagattgtccacatgctaagaaagaagaaccaaagaggaacaacaaccagaatccgggacgtatcttcactatgactcaggttgatgctgatgctagtccgttagcggtgataggtcaactgtctataacagttgatcttattcagtattatttgattcgggagctactcattcttatgtatcaagtcgagtaattgaaagttttcataaacttgagtgtatgctttggggtttggtaccctgttaccctagggagacctaatcgtatttaccaggtggattaggtctttgtctttttgaattgacagttatgagttaaccgccaacctaactaagctacaattgtctaattttgatataatcctgggaatagatttcttgtctaaatacggggcaacaattgactgtaagcggaagatggtggtgtttgaacccgatagtgtcaaaccaacagtgtttgtaggtaaaaggtaacaaggatcacgcatacctagaataacactcctaaaagttaaagatctgatgcacagagattgtctaggattcctagtcactgtagtttatactagccaacatgtgttatctagtcctgaaaatacgagactggtgtgtgaatttctatatgtatttcctcaggatttacctggattaccaccttcccgagaaattgagttcgtgatcgagatagttccgggagcagaacaagtatcaaaagtaccgtatcgaatggctccaacagaattgaaagagttaaagatccaacatcaggagttacttaacttgggattcataagaccgagttatgctccctggggtgctctagtgttatttgtgaaaaagatagacgagttgcttcaaatgtgtattgattatcgagaattgaataaactcactattaagaataaatatcctctaccccgaattgatgacctgtttgactagttaaagggtaagacaatcttcttaaagatcgatgtaacaccctaatagattaggcgtattacggtattttctaaatactgtgcacacctttgctaatcaaagggtttattggaaaaagtgaataattaaaacttcattaattaacttcattttaataattaaacataataatttacataatctgggatcccgttctaaaagttacaaaatatttaaacttcaaaagttgtcaactagagactagcaaagtgagccaaaattgtcccaaagaccatgaacactctaggtctaaccgacttgatatgtacaatcttcatctatagctttagactctcactgcttcggttctagcttttacctgcacatacatgcaataactgtgaatcgacaaactcattgagaaaagtataataataaacataaacatatatctagacagtaaccaggcgcccataaaactaatcacgatctgataactggatcaggaacgttctcgacaaagtatgactaactacgaatctagcctatactcagtattctagtcgtactgatgtggtagtagttaactcatactatatatcaaatagcctagcatatatatgttgccatctctgtgcaactctatgtaactctatgtacacttcactgaaaccctactgaaaccctgatatgctaatctgatggctattgatttgcgtaacatgtgtatattggtatctcggtgcagctctatgtacacctcactgaaatcctgatatgttattctgacaacaactaacatgtacgctaaacatgtatacatatatgaaactgttatactaatattaccttaattttgaatgcaagtatgtcggtaactctgagtgaaaactactgctcgacgatttacaggcccataagtctaacatacgtacaactgataagtgtttactctagaacacttttctaatgtctgaaaagaacctagagtttttctaccaaactatgtggtggagacaccctaaaataaaatacataatttggctcgaatttatatatgatatcgtagagctcgtcataagctttaaaatggtatatagaacgtctaaaacggacacctgagtaaaatgttatggccaaaatactaaaatcggcctttctcgatgcagtccaaccaaaatcccggttggtgcagtcctaaaccaaccaaaattttggttgtctgcgcagaaaaacacgacaatttccaatcttccaaccctcataacttggtctaatcaaacccaaacgctaccaaactttccaaaatctcaacacaccacataaggaacctattacatagctttaaacaaaaaaatttatactaagaatcaagattcgccatggaagagcaaagtttgagctcttaagctcaaactttatctaaacaacacaacaagaatcaaactaaacttaattcaacttaaataacaaccaaataacttctaaaatcataaccaaactcgaattaaacctatagtacgttacccaactcaacaatcctccatgaaacctaaccttcaagtttaaaaaaaaggagaaaaagagggaaaagcttacatgacaaattacttaagctacaactgttgaattcctctagaaatggtctcaattgaataagaaaattgttgggttttcccttggttctaatttagaataaatcctaatgtttatctaatgttcaataacttaaattcatattaactaagcttaatatcaacccactaaaggacaaaagaaatctatggcaaaagaccatttgcccctttctttcccatgaacttacattgcaaccaaagggcattttggttatattaaatacctcgaatattctcgatatctctaatgtctaactaaatttccccactaatactaaaatactaaaccatcaaatgtgactctatcggccaaacgtcgcgttccattgttactgggcataaaacatgaaattcataaaaattcatatataacctaaacaatgcacctaacattcaaatatatattcttagttgagaaaataatttcctaaggtctatttctgacaataagccctaatttctactaagaggcacaaaaatcacataataataattaacctcttaattatcttttaattcccataacttaaccatgcggtcattacaattatccgccataaaaggatttcgtgaaatcaaatctgaataactggggcctggagccacacgtcggattctaattcccgggtaatttccttcactttattatttcttggaatatgataactaataccataactctgccgcatatatttttatttttcttatcgagaatcttaacctatttgtctttaaagagataggtttagctgaagttctcgagttccataactaaagatatgagccaaatttcccaatatattacatgaaaacatcttgtgtgctgcaaatgctacttgtaaggttaaacacaaaattattatcctgatgttctctggaaattctaaaatttttatgaatcttattcttgttcccaaagtatttctcctacttaggaattctgcattcttttgagcttttgattaacatgacctctactgtctatgttgagaagcaagtaccctaatcataatcttctctatagccttattaatatgctgaactgacctcagatctatcctattccgagtttaaaacaggaacaagacttcatacatactatataacatctttatatgaaaccatccctgttacactctgacaactgttggttgcacgagaacttgatcaaaatagatatttattccataagttcttgtaattcatcacataaacttgcagtatatacttcaatacttaaattgtccctccggacaggccatttgcctaagtataggaagctgtcctaaactttaactacacaataccaatcttctgtagacttcgttaaaacctaaagaagaatttcagtttcctatccgaaataatggactttagagtcgcaaaaaaaaaaaaaacatactatcc

SEQ ID NO: 31401 - DNA, 1317 bp, Cannabis sativa
tcttgaagcgaaatccttgatgacttttgtttggaaaatgatttaggcaagttttctttggatcgattgagcctttcaagcctaccagaaacgttttattctaatacacccaaagttgagccttagcctattctaaaattttttcaccacttaactaagctgaattagttatccttaactacgttcaccctaaacatacctcattatgccataagcctttaagcaagtttgggggataaattgttgtaagtgggggaatacattttggagtgagagattgaaaaaatatataataaagttgttatgtgttgtgcctctattgaaaaagagagaagaagaaagaaaaacaaaacagaaaaaaaaagtaaatgcgataatttcttcttgagaatcaattgtgaacaattgggcaggcacataggaaaaaatggcaatctcttactatcttctttggggtatatgaaaaagaaaaaatggataagtgtgggtgctcgtattgtgtaattgtgcttatggtatagtgtagcttaaatgacttttcacctacccgtgtacctaagccatgttgttataatcgaaaaagacctattgattccgaagaaaaagttgtcaacattagtggagagaggtatgtcatccaaacttattgaacatgggttagcggaatgttggaaagtgtagaatggttgtgatatgagtgtcaaaagtgatgttttgtgtctttatgaattgcttactcttaaattgtgcatccaagttagttcttagagttatcgagttgaaattctggttattgaatgtttgaagttgtgcaggtggtaatagcagttcaatcatctgaacgtctagttgtctattgcattgtttagtttgagtcttagctttactcgggggcgagtaaagattcagtttgggggaatttgttaggctacttttagcttatattttggatcgaccttgtgttcgtttttcgttgttttaggacggatttatgcgtgttttctaagttttcaggttcctcggagttacagaggtctcgggatgcaaaagtgcagtaaaagatgagcggagccaagaaaaactcgatttttcttacttatgcatatctggccgtggcgaggtacactctagccgcgaccatagtgaaattacagaagtagttttttagaggtacatctagccgcggcgagggtatataaaagttacagaagcaggatttttgatgtctatctggccgcggcgagatcccgtacgacccaggggtaaaattgtccgacgaaccctaaaaatcacttgtaaatagaaaactgcgattgg

SEQ ID NO: 31402 - DNA, 1867 bp, Cannabis sativa
cttcattatgcaagttgaatcgcaataatcaggtcaaatattgagtgagttatggctattttactgaaggcaattaatgacctagcttccaggttggcatctcagtacctatgttgacatgtggcatcaacctggacgttgggtaagtgtaaaaatatccaagggatatactttacgttgcctaagttatattttgacatcacttagtctatttctatgttctgatgaagttggtcactagttctcggagatattattgttttgccgaaatgagagactcgaaactcatcacttttaggtaagtttcccatgttgggaataaggaatgcgaaattgtgaatttgacttctctaactgcatgggtcttaattattgtaaaaaactagacggacggttgaaacagaattagaattggataagaaaaacctagcgcaccagacaatttgtcaacttgtgtattgggtactcattcttgaggtcctaggatctcgttttgatacttataaggttcttgaatttgaggacgaggtctcttaccccatttttgaccattctaaattcattggtcgaatcagatttgacatttgagtaatttaaagcaatgcctcaggttaacattgtcaactgggcaccgagagccctgtttctaggggctcaagtttgtaattttctccccgagtttgcttgaaacctcattattattgattactaaaaaaattcctagaacactttttcatgaacttgattggaaacaacctttagaaattctgtttggtctccaaaaatagttgatagttgaatcttgaatctcaattctcaatctttaatcttttttcttttttgaaaacgaaaaacgaagaagatgatcgaaaatgtgtttttgaaaaatatcatcggaatcggccaaagttgacaaaatatcaacctaggtgctgggcgagccttaggtgtcaacctgggccctgagccttatttttggcacccatgaagtgttgtttcttccccgaaagtacatatttctcaatttttgataaagacaaagaagatgcaaaagttggatcgtcaatctaatattgaaagatatagtgagttcgattcaagttattgaagtttgaacttccattccagagctcccaaaagtcaacctgaatgcatgcagggctaaagtcccttaggtggactgctatgactcggatctactcaatttcgtgacatcatcattcttgtcatgtgttaaacattgatgtctacatcactagaaatttttttcggattaacataaaattatacttataatatatatttatattcaataaataaaattcaaacacaaattaggattattttttaaaacacaaaaaaaatttaaattaatatcatatatgtatgaattccactttgtggtaggttagtgccctttgaacaaaattccactttgcaaaaaaaaaaaaaaaaaaaacgcagataatctatgagttgtcttaataagaaaaatttcaaccgagaagatcaaacaaaaacagagagagatatattagcattaccgtttctactaaattagtaaaggttattgacttttcaaagtcaaacacagctactgtagcttctcctaagccaaattattgacttttcaaagtcaaacacaactaatgtagcttgagccatgctgatattttttttaattattttttccttcctccattaaacttgcccttatatataggtcgtggaaaagaaaatcacttttacccggcactttaatttcgggtgagaggagaactatagccttttcacatcaacattatatattttatatatatttatatttgttccaaaacataaatttttttatttttgccatcatata

SEQ ID NO: 31403 - DNA, 1334 bp, Cannabis sativa
  modified_base (27)..(41): a, c, t, g, unknown or other
aggatgttaatgaaacatacatggtannnnnnnnnnnnnnnggtaaaatatttccaacacatatgccctcacatatgggtcttcattttcaatgccctcaagcttggtgagatgtaaaatttacgagccccattgttcaactcgactcttatgaaatgatttaccaaagtacaagccaaggaatgatgctaatggaattggattgggttgtagcaaatatggatcttcatatgtgtacttctccataaccatttgcttactatattgataactaattacttgttgcatgaggggtggtggtgaatttagtgtttcttcattactttgctcaaaaaatttctcaacaccttgggtagagatagtattcgacaatcttgaatatactattttatctgccttttttttttttttttcatcattttggattgaagtaggctccatttgttgctcaaagatttccccacacttcttaaattcttcattgtttttccaagtgatttcttcatcaccttcccacacatttttcatatcacttgaaagtacacattgcggtctattatgcaactcccaagataactcctcaacttgcttccctaaattctttaagaatgtggcattgctatgaattaaggcattatttttagccatatattcatttattttatccatgtatgcattcaccttctccatgaatgcattaatcattgatattcgatctcttaataaatcatcttcccatggtccttgagtgtcattatcaaaagtttgctccatggctagaggtgttctcccaaatttagttggttgttgaagaattccaacaacactcatcatactccgccatgtcctccaacatccaataggcttcatcgatagatagttggtagaaattggtggtaccatcttctcctacccattctcttgtgcttggatgcaacccatttaggaagacttcaagtacacaaattcacttacaatacaaattcaatgtaaatgtcatagaggaatgcattagtaattaaattttatcaactggaaatataaatgagcatatgatttttccaaacctatatgttatgggctctcaagattaaattaacatattcctatgcaaatctagacttagagaacacaaattaagcactaattttccatgggtcatacatggtaaataacatattcctataccatctacaaattacacttttccaaggtgataattttgtatcattcaagtattccactaatcttattttttttccaaaatcaaaattagctaacaccctattacaattggtgagaaaattcaacaaggctttttttttttttttttt

SEQ ID NO: 31404 - DNA, 3404 bp, Cannabis sativa
gtcatgctttctcatatgaagaagattaatgatgataagaaggtacaatgtatcaaaatgctaacatgaatcaaatattttttttttaaaaaaaatgaaaatattgttcaaaggaaagagagtagaaaaagtagttatgtgacaacaatttattgatactaaacctcactgtctgtccaaaaaaatcactacttttggcttggtatagcttttgaggttggtctgggtccctatgaaatcctttcacacagctcattccaacatcaaagctttcaatttgtcaaaaattcccctctttcttgctacaattattttattagtggaatgtaaagataaagtgatcaatatatttatttttattgttaaataattattggggttcatgtaggaatctacttatttaaattatacgtagtatatacttactctattaaagaaggtaacatggaggacccatataaaacaccaaccaccttagttgaagtgacaacatgactaaaaaattcatgcttttagagtctcctaatatctttttttattattattattactattattttgatgttaatactattttaaattaatgtgttttataaaagttattgattatactatttgttttattaaatgataaattaaatttgtcctttttaaaatagtacagaataatattttaaattaattttttgttaaaataaaacttaataataatataatctagagatattatgacaggacttattatatttctacatctttttttgttagaatttgttttcaagttggtgtcattaaaataataaaataaaagcaaatgcatcataagaaaaaaaaaattacaataatgatccaaacaaaaaaattacaataatgatccaaacaaacaataatttttaatctccattatttgtagattttatttttcttgtctattttttttaacaacacgtttgttaaatttgcattgtgatgatatgaaatcaattcatggtatagtatgaaatgtgtatgtgtgtgttttttccaaccaagtatgaaatgggattttagagtaaagtatagttatatagttttattccatacatgtcccttttttttaggtgtaagtgtaagtgtaagtgtggttttataataatagtgaaaatttctcaaaaaaaaaaaaaagtgtaagtgtggttatcctttacatataaaattgtcaataaatatatatatttttggagacaataactgttccattatccatactctttttctctatctacactctaaaaaagccaaacagcccaaaagacaatgtaacaaataccctcatcatcattattcatcaaacaaactcccttttatttttatttatttatttattttatacataatctaatataccatttcaaaaaataaaaaaaatacataatttaatataataataactgtacacaaatttagataatgattcctgtattcatgcatgaaacgaaacatgaattcatcattgttgttattaataataaaggaaaaatagaaaccgatacactgcatgcaatacatattcgaattaaaaaaataaattatttgttctgcaaatttcagccaatatatatacattaatattatcactattctatttatttatttatttttaactaatataatacttatggaatttactctagtcttcactgatatggtatcccatgctgcaaaatcgcttaaaagtcaattattgaaatattcagattgtccttagtttgactattgaacccaattattaagtatttacatgcatcaaaattcaaattttgtcattatttcatgttctaattagatcaaaatatatactgaattttaattatttatataacatcttgttaatgctgagctcttcccccaaactgcattgtcacgtggctttgagttttgtaattgtaacaaattttatttaaatgatttttattttttattcttggatggttgaatataatggacggtcatcttggaatatgaagttactttaatcaaacattataatatacgaaaatgtattaaaataatatcaatctagatactagaattaactttattatacactttacggccgtacaataagaataaatactatttttttatcactgtatttttattggttttttttttctttctgaaggaaaaaaataaataaacaaataaacaagtagaagtagtagactacacgtgataatgaattgtgaatacaaggctatggtctgagaaaatcagttaagaatttttcgagaaagtaaaaaaaatacagttaagaattaaatacatgacaatgacattgactaatattagtttatttttaataataataataaacaaatgtttttacttgtctcagtaaaattagttctgatcaaaataaagaaatcatttagttatcgaacctatcaaaaataattaatataaaagtgaaaagtaaaataaaaagataaatgctttgaacttttatcccaaaaagaatgggtaaattgaattttaattattaaataattcttaaaaccatgaaaagaaaagctgttaagctgccacgattgcgcacgcgccttgtaatcagacaaaagcaaaaggttggagaatgactggctaagctatacgtgtgcctgactacaccagattctgactccccaactccgaataaatctcacctcaccactcggccgagtcaaaactcaacgaatacgatacaagttgagcctggtgttgggagtgggaccaggccgagctcatttacttgttcaaaaagccgaccgttgcaggctcaacgatggtgggccccttagcaaagccacgtggcaatctgattcatgtggggtccaccgtcgaggcagaggctcgagtcccgaagctaaacgaggttccttcggaggagtagtgtagtcctatcctagttggctcaatggggtttggttttagatttctggtcccgaccacgatctccaccgcttaacggtcacgccccaattcaacccaactccctcgccgttgttccctttagcattaattgttttacttatttatttatttttgcatatataatgatttatattctgtcaattaattattattgttgttacagttaaatatttaattaatgaaataagaacttttcataaatgaaattgaatccattaattagtagtaatgataatgcttgcaacgttaatatatcttaggagaatataaccgccatgattatttttgtttgacagttttttttggattaaattttatatttgcaaaatagaaattatgggttgtaacaggggtattttcgtcagactaagaaaaaataaaaagaagacctgccagggttgcaacgggttgaaattgaaaaaaatgagatttattattctagaaagaaaaga

SEQ ID NO: 31405 - DNA, 1864 bp, Cannabis sativa
caaaacttattgatcctctaggagattaggacattgtaaggtgaatagcacttttaattcacaggatgtcgaactcatcctattgatcccattaagtcccttggagcacaaggataactagtgttggcattacacggaacaaaataattattcagtaaaaagtgattataatctggccatgaccagagatgagggattgcattcttcttctagtgaggtgttgtcaatatggtggaagaaattctggggtttaaaaattctgccaaaaattcttcatttttcatggcaaggtttccgtgagattttactctcgagggtggcttgtttcgacgtaaggttgttcctcataataactgtcctatttggggttatgggggtgattcaaattcacatgcaatttttcggtgtccctgggctcaagaaatttgactttattagattaccctttccttcacaaggcgaagaaagatttatcttttaagcaagtaataatctatgcatccgagattgtgtagaaaaattcctttgaaagattgattattatttcatcggcagtatggacagagataaataagatgactcacggtgaacatcaaaaacaccctaagcaaataattggttggatctcaagtttctgtgactctattaatttagcgaaggaactagtaaagaaaagtttggctatgagtgacgagggagtttctaactactctccttcttaaatagatcctttcacaatcattggatcccctttgctgatggacgcaactgtcttaaaggaatctaagatgtttggtgtaggggccattattatgtcaacaaatcatatagtaatggttgcgttaagcaaaacattacgaggttagtattgtagattaattttcaaggttattgtttccatatattagacaatagtatattctaaaagttttaaggatttttaaaaatttaaatactccacactaaggactagtataaccaaaagaatctaagtagagtagtatgggttatgtttgtctccttgctgagtttgtacacgaattataataattttgtcagttactaaccaaagtgttggactttgattagtatgggttgttttgatttattttttttttcttttattgttttaattgtaatttcagttttggtgttggaggggttttgatttggttgttagtctcttcttattttctctagttttgtgaatagtatgttttccagcttgtataaatgttgttctgttgtttgttgtttggttcttttcaggtagtactattgtttttcaagttgaaacttttgccatactgactggactaaattgggctcattcgtgtgggatttccctagaagcgattaaatttgaatctctctcagtagtaatggctattaataacaggatggtgttcgcaaatgagatgggcgtgttgttagaggatgtcatagccttattgtctaaatttccaagggcagttttgtctcatgtgtcccgcaaagataacactgcggcccatggtttggctaaacatgcccttaggctagacagttatgatggtttgaagaggtcccagcaccgattgttgaagtcttctcagaaatgtctttttagagcatttatattgctatattttagtacattaaaaaaaaaacctattttaatagtgtttaaaatgtgtatcagatttggcacaatatataaaattgtgttaaatttagtctacaataaattataacattttttatttattataatgccactaattaatgtgattcattgatttttatataatctttatttaccatactatcattacgaattattacatacaaaatataaattgacattttatttacaaaaatacct

SEQ ID NO: 31406 - DNA, 1672 bp, Cannabis sativa
atttaaaactggtttccttaacaactaccagtctgaaacacctcttatgatccatagctctcaatggtcttacctgcctatccccattcctactgtgtcacaggtcaatgcaccccctagagctcttggcactcgttctaactctgttgtttttcctccttcagaacagcctgttgcttcagatattgagtgggagacagcagcagtaacaccccgtgttcatgaccatgatcctgtcattactgtctctcctatgaactcatcttccactgctgcatttgtgagtgatcaaccatctgaaccggctgtcacaacacgtgttgctccacaagctacccatccaatgataactcgtgccaaggccggcatcttcaaaccacgatttttctttggacaatcgaagtgggagtctcttcttagagaaccaagtagcctagaagaagccatcaaccatgctgggtggaacaaggctatgaactcagaaatcatagccctcaaagccaacaatacatggtacctggttcctacagcacctggacagaatcttgtgggaaacaagtgggtttataaaataaaaaggaatgctgatggatctctccaaagactcaaagcgagattggtagcaaaaggatttcatcaaagacccgggattaattttggtgaaacattcagctcagttatcaaggccttaagagtccgaatcgtcctaatcttggcaataactaaaggctgggaaataaggcagctagacataaacaacgccttcctaaatggaaaaattgaggaagatgttttcatggttcaaccaccgggttttgaagaacctggaaaggaagattatgtgtgcaaattgaataaatctttatatggtcttcaacaggctcctagagcatggttcgacaaactcaaagccacccttgtaacatggaatttcagacaatcaaaggcggacaactctctgtttttcttgaaaacatccagggccatcatccttgtacttatttacatcgaggatataattgtcacaggaaacaacatcagtgaagtcaatagcttcatcactcaactgaacaggttattttccctcaaagatctcggtgctctacacttttttcttggaatagaagtacacagggatgattcgggtttgtatctcacccaaactaaatatattgaggatctactgtagaaatacaacatgaccaacataaagtcgtgtcccacacctacagttgcaggaaaaccgatgtctgtatctgatggggagccaatgcacaatcctactatatatctaagcatgattggttcattacagtacttgtgtcacactcgtcctgatatagcgtatgcggttaacaagctaagccaattctttcaaacacctacaacaacacattggagtggagccaagagagtactaagatatttaaaaggaacaagaacacacggcctgcatatcaactgcaacaatagactgcaaatcataggctattctgatgccgattgggcctgtttcccagatgataggcgttcgattgctggatactgtgtttacctgggagattcactagtatcttggtcttcaaagaagcggtatcgagatcaattacaaaatccgaataccgtgctctggcacatgtagcagcaaaaatatcgtggattgagtctctac

SEQ ID NO: 31407 - DNA, 3679 bp, Cannabis sativa
aaaccctcctccctaaaccctaaatcctaaatccctaaacactttacccaataccctaaaccctaacccctaacttggacacgggcctaggcccatacccataccgagatcgaaacctaggaccgcgaccccgacccggatctagacgcgaacctagacccaaactcaggacctgaacccacacccaaacccagaccaaaaccttgtccgggacctagacattgtctcggacccagattgggatcccgccccggacccaaatagggaccaggacttagaccgggacccaaaccctgactcaaacctaaacccatactaagacatagactcagaccaaaactcaggatcccgacccgaatctgaacttggacctagactgggacctaggatccgaacctagatgggggacctaggccctaaacccgaacttggacctagacctggaccaaggatcctgacccggatgggggacttggacacaaaactgagccccagatctgggatcgaacccaaaactcgaccccaaactcgagacacgggacccgaccctagacccaaaacccaggacctgacttcaagacacaaccccaaacctggacccataccaaaacttaggacgcgacccaagacccgggacccaaactagaataagaccgagatccaagactgagatccgaatctggaccgaaggcttcgacttgacctgtagtcagtgtttgaatgtaagacccagacccggatctgtacccagactcatacccggacacaaacctaaacccaaactaaaaccattacccatatcgagacttggacccggactgggacctgtgacttgggacctaaaccaagagctggacttggacacaaaccgggacccgaacccaaacccaaacccagacccaaaaactaggctcggacccaggacctatgaaccagactcggacttaagacccaaagctcagacccatactaggactgggacctaaagtcagacccgaacccaaattgggacatggactaagaccaggactcaagaaccgaacccgaatagaaacacaaacttggacccagaccgagacctggacctgaacatagatgggggactcggacccaagaattgggcccctaaactgggaccagaatttgggccttggaacttggatcacgatccgggacccgaccccagacccaaacctcgaccaaggacacacctcgggatctaggatccaggactcgatgtttggactcgacgcgtactcggtgtctagatctaggacttagatgagaacccgaacccaaactcgaactcaaacaatgacctggacacagacccacactcgggaaccaaaattgaaattggaactagaacccaatcaggatcatggaacgcgaccgagacctagcatcggacctgaacccagatttgggcccagccttagactctaactgagatcgaaactcggacctgaaccttgacccagaccaaaataaggacctgaacccagactcagccccaaaatcaacctgaacctgtacttgtgacttgaaactagaaccgaaaccagaagcagatcaagacccaggaccaggacctagacctaaaactttaaccagaaacccaaacctgaatccaatcccaaaccgagactcacgacccgaacccagacctgaactaagacagacccgaacatggaacatgactctggaggaccaagaattgggatcgagacccagaactgcacccaagtctcggtctcgaagctagatcgagacccataccgagacttgcgacatgaactgaaacaagactgggacccgcgattgggatccagatcttgtccctggatctgggaacttaggcctggagaagacccatagtcggtgtcaaacctgggactcgaaacttaaacatgaaccagaacgtgaccaggaccctggaacaggaccgggatcgtgactaggacctggacctggaccgagacccggaactagaccagaaccaagccccggaacaagggcttaaacctgttcctccacctagtcccgaacccagacaaggactgagactcgaacctgaacttgaacccaaactcgggactcgatctaagacctagaccaagcccctgacctaaactgggattctgacgtggacatggacatgaacccagacctgacctgacctgaataccgacccagacctagaccaggatcgaaacacgggactggacccagacccagacccgaacttgggacctaaacccaggacccgaacctggactcggactcaaacttagacccagaccgggatccaaaaacccatacccagactcgaactaagacttggacccgaccccaacctagacccatacacgggctcggaacaaaacctggacctagaatcagaactgcaactgtgactaagacctggacttgagaccagaaccgaacccaaaccataactaaaacacggaccagaacctgtaccgagaccttgactaggactaggacctcagacctgggacctgaacctagaccgagacccgaactgggacatgatcctaaaccctcgctggaacccaagacccatgagccagacaaagatccaaaccttgacaaggacccaaacctgaactcggaccaagactgggactgagacctggacccaaacctaaagcgggacctggactaataccaagacttaggacctgaacccgaacctcgacccagactaggacctaggaaccagacttggatgggggacgtagaccagcgacctaggccctggaacccaaacccagatcaatatccgcgactcaaacccaaaccaggacttgtcctaaaccttgggaatccaaagtcagacaaagacccagacccgaaacctgccccagacccaaacaaggcaggaacttggacatgaacccatgccaggacaaaacctgaacccagactcgaacccaaaatcagacccgaacccaggacccaaactaagacccataccctgaatcaaacccaaacctaggcctgcgcccagaccctaactcgaacccagaccgggatcaaaacccagtacttagactcgaaactaaactgggactcagattgagatcgaaacctaggactcggacctgaacttagacccagacccaggaccctaacccacacccaaagcctgatctgaacctagaccgagatccggacccaaacccaaattcggacttggactcgaaccccaactcaaactcaaacccaaactccaactcggaatcgcaattggaactggaaccggactaggactatgactaggcccaggactaggacccagacccgaacccaaacccaaatgaaaacccaaaccgagacccaaacccaaaccccgactaagactcaaacccgaacctagatcgggacccaaacctagataaaaactgggacctagacccagaatcaggacaaggacctgggcaacggaactaggactaggacccaagacccgaccccagaccaggacatgaacctaggacccagctcatgacccggcacccgaaatggaaccggaccaggacctgagatcgagatccagatcagcacccagggcttggacagaacccatagtcggtgtttggatcttggacccagccccagacccgaacccaaaccaggacccgaacccaaaccc

SEQ ID NO: 31408 - DNA, 1527 bp, Cannabis sativa
tggtaaaaataaaacaatcacaattgcacgagaattataaatagagaacgaaattcattaaggataacaaaagcacatattaccgggcttaaaagctgcccggtcagcctgttgtctgaaaaatgaaaaataattccaagtttaaagaccacttggccggtcatgatgtcttagaaaaggcccagagcccgaataagaaagataaaaatgaagagataaaaggagaagtgtttgaacagctggagtccaaggctcttggttcggttcttcttggccaattggagatggaggatctgttgtttgaacaggaggtacatcagcagcctgaccggaggttgaaacagctgcatcaatttcgccataggccacttgggacgcgcagaactcaaggtacatgtcctaagcatcacccaagtagtcaaagttggcctgaggattaggcttccaaaagtcaaagaagagctcaagactggctgtctccaaggcattgaccttctctttcaaccttggcacctcggatgaaagctccttctccttggattccttcttgtccttcagccgatgaagaactgctcgaagagaagtcctctaatcctgaagactgttaacttcggcagataaggtctcgatagtctcctcaaaatggtcagctacctcgagatccttagtcagctcagttatcttctttagggcgagaaacagcttcttgttggcttcacccaattccacccaacagctccgagttccgcctcttcagtcagcatccttcctcgccagccaagtccgcctctgccctcatggtgtcggacaaagccgtgttcctagaagcggcagactcagcccgggagtgagtgtaggccaacttcagaccggcctgcagaaaggaaaatttttagcatttgagctaagtatggaagattaacgggaagtatcaagaaagacttacactggtgaaccccttcaaaactccgcccaccaccaattccaaagaagagttagtgtcagcaccagccagttgctcactgacctcaggaaccagtcggtccatgtaatgggccagcatctccttgcctttattggcctctggaagcaccatcaaaggtggagtaggtgcctgcacccgttcaggttcactcctgaccaactcagacccaacctttggtggtccagacctgtccaagcttcctccccgagactccttggacttagcatcttttggggtagaggggtttgcagcagttagctcctcaaaaagatcaatgacctcctcttttccttagaagaggacccctgaccgcctttagacttcttggctggaggagaggcgatagagcttttgcccattctcttctttagagcctcaaacatctgccgagacctgtctgtacagaacgaaaaacacaacatggttataaaaaaatagacatctgaaacataaggcataaaagtcaagaagctcaaaaacaagacaaagtagtatgcaagctgagtgcccaaacaaggttcgaaagttcatcatcacctgac

SEQ ID NO: 31409 - DNA, 4019 bp, Cannabis sativa
cgaatattgtgaaacgtctccatttaaagcattgagcagcattaggcaatcggtttccacaaagtcgataggaagttgatatgtctttgcccacgaaagaccaacagacattgctttagcctccatttcctgcgacttaaaattccctatggctggagtagaaagtgccgctttaacctgtccagccgagtttctaacaattacaccaatcccaatcttgctcctcgaagaatccaaagctgcatccacattcagtttgaatgtattttctggaggaggcttccaactggcaactgaagcttgactggtgcgattggaagctgctggtgttgcagcagaggtaatggatcggtactgatccatataggccactgattgagtccacatttggagaggagttttaacctttttcccatgaatgaagttattgcgatcagaccatataaaccacatgagacatagaatattctcaaaagctgatttttcataaattgaagacaaatgcataagataatccccatcttgcagtcggtcagcattagtgaaatcaattgaaaaaccagaaaatttccaaacttccttagcatggcagcaagaaaataaagcatgccctatggattcccatgccgattgacaaagagaacatgttgcagatgttaaaattttcctatgatacaaagatttggcaactggaatggaagattgaattactttccatccaaagatcttgaccttagagggcaagtttaatttccaaaaagacttccaccaagtctcctgggtgtgtgaacatgaagataaatcctcttcacccaaagaactagcaagagtataacctgaactaaccgaatagtcacccgaatcttcatagtgccaaatccatctatcattgacaggaagaaaagacaaaggaattttaagaatgttgtccacatctggtgttgagaaatctgattgtaaacactcaatattccattctctagtagccgtgatgtagtctgcaacatggtttgtgtgtgcacctgtgtaacagtaaggcttaaaacctttatgacctggaatccatgagtccacagcacacctaatattgttacccgtaccaactttcagcctcaaacctttcacaagcaattctctaccccacactataccttgccatgttaaagaacttaaaccacctcctcttgctgtcatgaaatcattctgagaaaaataacgtcctttcaacacacgactgagtaaactagtaggatcttggaaaatacgccaagcttgcttggctaataatgcttgattaaagtgcacaaaagatcgaaaccccatacctccatccgcctttgatttgcaaagaaatcgccatttcttccaatgaattttcttgttatctgaagaagaaccccaccaaaactttgccatcatagcttcaatttcgttgcacaatttgaccggtagacgaaagcaactcatagcgtatgttgggatcgactgcacaacagctttcagtaacacttctttgccccctattgagaaaatcttatcattccatgcgtgcattagtttccatattttctctttaatgttgctgaacaattgtgatttgtctctctcactataagctggtaaacccaaataagcttcatggcattcacagataggcatacccaatatttgctgaaaggagttttgaaccgcaattggtgtgttcggagagaaggacattacagacttgtccgcattcaattgttgacccgaggctcggtggtaaatatcaagagctcgtttaatagcaccacatgatcgatcatttgcttgacaaaacaacaagctgtcatcggcaaaaaaacaaatgcgagatagatggtgaatgatgagatacagccagcccttttaatcggcctatttgttcttcatattgaagtaatctagacaatccttctgaacaaatgaggaatagatatggtgagagtggatctccttgtcgtagaccacgctgaggagtaactgagcccataacttcaccattaatattaaatgaaaacacattggtatgcacacaagacataatcaatgtaatccatctaatattaaaccccatcttgcccatgaccgcagcaataaaagaccattcaaccctatcaaaagccttgctcatatcaagcttaagagcagcaaacccttttgaacctcgcttcctatgtttcagactgtgaatcaactcaaaggccacaagaatattatccgtaatcagtctgttagaaagaaaagcactttgagtttctgatataactgagtgaaggacttccttaagccgagtagccaacatctttgagataattttatataacattgcaaagactaattggacgaaaatctttcatttcctttggtttcttaatttttggaattaaggtaaccaaagttttattgaaaggtgctgggcttcctccataattcaagacattgagaacaacttgtgtcacaagatcaccaacaatatgccaataagtttgataaaacattgctgacataccgtctaatccaggacttttatcagatcccattgattttaaagcagcataaacatctgtccgagtaaattcttgcagcaaaaaatcattctgttgagaagaaatggttgttggaatggtggacaacacatgggatagtgcccaatggtcttcatcagctgctgtgaatattttggagaaataatctgcaactacatgagctatatcatctttagaagtcacaacagtaccatcatcatctcgcagctctttgattttattattggagtgtctggccgaagctttggaatgaaaaaacttggtgttacggtcacccgattttaaccaatcaacccgagaccgttgttgccaatattgttcctcattggccaataattcttcaagaattttttcagccgattcaacattctgcaaatgattatctgaggcagtagcagtggagttcaatcgagacacttcacgttgagctttggagattttcttcttcatttttccaaacttcttaacatgccagtcttgaagctgtgttgcacagcgattaatacattcattaaaaccatcagccggttctaaatgatcagaaaaaaactagcagtttgagattattgttgagcattcttcatcattcagccagattttctcgaaacgaaagtgagattttcgcctaacaacaggaaccaaaggctgtgaaaatgagatttcagcagaaagaactcaatgatctgatccataatagtccaaatgagtgagagtcagatgcaacaaagaatatttccacacattgttgataaaacaccaatctattctttcctttaaaccagtcccttttctcctattcttggcccaagtaaaatcatctccaatagccggtaaagcatgcaaaaaacattgatccaaaacagtgcggaatgcttgcatatgattgtcgtgtcttaatggtccacaacttttgtgttcttgcgaaaaaatttcattcaagtccccaattaaaagccacggatcaagaggtgaaacgtcagcaagacgtctaattaaagcccaagtatgttttttattttttgcttccgggaaaccataaattgcagaaagatgccaacgcgggccatcatcaaacaagacataacaatcaaaatgatttgtattcatagataaaagagttacatcaacaccatccttccataataacataataccacccttcaaacccacccgagacacttctagaccattactaaaattgaaagacactttaaaacgagaaagagcaccatcacataatttagtttccattaaaaataacacctgaggagattgctcactaacaagcaatcgaagacggcggaatgcactcgagttccccaaaccccgtgcattccaactgagcagtttcatgatgaagtgcgggattgcctagcaatcaccgctgcattgtcaattacatcttcagaatccaaagaagcatcagaaactgaaaaatgtgagtccacttcc

SEQ ID NO: 31410 - DNA, 2738 bp, Cannabis sativa
  modified_base (304)..(304): a, c, t, g, unknown or other
  modified_base (577)..(578): a, c, t, g, unknown or other
  modified_base (2373)..(2375): a, c, t, g, unknown or other
ataccttaagcttttccttttcaaagatttgctatcctactactaccagagcttagatcgctaggttttgggttgaaaattgaagaaaattaatataaaaagagaaagttatgtcgaagggagagaacgagggtctcgtttgttcgtttttctactactgtttttaaaatatatataatatatataaacaaaaacttgtttatatatataataatataataataataaaaattttaataataatatattattaataaaaatataataatattaataaaaatttattattaatagttatcttatnatttcttagccactaagaaatctctatttctatggtatttggccaactttgagtaccccaaaatactctagtatttctgaaatcagctgatcctaataattccatcaatatttttaactaaaaccgttgtgatatttttttccatctaattagctctccagggttgccgaacctgaaaatacttttatttcacaaataactcatattacatttacacatgctatataaattaccgtaatttataaattacgcttatttactcacttatagcannatttaaattttatgctgaaatagattagtaggatcataatcccacttattacatgattaatccataatataaagataccctaattatttaccattaggcttatcgagatattacagtaactaataagtattttgaaggcaaacgatgatcagttttcctggagccattcagatatgattgggatcgaccctaaaattatttgccaccacttgaatatcgaccttaattacccagctaagagacaaaaaaggtgagtcttggattctgaaagacaaggggcactcaaagaagaagtggacaagttactgactaatgactttgtacgcgagacatcctacccctcatggatatctaatcatgttcttgtcccaaaaccaaatggaacttggagaacttgtatcgactttttagacttaaacaaagcatgtccaaatgattgttttctactaccaaggatcgactagttggtggatgcaactgctggacatgaggtaatgacattcatggacgcacattctagatataaccagatgaaaatgcgtctccctgatcaggagcatacaagtttcataaccaacatgggactttattgttataaagtattgccatttggtttgaagaatgttggggcaacgtatcagcgcctagtaaatgtgatgtttgaaaagcaaatagggaggaacatggaagtttacgtcgatgatatattggtaaagtcggtaaagagtgaatatcatacaaaagacctcacggagtgctttgagatatttagagtgtacaacatgaaactcaacccacagaagtgttcctttggagttttcttagggcagtttctgggattcatagttaacgtgaggggcattgaagcaaatgctaaaaaaattaaggctttgatagaaattccatcgcccacaaagccgaatgaagtccaggccatgacaggaagaatggcagctctaaacagattcatcttaaaatcaactgacaagtgcttatcattcctcaatgtgttgtgaggcaacaaaaagttcgaatggatagacgagggaaaggaggccttcaaaacacaaagaaacatctatcaacacctctacttttggctaaaccaacaacttgagagactttactcctctacttggctatctcggagaatgcgattagtgcagctttagtgcatgaagagggaaagcaccagaaacatgtttactatgtaagtaaaatgttactaggggtagattcgagatatcctcctcttgaaaaactttccttttgcctaatccatgcatctcgccaactaagaccttacttccaaggaaatcccataaaggtgttaactgatcaaccactaagacaagttttgtcgaaactagatgtttttggaaggttgataaaatggtctatgggcagttccacataacttatcacccaagaacaagcattaaaggctatgcttttgcatatttcctaatagaaagaatagttcaagatgaaaatccacttgtcgagcgagatgcaaaaacttggaagttgtatgtggatggagcatctaatgaaaatcgctcaggtgcaagggtgatattgatctcgccagataactttaagtttcactatgccctaagattccaatttgacacctcaaataatgagggagagtatgaagccttgatagcaggtttgaaaatagttaaagttttaaaagccaagaatcttatgtgaaatagtgactcacaattaattgtgaatcaagtcctaggagaatactaggcaaagggttttgtaatgtccccgcttcaannntccattaggcccttacacccacgaaatgatggctcatatacacgagaacgtcactatggctgcttcatggacggacgacagacactacagaccaacacgagtttttccagcgtgctttgtcctcactcgcacacttcctgggaaaacttcccaggagatcacccaacctgaaattaccccaggtcaaacacgcttaactgtggagttctttcatggtgggctactgaaaaataagacgcccttcttgatataggttgtacgaatcaatccatttatgctcttcaactgtgtagtcccatacatacaaagtctcagtttcatcacacttgaccttccccaggcgatgtgggattgcacagctta

SEQ ID NO: 31411 - DNA, 2830 bp, Cannabis sativa
tttctgtcatccaagaagaaaggcaaagaggtatcattaacaatcaacctgaaattcctaaatcctctaatgaaagtgcaggacagtttgctggtaatatgcagggaaatcggaaagaaaatagtcaggccaatgggaaacctacttgttctcactgtggaattgttggacatactgctgcaaaatgttataggttgcatggataccccccatggcatcgtttacatggtaaggtgccaaaggatcttcctaataagccaagcaatcaacaaaaccagcagcgtgatcgatctcagcaaaatgatcgacccactgccagtttttctgggcacatcgacagtcaagaaggagctcctggagagcatgatttctcttctcaatgccagaaactcattgccatgttgacacagaaagtgcaagagagcagcacactgaatcggtccacagatcagcccattgtttccaatatttctggtaatgatttctgtgtccctaaatctacttggataatagatacaggggccactcatcatgtatgctgtgatccctctttgtttcatagtgtgcaaagtaatatcaaaatcaataatgttggattgcctgatggtagatacattgctgtctcttttgttggaactatacatctatctaacattgttcttaaaaatgttctttgtgtccccaagttccattgcaacctactttctgtaacctctctttccaacacatctaactattctttcctttttcttcccaataaatgtatgattcaggatatttccaagaatcaagtgattgggatgggtgagcgtgttggacaactctacctcctgagacacaatgattctcctgctgccttagctagttttcctactgttttgtccatttcgaattccaaaatcagcagtgatgctatatggcattatagacttggccatgcttcttgtgtaaagaatcattctttgaataaagaactgaattttcactactctagctgttctaatttccattgtgctatttgtcattttgccaaacaaagaaagttgccttttgtatctaatcataatattgccaaagaatgttttgatttgattcatatagatatttggggcccatatcatgtttctactattgaaggtttcagatattttatcactatagtggatgattgctctaggtatacatgggtgcatcttatcaaaaataaatcttatgcacaacatgtcataccagcttttattaagcttgtaaacacccaatataatgctaaaattaaagggatcagatctgataatgccaaagaacttcaattccccgaattgttcagctctcttggtattattcatcaccattcttgtgtccaaactcctcaacaaaactctgttgttgagagaaaacatcaacacttgttgaatgttgctagggcacttctttttcaatctcacatccctttaccttattggggagaatgtgtcaaaactgccacctacatcataaatagaacacccactcccaatcttaaacacaagtccccttttgaaattttaaattctaaagcccctaattacaatcattttagagcctttggttgtttagcctatgcctcaactttaggggctgctagaaccaagtttgccccccgtgctattgcttgtgttttcttaggctatcctataggaatgaaagcctacaagttgttagatttaaacacaaatagaattttctgctctagagatgttatttttcatgagcagatttttccatttgtaaatgctggaactatgtctcatgaatctcttaatttttttcctaattctattactcacaccagcaaccttgacctgccacaacctgctataccacctgatatagaggcaaaccaacccgaaattgcaccagatttttatgacagtagacaaaaaccagctggtattactaccaacagacccatcagaaattcaaaaaggccatcatacttgaatgattatcatgttttcttatccactaacaatgtttcatctcagggcaatcctcctattactgagcatcctttatccaaagtaatcaactacagtaggctatcccccagatttcgtgcaagcatacttgccatctctagcctatatgaacctgaattttatcaccaagctaaagggattccagtttgggacaatgctatggcatctgaaattcttgcccttgaaacaaatgggacttggattattgttactttgcctccccaccatcatgcaattgggtgtaagtgggtctataaaataaagtataatgctgatggaagtgttgaaagatgtaaagcaaggttagttgctaagggctatagtcaacaagagggtattgactataatgacacatttgctcctgtggccaagttagtttctgtcaaattgattctagctcttgctgctattcaagggtggttcttacatcaattagatgtgaataatgctttcttgcatggggatttacatgaagaagtgtatatgactatacctcaagggtatagtcctaagggggagcttccaccaagggctgtatgcaaacttcaaaaatcaatatatggccttaaacaagcttcaaggcagtggttcgaaaaattctcctcagccttagtcgaagaaggttttaaacattcagcatcagaccattctttattcattaggcaaaatggatcaagcctaatcttgttacttgtgtatgtggatgatgtcattcttgctagtaataacatcaaggaacttgaggctttaaaaatcaggctcaataatagatttaaattgaaagaccttggagaacttaggtactttcttgg

SEQ ID NO: 31412 - DNA, 1395 bp, Cannabis sativa
gatgctcgcatatagttcgatatacgcgagctgctctcttgtctcggatgcgattagacttcggtcatacttgccacctttcgctgattctatcttaagcgagatttaaaacctcgaggagtccctcagggacatctcagttttccgagtatacctgtcctctaagtaggggtctggcctcgagtttctaggtgagagaaatctcactataacacctagagccatttttcctcgagggttattaactgcatatgaagtagttattcacttattcatccgctaaacaatttgattcaacaaattgctaagaaattccaagcaaaaaagaacaacccaacaccaacatcaaccccctttgtatacatgagaagctacctacaagatcaaacaaacaaaaataacaataaattagaattatagtaaataaaatgagaatagatattgcatacacaatataagattattgacttaattattgattcattttatgtatagatataggaagcttgctgtcaaatgtcaatgacgtcttaatgtttaaagggactatagtattgtattgtacattaattgtgatgtagggtcattgactcctagtctcatgaggctactatatcatttactcataaccatgtgaagaattcatgttccatttaagtttttgccttatattattgctaatatttatatataagaggatatattttattatattaatgatacataatgatatatttatatatatcaatatgcatgaaggtgatgttttataaagacacatatttagcaatttgataaaaaaaattaatacgtggcgtttggtaacacttttctttttaaattttttaatcacaaaaataaaggtaaaatttttatttttgaaaaacaaaaagttctataaccacttttacttttcaattttgaaaacaaaaaataaaaatgtgttttgtaaatttcattcgggactgggggtgggtccaagtccggggccgagtctgggtttggtttccaaggtctaagttggggccagagtctaaaatattgatttaaaaaaaacagtttaaaacatttttaaaagtgattttttttttgtttttaaaattcagattcttaattaaaaaattaaaacgtaaaaactgattttgaaaattattttcactttttctaaatttaaaaaaaaaaaactgattaaaaaattgttaccaaacacacccttaaattttaaagattgtttcataacacggagggtaatatttttcgtttttttaacgaattttaaccttttttacttttatttattttttatacaaaaatacagaatattatatttttgttattttttttttaaaaattaaaaaatcttacaaaaaagaattggtaaagatataaatttac

SEQ ID NO: 31413 - DNA, 3995 bp, Cannabis sativa
  modified_base (870)..(876): a, c, t, g, unknown or other
cctctgctcgtactcttttaactgtcaagaagcataagttattacctttccagtttgcataagaacacaacctaaaccttgtctcaaggcatcacaataaacaccaaacttttccttattcgaaggaagagttagtacatgagtggtaatcaaacgttgttttaactcctaaaaacttttctcacactgactagtccaaacaaacttcaaattctttcggtcagttccattagggatgttgcaatttttgagaaaccctcaacgaaccgacgatagtaaccagcaaaacccaaaaagcttctaactttagtagccgatttcagtgttggccaatcccaaataacttcaattttggttggatcaaccatgatcccatctttatccactatatgctctaagaaagaaacacgtgacaactagaactcacatttcttgaacttagcgtaaagcttgtgatcccgtaatcgttgaatcaataatctaagatgcaattcctgctcttcctttgatttggaataacccagattatcatcaatgaacactatcgcaaatttgtccatgtaatccttaaatacccggttcataaggtccttaaatgcagatggggcattgatgagtccaaaagacatcaccaaaaactcataatgtccataccaagtacaaaatgcagtcttcgggatatcttcttcacgaattctcagttgatggtaacttgagcaaaggtcgatctttgaaaagaccattttacccttcaattgatcaaataggtcgtcaattcagggtagaggatatctactcttgatagtgagcttattcaattccgataactgatacacattcgaagcgacccgtctttctttttcacaaatnnnnnnnagcaccccagggagaataactcggccttataaatcccaagttaagtaactcctggatttggatcttcaactctttcaattccttcggagtcattctataaggtgcatttaatattggttcttctcctagaactaactctattacgaactcaatctctcaggaaggtggtaatccaggtaaatcctccagaactacatctagaaatttgcacatcaatctcgtatttttaggtacaaatgacacaggttggctagtatccaacgtagttactaagaatcctacacaacctctgcgcatcaaatttttagcttttaggagtgttattctaggtatgcgcaatccttgtactttacccacaaacaccgctggatgggcactgtccggttcaaataccaccatcttccacttgcagacaattgttgccccgtattagataaaatatccattcccaagattatatcaaaatcagaaaattgtaactcagttagattggcagttaattcataaccgtcaatccaaaaagacaaagacctaatccaacgagtagatacaattaggactcctaagggtaacagggtaccaaaccctaaagcatgcacatcacacgattatgaaaactctcaattactttactcgatacataagagtgaatagctcctgaatcaaataatgctgaataagaacaactgttaatggacaactgacttgtcatcactgacggactagcattaacgccagcatgagtcatagtgaacagacgccccggattccagttgttgttcttttttggttcgtctttcttagcctgtggataatctcggataaagtggtccaccatactgcattggaaacatgtcttagcccgacactcaccctgatggtgctttttgcatttgggacactctggatatgatctgaatgtagacccgcggcattgacagccaccactttttcccctaaactttctattacttcctggtgcttcgaaagctttaaccttctgtttgtgatctgggttgccattgtcagtccccttactgatactaccacccacactaggattagatgccatgagacatcctttgcaacttgctctttaattacatgttgtcccacctctttagcaatcaaggctaactcaattttttttcttgtataagtgccatgatcagtggtaatttttaagtctcaactgatagtgtcatttagtccccttacatacttttgtttccgggtaaatccgttggtaccaggtcaccagagaacttagacagacgatcaaattttagggtatactcagccactatcttcttcccttgggtcaacttcacaaaatcttccacatgtgaagttcttacatcaatgttattaaaaatttcttcaaacaaagtctaaaactcttcccaagacatggtactaacgtctcgagtctgacccacaatataccaccaaatgtgggcatgatcttgtaacatgaatgtagcacaattaactcattttgtccccgtcacccctatgttatctaggatgagggaaatagtgctcatccacaactcaacctttataaaatcagtacctcccagaaacgttggaggttgtagcttaacgaaacgttcgaacacagaatctcgatgtggcaaaataaatcctgggttacccaccactggaactggagctggtggtaacacttgttctgctagagttgccgatgctggttacctgaatcgacacaattcatcttcttgacgaagtataatgcttggcatttcaaggaacatttgctgctagtcgataggtggattagcattattaacccccacattatcccttgaatgcgtaggcggtgccagtggattgacttggtcattaccatgctctacgtgctctctctgtggtctagatgattgtggagggtccattttcacaaatagccatgaaattaacaaccccggcgagtcaagcaccaataccgcacttacgcactattgccttaaaccctaactcatacattctatttctcttattaaataaatatttatcaattaaaacactaatcatgcttttcatataaaattcatttctagatgctcatatattgcctaaaacagaaagcgataaataaataattacaaaggcagttatgtatttactctcaacacttaatgcaccacgagtcgaccttgtctttgacgatgattgtacatgttctgccggtctataggttctttaaaaacctttgtgctctaagaccaaattataacgccctaacaattaggcacgctacgattttctgataaacatagcctaatctcactaaatcgggattactaaaatatgagctgaatttaaactttaaatcatttaaggaatgaaaatggtgagcgactggaacggaggtgaccactgactagagctggtcgaagatggcttggtgcggtggtggctgatcgtggaagtcaaagctttgccaaaaaaatagttgccacagctaaggcagaaagagaaaggtagaagagagtgatggaatccttagatttttaggcgcatgcgtcttctttttatttttaggaaagtatgggattttttaaaataaaaatttataaatttattatgatttttttaaataaattttataatatttaaataattaaattataaaattttatgtggaccaataaaagtgcactacgtgtacattgtatccacgtagacaatttaacataatagttaacagtcaaatttaaatagaattataaattaataacgttatcgtagttttagagattttactataaaaatttagattttaaaggttaattgatagcaaaataaaactattaagggctcgtttggtacgccgtattgtaatgtattgtgttgtattgtattagtattattcaatacaatataatgtttggtattgacttgtattaattgattgtgtaaagtaataatatatttttaatacactcgatcccaataccaactacgggtccgggtcctgggtccaggcctgaattccgggtcccgggtctgaggtccgagtccgagtcctgggtgcgggtctcgggttcgaggtctgaggtttgggtcgaggtccgagttcgggtccgagtcgg

SEQ ID NO: 31414 - DNA, 1194 bp, Cannabis sativa
agggtggacagcttagagggtgcccaagtcataaagacttggccacagacataagtgatggtgtgcaactctgaacatatgaattgcaaaaggcaacacacactttgattttatctataagttgaacacatatcaataagaaactggcaataggtatccatttgtctaattatttggctagggtttgaaccacaagtcttctacacattacacaatagacaatctaaccacttctctgttgtagtgtatgattctcattttttttctttataatttatgtcagtctaattagtaagacatgatatatcgtgctagctaagcatggggccataaacatggacgtaataagtgtgtcattgtaacaaaatttagtcttttaaaaaaatagttcttcgattactacatgtggtttgttgctagttcatttaatttctgaagggaggagaaattggaaacgaaacaacaacaaaaaacttgtcaaacaatagtggcggaggtataactggaataatttttcaatgacctaattgctttacaaattggaaatcggcgtacttttatctatatgtattttttaaattgcttatttgctttgcttcatttgtatacttttatctatacagttatatcattcatgcattaatgtaaacaatggtaaagaaatagacatgaatgatatgatatgtgagactttcagatgctttcacattattcttattttgctatttatagtattcaagtactttcaggttctcactgatttcaaataagaaatctaccgaaaacacctttattctttcctttccatcatttttcagcagatttctttttttcacaactttgttgcttgggcattatcgctttgttctgttaatggatgtagagcaagaatcatcattttaacaaaaagggatacatgttttcccatttatatatgagaagaagtttgactgtttgatgtagctgacctaagaaacaatcttctttccatgaagaattaattgtcatcaaattaatagtaaatgtagtatgagtattcttatttgtcgcacttgtgttcttttctataagttttgtgctatatctgtaatttatttcaataaaaatctcctaatgtacactgtgttttttcaggaattttcagcataatgtggcacaaagtaaggatgttagggctgatttggttaatgaggc

SEQ ID NO: 31415 - DNA, 1923 bp, Cannabis sativa
tgaagcatgctacaataaatcttactgaatttgaatttccctccccttgctgcaatgatatctgctttggtttaggttgttcgcagcctacaaagctttctccaataccagcttgtatccatggtcatcttataggatcaaaaatcattccctttgagataaatcgagttgatccacttaactcaaagtaagtcttttttattcatcaagccccaaatgaacctagctaaagaagctttgttccatttagttccatccttaaacccaagacctctataggcttttggaagccacaccctctcccgactaacaaactgaactctagaccgattatccttcaatccccaaaggaagccccggcaaagtttctcaatctcttttatcacactttgaggaagaagaaagactctcatccaataattccttaatccaatcaaagtagattgaattaattggattctaccagcataggacaagtgtttattagcctaagaatggagttttagtttcattttcttcaatatcgacccacaatcatcaagtctctttaaatggtctttggggaagcccgaggtacttaagagggaactctccaatagagaggtttattttttgtgcaagaggaatcgagttagatattccaccaaaataaacctgagacttagcaaagttgatggatagacccgaggtttttctaaactcgccaagcaatactctgatagcattgagagaaccctcattccctttacaaaatatcactaaatcatccgcaaaacaaagattagtgagtttcatttttttgcataaaggatggtacctgaatttcttatctctggccgctttttgaatgctttgggacaaatactgcatgacaagaacaaagaggattggggagataggatccccttgtctaagcccctgttcacctttaaacatcccctgaattattccattcataagttacgagtacgatgtgtttcatatcaagttcatgatccacttaataaacttttcagggatgaaataggccaccaaaagcttctcaagaaaatcccagttaaccatgtcataagctttacttatatcaatttttattgtgcatcttggggagcagttcttccttttgtaattcttcaagatatcctaaaggataaggatattgtaagcaatagaatggcccttgacaaacgcaccctggttctgactcactaagcaaggaagaagattagcaagccgagaacggatcagttttgaaagacacttgtataaggttgtgcagcaagcaataggtcggtactcaatagccttagaaggactctaggtcttaggaataagagagagtgttgtgctatgtagctctgtcgggaattggttggtatcaaaaaaagagctatagccatgtgaatatcttttcccacctgaggccaaactggctaaaagaaccctaagccaaatccatcagggccaggagatttagtcttcgggatactaaacatcgcagctctaacttctttgagagaaaaagggttttagaagatgaacctgctgatcgagattgagtttgggccccatagctatgatctcaggctgtaactccaagaaggtgggtttagcattccccattatgcctcgaaagtggtcaaggaaatactgaaccacatcaagaaagtgatcatttaagtctcctggctcagtcaaaaaagaaacaatcctgttctcttccttcctcttcttcaacatggcatgaaagtaggctgtgttactatcccctttttgaatctggtgttaactttgcttctttggtgaagaaagctcagatacattttttcctgaatttgaaactgattagcagccacaatctccaaatcaaggaggagattgttgttaggattagcttggcattggattttagctttaatgtaa

SEQ ID NO: 31416 - DNA, 1147 bp, Cannabis sativa
ctaaacaaatatgagtagaaaagttgatgagactgggaggagcgtccaaacatgttcagaataagaagagattgggttgaacttccatgcatgttaggagagaactgttgagcctgctaaaacgattgttgttgcggccttgacaatttgcactaccttgaggttgtgttcgtaaatattgctggaggaaactctcaaatcgcgggtcatacaaatcagaagtgttgtgtcctgatggaaagtgttcacgcaatctcttaaacatctcagcccatatactaacatcttggaaacgagtagaccttgcttgagattgactttgactttgacttggagagccagatgttgattttgtccccttctttcctaagatgtaaccaactccgtgcatatagtcactcctctcttcaaatatcttacccataaccttgtactggatgtcaagcgtcaactgtaaggatcaaaaatcactaccatattggctttcaagtatgtttttggccatctctacctctattttatgggtcgattcatcctaaccatagataaaaatgatttaaaatacaacaatgtcataattttatgaagaaaaaaaataaaatattagtgtaacgcacccatttttctttagcagcatcattgacccaagctttgtcctttttttctagtgtaactatctctccaagcatggatgatatatttatctagctccttctatattcttattagtgttagtttgttaaaaaaaatgtaattttattaaataatttgataattcacttataaattcgtgacgctgagctgccattgattttgtgccttgagttgagggatacttcatttgttttctatttttttttttgagttttattacaaatgcactcaatgaaagcaccaaactattaacgcaaatttttgtcaactaaaatattagcctttttgtaataaataaattacataattgattatattgcaattaattttctaataagtagcaaataacaagaaggttttaacgtggctttgaagttaaatcttcatagtccacgagtccatcttatttaagataaatatatttgaatacagaatacaatgatatgatttagtaatggtatctcttttatctctagattgaccgtccctttta

SEQ ID NO: 31417 - DNA, 2518 bp, Cannabis sativa
ataaaattatacaaggactatttgtaacaagctgaatagattaaggggcataatagtatagtgtcataagtacagggggtaaaaaagataattattctattacaaatatatatatggtgactctctataatttcctcatctatttttttaaaataaaaacaaaattatagttggaattcgacgacatcgctcaattattcatgcaaattagtctaaattattgcatgcaaatcattttaattaacctaataatatatatgatgatatttctagatgcacaaaattaaatattaaatctccaaatctcaattagcatgcttctacactatgtcggtccatagaacaactataacacattgtccaaatatgcggtttacttaattacttttatttttttaatgataatatatgatgaatattatattttcattatttttatagggatataattttgctccgtgatgtactttcatagaatgtatttcgtggtacattatatgggtctaagggtacattaaatgagtgtcagggtacgtttcaattttttaaccctaattacccctagatcaatctcagccgtcaaatcaaataactccctcatctgacggctgccgtacatcacggattacaatccgtgaaagtataataacgggacaaaatcatatccctatttttacatattatatattaatttgttaaaaggattcgattcatcacccattaatttgtgggtagggaatctcttttttatattgtcatatataatggtttaatattacatattttattcatgtcaggagatttacgtaatctctgcctaacaagatttatatatatatataaataattatataggagatttacgtaacctccctaaatatacatatttatatgcaaacgtattttatttttaagatagtggtggagtgggtatatggtttttgttttacttaaattctttttgcatgatttcaaaaaaaaaataaaaataattctttttccatttatagtaatatagctagtttttaaaaagttctaaataatttaccatgctaaaaataaatttaaatagcgagttacacatataaaaggtaacatggcgtgcattaacaaaatcttaatctatgcacaaatattctccacgcattatgtactcattaaaaaactagaagattggtaaattttctgaatgtgatcaatgtatatatcatctatttattttattttacttctttaaaaatatatatgacttagttctgaaaattaatttgttcaagatttatatatattagaattgggatttatgttttactcctttcgattttttattgagcttgtattatttgcctgttctaccctcataaaaatatgccaagatctcattagaaattatggtaggaaagggtctaagcctaattgcatgatcaaacttgatctggaaaaagcttatgacacaatgaattgagatttcttggaagaaatgttgtgttatctaaaattcccggagaagtttataagactaatcatgacatgtatcagaactcctagattttccttgatgtttaatggatctatgcatggtttttttgaagcaggaaggggtttgagacaaggtgatccaatgtcccctttgttatttattctggggatggagtatcttagtaggatcatgggcaaaattgggaagaaggaggactttggtttccatgaaagatgtgctgaaatgaaactaaatcacttgagctttgcggatgatgtacttctattttgtagaggggactttaagagcatttatctcttgatgcaagggctgaagttgttttctaagtcttctggtttaacaccaaacaatacaaaatctgtagtatatttcagtggaatggatgaaaaagagattaaacgagtcttggatatgactggattttctaggcaggaagagcctttcaactacctcggggtgcccatatgtgcaaggaaaattgcagcaggggattgtatcagccttgctcagaaaatgacaaagagaattagagtttggtctaccagaaatttgtcatttgcgggcagaatagtattggttaactcggttctccttacaatacatatgtattggagtcaaatcatgattctccctaagaaagtgattaaagaaatagaaggagtgtgtaggagtttcctatggacagggaagagtgtaatgagtggggctggatcagttgcgtgggaaagcttatgtaaaccgaaaaaagaaggaggcttaggcttgctgaatgttgctcaatggaatactgcagcaatgtttaagcatgtttgggcagtggcaaacaagaaggacaatctttgggtgaaatgggctcattgtgtatacatcaaacatcacaactggtgggagtataaagtcccacaaaccagtagctggtactggaaaaaaatggtggacataagggatatagtaaagcaaaagtttcagacacaggaatttacaagagctgattttaaagtagcagctggttataga

SEQ ID NO: 31418 - DNA, 1271 bp, Cannabis sativa
atccactaactggtcgatcctggttagtggaaaataatcttttgggcacgccttattcagatcagaaaaatcaatacaagttctccaagttacgttaggcttaggaacgagaataggattagctatccacgagggataaaatacctcgcatataaagtcattgactaataacttgtccacttcttgttttagtgccccttgtctctcagaatccaagggtctccttttctgtctcttagctaggtagttcagatcaacatttaaatgatggcagataatattagggtcgatccctatcatatctccatggctccaagcaaattgatcctggttcgcctttaagaaacttattaactgctattttagcttctcttccaggtttttcccaatgtaaacacactttgtagaatttccttggtcgaggataactttttctaattcttcgattggttttaataagtttctctcatcttgaacccggtggtcaagatcttcgtccttcctctcactttcttctgccaagattgccattaactggtgatcgactttcctatgctgcaactctatgtgataacaatcgagagccagcatctggtcgccccacaccacttccacaccttctggtgtttggaacttcaaggataggtgcttgatcgaactgactgcccctagtctgatcaatgttggacgacccaagccgatggcaggtcgacaactaagaagtcttgcataacagtgccagataggggtgcctcgctcaaggttagtgcgagctcgattatgctaagactgacaatgctatctctagtgaaactgtaaagatttaccatacaaggcctcaatttggctttttcgagccccatctttgtcaacgtttccttataaaggatatttactaaactctcattgtctatcaacaccctctttatccttttattggcgagttgaatggtaatcactaatggatcgacatgaggatatctcatgtttttctcatcttccttcgtgactataattggaggttcctcagttttcaccttcttggaaggttctggagcaaatgccgacttctcgttctttatctctttcacatatcatttttgggcattattgctctcccctgcaatatgtggccctcccgaaataaccaggatttcctccccttcaacatgaagaggttataacccctggttgtttgggttattgggaagactgggttggttgtgtccatggccctgtctcttcacgtactgtttaaagtggcctcgagc

SEQ ID NO: 31419 - DNA, 2555 bp, Cannabis sativa
ggatatggtaatgaagatgatatggaatcatttccggaaaatactgcctaccactattacctctcttcatatatggggattttcaaaacttagaggcttggacaaaaatggacttagacaactcacctccttggaacaactcagaatctggttttgccctgaattgcagacattgtcagaagaatggtttccaacctccctcaccactttactcatacaacagtgtcctctgctaaagaaaaagtacgacctaaaggagagcgggaatgaggagtactggaacaagattagtcacataccaaatttactattagattgagcttgcatttactatcatccataacatcctaatcatcggtatgtgttttaaaattgaggtttgtttgattaatttgttgttcttccaattttttcctttacttatgtgtaatggtatggattgagattcacaatttgatttgttttgctatgtatgtatgtatgctcattggaatttttagtgaagtttttcagatgttgaactgtctactgtttttcttttaaatattagaatttgcaccatttttcttttacttttctagcttttacttttacagactttatgcataatttgtttttcaaaatgagtgaagtgaacccatacccaggttagacaaaaatgaaaagtgaataataatccctacttctgatataaattagaataattagcacatattcttgttggtcactaattttactgaagaatttataattttggtaaaatagtgtttcagcttcaatctatctcttgtaatgcagggaggtcttttaggaagctttttccacaacataaaacaagcagtgttcgtgtcagattgtaatttggtttgttataacaattaatattcatggttggtttagacttgttttgtgtttttagtattgtctggttttttctctctgcatgtaaagaaaattctgttgtactgggatttagacacactgacttttctgattagagcaatttttcaacttttcaagtatttgttttgtttggtctgattagtagtggattgattgagtcattgattaaaactgcttttaaaagtcaaaggtttagattggaactaatattaaacatgaaattcaatacattgttatcctcataaaaatgttaattgcacattgaataatttgcagcagctaaaatgtttgagatggctcctcggtttggattgactgtttgacaagcttcccaaccttgggatacttgtcgatgaacttattaagtactcaaattgagttccaattcttcatgcaataaaacttatgcctggcctttatggcttttactcctttggtagacacatcagaccaggggcttatcaaaaattttgttgaacattcacacgaatcaatcgcctcaaatagattccagatcaatctaaacccggccttgaattctcttgggataccgggttctctttttattgcgttctgaataaaagtgttacaataatgcattacttacaaaagagttagataaagctatatatagacataagctatttagaaaccaactaacataactgcctaggttactaactggagagtgactagacttaactaacacatgtgtacagtacagacatatacataacaagtttctacagacaatacttgcagagaagcttgttggtcacaaaaaattagtgaagaatttataattttttctaattaattacttaatggttgacaccttctgccaaatcatgtttgtcacctttaatttaggaaagcagtaaagaggtagcttccacaacacgtaacaagcaatgctcgtgttagattgtaatttgatttgttttagtatcgtctggttctttcttattactttgatgttttagatgttttctttatcattatgtcatttgctactctgtctagcagtatgtaaccacggttttcctcagccataactgagtgttatgaataaacttgggaggagatcatgcctgttatgacacagatacttggtgatcggtcataccaagaattattttaaaaacaatctataacgtaaaattagtagtctactgtttaattagcttagaggtgatgagttttacatacttcttctccataatatatattatatttttgcctactttgaaagtccaatggtcaaattaggagagaaaatatttgtgaatttatacatattgccaattacaaaaccccacctaactaacatattaacatattcagtgttcactcaatcacaaattgtatgtatacttatttatatttttagtttttatttttattcagtatatttttaaaattttataaattaaaagaaactatttattaatttattgaaataaatattttaatattgtatattgaataaacttttagtattaaaataacaataaaaaataataaataatattacaaatttttatattaatatttatatatatttaaatttaaaattaatataatttcaaatggtctccccaccgggtcgagggcatcctaaacctataaagatgctcgtcgaaccctacggg

SEQ ID NO: 31420 - DNA, 2451 bp, Cannabis sativa
atatctcgaatttgagaagcattcttcttcttagggataacaacaataacagtttcattaatggaagaaatatcagcttgattattaagaatagaaagaacagcactacataagtcagggccaaatgtagaccaatttttttggtaaaacttggcattaactccatccaaacccggggctttatccccagccatttggaaaagagcatccttaacctcatcactatgaaaagattcatcaagttgttgtatagaagaatcacagagacggttagggataaactgcaaaagatgatccacaaccctagcatccgaacattgcgaggtaaataaagtactataaaatttaagaaaatgttgactaatatcttggtgagaatcaatacgctccccagaatcaaggacaatctcacgaataaaattattcctacgtctagaattggctttagaatgaaaatattttatatttttatcaccagccttaagccaatttattctagaacgctgcttctagaaaacctcttctttaaaaagaagagagtcaagttgagattgaagctctttagcctgattactattaaaatcagaaggggattgacaagagtgcaaagtttcaagacgatcctgtaaagacttaattcgacggctaaagttttgtctagtatagctccaagactgaacagtcttaatacaggagtcctgcttgagcaggaaggtggaaagaggatcagcatagggaagattagaagaattgttctcccagccttccttaacaacagtgagaaaatcaggttcagaaaaccagaaattctcacacataaacctctttctcccagacgcgttactaagattatcctcaaggataacttttaaagccctatgatcagaaccaaaaaaacctaagtgatagagagagaccttacgaaacagatttaaccaagagttattaacaatacactaatcaagccttttcaaaagaattaccatgtttctaagtaaacttgttccctatacacggcaaaggaagcagactatatttattaagaaaatgttgaaaattagtcatagcatacacaggaggattagaaacattagatctatcatttaaagtgaggtaatcattaaaatcaccaaatataaaccaaggcatactaagagcaatatcatacaaccgatgtaaaagagtccaagtatccattttatttgaaacataaggagagccataaaaacaagatagatgccatttagtattaatattatcattcatagatacaaaacaattaacatgattagaggagtaattatttatatatacatcaacagcagcagtccaaaaaagaagcaaacctccccctaaaccccttctatgaatttccaaaacatgatcaaaagataacctagaactagacccaccccctaacttagtttcaataataaaaagcaaacagggtttatgctgcttcactaaaagggaaaggtttcagaatgctcgggggctccccaaaccccgagcattccaacaaataagactcattttttcaggcggggttgctcagcaacacccgccggtacaacatgatcagaatcatcagaaagaaccataacatcagcaccattggccatggccctcttcaacataccacaaacagaagaaccaacagccacctcttaacaaaagatctcttggtacccgaaccaccaccaatagataaagctcgaggaggaaaaggaggaacaaaggagtcagaagcttgaatcccttttcctttgtcagtatgaacaatagtggatggctcattcaaaaaagcctgagaaacagcacagagaagactctgaagcccactgaactgggaatcagaagtcacaacatcttgagaggacataggagacgaggaatgaacctggtgatcagtaggaaccaaagtagtaggagaaacctgagaacaaggtaagctcgcttgaggaagaaactgattaacagaatcttgaagatcatgattttggaccaaggatcgaagattcatctcctcaaaatggaatagagttagccaaatcaaaagggtcacgcttgaactgagatttaagaggagctctaatattttccttaaaaggcagaacaggagggtaacatccatcatcacaactttgcagaaaagagccacacttagaaaagatatgatcagtttttccacaaaaatagcaataattctgaaggccctcatatttgaacataagccatttggtcctaccaaggcttcgaaagaacacctgcatcccccttcgaataggcttagagctatctaagagaacccgaatgcgtaggaaaggactagaaatttccagcagagtatttttatggatttctatgagatctccaatatcatcagcaaccattttagcaaggctaggagacctaaatccaaaaggtatatagtggatttgcatccagaaa

SEQ ID NO: 31421 - DNA, 2091 bp, Cannabis sativa
aggattctattaccaggtaaatgcctaagggaatgctgctattacagaaacacagaagtttttatgttttctttctttatttcttttcgtttagttattttgttactaatgcaaatgaagttattgtgttattaacagactcggggtttaaagcacgggagggcgattgtggtttctacatgtgctgctgtagcatcgattgttaccggtgtgctagctggaatgctcgctttgggtgaaagattgccatcagctcccacagcccgtttatcgcttttgcttggatggtaactttagataatgattaatactaattcttgaaagagtgattggcagccaaatccccttatattttaatttgcatacacttagcccctgatctcattttttttttgtgtgtggcaatactctctttaacttcacgtttgtttgcaaatttgaggctccagctataattctaccgttaaatgccagcttgattgccactgtggctacctgtgtatatgctgcatgattagcttcgaggttttagtgccacatgtacataaatttaactagcgtatcaaatttgaaaacaaaagtataattaagagagtattgtcacaaaaataaatactagggagttaagtgtataaaaattaaaacagaatgggatatttttgccaattacctgtcataaaaatattattcctcacaactttgattggtaatatgtggtccatgcatatttcagtctctggttatttggccataaatgtttatatataatacctattgtatagattcttgtgcacttgatgccttctgttttgtttttggttaaaattccagaaattttttcattgcaggttactaataatcgtcggagtgatgttactcgtgagttcaactcgagttctacgacttcttccccgaagattacgacgtgctgtacagagtggctctgatcggagttttggtgcaagacaatccgggtccgttcgtggtagtagggatccaaacccaagtaccgttattcaggcggcaactctgcatcatttgatagcatcttcttctgctaaagagaaggcttgaagatgggcattgagaaaagaaagaaacgaaaaagaagcccgcatgcgtcgagtgtcgaatttctggttcggcgggtttgcacataacaagggagagttggggtccatggatttgggtggtaattgaaatttgtggaggttggattgtatagttatatacagtctctatttaggggtcctaagtgggcaattatgagggttttgaaggacctttggagacattgaatttgttttgtttgttaattttttttcttttgtgtttttgggttggaattctttatcagttgtaaaacattgtgtgtgaactttaaaaaagttgtaactttgtaggccaaaccttaataatatgtaatgttgtaccaattacaatcgagcaaaaaccaaaaaaaaaagtttttatttttttaatttataatttaagatattggaatgtgagatggagttagaatttagtttatttatgtctaattaggatatttttctctctaagtttgacattatgaaattgtgtttttttaactttttaggttgttacaatttgttttttgaatttttgagattattgaatttaaggttttttgtctaattttataatttggtagatgtcaaagattgcacgattttggttaatattaaagtttaagtgcatgattttgtactatggacaattgatagacaattgatagaattttttaaaaattttttaaattcaacaatctcaatagtttgagagaaatttttaagggcttgaaaagtttaaaggcatgatttagtatattttaaaatacaggaataaatttataattaatctttatttaatttaaattagaggagttgaaatgttattttttattttttagaggttttttttcttaataaaaaataaagttattcttagttggaatgaataattttctactatttatagtggaatgattatgtttttaaaagaatgacaataaatattatattattaaaaaaataattatgtttttatattaaatcttattttattata

SEQ ID NO: 31422 - DNA, 4152 bp, Cannabis sativa
aactttttactttggaaacaacaggttatggctgctattcgaggcaatcgactactgaagttcattcaaagcacagctcctcctcctcaatatctcaatgacactgatcaatctaatggagtatacaatccagcattcatcgagtgggatgttcaagatcaactcttagtgtcatggctgttatcttccatgacagagagcttgttaaccagaatggtgggatgcaacactgctaggcaaatctggaatgcactcgaaaagtatttcactcttcgagtctcttccaagattctggaattccgcaccagacttcagaaccttcgcaaaggatcgatgaccttgaatgagtatttactcaaagtgaagcaaactgtagatctgctagcaagtgttggagaaactctaaacgatcgcgatcacatttctgcaatttcaaaggccttcctgctgagtatgatacgttcataatctccaccaacaccagaattgaaggatacaccgttgctgaaattgaagcattgttacttgcctccgagtccagaattgagaaaatcgatcaagaacatgagatgagtgtgaatcttgcaaaaacagaagttgatcacacctttgattcagatctaagttttgaagctaacatagctcagttcaatcgcaacatgcgatatcccatgccaaacagaaacaacttcaacaattcgagaggaggatacactgggaacaacactcgcgatgcaggaaatcaatcctatcaaccaagtcagaacaatcgtggcaacaatttcaccaatagaggaggacgattttctgcaccaccatcaagaatccagtgtcagctgtgccatcgacttggacacacagttcttgactgctactataggttcgacaaaagcttcactggaatagcatctggatccaatcaacagaaccagcctcaagccaactttgtacaaaacacagcttctcaggtacaaattggtaccccgactctggtgcaacgaatcactgcacaccagaagctcagaacctgatcaatcgatccagctacaatggctcagacaacctatatgttggagatggaacaggtttgcccattcaccatactggtcattcttgttttctgtctaaatctaaccatattcttgtgttaaacaatctccttcatgttccaaaaatcacaaagaaccttcttagtgtgtctaagtttggtagagataaccatgtttactttgaattttaccctgatttttgtcatgtcaaggaccaggtgacacacaaaatcctcctgactggtgctcacaagaatggcctgtattcttttgatgaagcccaatttcaactacagcctttcccactgtcatcctattccagtttcagacctgctagtgaagcccaagccaatcctgatattgcccaagccaatgtttcctttactgccaactctgaatgtagtcaaaataataacaatttgtttcaaatgtggcataatagacttggccaccctagtgagaaaattgtaaaatctgttcttaacacttgtaacattgctgtcagtaataaaactccttttactacttgcaatgcttgttgtctaggaaaaattcacaaatttccttttccaaaagcatctgacactgtgtacaatgaacccctacaacttgttgtcactgatttatggggtccctctcatataacctcaactaatggctataaatactacatccattttttagatgcctacactaggttcacttggatatatctccttaagaacaaatcggatgctctcaaaaccttccaaacctttaaagttgaagctgagcttcaattaggcaagaaaattaaggttttacaaagtgattggggtggggaatacagatcattcacaccctatctcactcagtgtggcattgttcatagacacccttgtcccacaacccatgaacaaaatggattggctgaaaggaaacataggcacatagtggaaaatggcttaactttactagctcaagcatctatgcccttaaaattttgggatgaagcctttagaacagctgtatacattcacaatcgacttcccactactgttctgaataatcagtccccaattgaactcttgttcaatatcaaacctgattataccactttcaaaacctttggatgtcaatgctttcctaacataaggccttacaacaaacataaacttcaatttaggtcctcaccttgcactttcattggatatagcattaatcacaaaggttttaagtgtcttgatcaaaatggcagaatttacatctctcgagatgtaatatttgatgagtttgtcttcccttatgccaagtctgaactaaactcacctgactcacctattgagtattctgcttctgctctcattcccataagcagtcacagtgaccattcagcacctcaattcttccataatgacagtcattcttcatttccaactcagtctagaatcaacattccacctagttttcactctagcatcagtaaccaacctattttacaatctgagtctccatctcaacctgtcaacactactgcaccagtcaacatacctccactacatccaccagtgtcatctgtttctacaccagtcatcattccaccttccaatcttacagttcccaatgatactggtccttcctcacatatatctcccacacccgagtcatccaatcctcccattcccaccaacactcaccaaatggtcaccagggccaagtcgggtattcacaaacccaaggccttcattattgagaaaataccaaaaagcttcaaaactgcattgcaatttgaaaaatggaggcaggctatgtcacaagaaattcttgctcttgcaagaaataaaacctacacaattgttcctcttccaccaagcaaggaaccaattggttgcaaatggatccttcgaataaaagagaatccagatggctctcttgacagatacaaagcaaggttggtagccaagggctttcaccaacaaccgggctttgattacactgagacttttagtccagttgtcaagccaattaccataagaattgttctgactttggctatttcaaatggatggagtgttagacaattggatgtcaacaatgcattcctaaatggggatttacatgaggaggtatacatgacacagccacctggttttgagattacaactcagcccaatttagtttgtaagctacacaaggccctctatggtttaaaacaagctccacgagcttggtttgagaagcttcataagtgcctactgtccttgggattcactgcatccaaatcagatcattctatgtttattcttcacaataattcatcaactactctggttttagtatatgttgatgacattcttgtcactggaagtgaccccaagtcagttgaatcactcatctcctctctcaacaacactttctcactcaaagaccttggagaacttaaatactttctcggtattgaagttgcaaaaaccaacagtggcctctttctgtcacaagctaaatatgccaaagatcttcttgtcagggctgatatgcacgatgctaaacccatctcaacaccaatggttagtggtcaaaaactctcttcttgtggtagtgaagtcttttcagatccacacatgtacaggtcaatcgttggtgcattacaataccttacaatcactagacccgaactctcttatagtgtgaataaggtttgtcaatatatgcaaaaacctcttcaaactcattggcttgctgtcaaaagaatcctcaggtatgtggctggcactactcagtttggtcttcatctcaccaagcccacacatcttgaagttaaggcatattgtgatgcagattgggcctcggatgtggatgacagaaggtctacttctggttttgccatcttctttggccaaaatcttattgcttggaaaagtcaaaaacagcatactatctcccgttccagtactgaagctgagtacaggagcttagccactgttgttgctgaacttgcttggctccaatccttattttctgaactatgcattcaactccctcaagcaccaacagtttggtgtgacaacttaagtacggttttgcttactgcaaatcctatacttcacgctcgcaccaaacacat

SEQ ID NO: 31423 - DNA, 1990 bp, Cannabis sativa
ataactctagttttttaatatgacaatcataactattaagaggatcaattctataaaattttaaaaaatttaaaataatttataatagtgcaaataatattaaaacagtctattatatgcatatcttatttatttattaaagaagcatatcttatttattctatacatatatgaaatagaactttaaactatactttttatagtataaattattttaaatttttcacaaatttgtaagatattttaaataattattatacaatataatataaataaaattgacattataactatgggaatataaaatatataaaaaaaaaagtgtcacagtatattaattttttagaaacatgctattaaatattcaaaaaaaaaaagtaaaaattaatacattatttcatataaaaacaactaaaagattaacacattctcttaaaactaaatacaaatatttttcattttcatctataaatttaatagaattatagcattggattggattacttggattgagattggaataattttgtattagtgtttgatgtagtattggattggataaaatattttattcattttaaaatataaaattatttatttattaggattttaatttaaaaaataataaaatataatatatctatattagagtgtgtaattatggtagaagagaagtgctaccgtcaacctcctgttacaatctcttagtcaatctctacgctcgaaaatatattttggtactgtaaactattcggaatttttcaaaaatttacagggatgatacagtaactatgacgaatactgctatgaaaaaaaaaattaaaaaaaaaaaaatttcgacatgtgatttcggatgtggaggttaagtaataagatgttgtaattagcactcctctatagtgttgaaaatagtaaaaagtggagcccaccatccacacaaattgatctactttgggaaaagtagattattaatccaaagataaataatcttaatcctagttctagtcctatgtaccaaaccacgtccaaaattatattttattttgagaattaagaaaaataattaatttcaaaatacatttgctctagaatgaaaagtatctaattataattaatttagatagtgtttagttaaatgaataaaaacataggaataagaatgaacatgagaataatttttttttttttaattttaaatattagtattgtaaatattacttcaatatataatactactttaatatgctaattctttttttttttatttattttataaggagggttgcagttactcaaatatattacgatgatagtgttgaattggtctatgacgcataatttttttctacttttttttttcaagattaacagtttatgttgaatagagagttgaatttagttctttgtattatctacaagatcctttatttgtattgaattatttaagatatttattaaagatttttactagtttacttactaattttttaaggcgtccctaattaatgttcgtattcatgaattaacaagacatacactcagagtagatagtgaattagtttggataaattccctgtcgttttttcatgatgtactactctcttatgggtttttaatgaaatgttttttcattgttaaaaaaagaataaatatgagaataggaatatgaataagatagaatcaaatttactaatatgaagcagtcgcgttattaatagatttgcgttgggctcaatatgtgggacttcccgtggagagggtttttctgattcactttctttggtctcaactggagggtctgacattgtatttgcatgaactgggggttatcttttcagatattaaagttttattgtctagttttcctgaggcatctctctcatgcgtagcaactttattgttgaggctcatagattggctaagcatgcctttaggatagacaatgaactttcttggatgaaagaaacctccccaccttttgtgtaacttt

SEQ ID NO: 31424 - DNA, 1888 bp, Cannabis sativa
gagcgggcctgcccgccgccatgaaacttgtcagctggaatgcacgtggtattgggagtgatcgtgcattccgtaatctctcccgtttagtttatctttgtaatcccactatgctatttattatggaatctaggatggctaagaatgttgttgacaatcttaagcacaagctccattttgattctggtttggaaatgcctaggttaggtagaagtgggggcttgcttttattttggactaatgatgtaattgtcactttgctttctcaatctatcagtcattttgattgctatgtttcatgttctattactaatgtttccttccatcttacttgtttttatggctccccggttgattctctcaagcctcatacgtggaatattcttaaccgaattggtaggggtaaccctcgggatccgtggcttattattggggattttaatgcttttctcttttcttacgataaacaaggggggaatcccgataggggcccttcctcggaattcagacattttcttgactcctttaatctctcccctcttgaccctactggacccttactcacgtggaataataatgtcgcttccccaaaaaatattcaagaacgattagactggggcattgtcaataaccactgggtagatatcttccctgatgccacccttgcccatttgggattcttcggctctgaccactgcgcccttgaagtcaacacttctaatcctccgggcacttgccttaataataaaaataaacgttttcacttcgagaatgtttggcttaaggatccaaattggaaccaagttttcgatcaatcttggactagccacccgaaccagcatgatcccatcctcaagcttttctcgactcaagcctcttgtgctgcgaagcttaacaattggaaccataaaaaggactttaactttaaaaagcacataaccaagcttgagagagacctggaaattgcccgatctgctcccgtttgggatgacaataccatcaggaatataaaggagctccaatccaggcttgactctcttctgtacaaagaagaaacttattggaaacagagagctaggacccagtggttagcccagggtgataagaacaccaaattctttcatcgacatgcctcccacagaaagaaaataaacaaaatcaataagctccaccttgccaatggaggtattgtctctgatgatgagggcatcacccgtgaaatggaatcccactttaaccagctcttctcgtccacgaacccctccgaggaggatttcaacaaggccctacaaggcattacaatctccctctctgagatggacaaatctttccttgctgaggagttttccttggacgagattgaaaaagcctttttccaacttccttcagataaaccccctggtcctgatggtttcaattctaatttctacaaatccaactggacctctgtcaggcatgatgttctcaaagcggctaccagctttctcaatgggaatggggacataacccatctaaacacaactctcatcacccttatccccaaggtcaaacgaccttcttccctgtctgatttccggccgatcagtctctgcaatgtcatttacaaagttatctccaagactctcgcaaatcggcttaaacttgttctcaacactttgatctcccccaatcaaagcgcttttcttccgggtagactcatttcggataacatcattattgcccaggaagttgcgcattccatcaagctgaaaactaggggtaaaaaaggttggatggcggtcaagctcgatatggcaaaagcttttgacagagtagagtggcccttcatcgatgctattcttcgtaaattccaatttcctcccagattcactaacctggtgctctcttg

SEQ ID NO: 31425 - DNA, 2559 bp, Cannabis sativa
tctttcaatatttctagtttctctgctcactcatgtcaaggaaattcaatatggtatcagagcgttcttttcttgtcattgatggccaatgtcgtcactaactccaacaatggagttcaagctcaacaagacaatgggtctaatactcaagctcaacctacaggtaacacttcaaatctgaatccgtggaagcaaaccagtagaattcgaggaatcgtggtggtgaagatcaaggccctgtgttcttcaatcataccctgtccattaagctgaatgatcacaactatttattatggagacagcaagttcttgtcgccattcgagagaatcgactgtcgaattacattcaagaaaacttagttccacctcagttcttgactgatgatgatcgtgaagccaataatgtcaatcctacttactccacctgggaggttcaagatcaattgcttgtttcctggctattgtcttcgatgacagagagtctcttaacaagaatggttggttgccgtgcaaaaattcttgagttttgaactaaacttcaaaacttgaagaaaggatctcttagcttgaacaattacttgcttcgagtcaaaaagattgttgatttgcttgctgtagttggagaaatttttagcactcatgatcatgttgcagctatcttcataggccttcctagtgagtatgacacctttgtcatttctactaatactcaaatcgaaagttactctgttgctgagattgaagccctgcttcttgcatccgaaacaagaattgagaaaaatgacaaagaagttgatctcaatgtcaacatggcctatactgaacctgagtttcctgaagcaaattacaccaacaccaatcaaaatttcagagctgcctatcctaggttcaatggctcttagtttccctacaatggctacaacactcagaacatcaacaactcaggctcatattttccccaatacaactctggccaacctaaatcaacacaaattcgatttaataaccccaaccctggacctccaccaccacttggattgagtaatcaaagaggaggattcactggcaatcgaggaggacgatttcccagtggtaataacaatcgacttcagtgtcaaatttgcttcaagacttgttatgctgctcttgattgtttctacagatttgacaaagcctacaccagcaacacacaacctccttgcaacactaggaatatagctcaaatgcaggcacatcttgcaagctcaaacaatggatgggacacaaactggtatcctgattttggagccaccaatcactgcacacctgatcctcaaaacatcatgacaccaactaaaaatactagttctaaccaattatttgttggtgatggcacaagtctatctatttctcaaactggtaatttcttgttgtcatcacactacacttcacatcctcttttgcttaacaacctattacatgtgcctgcaataacaaaaaatctgttaaatgtttctcaatttgccaaagacaatgatgtctatttccaatttcatgctgatgtgtgttttgtcaaggaggagaagactcatattacattgctgaagggacaccttgtgaatgacctgtattcttttgactcatcccagattcagttgcatccttctagccttagccaacatacacactccacagctaaagccagtgcctacatcataactcaaactcattctgattcacccctaagttctcatattcagtgtttgtcatgtgtcaaatgtaatgcccttttatttttttaattcgatttgtggcataacagacttggacacccttcaaaaaaggttgtcaagtttgttcttcactcatgtaataagcacattgactttaataaaaacatgtcttctttatgttctgcatgttgtttagggaaaattcacaagcttccatttcctaaacagccactcactgaatatacaacaccacttcaactcgtggtatctgatttatgggggccatcctttacaccatccacatatggatataggtattatatttatttcatggatgtgtattctaggtttactgtttatctcttaaagaacaagtctaaagctctaaaaatgtttcaacttttcaaggcttaagctgagcttcaacttggcactaaactcaaatcttttcaaacagattggggaggggagtatagatctttcacaccttttctcaaccaattagaagtgattcattggcacccttgcccaacaacacaggagcaaaatggtctagctgaaagaaagcatagacacatagtggaaaaatggcctaactctccttcctcatgcatccatgccactcaaattctgggatgatgcatttaggactgctgtctaccttcataacaatttacctacacctattcttgacaacaagtctcccattgaggttctgttcaacctaaaaccagactatcttacacccaaaacctttggctgcagttgttttcccaatatgagaccttacaataagcacaaacttgagcttaggtctactccttgtacatttgttggctatagcctt

SEQ ID NO: 31426 - DNA, 3475 bp, Cannabis sativa
aaatataggttaattataacctaacagacatctacctcgctacatgtaaggaagtattgattaggcgaatcggtcgttgaaacacttagcgtataattcacattataataactaagtgtaataacttggagtatgtaggacatgattgttcagtctggaaggccttatggtcaaagagcagtttttaagtttgctcagtacactggtacccatgccactactgaaaggcatatgaatacgccaagtcattcatctatgtacaaagcgaggtgcctctagcgagatgctcctatcccacgtctgtgtccattaccttaaagataagaataacaaacggttatgcagttttttagctatacacgtgttaaaatggaacgtggtcaaagcccacgtttcgtgaaaacagttatgtatttcaaattcaaatgtaaataactgtcaacctatattattataaataggggctgattatacagaaaaagggacggaaaacctttgagagaaaaaagatcactgattgtaaaactatagttctgtatcgagaaatatcttgaataagatagactcgtggactatgcagagttaactgcaaaactacgtaaaaaacctggtgtcatcattactattattatttttcttaaatttcttatggtatctgtgtttaatttattacaaaataaggctcattatttgttaacaaaaatctgcgttaacagtttggtgctttcattaagagactacgtgataaaaactcaaaaaaatccttcctaaccaaaaagaaaaaaaattctccatggctagtcatgatcaaaacgataatagtcatcctgaagagactaattgtcgtcctgggaaagtaccaatgggttcatagaggccacctacttcaacaacaacacgttcaagaagaagccgacgtggtcatgatcaaaactcagaaactgggaatgaggaaatcaatgctaacacttgttatgtacctagaagtgaggatacatatgatcccactaggtatgtaccattagttgaattggaaaatcgccaattccagcaacgtctggctgagtctaaccaacgaaacactgagttagaaagagaggcaaccgcagccagggcgactcaaggaaacgctacacaaaaccaacttgatcctggagtgaggaggccacgaggtagacctcagggtttgagaactaggaggtaggagacaactcaaaaaatccccagaatacccaggaggagcaacctggggaaattggggatgttccaaaaggcgaacaaccgaacaatcaggcacctcgtcgagaggtacctcagagaccccagggattcacaaatcaagggaatgaaaataaaaaaattccagaatcatctcgtaggaacgcgaacataaggcagcccaaaactagggaacagagatccctcgtaataataagagaaatcctaggacacaacctagggaaagtgggttaccaccgaggcatccccaacgtccttcttgcactgatagggaggaggcatacacgtacctcaacggggggcgtgtatctaacctttctcgaaggagaaggaatctgcaggacgaggcaagttctagcttgggacgttcgagatcctgagatcacagtcgatcgaaaagacatacgcgaagaggggaaagacctcgacgtagtgatgatcgagaaagtatgagtaatacgaggagctgccaatctgagagttactcaaatacgaggtctatgagcaaccatgaacgaagacagccagatctcgttaacgtttaaattgaaaacaacccgatttatgtgagcgcttaaatcagaatgcacctaatttacgccaacaactcaatgctaatgaaaagcaagaagatccgatccaattgcaaatcagtgagttgaaaaataaattcaagagataccaagatggggaatatgggaaactgccttgttatgactcggatgaagaactcgagcctttccatccagacattatgaactttgaatttccccaaggattcaaaaaccctcacgtctcaccgtacgatgggacttcagacccaatcgctcacctcaataattgccatactataatgcgagccaacaatgtctcgaataagttacgttgtattttattccccacctcgctgactggagcagcgagtaactagttcaataaatttactcatcatacaattacttcttgagaacaactatctttaagaaacaatttcaggtagcaagagacactcgacctaaaacgtcctcccttactaacgtaaagaagcaatcggggagagtcacttaaggcttacttaagtcatttcagtacagctgatgctaaagttagaaacttgaatgacaatatccaacttactactcttcaagcagggatcacgactgacctctcaacagctgggggcgagctgtgggatgatttacagggtcgctcggtgaagtacatcaatgagttcaatgaaagagctcaggtgtcaaaaaattaccttaatagacataatttgtaattaattatataggtgcaataactttatttcataaggattttattagtaaaattttcatctttagtttttactttggtgtctggtaaacccataattttaaatgattagggagtaaccgcaacatccttaattatataaaattatatatattaagtggattaagatcacataatggacatgaattgtaattgattatgtggatacaatactttttctccacatagatttaattatgttggtataattaattaggaaatatgttaaattaaattctcttaatttatcccacatgatagatttaatttaataattttatcataaaatataaaattttgaaacatttataaaataattaaatgtttcaaatatattattgagatagaaaaattaaaccttaagttttttgataaactgtgtaaatatatcataatctacatctaaatctaatcttattaatttaaaaatttagcccacaatcaatttttgtttaataaaattttatatttaagcatgtttatagattggtaaaaacatgattcatttaatcctcaaaactatatattaataacgtaattttactacatcattgttcataaatttctacattatttgtaaaaattctaaaatttactcttataatttcatctggaatgtatagatttttactgtacagttaagaaaaataaatcacacttcattatcactaataaattttcaatttattttgtatgacttcattgtattatagtcaatgtaactattaacacaatggattttttttagattaatccacattcatattttcttgcaaggtttacaataaacctaagaccatctccaacgggagatgtaaaaattgtgctacatttattacaaaaagtagttttgtggtaaatttataccaaattttaactttgtactccaatgcacaattgcaaaattttgatgtaa

SEQ ID NO: 31427 - DNA, 2665 bp, Cannabis sativa
tagaagtgttttgaatgctcttttgattgccttattgtagttttgaggtaggaactaagtttgagcttttaaagctcaaagcttgagctttaatggcacttttcatttaaggacatggttttaatttttgttacgttaggattgttatatgaatgatatatatatgtgtcttgtgaagtttggaatgatttcgttaggtttggagctagtttggagggtttaaagttgagaaaaatcctgttcctggctattcagaactagaattccggatgtaccaaccggaattctgtttggtcagtttttagaaaagtcaaatttcatattttggccataacttttcactcgggtgtctattttggacgttctgtctaccatttcgaagcttacaatgagctctaccataaagtgtatattttagagcctaaatataagttttattttagtgtatttgaactacaggatttggtaggaatcccaaagctatcttttgcaactgttaagccgtgttttgagataaacacttattagtttattattgttatgatatagggcccaatatcatcgatcgtactctaagtaggtcggccaatttaagataagaaaagaatattgtactgcataataaattgtattgtaatacaattaatattgttatataatgaaaagattgattggttaagcaatgataatgtgatgatactatagatataatatatgggctcacctgattaggtgatgcgatatacctggcggcgtactaggcgtaggtacaagcatcagtgacatatgatgagtgtaggtacgggctcacctgattaggtgatgcgattttcctagcaacgtatcgggcgtaggtatgggcatcagtgacatatgatgagtaccgagcataggtacgggctcaccggataaggtgatgtgattctcctaacgacgtgtagatacggcgtcagtgatatgaaaattgctaggttatggtataaaatgaaactgttgtaggatttcctcctggcaacatgtagatatggcgtcagtgaatatgaaaattgcaaggttatggtatagaatgaatctattgtagggtttcctcctagtgacgtgtagatacgggcgtcagtgacatatgataagtactggacctaggtacaggctcatctaattagacgatgcgatatattagtgccaggttgtggcatgggttcacatgattaggtgatgtaattatgttccgtgcgtaggtacaatttcgtctgattaggtgatgtgttatattggtgccaggttgtggcatgggctcacctgattaggtgatgcaattatatgatatatgggtgcagatttttggcacgggctcacctgattaggtgatgtagttatgagatatatgggtgccaagctatggtacgagcttgcctgattaggcaatgcaatataggattatcaaatcaaagcattaccttatgaggaaaaatatatataatatatgttattaaatgaatatgatttctattattagcataatagttttgtattaccaaatatttgtatactgatgcttattcatggcagatgctgtttgggaggtaaaaactgagcacaggaaaaaggcccaataacataaaatggaaacgtcaaaaggcccacacaggttgagcacgtaaaggcccaagatcgaaatacgtcagaaaaagcccaacaaggtgcggcccaaacactaaacctcaagggagcaatacggacaaagtagaaagggaagcgctaaacgacaaagaagataagtaagcgctgacggaaattgaaggaggagggagaaagaggaatttgtcgacggagtaaaacctgaatgcaggatatattacaaacgagaacccaatgaggacccctagctgacttgccgacgagggatccacctaaaattaaataagaaaagggacgccgagatgatgccacgattaggacaaacacccccgacgaaaggaaactcggatcatctcagacagggattctgacgggagaaagagatactggatacaaaggaagaagtcaatatgtatgagggtataatgtcgtcggactgagagaaagcagcagcagtatagctaccagctacaacatggacacgtagcacaacagaaagaacagagggaaaaaacacgtgtcaacagcggaataggtaaaaaatagattacccatgcaatcaaaaaggacgtaccatataaatgtagaaagaccacataaagaaagggaggatcaggaactaaaaaagaaagagcccacaaaagaacaaatagtgactgtttttcgactgaaacaatttggcgccgtctgtgggaaaccaaaaattttcctttttttttaagtaaaaagaccttttcatagaacgatcgatcttaaaagaaaaaaggagggaggaagatggcgaatgaataggaaaacctcactccttaagatgacccaaacaacgctctcgaaactcagacgaacaccggcaacaccagcgaagatgtatcaaatccgaacccgccgtggcgagagatcctcgaaaggctaaaacaacaggaagggaaaatgacaactcaaggtacagaaattgccctccaaaaagaacatattcagaggctcgaaaatgaaaacggacagatgaaggttattctcgagggatacc

SEQ ID NO: 31428 - DNA, 1236 bp, Cannabis sativa
tatttttataaatatttgtatgtggactgtataaatgtttaatgggccggcccaaagtatttttgtaattttttttccttttttgtatttttttgtttttttccctataatatatgtcttaaatatttttttattttaatttttttaaaatttactattcatatgttctatatttataaaatattatttattgttctaaatatattttattaattgttttgaattttaatatctatttttatatgagaaaatatataaatattatatatttgaaatgaatgaaatgtattaaaatattaaaaaacaaagtagtattttagtaatgtattttaaagaatagagtagaaaaattattggaaattgaaaactgtatttatgcaaatatcaatacattaattaaatttcagtaattaaaatcacaaccgttacgatctgcaataacagaatgaaaacttgttgctttaaaaacacagatttgtagtaacagaacagaattaacagtgcctaatataaaaacttgacacaagataattatacatgatatcagtatttaaacattcctaatccacgaggccacgcccagggaatgaaatcaattagtaaagtattaaagattacacaagcaattaacttaaataaatttagactccctctaatgatttgctacagcagtttgtaatccacctagttaatctgatctctgaaccacaccaatagtagtgaactccctttcagctattgatgtgtgcttacttactctcgaagtaaggcttaaacaaatcttctcccgaagatatatgcacacttcctccccaagtaaggctttgacaagtcttctcccgaagacccttctcttgttcaataaagtcctttaacctattcttagaacagtataagaacgataaacaaagactaaaacatagttgaacactcttggttttcgcaaaagaaactctctccttacaaagataaaaatataaaaaatgaagctcaaagaagtgagaacatttgtttactctctaagtcctatttataatcatatagaaaccctagagacagctacatatacattttcaaagttgtacaaaagttccctaaaataatccttaatttgttgcaacacgattgaaatctatagcatagcagaagattgagcaaaataagaaaactttccatacaagtccaagattatgatttggtctttatttcctgccaaagattttttttttttttttt

SEQ ID NO: 31429 - DNA, 1916 bp, Cannabis sativa
  modified_base (1870)..(1873): a, c, t, g, unknown or other
tgcattaggagataattttttccctaaactaatacttttctacattgaaaatatatgactacttttccaaaaccccaaaaatacccctctcaaatcgggtccggtgtggaatttagctcatttttgggttttgaaggtcgggtccgatggtgtgcccgatgcccgtccgatggtgtgcccgatggtacaccagtttggcttatttctgggttttaaaaatcgggtccgatgtgggcccgatgcccgtccgatggggccagcccgatggttgggaaaaataggagggatattttggggtttaggaaaaagttatcccattttacaaattatgcatagtattagtttaggggactaatttatgagtttattaagcatggaaattcaaatttcccttctagcaattactagatatatggaaattagtgacatttttgttaaatgacattaaaatatatggacaattacatttttacagaaatgttaaagttgtgactaaatgtcaattacagaaatgttactaaaataaatgttacttaaaatgctactattatgacattttcttacaagtgttacctatccaaatgtcacttatatgatgttggctaagtgtttcaatttattgaagagaaagatactcatgaggagaaaacaagagggaaatttgattttctatacttagaaaatcttaaaattttttccctaaaccaaaaatttaaatcctaaaaaaactatacttagaaaatcttaaaatttttggtttagggaaaaaattttaagattttctaagtatagaaaatcaaatttcccaaacaagaaacaagaagcaggtaagtgaggcaaataccataacaagtattttttttttttttaatttttcctttaacaaagtgtatttttgttatactattaaactattaaaataattgtaataccattacgctacattaaaaaaagtgtattttaataattttaaaactttacaagtatatttttgtaataaaaaattgtagaccgtaaaattataaataaaatataaaaaaaatgatatttttgaaaatttccttaatatttttaagctttatatatatatatatatatatatttaaatctagttaggatttttgcctctcgaattttgacatataacaactcatacttcggaactttgaagactgttaaaatttcctcatgaaatattgagattattggatttaaaaacttttgtctaattttagtaataaaagtctaacatagatgaaagtttcagagacatgatttgacactttgttaaagttcgagaaacataatttggtagatatcaaaatcggggagcatgatttagtatatggacaatcactgaattagtaaaattgaataaaattagacaaaaatccttaaatccaacaatcttagtagtttaggagaatttttaacgaccataaaagttcaagagacatgatttagtacatgtcaaagttcaggaagtaaaaattctaattagtcatctaattatttaaatactaaaagctactaataataataattataataaatattaagatcggtttggacgagttaacttgactaaattaataaagtcattaagcgagttaagtttttttttttaatttttaattggacgagttacaattaaaaatttacaattacagcttaatatttatattagattagtaaaaatataccataactcgatcaatatacataacaattaaatttttttatacacgagcattgttgttaggtactactagtaatatcttgtacaatctagaggtggtactttataattagttattatataagaattattgggctcgtttggtatgccgtataagggtcgtattgtatnnnntaataaataacactatgtttggattaagcaatgtattgtatta

SEQ ID NO: 31430 - DNA, 3828 bp, Cannabis sativa
tatatatatatatatacaaaagatttacattattatgaaatgtcataagtagtgaaattattagaattaaaataaattttataatatattttttaatttaataattataatagaaaattgttaattaattataaataatactaatcatataatattagtatatatatatgatgatgcttgatttgtaattacaaaattaattataattattccatgcacaatatatattaaagatgtgtttggatttattctaaggttataaattaataatggtaatttaacaattattgattctgttcctttaattaggctatcgtcactatatacccataaaaaagatgaaagagatatttaaaaagctatgaaaaagaaattagaaaagttatgaacaatatatatacataaatatatatttatataaagccttatcttgaagtccataccaataatattagtgtgagcaaattattagaagatgcgttactcaactaaaaatatataaagagatttattaattgatttgaaaaagaaaaataataaaattagtactaattgttctacactttgtcatattcatatgcatgttaattagtacaaaaacttttattttgaaattgatggatatttataaatgtgagctgataaaatgtaggataaatactattttagattttgtgttttgtaaaaattattgattgaactatttgttttgttaaataataaattggatcctgtattttttaaaattatactaaatagtattttgaattttgtcaaaataaaaattaataataacccgatttagaggtgttatgacaaaaatatatgggaaatgctaaaaggtaccagtggtgcatagcaccctcccatgtgtcaatattggtcaaactaagtatcgggtctcatatagtttaatataataatttttaaggagtatcactagccaattgcaagacgacatgtttagaggtgttagacaccactggtaccctatagcaatactcaaaatatatatattctgcatctgtttgtactaggagttgtttttaagttgattatattaaaaaaattatcgaaaattaaactaaagttgttatttgtactattttaaaaaaatacaagatcatttaaaaaaatagaaggtctaattaatataacttttacaaaatataaaatcctaaatatataatattaacctttaaatgtatgtatatatgttaatttgtttctttttagtataacaattattcaaggtttttttttttttaattaacctatcataacactttctttttttataatggttgaataaaagtaaagaaaaacaaattggcataataaaaggaactttatttgaaagctaataataataacattgcttataataatgccttgaatttccaatctcttacgcaacactacctaattaattagtacttataatctttatttctttttcagataaatatatcaaacaaattaattaaaaaaaaaaaagttgatttgattagataagcaaatgaaaaatgaaaacaccaactctaaatatatatatatatatatatatattttttttgtaacaccctactaatttagacgtgtcatcgtaatttcatacaaactgtgcaatccgttgttatagtcaatgagttcgttaaaaaaaacgtgtttaattaaaacttaacataattaaactttaaattaaaataaataaactttacataaaccgagatcccaatatttaaaaagttacaaccataataccaaatattagttacaaaagttatcacctagcggccaatcaaaatactgcatgctatcccaaagatcgtatgctccaagtcgatctaactgtcccagtatgtgcagttttcatctgctcgatctcactgctgctcagccttagctttgccattacttacacatgtaaacaataactgtgagttgatagactctgtaagaaaagtataatcataacataatcttaaaccgaatcataactaagcgaccttacacccaatcataaccctatcccgtatctcatgcgtaccaagtctagaacgtttgtacgacaatactattgaccataatatcagcctatactttgtactctagtcgtactgatgtgataacgtcaatcagtacttatgccaaacatacatggtatccaatataattttacgtatactgatactgttatttcaatatgttatctaacaggcattcataaacatgcacgctaaatatgtaatcacatatgtatatcattatactaatcttacctcgatcttgaattcaggcgtgtcggtcaacctgagtggaactgctgctcaacggtttacatgcccctaagtcacaatatacactaaatcacttttcggggactaaaaatcaaaactaaaagttttcctatcgatggattcgataacgtggcaatacgctaagtatcgctaaaatatgaaaatctagggttccaaaactgctagaactggtaaaccgaatttccaaaactagaaaactagttcttagggttcttcctgaggaaacggttaaccagttctatagggctagcccgaaccgactaactgcttccctgtaggaaaccctaaaaaccttactatcaactcaaatttacccctaattttttctatctctccagaccacctagacaaaccataacaaacatatttcaagcaatagaaacagctataaactttagaaaccaattctaccattaaaagacaaagtttgagatcaaaagttcaaaccttgcctaaattctataatcagctgcaaaaacaacttaaaatcatctaaaccaatatacaaacacctaaaaaaacatagaattaagcttaaacaattctcacaacaactctaactcacgtttcatgtatgaaaacctagtttttactatgaactttaaagaggagaagtgaagagattaccttgaacttgaaatggactaaggttactagaaattttgttagaatcctcagaaaataattagaattttaagtactttttggttgctttgatttgggtctggtcgaagcctaagggagaaagggacaaagaatttcttccaattttctaatttcttctaaatgattaatgaataaaacccacttatttcaacataaaaaaaatcaattaactaaaagttagtagaaatccacctatctttaaaaacaaaattagggtaaagttaccaatttaccccttgcttcatcatgaagtaactttgccacttaagggtattttagtcaaacctaataatcccgcataatcctaacatactaaatatttatctataatgccctgctatttctaaagtactaaactaaaataaattgactctataggccatacgtcgcattccactgttaccgacataaaaaatgaaaaatataaaattcatatataatataatttgcacacttagaattcaaatatatctccacaattgcataaataataattaaaagtctaattctgaattaaactctaattatctgctaattctcatattaaagcaagcggtcattatattttttctgttagtgatttttttattttttattttttaaagcaaactcattacaaactaatagtgctaataaggccggtttggactctatattctcctgcaatacaagtatcctttctttctctttacaaacaagtaattcaatctaaatctttctttcataaaataactacattctagttcttattttttgtttaatacaaaatattaaaacctgtattgtcataaatttttgtaaccaaatcacaccattatgttttctctaaatgtgatacacc

SEQ ID NO: 31431 - DNA, 1934 bp, Cannabis sativa
  modified_base (1048)..(1048): a, c, t, g, unknown or other
aaataaaattattataaactcctatatcaatttagacatagttttggaaatgatttttcggactacccaataattggttaagagtgtattcataatttgtttttggtcaaaaacgttttgtaaattgatatagatagactgtttttcaggttgacgggacaacctaaggaccgtttgggaaaaactaaaaattactttttgaaaaagttataaaaaaaatagatttggtaaacaattaaaaaaaaaaataataactttttcaagaatatatataaaatataataaaaaaatactataaattatttttgtcaaatacatataaatttatatttgaaaaaaaaaactactattatataaaataagtttttacatattgtgattataatagatcttaacaacccatagtactttgaaatttataatttaccaaacactcagctcagcttttttctacaattttgttgtacaacttttttttctcacagcacagctaaaactgttttttctcacagcacagttgtgtcaaacatacgatgagagaaaaaagagaaatggactaagatatcagtggtgcctatagaactcttctatatgttaatatcgttattggtctaattaagtatcgggttacatataatttaatataataattttgaagaattatcgctagccaattgcaagatgacccatctagaaggtttcctaagcattactcatgtttaatagctagcaatgctcgataaaaactatgttgacttaaatcaagttaagataactattttgaaccaattatattttcaaaacatttatatatagagaggataattttactgtagtatctttattttgtacctcatggcatggtgtagatttttttaccaataaaattaaagtcaaatagaggttacatggtatacatatccatgtgacattaaaaaaaatcttactttaaatttgtgactaaagataaaaataattgtggctaattttatattatcattattgtgttgtgacaaaaaagtccgttgctaaaagtattagtcacaanaattataatttgttatgactaaatgtatttttagtcacaatatttattgtgattaaaactaaattaataacaacttgttacttaatattatgttttagtcacaagtaattttttttgttcggactaaaagtcacatttagtcacaaaaaattcatgttttgactaaaaaattgtcacaaaacagttttttgtattgtgattattgtttattttttgttaaaaaagtggctgctttaaaaaaaaattattgaaaaaaatagaaggttgctttatatatgtcgtgtgtgtatacattaatgagctatttttgttacactaattagttaatggactttgttattttaattttatttttttgttattgaaataaataaataaatatgttaaaagaacacatatataattttaaaatgagaaaaatatatgttaaaatgtgtcataaaaattaaattaagttcataataatgtgttactaagtgtaatttatggcatttgacttaactaaatagttgtgtataaataagaaaaaaagtgtatgaatcaaagatagtaacattaaaagagagttttaaaaatagacttaatcatgtataggaaaagaagtttgtgtaaaataaattgttcttaaaaatataaaagagttgtataagtttcttttttgaagggagattctcttgtggatgtaattgactcaatttgattactagaaattatctttcttcaaaaaattaataaagcaaattaatttaaaaaattattatggtagaactatatatagaaacaaattagtagtgaaaatacttaagtaattaattttttttatagtttaactattagtattaaaaattaataataacattcctaaataaaattattttttgaaaat

SEQ ID NO: 31432 - DNA, 13391 bp, Cannabis sativa
  modified_base (2726)..(2732): a, c, t, g, unknown or other
  modified_base (5333)..(5334): a, c, t, g, unknown or other
  modified_base (6146)..(6147): a, c, t, g, unknown or other
  modified_base (13364)..(13365): a, c, t, g, unknown or other
aaaaaagccacttgtgattcggggatatagtgagccaaaaataaaaaagagccaccaaaaaatcaaaaaacaccgatctgaaaagtagagcaaaaagagccacttgtgattagggatagtgagctaaaaaagagccgtttatgatcgagttgtccaagatggtgagcaagtaaaatagctaccatcttgaggggggatgttagagagtcccacattgccaatgtgtggaaaaataatagaatatataagaggaatgtgctactcctcccattgccaattggttttgagatggaactccattcaccttattccaaattctaataatttaatgtaccataagacccatctaatgtaccacgaaatacattccgtgaaattacatcacgggacaaaatcatatttctatatttatagtatcataggtaatgattaagctcagtagatataattattactgctttcggctatatatatagtgtctgaatataattgaatgatgcttggtttaaggaagatgttcagttgttttggagtttggaagagaagttggaggctggcagtgccatggtttggtggtgattggccaaagttgctgtggcagaggagttaaaggaggagaagtgcgcattggaccctaccagcagatttttctacaataaaagttcctgttgatggtgctatctttgaaggagattaggggacaatatggctttgaaatggtggctccagagttaagccaggtgttaaatgggaaaggtgtagccagctatgctcgctcgaagcaattggtttcaaagaaactttaagttagacaaaggacaagggctggcatggcctagtgttgtcattgaataggcctaccttactttggtcaataatttaacttcgtttaaaaatatgatctctcttcatgtatatggccatgtattatatgattgtaggagcagtcccaatagttactcttaaatagctaaatctttaaaatttttgaaaaaagaagtcaaaaactcaatccaacagatgagataaaggtcatattcattttagttaagagttacttctttaacatctagagacaactttatgtgcttcaaacatttttattttttggataatttccctaaacctacatgtattaaaattggccatctatgccaacattctcatataatacccctcacatttcaaaaaataaatcaaggctcccttctctcttcccctcttgctcatacccgcgacgcacccactcgacccacgatatacccacgacgcaccccaatcgacccacagtagaccccaatcgatcctatccacgaccctcagtgcacgtacaaccaaagtgagaccgaacccacgaccgatggtgcacgacatacccacgccatcggggacaatgtcgaaggtgagttcatgttttgatttctagttttttattgattttgtttgtgattttaccattaaagattgattttgtttgtgaaacctaaattttgttagatttagggatgtttagaatgttggatctgtgatttgggtaagaacctagcctttaagccaggttcgatgcacgcccgatgcacatccgatgtaggtccgatgcattcaatgaatttgaaagaatttgaagtagaagacgtaggatgggtctaataggtggttcgatttgtgtctgattgtcttttttctatgcatttatttgttgttgtccgatgtggtctgatacatagtccgacggagcccgatatatgtgtccaattgtcctttttctctgcattatttgttgttgtccaatgtggtctgatacacggttcgatgatggcccgatatatgtgtctgattgtgcttttagtgtattttttgtttgttgtccaattgtgtctgatatatggtttgatgatggcccgatatatgtgtctaattgtgcttttagtgtattttttgtttgttgtccaattgtgtccgatatatggtctgatgatggcccgatatatgtgtccgattgtggttttttagtttattatttatttttttgatggtgttcgattgtgcccgatatatgtgtgatattgtgaatatactgtttttttgattttgtttattgtattgggtctaatggtgggacgatagtggtccgatggtgggacaatagtggtccgatgtgtgattgtgaatgctttttttttgtccgatacgggtccgactgaggtctgatgttgtgtccgattctttaattgctaacttttaatttcttggttttttttttttttgcagagacctccacaactaataattccactcacggagcattacacagaccgtgtcacttggtgcggcagtagttattactacccgaagattaaggccaaatttgaagaattcagattattggatagggtgagggaatcccctttcaaacagttcttcgagagagagccattacaatttttaggagcattgatccatcaattaatgttgcacaagatcaaatctgacaagccagacgaggtacatttttacttgacgaagaagagatgcagattcagtagggtagagtttggtttggtgactgggttaaacttgttgcccggacctactgaaaaagaaattgaagaaaaagaagttcaaaccggttgattatggagtatttcaacagtaatctttccatcagctttggccaactatgcagagtttttgagagctgcacagaagttgatgatgtctacaannnnnnnatggccttgtttgttatgggcgtcatcactggtaaggaggagaagactgccgttcctccttttgtcataagaatggttgacaaccttctattcttctacaagcacccgtggggaaagatttcgtacaacaagttgatggaaatttgtaataaagactacatagatgtgaagaataggatgcttaagaagattgaaaagggagttagttagaaggaggctaaatacttattttacggctatcctgcagtgttgtagtattgggcatacgagaccatccttgtaatatcttgagattaagaacatagattagcaaatcctaactagttaaatgtgtatttattgtagaattatattattatataattaattacatgtgaattaatgtgataaatgacatgttaagaccctgttggtgagccagaggcatttttgtaattatgactcgagaagggtaagacagtgaatttaatttaattgcgtgcttatggaactatattattatatagtatacttattttgtcctttgcatgtgttttttgacaagttggcgcggtatagtcacaattgggtatttcggaccgaactgggttcggggtcgaaatacaattttgggatttacattggcattttattattatttgaatattctggaaattatttgagtaatgatatgtgatggaaatgacttaagtgcccttgaatgcttatgtgtgtgaaatatggccctaagggcaattttgtaattttgcatattctaattactttcaacaaaaggatttttgagctgaatagtgggataatttctgatttatccctctaaagaaaccgaccccctctctccttattattattttttaaattgttgaatttgttgaaagattgtattggaatcaagcttaatttgtggggatcttgcaccttgaatttgtgagaagattgaggtagtatttctaccatttttaatttgagttgcattgctgtaaaaaatatgtgaaaccatggattaggttcttgaattgaatgtttgtgagattggaattgattatgatattgtagacatagttgtgtttgaattggtagttattgctttgtgtaggttttaaattgtgaaattgagagttcctagttgctgaaatcgaagtggattctttagaatttaagcttgtgatttcagcttgttactcatatggttgagttgtgttttgtggaattttagctcaatgtttggagcttagctaggatgttgttaatatgaatttttgatgaatgttggttgaattttaagcatgaaatatgtattttaatgccctgctttgatacttgctaatttgtgaagatgattttgggttgtgtgtaagtttgggttgaattaggtgtattttagcatgattttcgagctggaaaaatggggtttcctgggtttggaactcaggggccgcggcccaactttttgagcgccgcggccagccccctgttataggcatgggtttccaacccaggtgtcgtggcccgtgtggggagtgccgcggcctgtacccattgtttttgggcatattcgaatgcgatattcgaatgttcataactttgtgattcgaactcagtttcaagagttctatatatcgttggaaagctcgtttcgagctctatattattatctggtatttcaatgccaattttgtattatgtggaagtggatttagggattaaccctatttttgtggatcctaaaaattgtgactaggattaccgacacttagtcatgagcacttggggatttggaatctccacgtttgcgggacatcaggtaagacagtagtttgcacgtagagttaagagcagtggccctcatgttttatattatgattatgatttattgagaaccaggattaaggttattaccctaaaatgagcggttatatggtctagggttattaccctagtaattaagagattttgagtattatgccatgctaaatatgttggaataaaggattatgcccctaaggcacaattaagctagacgtggtagattaataccttgagtttaataataatacagtctagggttattaccctagaatttatatgaaggtaagaaagcaatgatgttcagtaacattgctaatcgagtgaaagcatgagttagggttattaccctcaatagatgttattttaagcatgctatgatatattatacgagtaattatttagtatgaaagttaaggttattaccctaagattttatatagtatagtatatattggatgcacgcatatatgtttagagttatgtgtataagacataactgggttagacttgatatacatcatcaggataaaccacctaaagaacgtaatgtatggattatgtgtatatatgaatagggttatgcaagctaggcataaccaggttagactcggtaactataactgagataaaccctactaagaccttattgtaaatagacgtgtgagcgtaacacgtaagtctatgctacatagacataaatagacgtgtgagcgtaacacgtgggtctataccacatagacatatataggcgtgtaagtgtaacaagcaggtctatattaaatagacaaatanngcggtggcaccattaattatgtgttatatatattgagattaagggttatgtgttcaaggcataatcaggtcggactcggtaaccagaaatgagatgaaccattctaaggacttattgtatctagacgtgtgagcgtaacacgtgggtctgcaccacgtagacataaatgggcgtgtgagcgtaacacgcgagtctatgttaaatagaaaaaaaaatggcattattgtatatgtgatatgctaattataattgccgatattatatactgtcttactgagactggctcacggatgccttactgtgcaggaaagggtaaatctgtctctaatcagccatgagtgcgttagctgagcgatgcttgtacatgttcaggccacactagaccaagcgggttggggtctaccagtgatgtacttttgtaactctgattttgccgcttaggtcagctagtgaaaagacttgtaatattttgtaaaagatttttgggatcccaaaatatgtcacttatgattgtaaagtttaaagttattacaagttttattttcattctgttttagataaaagtttaaatttcccgagcttatttttttagtaatcccggattagggaattagggtttcttaattgattagcgtagcatgcctaagtgttagggcgttacaatcctagagctgggcaacaagtatacagtgaaaaagtcgcatcgcttttcaagaatagtgaactgggagacattactacaatttacccttttagtgacactatatagtgacgcgtagaaaagtgtgtgtcactaaagagttgagagtganntttagtgacatgcacaattagactctaaaattcagtgttagtctcttgtaatgtgggtcactaaaaatatggagtgtcactaaagtgtaaaaccaaaaaatttctgaattttattaatataaaaaatattagcatatagtgatgcgccagacgcgaatggataaacatatccccacacatctggcgtatcactatatcataacctagtttttttataaaaaaaaaatacagttgtaattaataaataaataaaaaataaaaaatatatttaataatggtaaattctaattattcacgccactctctctttcttaatcaattacaattctcaatcaattaaaacatttatcacccaatataaaaaattaaataataaaatataaaataaatataataaaataaaaaaagaaaaaaaaggctgaatataatcatcctatttaaaaaaaaaaccacgcctgttagtgttaccatatttctctctctaaatttatttattaaaaaaaattaaaaaaaaaactaaaaaaaggtataaaagggatatgttagaatagaaaccctaaaattcctctctctatcgatctctatctttctctcccccctatttggtgcggcgatatactcctcattctctgaccattttttttccttcttccagccatgctccggccatcaaatcctcaagctctaccccagtaaactctgaagcccttaacctttcccatcccttgttccctcttctgttgatcagcgacgttgctaggtgaacgatgatggtccaaatggaccacatcacagtgctcgcaacgcccaaaatttcgagcgatgagaagagcagagatctcgacgtacgaccagagtagtcaccggtggccattcgcaggcctcgacgaacgacgaccatcccttttgcacctccagtttaatctttctggggtttgatattaggcaattcatttgtagttttttttttttttatatatagatttagagattttagttttgatttaaattgtatgttgtttgtgtccacttcttttattgttctaaggtttatcatttagttcaaatgatgaataaactttttactaatgtttactcattttgtttgttgattctgatttttattttgtaatgaagaaaagagactttttgtgtatagatttgttattattaattctgtatagatttttgatgaattgatttttgattttgtataattgtgatatttttttatattggtttattaataatattataattaaaattaaaatatattaatttataattgataaatatatagttaattaaattgtatcattaattaaattatttttataaatttataatatataatctgaattttagaaaaaagtaatattaatttttatatatatataaagcatattaacattaataaaaataaaaaaataaaaaaaaaaaaggatatagtgacactttatgtgtgtggctattactttttcagtttgagaaaacctgactttatacgtctggagcgacgcacataaagtgaatgtaaaaaggttcagtgacacgtgtgaaaagttactaaaaactgtctttccagtcactctcattagtgatgcacgttgaaatgtcactaaatagttttagagttactcaatgtgtgttactaaaatccgtttttctagtagtgagagacgtaagctaaaaacgacagtcggcaagaatgaagtgatatgattatttgctagaaatgtaagtttcttacgctttacatttatttcatgttaatttctatctattaatatttgttctatttttcagttgacagtgtactctatgttatgtccccgagcgaatgagattgagtttgtgagttgcatcactggcggtgagatgcctttatatattgacttggaggaactagtgttcggtgacgatgggaaaccaacacaggatgctttgcaaagccaggcccaaaagcttgcctcgacattggaagaacgagcgagtgcagcccgaatctttagagactctacaccacgtgcaccgtctccaccacgtgcaccgtcttcactaccagatgagtttggtgttgtcccatccgcatctattcctagcaattcaaagcctcaagaatcagtatcctctgccatgatggcaaggttggcgattttggagtgggaacaactagctctgaagcaaagtcaggctgctcttttgaaaggacagaacgagattatgggtcatttgaagaccataatgagactcctgcaagatcctggaatttctcctccaattgatattttgtcttatgtgaaatatttgtggaggtgattattttatcaaagtctctcaattacaaatataattttaaattaataaggtttatttatttttttaagtgaacattttgcatttgataattatataaccaatatatatactaataatcataccatataataaatgaatttattagtatatataattaaattgagacaatatctatctataatttataattgtaataaatttgtaaataattttggagttctatttacactcgtatactttattattaaaaaaattaaatttaataaaaaccttttgtattattcattttataaaattaattaggtattttatgtattaattatttttttctttaaaaaatttaaagtattctattttacaaaaatagaagggaatgtgtgcaaaatatcctaaatatttttaagagccacaaaattaataaataattttggcccttgttaatttacaaaaaaacattgaagactaagaacatttcgaatggagatgcaaatataaaatatagctcactttgtcaaaagtctactctaatgatgtgtgaaattgtgatgcaaatatttcacataacaaaaagtgatctaaatttaaatcaccatatagtatgatgcaaaatttctattacaataaatgctatgattttataattactattatgtcatttttaatattttattataaaagtttagtaaacatgctccattgtattaaatgactttcataattattaatattttatgattaaattttatatttattattgtgtgattattattttatatttttaataaattgttagatgaacatttaatgatatattaaattttgcattaaaatttataataatatcacttattatttgtactaaatataaattaatttttgcgtcttctattagaaacggtctattatttaaattatgggctcacgtgcgaagaagcgcgtgacctaactagtatttatatataaatcaaaaacttaggacaatcatgtgggcgtccttatgagttttttcaattattatgtttttaatgaattttcaatttttatattacttaataataagacagcatttaaaataaaggaaaaatgtattctctaatgaaatatataataatgtaagaatttaaaacatatctctcttgatattctttgtatataacatatttagagggatagttattgatatttggtatataatatattcctgaggaatagttagttagcggaatagttagttagctatcattagttattattttggagtaagtattctgaaatttaaaaagttatatgcatgacacaatttattatttaaagagcatattatcattcttgtgagaaaaatacaaagactttagatggtacatggatcgtatggtaatagttttactcttactattattgttttgtgtaatattatatatgatgtacgtattgtatattttaatttaactatatataattatatgattatacttctcaatctattaggctaatcgatggtttatcataaactcaatactacaaacttgataaataacattacttcatatcatataataatttatatttttattaattaatacatttatatatatatatgatatttttatttaattataaataattattattgatctcaatcttttagcctaaccaatagtgatggtcatcaactttttgtcataaacttaatatataataggtatcattcactcttatatatgcactacttttaatggatattatctataaatgagtaatattagaaaaaatttgagttttttatgattattttttttatttaattagaaaaatttctcacttttacattacatattacataggctggaattggttcatcaattgaaaaaaaaataataaaaaaaaaattcagcaaaaaagtgataaaaaaattaactttgacttaaatattttttatataaatatatttttgatatagtgtagaaagatgtatttttgatattttctttaattaattaactaaattaagtataaaaattaaaaaatttcttttattattcgttatcgaactaaaatttaatggtttaatatttttaaaattaatataaatatatttatacatatctttatgcccatttctaatgatgtttcttttgtttttttgttaaattattaactactagtactcaacattaatatacaaacaaattaataggtgtactattcaaataaaatttaatatttattttaactaatatttaatatttattttgaaaataaagcatcaacattaaaaaaaaagatttacttacaataataaatcaattggtacgtatttagtttatctcaattagaccagttacattagtggccgaagtctacttagctacaaaatgggcaacagaattacacacgaggaacccagtacccactcaaaacaacaaccccttaggctgtagtgtcaactcttcaataattattttaaagttatttttttccattgtatatacttattatcttttctttcattttttttattgtgagaaaaatttatcaattaattaaaaagatctaaacattattatctcgcgatattaatcacgagttatatatatcaatattctccaagaaagaatatgtataaatggctaattaacctgaaaacatggattataaaagataatatatgagaaccggatgcgtagtataaatataatatatatatagaaattttttattacgaatgaaaaatagattatattcttttcttaatatattgtcatatctggttttgaaagagggacgagtgagcaaacctacaaactctagcttccttataaacgagtccttgttgacaaaaataccctttatcaggtctacaatggcgatcttcactacacacacattgtccctctaaagcacacccatcttttttctctcggctcccaaacaacagctcatcagaaaattcactagagaaaatattctcagggtccaactcttttcttttctcaacaaatttaccaaaactcgggtacttatcctttacaccaagaaacgccaagtttcgattcttagcccaatggggtttcgctccatacttgaaaaacgccatctgttcaacctcttcccacaggtcttggttaagtctgggagtcaacgcatcgctggccctgtagtagttgaagtcaacgacaacggagtcaacggtttgaccaaggtaagccgttgaggccttgatgaatcgtatgaggaaaccgttgtaagcgtcgaccccacagaagttttctgggtttagatccctcagttttttgacgtcgtttatgaaatttgtgaaggtcaccaaattattagctgggaaaatcgctgtcgtttcgtagaagaataggccgtttattcttggatcccaagcacacgacaggtcgtttcgtgtggcgtagaggcacgtgcctgaggtttgcattttggcctgtgggcccaccacggggtagcccgtgaagattaccccgttattctttaatccgttagctgatagttttttgtaacccaccaccgttgctgccattgcacattttccctttgagtttcctgaattttctattgctttctctgtacacataaatatataatatatatatatagtaattaatctctaaagttaattaattatcttataatcattttttttgtcttaaaactattcaaagcaaaggatgaatataaaagataatactatttcagggtaataagaacatgttgagagagacgggttaccaatatcttataatttatgaataattatggattttgtataataattatttaattgaaatatagtatttctaattagaaaagaatttggacatttttccgagaatatttacagatacgattctcacgtacgtagcccgcgatgtatatatataacaaaacgtaaaacagattctgaatgtggtaacttgatgttgagatgacatttgggttctcttttcgtaaagagaacgttagatttctggatagaataatgctatataaagatagctagtttttttttttttgaaaaaaataaaataaatgtacaccatgatgtgggccaaaatggacatgtacaaattaattttattccattaccagcagctcggctggcatggcaggcaaagaaaataatatcagttctgtagttttctcttcttctttattttttttagtcctttcatttctgaactttttgtcattttttatattatacacacaaaacgaattgaagaaaacaaaaacacgtaaaaaaactgaaataagtgatcattattaatgtacattcgaaaaatgtgtattacatatctcctaagagaggtacattttttatctctttcaaaaaaatatattattttaattttttaattatcttacattagttattaattattttagattatatctaatctttaaataataatttacaatactacaaataaagtttaaataattatttactaggtgtgtaataaaaaataatgtcgtgtggaacaaaatttggcattgcaaattatttaaaacattttaaaaattgactaatagccctaaataactacactcataaaagaataaaaacaaaaaacaaaaaagtgtcgaactaataaagagtctgggttatttatgtttattcgtgcctttaagaaaatagatcgtgacgtgtcgtgctaaaaaagaatatgagtgtgtaacatttttaaaaagtaagcctgacacggctgtaggtcaaatattttcgtatcatattttactcgtgccaacctatatttcttaaacaagctagtctattttaaaatcccaacttaaattcattctttactttatatatatatatatatattttttttacagttactaaagtatatatatatatgggtatgctnntaatgggtattacccatgtatgggta

SEQ ID NO: 31433 - DNA, 1747 bp, Cannabis sativa
  modified_base (131)..(133): a, c, t, g, unknown or other
aacttttaatcatcgttaatttacctattaatttacttgcttcttgttttatttttttttttgattgttttctagttttaattttctcttaaattttatatagctgaatagaagtaaagatttaattttannntacttaactacaatccttgtgggatcaaccttactctttgggagtctattacttgtttacgatacgtatacttgtgtgctaaaattaccacaacaagtttcttggcgtcgttgctgaggattgttagttaatattaataaaaattaattttattttaatttggttttttcttttcaatttcagttttaattctgtttgtttcgaatttttctcttttctcaagaacaattagtttatgctacgtcaaggagcaactgccagattgcctattaaccctgaaattgagaagacttccagacagaacagaaggaggaaaagattagaaagagctgtaatagggattgaacaagaagtagctatggctgacaacgtcaacaatggtaataatggcaataatggaggtgttgtaaaagaccaggctaatggtcacaatcaaaatgaccgtagcctgagggactatttgctgcctaacttgacaggggccagatccagtataaggccacctaccattgatgccaataattttgagattaagccggccatactgcagatggtttgatccacattccagtttggggggctatcaatagaagacccaaacatacatctcgctaactttgaagagctttgtaaaatatttaaggtgaatagaattagtgattacgccatatgactgaggttgttcccattctcattaagggattgagcaagagttggttggtatctttgccacccaatttctatcaacacttgggaggaattgcccctaaaattcctttccaagatctttcctcctgctaagattgccaagctaagagctgaaataaacaacttcatccaacaagacaacaaatctctttatgaagcttgggagaggttcaaggacttaatcaaaaagtgccctaatcatgggattgaaaagtgaatgcaagtgcacaacttctacaatggattggttggcactacccgaacaatcatagatgcacagctagtggggcttttatgagaaaaagtgtgaatgaggcttatgaactacttgaagagatggccatgtataaccaataatggtcaacagaaagaagccaatcaaaaaaatttgtgggtatgcataaagttgatgccataacaaagctgacagcccaggtggaggccttgactaaattggtgactgctcaggcaaagtaagctcaagttacttgtgagctatgtgggggacctcacacttatgatactagcccggtggatgtgaatagtttgccaatggagtaagctcaagccattgttaactatcaaaataacaactatggttacaactaagggggtcatcggcagaactttcaaggacagttttgaaattagcagtaataagggttctacccacagagaagtctgtctcaacacagtcaacaacaacaaggctccagtggagggtctaatcttcagacatatatgctacttcaattcatgatagagattaaatcttccattaaggtcttagaaactcagatggggcagttggtgtaacgccctaacaattaggcacgctacgccaatcgattatgaaaccctaatcccctaatctgggattattaaaaggataagcgcaaaaaattt

SEQ ID NO: 31434 - DNA, 1517 bp, Cannabis sativa
ttgtttgaatacgttaattggtaattttattagacttggtagattattaaaattatgttattaatatacttaattaagtttatatattatcgataatatatatttgtgtatatttagtttatacatattgatatatatataagttgataatagttataaagattaaagttttatttacttttattttaatttgacgagtttatagaaggaagcttttaattatatattttaaatattttataggttttgggttctttctgttgattgaagattgcacaattgtagctatatatatggagtaaggtataatcactaagatttaaaaaaaaaaatagtggagtttgaatatgttagatatttatccttagtgaagtaggttctgtgattaattgtattgtggtcggatgggtggatcattttgtattgttaatgttattttattattattgtattgttttatatatttattaattatttttttcatgttttaaattttttaaaatgtccgattgtagtcattatgctgccgaaatttcgctagatcaattaggataaatttcactaaaatacataaatttcactaaaatatatatgtgtggtaattaatttaactaattatttactacatatattcaaacaaataattgaataaagttttattttttttagaagtttcgaaatggatagaaattcaatgaatgggaatagattatcacggagtatagtgaaggtggttgaccgtttcttagaattttgttagaagtatgccaaaaattctaaattagatctttgtccttgtcttaaatgtggtaacatagagcgtatggacattactaggataaaggagtatttatgtaggaacggaataaacaagaggtataaggtttgggttcaccacaaggaaaagaacagagttccgggtgagggaacgtctaagattaacaaggttaagggtgttaatgtggactatgaggatgatcacattcccaaaatgataggagatgcacaatttgaattaaatgtcgatcctttgaaatttcaaagttttgtagaggatgccgagaagcctatttacccttgtttactgagtttttcggcaacagaataaatatagagctttagaaagtaatgaagacgtaaatagctagattatagaaaatagatttttacgtggttcaggcgttaattatccttagatcacacaccaagcatcttcttcgagcttaatgaacccatccgctcgatctagaaattcggccattgatcccacagttagccttttggatatccttccacaattctccgagaggctcaatgcctctcagtattacagccaatcttccttcttcagtcagcccctttttgtagcctcaatcataaacctgctaatataagctctgaggggttcccctggcctttgctttacttcgaccaggtcttcaaggtgcgagggaatttgacgagaggagaaaaattgtgcatggaactctgaagagaaggcattccatgagttaaac

SEQ ID NO: 31435 - DNA, 1866 bp, Cannabis sativa
attaaattcagagtactttttttagcaaccaaagcaccgggtgccccaagcacccaacacccaaggttgacattttttcaacttggggcactttcaagcaccaaactgaagaattatccaaagcattttcttcgtcttcatcaaaaataaggaaacaagtgcttttagggaaaaaatagatcaatttggaggcaagaagggggacccagcgcccaggttgacattttgacaaccttggccatttccaaacatttttttttttggaatttttttaagaaaattcttctttttcatcaaagattaagatacaagtgtttttgagaatcaaatggagtcatctggtggccaaaaactggtctgattgcctgggttgaaacctagtgttgggacgagcacctaggttgatatattttcaaccttggttgtttccaatcactttcctaaaaagagttttaggcattttttcctttgtcaaaaataacaaagatacaagtaaacttgggggagaaaacgagaatctcgagggcctaaacactaagttgagcacccaggttgtcctggtgctggacccagcatacaggttgaagatcaatctggtgtgctggtttcgatcactcaaatgtaaatccttctccaagcattctttccagcatagtcaaaaacgaggtaggagacctcatccttgattttaagaaccttagaagtatcaaaatgacatcccaaaagctccataaagacattcaacgccccagttgacatataacctggtgcgctcggttctgcttatccaattttgattccatctcaaatgtttgtgtagttgttcatgttaaatgagagctatgaactaagtcgcaaatcgggcaatttagagtctgtcgattctacaaaatagaaacatctttgagaattgatgaacgacttcactagaatacaaaaactagccaagtgatgtcaaaatattacttaggccataaaaatacatcatcaacacgtttgcccttggctcagcatcctggttgacatcatatgtcaacctgggcaccagatgtcaacttaggcgctggtagcagagcagccttccataaaacatccatacctcactcaatattgattcaattgatgcgattcaatttgacactttaagctatttcaatgctctacaaagttatgtctgacactccaatcacagttcttaatattatcaagtccaaatttcgtcctcaaaagagttatgaatttaagctacaacttacccaaaaaaggtcttgcaaacgcaagccaagctccaaaaattgaagaccgacctctacagccgatttcaccgttacatcatcatcagcagtcaaaaatagcttaaatgtatttttcatattttattattattttaatcgaacctccttccctataaaaggagcggtcttctagtttgtttttaacattcaaagaagtacccataaggttagattatctctctctagaaattagaacctttagacttagctatttttcttgtaatcattctcgtgagattaaaaactcgaagtagacgtagctctattactattgcaacacaggtagtgaactacatactataaactattgtgtgttctctctattttacttaattacttctaacttttatcttgtctatacatacgagtgagttggccagatttattcatcaatagataccacatttagggccagtttggcacaacttttgaaaaaacaaaaagttgttttctcgaaaagttatgctataaagttatggagatggtacagttaaaagctaaagttggtacaacccaactttaagtacaagttgttttgataaatttcattaaaacaataaatttatttgta

SEQ ID NO: 31436 - DNA, 1937 bp, Cannabis sativa
  modified_base (153)..(166): a, c, t, g, unknown or other
  modified_base (476)..(476): a, c, t, g, unknown or other
  modified_base (1704)..(1728): a, c, t, g, unknown or other
ttattttttctgtgtggaataattattgccatgaggatcatcaaatttggttaataaaaatctgcgttaacagtttggtgctttcattgagagcgtctgtgaaaatgctcagaaaaagcctcctgacataaaagtgatggatgacaccaaagnnnnnnnnnnnnnngaaggaatcaatcatcgtcttggaaaagaaccattgagtcctctgatatctattgagtcatcgcatgaacagactgcgagccctaggaagacccagtattggtcccttggcttgacgaacctttgataaacaacaatcagcaacttcctcacaaggttaatgaggatggcacctacgacccaaccagatacataccaatcgtggaattagaaaatctccatcttagacgtcgattggaggaagtaaaccagcgtaataccgagttagagcgtaaaatagctgcaataaaggcagcgcaggaggatggtanccaaaatcaacctgaccttgggaaaagagattcacgaggaaaacctcatgactcgcaaaccaaggggcaagggacaacccagagatatactcagaaatctcaggagatgcaacctgtggaaactgtggaaaacctagagacacaacctgagatacgtggaacatcggacaaaaattgccaaccttctcttccagctcataagaaagaaacttgtgcaaacccttacggggagaaaaaagagaattaaaccttgagagggagggcaaggtccgaccgcagtcacgattagagtgatatatgagaacatctgaacttgaagaaggctgaccttcgtcaacgactcggtccacagcaaaaggattcactccatttgcgaatgaacgagttggagaataagttcagaaggcatcaagtcacgaaacctagaagacaatgggggcacgacactgttggagaacttgattcggaagcctcaggatcaaagagaaaagacgattccaaaaggcttcccaaggataagaagcccaacaagtatatccctctttatgctgaatataccgatctcaatgaaacttttgaaaaaatctacctcgcacatgtacaggaagccatttttggcgagccaagacctatgaaacatgcgaggcgcaagagggatctgaataagcagtgtgaatatcatggagatattggtcataccacggaagagtgtcattaggtgaaatatgagatagaaggtctcatatcgcaaggacaccttctacgatatttaaaggggcaacaagatgcctatgatcggcttgatcaacccaataactaaagtgaccaaagattataaccctcctccgtaagaggaagggacacctcagttatctcgagagggagcgggtctcaagaatacaaggggcagttactctggtaaagcaattttgtaaaagaattgcgacgtgagtagatatcggcgcactgtggttgccatatccagctgccacgtggaaagctggacaatagcagtcgaagacaaacaacatgaaccaggactacttcacctagaaccttgggatatgtcagggattgacccttgatattaaaacaattgagggtgtatgtgatggattgaccctaaacatcaaaacccattttatcgaaaccaggtgctcctggaagattgataaaagaaacagataaactggggatgttctcatgagattaatgattgtaaatcacnnnnnnnnnnnnnnnnnnnnnnnnncatttgtgaataaaataatcatttttttcaaacaagtaattataaagcgtaaaccctttgaaattacttaaggggcatatatgtatcattaaccggaattaatttagaaatacatagcacaaatgcaaacccatcatttcaaaaaatacaattttgaaaactttctaaaagggcctcgaccaaacctttttgacggaagaggggtcgaa

SEQ ID NO: 31437 - DNA, 915 bp, Cannabis sativa
  modified_base (27)..(28): a, c, t, g, unknown or other
actaatcagattgtaaagagttttatnnagggcataaaacccaacacctagagcttaacttgccccacttctcaaagaactttaatcccatcattggtgaaactcgcaggaaaacatgttctcccacctaaaactctatgtctctacacttaggatcagaataacttttctacatgctttgtgaagcaagcattcgaaccttgatcttgtccattgcctcagtagtcctctagactaacttaagaactaaatattatttttttctccagtcttgtcccaatgaatggggaacgacatttcctaccgtacaacattttgtaaggagccatccttattgtactttgatagattttgttgtaggagaattctatcaaaggaaagtatttactacatgaaccctcaaagtccatgacacaggctcacaatgaatcttctagtattcgtaatgtcccctcaaactttccatcattctgagggtggaaatttgtactgaacttcaacttcgtacccatatctctctaaagacttacctaaaacttttatgtaaaatgcagatctctatctgaaatgattgattttacagctccatggagacaaaatatctctttcacatataattatgcatactgatccactatataggcggtctttattagtagaaagtgtgcttactttgtgaaatgatccactatgacccatactaaatcatgcattctcgtggttctaggcaaaccaaccatgaagtcctttataacatcctcccacttccacatgggaagtattaatggttgcagtaaccctaccaatttctaatgctttgccttaattttgttgacacattaaacatttagatacatattccactacatctttcttcacctccaaaaataaggtttaagatcttggtacattttg

SEQ ID NO: 31438 - DNA, 4024 bp, Cannabis sativa
  modified_base (1618)..(1637): a, c, t, g, unknown or other
aattcagtttgcaccaaacacatttaaatagattgttatttactcgtcaccacctcaagtatcacattttatttcatgttttcatttcatcgtgaatttgagaagatatattaaaataattattaataagatatgatgctattttagttttctctatgtaagaatttacaaacataattttccatcattttattaatccaaatttgcactaaaatgaatcaccttttctcgaataatctctcttttttttttttttccttttgtttgacatttcacaaattgatgactatttgactacactagagttcttccctttagcatttctcatgtagggaatattgtaagtttatattataaccacattgcttctttaaaggctttagtggccataaactccaattctgttgttgacaaagctattactgattgtaatcaagacttcaacccgaaactgtccattttatatgaaaaatatgtgattttttttttttttttgaaagaaaaatatgtgaagttaacgacctattctgttgtagcaaaatctgcatccacatttctttctaagatagttcctttttgtttgtctggcgaaaactaaaccatattaaaacactcactgcataaacaatattagaacaggtgcttcttatagcagcattaagctccctaatgctacagcatatataatgtaccttctccaaatacacactttcttctttagttgtaggtgcttgattgcttgatctgttgacagtgtaaagtgtgctgcaatctatacatactggttgtctctgaatttatttcaatcccaagtatccgttgtgctgggccaagccattttatttcaaattccttgcttagctttagccattcaatcctgctttttctttaccgatcagcaacatgtcatcgacatatataggtaaatatattggttttttggcttctctagttccttaaaatacaaacatggtttctcccttcatctaaaacaacatttctacttacctgttgctccttctccatatcccaagaaaaaacatgactggggtgttcgaatgaatgtgcactcccagggtatacatcacatttccgaacaattacaatacatcatctcgtagtgtcgttcgcgtgcaaaaatgtttctaaagcattaaacacaaaagttgcaaatggaaaaggaaatgtaaaaataaaataaactaaaaaagttacagcaggcagtaagtgtataaattgtgtctaattgcatagcaaaactcaatatctcaaacgtttgtttcacattcagcattattaatacaaggaaaccaaaaaaggctctttcagttgatgctttcatctctcaaaatctcacatctgtagtccatgtaccttgtacgctagggtgtttggttatatgcctagtcttcagtttcaccacctttcttcccaatgaatttcttaatcttattgcagaatggagaacctcatcagaatccatatttctcacacataccacccgttctcttttgttctctgtaaaattaaaataagagaaccttaactacaaaattgaagacttctttaatgcatacatgtttcatgatgtgtctttttgtgtgtgtgtgtgtgtgtnnnnnnnnnnnnnnnnnnnngagagagagagagagagagtctcactgtagaagcccttcaaaagtggatgctgaccacggatgagttcagtaaccacctccaactgaggattacactcttttaatgctggtagttgggactccataaatgccctggaatgatcataatatcatataaccaaagcttaagcgcaacacttgatccttaacactatacacatgaagtggaaattacaaagaacaatacaagctccagctgcagacagaaggggaggaggaacaaggagtgtggagctcacactacaacaacgcacaattacccaaatgctcaaattccagattagttattatcaagtataaagaacaacaatttggcaatgtatttttttcaataaggcagcatttacaagaacgaaccccatattactaaccccccagacaatgacatgagccacaacaaaaagtttcttttcatgaacctaattaagtattttgaatccacaacaaaagtttcttttcatgaacctacactttccaataattattctcacctcaagattggttaagctttacatttacaccttcatgaactcaatttctataaagaggaattcctttcaaccaaataacctcgatttctatctgtagtatgtccaagctaaattatgtgttgcagatttactattttcgcatcacatgtgaaagacatagcattaaaaagaacgataactaggatcaaatagtctcaagagtacaacccattgaaagaatctcccgaaggaccagaacaaaattgacaacaacttttgcatcactcccaagtcccagcaaaagaaacaaagaaaccaagctatgaaatttagtgaaacgtaaaatattaggatatgaacaatgtatcttaaatcttaataatcaaaccgattcatactaatttaaaaggaaaaataccaaattacctgatgcccctgctactgcctccccagtcacagtaattaactattagtttttgaagttgccatacacctctctgagccatctgatacctgaatacatatatgcaaacaacttcattaaaagaaatgaaaccctttttgtatcaaaactaaatccaaagataatctcaacacatttttcaccacattaaattaaaacataagtatcatcaccaaaaactgaaaatcatagaaggaagtaaagcaatgttttaattccattaaaaacaatgaataccttcttaaaaatttagaaatgaaaccagaagaagcttctaatgacttttcaatcgtagagctcttgaccagggtggtgaatttgtatttttttatcaatagagaggtcaatatctttctatatataataaatgtaaaaaaaatgataattttagcagaaaactttaattagtcattacatactaacgttaacaaactgaatccaatccaaaatgagatgacccatcaaatataacaagtaataacacactataaattctgaaaagttctatcttcattctcatcagtttcttcttgaatcttgatcaattcctccaaagtcacaataacaaaaaggcccagtgttgcaatttcaagaggaattacatgcgacaaaggggggaaattcaaattgccagttatttaaaattgtaaagagtacaagcacggacactgaaggatgtgggaacaaacaacgattgtcaagctacaaacaagtatataaaaagaacagattactggtcggtcggtaaatgaattctacaactggattggtatcaactaagctaaagaaagtaaaattgagtgaaacatactaagcttcatgggagaacaatgcacaaatgagtaccttttcttgaagagcaggagcccggaagccttgagtcctaatctctataattcagaatggaaattaattagggctaagagggagtaagcgtatgataggaagagggagtgagtgatgagagttactgggttagggagatgggtagggttcaaagttgcgatgttgggctgggcttaggttgggctttgttactagggattatacacttttttttttttttttgataaatcaataaattgtattgcacaaaccggatttttacaacctatgcgcacccagtgagggccgaatattatatacagaatctatacaagaaaatcaaaatcactataaagcaaggaaccattccctatcattgttcttgatcttcttaggcattactctatcaattcgggtcttgatagtccacttagtttcttcaattattctttccagattgactttgctttttgccaaataatctcatttcgggtcttccacaagttgtacaccagtccaatggtggcagcagcaagcacccctttcctaaactttgacattttagctctatcaatccatctaagcagctg

SEQ ID NO: 31439 - DNA, 1897 bp, Cannabis sativa
tctctgtttgagcctctgaacccacgattggaagaagagcctctggtttggctaggttggcttgcacattatgaagagatttagttgtgtttgttgaattctcatttcttggctctgcaacatgaactgtacttctagagaatgagaggttcagttcttgatgtcaaattgacaaccacggcttcgtactctattcctaatccaccaagaatgtacaacaccaaatcatcattagtgattggctggccaactgctgcaagttgatcagcatgctgcttcattttgagaatgaactcctcgatcaacagagatcctttcttggtggtttgcaatagatttcgaagttttaggaggcaagctcaagatctggttgcaaagagttgagcaaaggtttttcagatctcgtgagaggttcgacaatggatgacatgacccaacatatgttcagaatcaaaattcattagccagtgcatcaagaactgatcaagttggatccaattttgaaaggctgggttaggtacaatacctgtaagaaattctggtggttgaggaagaaatccaagaacatagccattaagaacatacgctcgaataccaacaaggataagagatctccaaattgtgtagtttgatctttcaagtcgaagattgagggggaggagatgatttttggggaatggaattggatttggagcatcaggagctggatttacagctcgaccttgctgtggttcgactctttctcctgttggtggttcaactcgaatgtgaggacacttgcattgttgccatgattcggcatggctctcataccatgtaagaatactgaatttccaatactcgagcttgagcaagaaagaaacaatgagggagagagaaaaagagagaagaagatgatgatagatgaataatattgctcaactgaaaacagttggcttaatcttgacatttatatatggagagccaatacaaagaatctaaagaaaaacattaattaacttctaacaacttctaactaactcaagaaatgtacaggtaagaaaagcaaaaccaacaatagcaacaacatgttgcttaaccattttctattctaacaccttctttcacaattaattctttgtaccaaatacaatataataaaataaaccaaattaatttctaactaaatattttcaattaaaaatatatttcattatttagttaaaaatattaatcaaaacttaatttagtttagcgtttgagattaataaatgtacatttttcatcactaatcaagactcgtcctctttttcggaccttattaatcatgatttgtgcttgttattcaacaacatagttaatgtgttcataggtggaaaagctcatttctaggtgctgagacctaagacatatacaagtaagtcgtgacctatgcctcagtcttatggtggtaattagatctagctatgttggttgccattatgggtatctgaagtagggggatagtatttaaagggacctatatatgttgatcttgtaaaaagattatcgaataaattaagggaattatcaatttgctatgttattcctaagttgagactagactaaatataatttaatcaaaattattttcaaaaatattgcactgtagttatatcacatgaatagattgagaagagtaaaaaaaatacagatattacaaagtacataaaacattcaaaagtagtaaaacaaagtacccaagctccccacgcctaattttcaagaaataataacaaaactaatctaataagaattagggattgaaagagttagcaacatcgataacaaaacggtatttaacatcagatttgagaagacgttccatggcagtgttgacataatgaatgggaataagttcaatatgagatgtaatgtt

SEQ ID NO: 31440 - DNA, 2611 bp, Cannabis sativa
cccacaattttagggataatagccgtaaatgtattttggtcagctttgtaattaactaccactatgaaattataaatagtggcagataagatcaaaaaaaggaggaggcccaataaaaaaagaaaaatagattcagaaatcagaataagattgactcgtgaaccatgcagaattttaactgcaaaaccacttaaaaatccagtgttcatatttttattttcctgtagtttttctgcgttggatcatattcgtgaggctcgaatttggttaacaaaaatctgtgttaatagtttggtactttcattgagagcctctatgaaaaagcttagaaaaaagactcctgacataaaagtgatggatgacaccatcggtaatagtcctcaagaaggaatcaatcatcatcccggaaaagaaccattgagtcctcagggatctattgaatcattgcttgaacagaatgcaagccctaggaagacccagaattgaggcccttggcttgacggaccttggaagagcaaaaatcggtcactccctaatcaagttgatgaggatggcacttacaacccaaccagataaataccgattgtggaattagaaaatcgccatcttaggcgtcgattggaagaagcaaaccagtgtaatgccgagttggagcgtgaaatagctatcgtaaaggcaattctgggagattgtatccaaaaaaaacatgaccttgagaaaagagatttacgaggcaaaccttgtggctcacaagtcaagatgcagaagatgacccagggatatgctcagagctctcaagagatgcaacctgaggaaactgaggaaagactaggggtacaacctgggatacgtggaacatcagacgaaaattgccaacccactattcagtctcataagaatgaaactcgcacaaacccttctagggagaaaaaagtgagtcaaaccttgagaggaagggcagggtccagccacaatcatgatgggagtgatctacgaaagcatctgaacctgaaaaagcctgacctccgtcaacgactcgattcaagataaaaggatccattccatttgcgaatgagcgggttgaagaataagtctagagtacatcaaatctcgaaaaccaggagagaactggggcacgatactgttggaaaacttgatttagaagcctcgggatcgatgaaaaaagatgattccaaaaggttgcctaatagcaagaaacccaacaagtatatcactctttacaccgaatataccgagctcaatgaaactcgagaaaagatctaccacacacacgtgcaagaagccatttttggcaaggcaagacctatgaaacatgcgtggtggaagagggatctaagtaagcagtgtgaataccatggtgatattggtcacacaacagaagagtgtcatctgttgaaagatgagatagaaagtctcatatcgcaaggacaccttcatcgatatataaaggggcgagaagattcctatgatcagttcgatctgcccaataacttgagcgactgaagattataaccctattccacaagaagaagggacactttggttatctcgagagggagagggttgcaagagtacaaaaagctgttactccagtaaaagaaaacttgtaaaagaattgcgacctgagtatatactgttgaatttgaatgaaaatatcccaaataaagtgcatcacgtgcgtgcgcaaaagctggggtgtcactcggtcgagaccgagcttcaggcatgctgtccgaggtttctcgaacatgggttatttgaagcccttggtcacgccgagtagcctcggtcagctaggctacaatgccgccctttccatgcataacctccctcatacacgcgcaagggtatgcaatgcatacccctgtgcccaattttgtttatgtgatatcttttgattaaaaaaatcattctttagtgaaagaaaattcaaattttggtagaattttgtataaaattcaaatttttaaataaaaatctaattatcggaataaaattaatttttttttaaaaaaataattaaaattagttttagatattaatagcctttgaattttaaaatttaattttacacaacctagttatatggttaattttgaattttttttattatttttgtttgttttatttattttaattgtaagattagatattacttattttattactaaaatttaaaatgatcttattttttatattaaatattaataaaatttaaacataatctagttagaatttcatatttgctaaccatattagattttaaaatatattttattaattttaattatacgattaaaaaatattaatttttacatttcatcttattagatatttattttaatttttatatttttggtcaaaataacatgacattttgaaaagttgttaatttttgttttaatagaaattttaggattttggtaaccaaaaaaaatttcaaacttaggatatttttgtttatttaattattaaataaaatcgataatatcttattttcaagtttgtttatttttggttaaatttattttattaaattataatattagaaagattcaaatttcaaattaaatattatattatattatat

SEQ ID NO: 31441 - DNA, 5393 bp, Cannabis sativa
gattacatctaaatggagttttatttagggcataaaacccaacactaagttgaagggaggtgcgggagccaagcagtatgctgaggagcatcttgatcaggaagacaaggttgaggaggagcagatgactccgttcaaaagtaagaagaaacttccaatcgaggacaagcctattgaacatgcaattgagatcagggagcccaatctacctgctcggccatccactcgtgtagtaggaaaggggaaagccgtcatggaggagcaaagagacttgtcaaatgatgatgagccatcaggtcttgctcaggcaaacgctttttccgaagtggaagatcctccgtcttgcctttaactttcttgattattatgctttcatatttcttgtgcttttctctaaccatgttgcttttatttcgtgcagacatgtctcagaaaatgctcgaagctgtaaagaagattgtgcgaggaagcccaagcttatctccttcgtccaagaagtccaggggcgctgagacaacaccgtccagagagaaggcaccaactgaggcagttattgatctctctgatgagccaagtgttgtggatccttctgcttcaaaaacaactaagtccaaagactcgaggaggaagcttggacaggctcgagcagtcaaagggtggatcctagctagtcaagagtggatcagagcagatcaaggctcctgccccacctctagcactgcatctagaaattaatggagggaaagatatgctcatccactgcatgactcggtcagtccatgaggtgaataagcagctggccggagttgataaagagctttcccttgagctggtgatgggaggagtcctgaaggagtttatgagggtgagtctttcttgatagtttccttttatccttctttacttagcttagattctaatgttttttctctgtgcagaccgctctaaagatggcttatgcttattcccgagctaagtcgcctgcctctaagaatgctaccatgtcaaacaccatgagggcggaagtggacttggccaggaaggatgttgatgaagcgagggttcaacttggatctgttcgaatggaactgggtgaagtcaacaaaaaacttcttgcggccgagaataatgtggccgagctgaccaaagatttagcgacttttgataagcttgaagctgccatcacctccttgtccaaagaagtgaacaacctctaagaagaaagggaggttcttcaaactctcttgcgcaggttggaagcggagaagaagtctaaggaggaggagttttccgctgaggttgagaagtaaaaggctgagcccgagcagccgagagctgaggttgagaggcacaaggtagaggccgagcagcaaagctgaggtggcgaggctcgaaggcaaggtaaatgccttagagacagcgggctcgagattctttaggacttctggaaggctaatcccaagggaaactttgattacttgaacgattcaaaagtaatatttctcgagtattgtgcttctcaggtggcttatagagaatccaaggtgaccacttgtaattctggtaaggacgttgacatgccccccgcccagacaacaaatcctctagctcctaccggcccagaagacccgtataaagagcctgggactgtatccgtctgaatacttctcttgttatctttttcttttttatctgtccggccataaggccttttttaagacaaggtgaacgacaaagcgacttttaatcttggaattatttttcatttttcaaaaaacaggctgactgggcagcctttaatcccggttttacgtgcttttgttatctttaatgaatttcatcctttgtttaaaatcctagtgcaactgtgtttattttaactttaccaaataatgctttgtacaagtataggtgcccccaagtgaccgaacagacttatgactcttggtcacttataattttttgcaagtatgctcttttgtctgttcagggtttcgggttcgaccaaaccttttgtacgcactttatggtaaattaacagcatgctagtagattcgactcaatttgaattttgaaataaacatctttattcatgtattgatcaaaattgtgtttgttaccgtagtaacttacatcaaagttattaacttgatctaatctgatctttagcttaacatgaaataaaacaaattacagaaattagaaattgtactttagattgtggtcacccgacctgagtactttttcatttttttcgaacctttgggcttggtccgccaagaaggtcattcacttaaaagtaaatgttctttttgtttagtacttagtatggtcatccgaccttgtacttctattggtagtattttcttaaatgttccccaatctaataccttggtagtacaacgagttgcattttttcatcatacttacccaatttgtatgctcctgattcgagaacttcaaccacctgatatgctccttcctagttaggtccgagtacacctgccatactctctttggtgtttataaatactcttcttaggaccatatctcccacaaagaatttctgagccttcacttgtttgttgaaataccgagctactttttgttgatgggccatcaactttaagtttaagatggcttatttctctttgatttcgtcaagtgattcggcaaggagtacgtgatttgcttctcagttgtatgtcaatcttctatgggatggtggctcgagttctacgggaagcattgcttcatatccatatgccatggcaaatggagtctgtctggtagtcgttttctccgttgttcaatacgatcatagaacttcaggaaattcatccggccagtttcctttagcatcctcgagtcttttctttagtgtatccttcagggtcttgttgagttcttcaacttgaccatttgctttgggatgcgccattgcagagaaacttttcatgatacaatggttcgcacaaaaattagtgaaggactggctgtcaaactgtttgccattgtcctcgtctgttcataattccctctattatgatataccgtgtagccttcgttctcatctttcgagcttcatttcgattacctgggagatccccaatgttgaggtaggttgatattggcgtcatccagttttgggaagtatcaatcattttgatctcttccgtgctggtgatgctaggttcttcgaggaactggataggaaccaagtttgctttatcacttacattactacttgccagaccagctaacgtgtatgtagtcgtgttttctttccttgaaatttgtctaagaccgtagcttttgaattgtgcgagcaggtcatgtattttgctcagatatgttgttaccttttcttcgcgagcctcgtattctccagatacgtgatttaccaccagctgggaatcactacagattttgatatgtttggctttcatctcctgggctagctttaggccagcgatcaaagcttcatattcggcttcgttattggatgctttaaatccaaacttgactgcagcgtgtaggtgctgccccctaggtgttacaagggcgatttctgctccagatagttgatctgtagtcgacccgtccacatgtagtttccaagtcggcttgtcttcagtgttacttggctaaggtatttgtactggctcgaggttgccttctgttatgctttcttctttgcctgtgcattctaccacaaactctggtaaggtctggcctatgattgttgttcgtggttggaaagtaatttcagactgacccaattctactgcccacttgagtaaccgtccagaagcgtccaacttttgcaatatttggtgtaacggttggtcagtctatacctgaacaggatgagcttgaaaatagggccttaactttcttgttgttagaatcaggcagtaagtgagtttctctatcaatgggtaccggacttcggcataaatgagtcttttactaatgaatagactgggtgttgtatgttgttttcatctctaatcagcacggcactcacagcatgctctgttacaactaagtatatcccaagttcttctccgtctagaggtttcgagagtatgggaggctttgcgagttgcgcttttagctcctaaaaagcttttttcacattcctatgtccactcaaattgcttatttcctcggaggattttgaagaatggaacacacttgtctttttattttgaaacaaatttgttgagtgcggcgatcttaccagtcaaactttgtacttccttggttcttgttggcaatttcatatctaggagggctttaatcttctctggatttgcttcatttcctcaagcattgacaataaagcctagaaactttcccgagctgactcaaaaggagcactttaagggatttagtttcatgttgtacttcttgagggctttgaagcattcgtcgagatcatctatgtgccccccagccttcctggatttgacgagcatgtcatccacatatacttccatgttttgtccgatctggtctttaaacatcttgtttaccaatctttggtatgtggctccagcatttttgagaccaaatggcatgactttgtagcaatatagacccatatctgttcgaaaacttgtatgttcttggtctggtggatgcattttgatttgattgtaccccaatataccgtccatgaagcataatatttcgtgcctagctattgcgtccacaagctgatcgattcttggaagaggaaaacagtctttggggcttgccttattgagttttgtgaagtcaatacaaactcaccattttttgttcggcttaggtaccagtagaggattatcaacccaagccgggtagaaagcttcaataataaagttgttattttgtagcttctcttcctcttccttcagggctagcgctcgctccttgtccaacaaccttcgcttttgttaaactggttagaagttgggatcaatatttaggacgtgcaaaattacaaaaggatcaattccgatcatatactcatgtgaccaggcaaaaacgtctaggttttctctcaaaaattttatcaatgttgattttacttcgagcgacagaccttttccaatttttagcttactcgctggaatatctggatcaatctcgatctcttctagttcttccacaggtccaacattgctgcttggctccccaagtgaaggatccacatcttaatccctgccttgggaagttccgtacttagaaaggctttttcaattgtctgtgttctggctagaggatacttccttttcagctttggccatggaaaggttataacattcccgagcaatctgctggtttccccttagacagcctaccccattctttgttggaaacttcaggcatgaatggaatat

SEQ ID NO: 31442 - DNA, 3475 bp, Cannabis sativa
  modified_base (3224)..(3224): a, c, t, g, unknown or other
tatatatttatagagttcgatcttgatcttcactatttatcgatcgatgattatattattaagagaaattattatatactattttttaatttttatgatttgagtagttcttgtggtttttaactggttaccatgtgaatttaaattgcgatttaagtaaaaaaaaaaaaaaaaactctattatcaatagttaggatcggctctgagaagaggctaagtttttgcttaggtcctctcacttaatgagttcttttaatttttcgaaaaatatttaaataataaattttgtatgaagattcatcccatctcatctcaaggtggaccccctatagatgattagaacacccaattagaataatgtcatgagaatgcttttaaatttaggaaaatatcatttatatataaataaaatggtattattgaaaatgtaggatgagctattgtgggctgcaacatggctatacatggcaacaaagaaggaagtgtatttaaagttcatacaagaagaatccattagtgcaaatgtggctgaattcagttgggacctcaaatatgctggagcccaaatccttctcaccaatgtaagtaataatattatttacaataatacctactttttaatgtaattttgaaaactaacactttataaagtaatcttcttctcagcacactttcatgttggtcaaaatataaggtgaattataagagttatgtgataaaactaaaacaaaatcatattcaaaatagtctgatgagtaatttttttaattaatttttagggtttttataccatatactgaaatttataattttttactgtttttactgtgttaaattttcactgttgttttacgattgtgtttaattgttgagttttgttgttttataaaaagacaacatttttataaaaagtcatgtatacttttgcctaaaatttaatatattttaaaaaattgatttgaatatttatatattgcagttgtatttagaaggacatgatagtttggtagatttcaaaaaacaagcagatagctatatatgctcagttctaccacagagtccgtaccaccaagtttacctatcacccggcggagccgtacacatgagagacggcgccaacacccaatacatcaccggcaccgcccttcttttcagtgtctatagtgacatcttagcccgtcacaatcaaaaagttcagtgtgataacatgcaattcgattctactcaaatttgggcttttggtaggcaacaggtatatcgtgaaattttattatatgagttcgtttagtataccatattatattattatatgtggtattttattttatattatataaggctaattaagatttttgtcccttaaattttgacatgtacctaatcatgtttttaaaaattttctggtcgttaaattttttccgtaaactattaagattgttagatttaaggatttttgtataatttcattcaattttactaatttagtgattgtttatgtacttaatcatactcctcaaactttaatgtctacgaaatcatgtctctcgaattttgacatgtatcaaattatgctacttgaactttcatctatgataggcttttcttattaagattacacaaaagtctttatatctaacaatttcaatagttcaaataagatttttaaaggccttaaaagttcaggagacatgatttgatatatgtcaaaattcaaagaacaaaaatcttaattaactacaatataatacaataggatgaactaaatgaatctttcatgtttcttctttccacttatgtagaaataatgctaggccatatttttattttatttatttatttataacatgtgggattatataataataatgtttaatgcaatttttgtatagatggattacattttaggacagaacccggagaaaagatcatacatggtggcatttgggagcaactcgccaaagcaagcgcatcacagaggttcgtcggtgccaaagttgccatcagggtcactagtgaattgcgcgatgagctttgtgcaatggtataataccaattcccccaatgtcaacgagctcactggggccatcgttggtggcccagaccgctatgacaactttgacgacaaacgttgggattcttcaaagactgaaccttgtacttacattaactcactcgccattggagtcctagccaagcttgccaataaccctaactaattatctagcttttatcatcaaatgagattttattattctttacatgtatgttttgatttgatttgattaattaattaattaattctaattattaattaatcgtgaaatttgttgtaagtgtgtaagtttaacctcatcatcacaatgattcaattctattgtcttttcatgtattttagtgacttgtattttgtatcaaattagtactttttgcaaagttttaaccacaaagttatataatgtcaatattatactaataaaattttatttatttaatttataacttttatttatatatattcattagaaagaatgatatatgattgctagttttaagcacaaaataatgaaattattttcatgccatattacaatgataaattataaattaagcattttttttcaaagaaaaaaattgtatttttgtagcatataattacaaaataaattaggttttttttctattattttattatacatataaaaatttgatattttgaaaataaattaaacttttctaaatatttatatatatatataaattggcctaagtagcaaggggcctaggtctcatcgatccatttggaaatattgattttgaaataattatcatgtactccaattacaatgtactctaaaagaattgttaaataattttttttttttgaaagaatatcaattcaataaactaagcgagaaaagtggtaatcatcgaaggatttccctctccttgaaaaatatcagccactaaattagataatttagcgcttcgagcccgtttataaattagcgacttggattgctgtgtataatactcgccgcttcttttctgatgggggagtagcacctcttatatactaccatttaactttggtttgttttataaagatgacgtttggtaatatttttttaatcaatttttttgtttttaaaattaaaaaagtgaattttttttttttaaaatcatgtcttataaattttttttcactttttaattttttaattganaatcaaaattttaaaaacaaaaacaaagtcactttcaatattttttaaacagtttttttaatcaatattctagactccaactacatccggatcatatccaaacccgacccaacccaggcaccgaaccccgtccctaacccaaatccggactcgattccagacctagacccgacttaaataaaatcaaaaaataaataagaaaataaattttactgaacacacttttattttcttttttaaaaaaaattgaa

SEQ ID NO: 31443 - DNA, 4328 bp, Cannabis sativa
ttctgagttaaactatatagtatatagtagttattttgtatgacatatttaaataacaaaattattattatatatttaatattaagaattaaaataaaaataaataaaatctattaccttaatgacattacttaaaaagctactgggaaaagtattcccttttttattcatttaatcaagttcttcattttttctaattttaataatataagtaaataaatttaaaagattaattaccttactattaattctcattacttattagtaaacatactattagtatcactataaaaccttttaaacaattttactacattaattgcttatcttcgagtaatttatgatatttatattatacttaataacaaacgaaacaagtcttactgtataagatattagtaattagataaataaaaggtttattgtgattttattagaaaaagaaatttgtttgtgtttatcccacattgttgatgtgataaataatttaagttgtttctattttctgtaattttatcgttttttttttttgggaagttgaaataaataagaatcaatatacgtaaatgacacctattaggcaccttagcatttatcctttagttgatgaagtagtctcgtactacatgcacacggtcaacacaacaacactgacttccaatttcccaaaatgaatgtatttaattttaatttatttttttttcacttatttccacaataattcgtttgctttgctcacacaattgataagtgataacattatatttattactatgacaaatataatatccatttttagtgttaaaaatcacaccgaaaaacaaattaggaataaagaatgaggacgtaaaaatggacagatacattaaaatatagccaaattaagcccaaatgcattgcaagattttgtttggtggaataactacatagagaaccgtgaacactataaatataatacaaatcaacagacatttagtttcttcatctgatcatcttctcaatattatctgttgtcatattttctccattcttcaaacaactacttttaatttcttctctcattataacatagtgaccatataatgacgacactattgaaatagtaaaaaaaaaagtctttttcctctatacataagagccatcagattaaatcgaaaaagggtagattgaaaatggtgagaattccaataatgtttccgagagtagcagcggctttcgacgagcaagtttctcgtgtacggatttgcgagagcagcgggagcgaacactctccggcggaaagtttcactgatttgtcgaatcttgtaaattctttcattgaaaaagaagcgtggagtggagatcatggctgtgagtttgatcaggaaataattaatcaacatgaaggttctgatgttgattcttggtctgatgagttggagaggaaagatatgcttaagaatttgttatttggtgtaaacgatgatgaggatggtgatttgaagagaaagatttatgctgaagctgaaattgtttatgaaatggcttctgataatggtgattttcaaggattcaaacgccgtttgatgactcatttgcgtgaaaagggcttcgatgctggtaggtttatatatgtttaattttataatattttaaataatgttctaattcatatataatgattctatttgaaattttagttttaagtgtgctaatctcttttaggaaaattgtattgtaggactttgcaagtcaaaatgggataaatcaaagaggtttccagcaggggattatgaatacgttgatgtaaatgaagaaagaagtggaagtcgctacattgtagaagcattcttagtaggagagtttgaaatagcaagagcaagtgatcaatacacttcattacttgaggttttcccactcatatttgttgggaaagtagatgagcttaaacagattgtgagactaatgagcaatgcaattagagagtccatgaaagccaagggtatgccaatacccccttggaggaaacatgggtatatgaagacaaagtggtttggttcctacaaaaggaccactaatgcaattccatctagtaaacccaaaaacccaaaggaatcttttgatgccatgatatctgtggggtttcaaaccaagccagtagtcccatatttttgcagggctaatgatcacttttcaactaaggtcgggttgagagtaggaaatttgactgctgcattattcgatggttgagatttgttgctgcatttttgttcataaattgtttttgcccgtacaaagcataaagtcattgctttgattttttcccccttgagtttgattggtattctagcaatttgatatgttggctaaatacaatatatataggtttatattggtttttcaggtttttagtattagaataagtgtgtaataagtacataatggaatgttgaaaaaatgcattctagcactaacaagtagcctatcgattgtatttatgttgcaagaccatctgaaacttttgtctgttacttttcctcaaaattattccaaatttttatcattctaaatggtcccaggtgaggctaattcaatgtaattcaagcattcaaaatgctatttaaactttttaaacttaagtaccaagccaaagaaatccccttatcctttcatacttaatcttactaagatttacttaaaaaaaaaaaaaagactagttagaatatttgctcttaaaatttaacatattctaaattttgtggttgaatctttctgaccgttaaattaaaaaaataagttgaaaaaaatttggtatatgtcaaagcaagaattctaattagtcaaaaaaaaaaaaaaaaatgcatgtttggtgttttgagtataatggctcaaaaagaacaaataagacctgtatagtatagattttgagagtaggaaatttgactgctgcattattcgatatttgagatttgttacgaaaattttgttcgtaaattgtttatgcctgttcgcataaaattttgtgcatgtaatatttgctttctggaatgttgaaaaaaaaatgcatcctagcactaattttgcaacactcgtccaattttgttttatttgtgatgtttaaaacattaaatccgaaagatagtccttttaatatctctcaaaatgaacccaggtgagaggctatttcaatttcatataagcattttgtgtaaaacttatatagcaagaccaagactttctactacttatccttgcatactttaaaaaatccttaattggtgggagatttttgtgaaggtttaattttggtactcacaaaccccagtctttatctaatggtccagatgaaaagaataaacaaggcaaatttgcctaaagaaagggatgtaggcaccaatagacgcaagcagctggggatcaaagcagcttgcctggaaggtaacccctttttataagagaagggttttatgaaatggctagatcttgtcatttcccttttcttcccttctcatcatcaaatcatataagcaatatatattaattataatagtattgagaaatgtaagaagttcggtaagcagatttgttgactgatatcacaacaaccggccagtaaacttctatttcatttagctacagccactttggcaaatcaagagcaaaggtactgttcaacccttttcttggtacaatgtagcatatatcaaatactaaaacccaacaaataaataaaagatgatgatatgagatataaatgggagagaccaagctcgctgagaattcttcttcatcctcagttttatgcactaaaaccctagcggctgtggattatttgtgttgttacctatcgctatatatagggcaggatcccttttttccaacggaggttttaagccgttgatgagatccaacggttcctctttttagttttatatttttttttttggcgaagtagtaacgaggaaactttgaaacattttgcttaacctaattttctgaaagcattatggttaacctaattggtaaacaagtattcaactgccgcttgagtaaataactttatttgatgctttaaaaattcataattatctctaaaaaatcataatgttactattactattcactctaatattatattttactttaaacatcattttattcaaaaaaaaaaaaaaaaaaaattaagtgtcgaagttgaaataatttaaatttaaagttatagtaccttttacaccttaacaaaaaaaaaaaaacataaattttagacaaaataaaaaaaaaaagtttaaagtaaattatgaaaaatgtaggtggcgtttggtaacacttttttaattagttttttattt

SEQ ID NO: 31444 - DNA, 1388 bp, Cannabis sativa
ttttctatggacaggcaaggacaagatgatagggctggtagggtatcctggtagaaaatgtgtactccaaaaaaagctggtggccttggacttatgaatattgctacatggaacattgcagcaatggctaaacatatgtgggttgtggctaataaaaaagataacttgtgggttaagtaggtgcattgtgtgtacctcaaacaacatgactggtgggagtataaagctcccataattaacaactggtattggaggaaaatggtggagattaaagataaaatttagcaagcaagtgcagcagccagcaatgttctctgttactgaatacaaaattaatgtgggatactgctggtttggcactgaaaatgacagagttgcttggtgtaatgaggtctggtgcagactaaattcacctaagcatagtttcttgacatggcttgctgttcaaaacaggttgaagactcgtgaaaggcttttcaaatacaaaatcatagactctcctgattgcattttatgcagcaatgacaaagagattgtggatcacttattcttcaagtgtgagacttcacttgactgcttgaaacaactgaaagattggttaaattggcaggtgaatttggattctctgcaagggctcctgaaatggattaggaagtcaaataattccaagtttctaaagaatgttaaaatggctactgttgcaactcttgtctattcgatttggagggctagaaatgacttgttttggaactcgaacaggcagcagagtgctgagattgtgaagcagattaaatgggctattaaaaatagaataatgtttgcaatgccaaaaaaagtaaagcgaaaagatagagattggttccaactattgtaaataatgttgtatagataaaattaaggcattttatggtgcttttaggttgtaaaagtgagtttttttgagcaatgaatacattaattcataaaaaaaaactttatttagtgaaatatatactcatctaaccgaaatgtacattaaaaaaaacagatatcttattgtacccaaaacacacatatatatatatatagttaaaaaataagtgggatatgaagatgcacctaccttgaagaaattaatgtggtcgacgtagaaatggtgtcgggtgctctagcaggcaagaagtatatatatatagcttccttgaataatacaaaaagatacaatgtttaggttttgggatataactttctgaagagtaatacaaaaagatacaaagaactgttaaactttgtttaggttttgggatataatgttttggatttagagaaaatgtgaaactatagcttaatacatatacagaaatattaacttcttaaccaaaaataaattagagagttgtataatataa

SEQ ID NO: 31445 - DNA, 1759 bp, Cannabis sativa
tgaatacgcgtccatgaaactcaaaattttatggccagttgtggcatctactagttggcaattctgggaaatgggaagcagtcttttagacatgctttgttcaagttggtaaagtcgatgcatactgtccacttcttgttgggtttaggcaccaatactgggttggatacccatattggatataatgcctctattatgaagtcgttggctcataggctctcgaccttgagtgcttgagtgcactccctatcttacaaccaccttttttgttgaacaggccaaatgcttggatcgatgttgagtggatgggtcatcacggaggggtccattccgaccatatcttcatgtgaccatgcaaaaaggtctaggtttgcccttagaaatcttatcagtattgatttaatttctagagctaaaactttcccaatcttcagtctgcttgtttggaaagtgggatcaacctccacttcttccaactcttctacaggccctaagcttcctacaggatccccaaagcgaggatctatgtctatgtcctcgccttgggctacactttatttcccctggcaaggctcatcttctggagacatgggggcatcttcttctttttggacttagataaggctaggttataacagtgatgagcagactattggtctcccctcagacatgccactctatttcttgttgggaatttaaggcacaagtggtagatagacgtcactgccttcaggtcgttgagggccagtcggccaatcatggcgttaaaagccaaggaaacatcaataacgatgaaccacgccatcagtgtgcttgtggttggattctctttagttgtgaggggtgatctgatgccttggccaaaaaagccatacatcacttggttgcaaggtgccaagttggtgagttagagcccatcttttaatatgttgatttgaaaataatgttggaagaggctccgtcgttcaccatacatctagccacggccataatctcgatttgcatagtaatgaccaggggtcattatgtgggaaactcaccggtgttgcatcttctttgccaaaggagattgtggactctatggtcttttgtttcttagagctccgatcttcgatagctagaactttgcctttatgctcatgacggagattctgagcatagcacaccctggtttgctggtttcactagcaatgtgggggctgcctattatgaccgccagatgtcctgccatgggtggtggccttggatctccattttggcttccttgcggctgggtctggttgtcttgcacataacgacacaggtggggattgttatgccttattaggtactcaatctccctcttcaaactttgacactcattagtgttgtggccaaagtcattgtggtatctgcagaacatcaacatgtcccacttgcccatctcccttttgattagaaaaggcttttcgtatgggatcgtttcttgagttggccataaaaatggtctcaagcttctttataaggagggtgaagcaagtgtacttctcctccttattcttttgtggcgtgggagaagtgttaaacttcccattttcgccattgttcctcccaatgttgttggtgttgtccttgtttctagtgtttttgccactagaggtttgcgcattagttctatttcttacatgtgccgctagtgggtcatgaggctgctgggtgcctcgtgactgcctactattgacatgccctgcctgcgcctgttgtatggcttattcaagtt

SEQ ID NO: 31446 - DNA, 2715 bp, Cannabis sativa
  modified_base (1516)..(1519): a, c, t, g, unknown or other
tttatttatcgttttagaaagtttatatttagggtgttaaacaacatacttataattagatctaagatcctggtaaaataaattctaacagtcaaatcaaaggtattaggcaaaggtaccattgatttgtttttcacctcctgtaagaaagtcacattgatgaatgtgcttatgtgctcgacatgaataaaaacttgattattggtgacttactttgaaaacccaggctgtttatgagtttggtaagctcatacttaccaagtctgatgtattttttgacaagggatactcttgtgagggaatggtgaaattgtgcaccaatgatgtaacttttagttttagcaataataaagcatctagttctacttatatgattgagcatgattctttatttttgtggcatcttagattagctcatattagtttttctactatgaaaagagttgaaaaatatggcatgattgattgtaatataaaaaattacggtaaatgtaaaacttgtgtaaagccaaagatgattaaaaaaaccttttccaagtgttgttagaaattcaaaattgttagatttgattcatagtgatttatgtgaattaaatagaattctaactagaggtggtaaaaggtattttattacttttattgatgattatagtagatatacttatgtatatttgttattgtaaaaggatatgacctttagtgcttttaagattttcaaagcgggagtttaaaatcaactcaacatgaaaataaaagtgttgagaagtgatagaggaggtgtttacttttctaatgaatttactaatttttgtgagaaaaatggtataatttatgagagttcggcacgagatacaccataacaaaatattgtagcgagaaggaagaataaaattgtaactccctaaccattaggcacgctacgctaactgattaagaaaccctaatcccctaattagggattactaaaaggataagcgtgggaaatttaaactttatttgaaacagaatgaaaattaaacttgaaacaactttaaactttacaatcaaaagatacatgttacgggatcccgtaaaatttttcacaaaatattacaagtccatttcacaagtagacctaagcggcgagattagagttagaaaatacacaactggtagaccccaacacgcttggtctagtatggctcgaacatgtacaagcatcaccgagcacccgtactcatggctaatcacaaactgatgtatcctttcctgcacagtagagcacacgtgagctaagccaaacaagacagtaaagatatcaataatcacaaataacatatcgcatatattataatgtcatctcccttattgtctatttgatataaacctgcgtgtcacactcacatgcccatttatatctatgtggcatagacccaggtgttgcgctcacacgtctatttatgtctatgtagcatagacctacgtgttacgctcacacgtctatttatgtctatgtagcatagacctacgtgttgcnnnnacacgtctatttataataaggccttagtagggttaatctcggttatagttaccgaatctagcttaattatgccttgcccgcataatcctattcatataaacacaatccatatattatgttccttcaatagtttatcttaatgatgcatatcaggtctaacccggttatgtcacactcacataacctttaacatatattcacatattcaatatcttcaatgtatactataatatatggaatcttagggtaataactgtaacttgcataccaattaattacccatataacatactctatagcatgctcgaagtaacgcttatagagggtaataaccctacttcatacttttacttgattagcaatattaccgtacatcattgtgtccttaccttcgtatacatcctagggtaataaccgtagaccacattattatttacttagggtactaatttaccgagtctaacttagttatgccttgagcacataatcctttatttcaacatatttagcattgcataacaatcaaaatcattagatttctagggtaataacccttggctagataaccgctcactttagggtaataaccctcatcccggttcttaattaatgacatccataaaataaaacatgagcgccaacacacttagctctacgtacaaactactttcttacctagcatcccaagtatgcggagattcaaaatcccccgaatgttcgtgagcaagcgtcagtagtcctagtcacacatttctgggatttcataaatagggttaatcccaaaattaactttcaataatcacataattagcatccaatttacatattaacatatagatctcaaaacgagctttccagagatataaagaacgtctaaaacagagtcccgagtgaaaaagttatggccaaaacaaaatcgggaaaaacaggtattcccactgccaaacctagtcgcggcgaccaataattcgatcgcggcgactgggtttagaacatcgaaaaatcccatttttatggcctaaaaatgcccaaacacaaacctaacttcacctaagtcatacacaagaaaaactatgctaaatcaaggtattttcacgcattagtaccacaaaatataatctcaaaatcacaatcaccacaatttaagcatgctataaactcaatgaacttactcaccattaaataagctgaagatc

SEQ ID NO: 31447 - DNA, 3396 bp, Cannabis sativa
gaaggagaagagctctatgtctttattgtaatttcccagtttgtaagctcccttactagttatttttgtaacttgatatgggtcttcccagttgggtccaaaaacttttgctattgatctttggtattcaggaacactcataggagcactaggtctcctacaaagaatttcctatccttgacttgtttgttgaagtgcctcgtgaccttttgctagtaggcttgtagctttaggttggcttgatctcttctttcttctattttctcaagggattttgccagcaagatgttgtttttatcctggtcataggttgtcctcccgtaagacggcggcaccagctctacaggtaatattgcctcatagccataagctagaacgaatggagtttacccgatgatcgtattctcgatggtcttgtgcgaccataggagttccttaaggtgtctttaagggtcttgttgacagcttctaccagcccatttgcttgaggatgggccccgacagagaagcttttgatgatgtcatgtctattccagaaatcagtgaacatgtcattgtcaaactgcttcccattgtttaacacaatcttttgtggaagtccgaatcgacatatgatgttcttaacagcaaagtcaatgacttttttagaggtgattgttgctaggggttcaacttgtacccacttggtaagggagtctacaacaactatgataaactgcacccctctttttccatttgagagttgaccaataaggtttatcccccaaactaagaagggccaaggacactgcatcatcatgagctcattaggtggagctctagggattttttagaacctctggcacttgtcacattttttgacatagtccattgaatcctcgatcatttttagccaaaagtacctttatcagagtatctttttggataggcttttccctcgacatggttaccgcagaagccttcatgcacttctatcattagtcgctcaacctcagccttggtgacacaccttaagggcagcattgagaagctctgtctgtacattactccatctaggattagatacctagcagcctttcttcttatcttctttgcttcattcttgttttcaggcaaggctccagtttggaggtaagctgcaataggtgtcatctatgttagattgtcatccaacatgtcgacttcttcagggatggtaattcttggttcctttaggaattgtattggcactaggttttccttatcgacaatggtgttgctttccaggtgggcaagtgcatctgctgtggctttctattctttgggaatctaccttatagtatagcctttgagttgacttagcaagtcttgtatctttctcaagtaggccatcattttttcaccttgagttgtgtattcacctaggacttgattcatgactagttgagagtcactgaatatgttcaggtggtcagcctatactttatgtgccagcctaaggcttactattagggcttcacatttaccctcattgtttgaggccttgaagatgaatttgattgctctgttcaactattgccccaggtgttatgagggcaatgcctgcaccggacaattggttagtgcagcttccattaatatggagtatccatgttaattctttaggtttttgttgctgctcttactcttgcttcttctctggctctcgctcttctcttaaatcttgagagatttcaagaggcgtgtttttacacttggccacaaagtttgcaagggcttgatccttcatggccattcttggttgatgtgtggtgtcaaatttgccaagttcaatgcccacttaattagtcggccagatgctttaggtttccgtaaaatctgccgtaatggttgatcgatgtacacctttattgggtgtgcttggaagtatggcctcaactttctggatggcaagagcaagttgtaggtcaacttctccatgagtggatattgactttcagtgtcaattagtctcttgctgatgtagcatacagggtgctatacactatcttcttctcttattaggactacactcatagcatgttctgtgactgctaggtacacacctaactcttcattgtctaggggttttaacaacacaagtggttaagcaaattgtttttcacctcctggaatgctttttcacattcttctatccactcaaattttttgttgcctctaagaatggtacacactcgtctgtagacttagacacaaattttcttagtgcagtaatgcgtcctatcaagctttgtacttccttgatggttgtggatgacttcatgtccaaaagggcttggatcttgtctaggtttgcttctattctcttgacattgactatgaagccaaggaattttcctcagcctacttcgaaaaaaaatttgagggggttaagcttcatgttgtacttgcaaaggatcctgaatcattcatctaggtcttccacatgccatcaacctttttggacttgaccagcatgccatccacatacacctccatgttacggccaatgagatctttgaacattctgttcacaagcctctggtaggtggcccccgtgtttttcagcttgaagggaatgactttgtagcattataggcctaagtttatcctgaagcttgtatactcttgatctagcagatgcatctttatctagttgtaacctgtatacacatccatgaaactcaaaatttcatggccagctgtggtgtccaccagctggtcaattcttggaatcggaaagcagtcctttgggcatgctttgtttaggttggtgaagttaatgcacacttttcacttttttgttgggtttgggcaccaacacagggttggatacccaaagtggatagaattctttgattatgaagtcatgggcccgtagcctctcgacttcatctctgagcgttttggcgtgttctttgtccaataacctcctcttctcttgtacaggtcaaaagtttggattgatgttgagggcatgggtcatcactgaggggtcgattctgaccattctgaccaggtttacccttggaaactttatcaacacttaatttatttcttgcgctaaacccttctcgatctttagtcttctagctggagaagcgggatcgacctccacttcctcaactcttctacaggtccaaagctgtctacaagatccctaaagcgaggatctatgtttgtgttcccgctttgggctggacttcattgtcctttgctaggctcttcttcagagctcttgacagacatcttctccttcttggctttagacagggccaagatgtaacaatgacatgcagactgttggtctcccctcaaacatcctaccccatgccttgttgggaagatgtcaccgccttcaggtcgtatagggctggt

SEQ ID NO: 31448 - DNA, 887 bp, Cannabis sativa
atatatatataaaaatccattgccatggtaagttcgaaaatacaacacaaaaaccaaaccttgagagactaagtatgtatcttccattctgaaattgaagcgataatttcagtgatgaaggatcgagaaccaagtgcctcctattccttaaacctgcataagaataaaaattgcagcttagactacaaattgaacaaggcctctaaagaaaaatttcctggcagcacagaggttcaaccatttaagagttgcaaattcatacaaatcaactcctaacttggtccatatcgagactcaaaacaatttctctgttgaatgtagagttatagaacctaaaaaaaatatttattacaaagggaaaaattgcacaagtgttctggaaaaataacaattttttagctctatctctacaataaaaaagagagagatactcccgccattaccgaacaactcactatctcacaatttactcaaacgagaaaataatgccttagaaaatttgaaaaaaaaaactcaaactaaacaatcagtaatatatgtgtatgatataggttgttacaaaaaatatattatatagaacaaagacatttcaaagaaagatgtaataaagaggatttgaataccaatatcacactcggtaccaatggcaagaacagtggccaaatacttggtgtcgaagccacttttcagatttgtgctcttcaccacaataatatccaccagagaagcgcccaataaaaaaactataaacaaagatctagaaagataaaacttacaaaatgtaaaggaaagatcagagacaaggacgtcggatgtgagctcagccaggggacaaaggcgcggggtgcggtcgaagagagacgatcggagctagagacgatcggaga

SEQ ID NO: 31449 - DNA, 1387 bp, Cannabis sativa
  modified_base (321)..(324): a, c, t, g, unknown or other
  modified_base (626)..(626): a, c, t, g, unknown or other
taaaatagtaaaaaaactaatattgatctttttttcaatatgatatttttgtaaatttaattctaaaaaaaataataaaatagtaaaaaaactaatattattaatacgtgtatgatattatatctaaatacgtgtatgatatttttatgatatcattttttaatattttatataataatcaatttttttaaaaaataataaataagtagaaaaatatatatataaaaaaagaataaatacttaataaaaaaagtagaaaaatggagaaaataaaaaaaagaaaagtagaaaaatagagaaaaaagaatgagtactttaaannnncgccacgtcaccgactcatacttctcctttatatatatatatatagataagaaagtttatgtgagtactcctaaaatgatacttaaacaaaacttttattgttagtatattttgtatttttagatactattgaatattttcttttgctgagaattactattattgaatattgattagcatagttatagagagaaagagctctatgttattgtgttttatataatattttgaatgagggaaatttgaatttccatacttagaatactctaaaattttatccctaaatgcatagttattaaaantggtcatatatgaccacattactaattttccaaaaatgccccttacattacagcccgaataactcagcctctctcttcctctctctcaactcactatcgcccaaccctaacgcaaacctcaaccgacggtgacgacgcagcagaactcgacccacgctcgacccatcgacccacggtgctgactgaccctctcgacggcgcagaggaggagttcgaccgacggtggtgactgacccgaagctaaaatgtcaaaggtatgttgtgatttttttctttttttttagaaagtgtttaagatttattttgtttgtgattttgtttggaattgtttgtgaaactattatttgttagattttagaaattttttgtggaattgggattggggtgtttcggatctgtgaaaggagaagggattggggtgtttcagatctggggaagaagagggtccgatgctcctgtttggggtccgatggtcatgtttggggtccgatggtccgaccgtcttgggtgcgatggtccgatggtacgactgtttgggggatacgtgggtccgatgggtgccaaaaatatggtgttgtttgatggctaccaatcggacttataaaattgtgaaggtctgattggtagccatcggacccgagtttttttttcgtttttattaattattaattatttagttattgttttaggtattattttatttttattgatttattaagtattgtttaattaattattgttttattaccaattaataatta

SEQ ID NO: 31450 - DNA, 2111 bp, Cannabis sativa
  modified_base (1944)..(1952): a, c, t, g, unknown or other
aattgattcccatcattgtccacactacttgggtctcttccatctatcaaaatctgaagaaaaaaaaaaaagagaaccaaatgaatacatatattctaatgttagcgaaatgtggaaaatctcgttaaataattagtaattttacttctcgaaatatgactgctagcatattttgccctgagttttcgatattggtaaatcgtgccccttttatttcacataaattcggatgtggtagttgtaaatgtttagagagcaaaatatgatagtagtaatgtttcgagggtaaaattgttaattatctcatagaagtctaacaaaagtcctaataattcaaagttgaagggggaatatttaatatcaacactaataattcagaaaattcaaagagaaaaatacctatttattattctataagaaaattattggtagcaattatttttaataatcactatttataattacatttagtattttccatacatagataagttgcaactctattttgtttacataccattatatcgaaatcacaattgaaacagtttgttgcacacgttcttatttcgtattataaattagtttacctgaacaatggagtgatgatcatgtttttttatgttgaaattccattcaccaaatcctttatgcaattttcttgtttcttcaggaatttttcctaattcaatacatgactcaatcctctttttcatttcttcatacagtttctgtaaataacataaatattatttgcatactaataaatcaaataatacaagtataaactaattcttaagcaaaaataagatcaagaataattaccttaatagccaaaaattccttagaaaattcagtatcatcatcattggaagaagaagaaaattgagaaaaatagacatgtggtgctcttggttcaatgttgaattttttggtaaagggtatccaaaactttgagaaattagaggtttccatgagagcatagaaagtgaactcggaagcaccatcatcagagagataaaccgaaagcttttgcgatggataatcatatgacatcgcggataaaattgtgttcatcactaatgttggtggctccattttcgggtcggctgtgaacacgaaaatgtccactcttggtaattttttctcgtatctgtaaatgattttgcattaacatgtcaagtttttagagacataattcatgtttgtattgtacattttacgtcatgtaattacttaaataacggcataattacctaaataaatttttgtaagaggtataaatatccaatattaaaaaaattataatttttgtctaaatttattagtacatacttcatttatatctgttacatataaaccttagataacacaaaatggaaaattaattagaagaaatagtgtaaagtatagaataataaaaactttgaaaaccacaaacataaggaatgacatcacaaacctaaccatataattaattatattttttaaagcaaataatttgaatattatatttttttgaaaataattaaatatagaatgtttctgtattgcactcctaaaagggattattgatgctccccttatttattttggcatttaaaaaaaatttggtctaattttttcctggtcatctgtgtcagcaaaattttgagagatttaaaaaaatttaacatttcggtgtattaaacttttataaattttacaaaatatcttaattaaccataaaaaataaactttccaaatgacaaaacaaatatgtattgataaaccctttttataaatgcattctaaaaattttcttaaatatatattatatatggttgattctacaatgcacttcttaaaaagaatatactgatacacaagaattttttagtctaattttttttcatattcatatacgttatatctatttaagatatcttacaaaattttgagaaattnnnnnnnnnttacaatataaaaaataatattcaaacattctattttacactcgtataaaataaaatagccacgtgtaaaacacaatgtttgaatgcaattttcggcatattaaactttttcaaatttcttaaaattttgttagatatcttaaataattataatttata

SEQ ID NO: 31451 - DNA, 7515 bp, Cannabis sativa
  modified_base (7453)..(7489): a, c, t, g, unknown or other
tttttggcgtgttaatttttttttgaaatttttaaaattttataagatgtcttaaataactgtaatgtacatgaccataaaaaaataaaataaaaaagtccctcgaatattggaaccaataagggtgcatcagtgctccaattttagaagggtgcattttagaattttcctaattaaaattgctaagaactaccaatacttgagttgaaatgggctataggcaaaacaaaaaaaaattagacccctactataaatatttttttaaataattttttatttgggcccctaatataagtagggcctaagcacgggcctagcccgcctatacttaaggccggccataattggccattacaaaaatgaataaaataaaaaaaataataattcatcagtatttttttaaaacaaaaaatcatcattaaacaaaaagaatatgaacttatcaaaaagttaaaaaaaaaacaaaaagaatatgaaataatcctttgtagatgttgaaataaaatttgtgtacaatcagttgtttttaatctttgattggcccaatttccttccctataacattagataaaaagtagggattttttcaaaaatatacgtaaaatacaaaataattacaaatataacttaacaaatctcaattacattaataacctgccacgtcattaaaaaatacctgaattcttaaataatatgcctgaaatgaaactaatcccgaaattctttttttttttttttaaaaaaaaaatttcatgcgtttcaaaagtaaacttttaggttgcctataatgttgataataaaccaacaagtaactttttcataaaaagaaatattatttttatattatataatttgagatacattttgattacttttaaaacttacatgtatacactttaataatcaattaattatttagattatattaatacattttgagtaactttcaagttattttcaaaaataatgagttatccagtaatctactattttagtaaactgcattttaacaaaatatatatcataaatgtttaagtcatattttttaatatgaatcaatatattttttttgattagttaaataaaaaatgaagttacaaataacttttaaatcattacaaatacgatatttttttggaccaattagttattattttgataatatatcaattggttactttgataaaatcattaattttaaaataaaaagatgatgatcataccaaatatcctataatcagatttggcataatcaaacaaattttcattctttgtttacatttttcatatagtctaacatcgtatatgctaataaatctattagtttattttgacacattgaaacaaattattatttttcttttcgtatattagaataacaattcatttcatttcatataacctataaaaatatatgtcaataaacttactaatttctgtttgttagaacactattttattttttttaatacaaagtaaactataatcaaacataatgatatatacaaataaacttattattctatttttcgtatattagaacaacaatttatttttttatttgaaacgaaatgtgtgtctataaaataacaaactaagtagtctattttttttaggttgagacatcaaatctaattgtatacaaagtacatgactgtaacatatcttgtatagtaaactttaataacaatatatgcatttgtcaaaattttgaatatgataaaaaattttactcacttgaaatcccttgctcataagtttatttggcatattgaaataaaatttaattctttgtttacataacaactttttcgtatagcctatcatcatatatactaataaatctattagcttattttagcatattgaaacaaaatttatttttctttttgtatattggaacaacaattcattttattttatatagcctaccattatgtatgttaataaatctactaatttctgtttattggaataatattttattttttgcaatacagagtaaactatattcaaaacataatgatatataccaataaacctattagtttatttttcgtatattagaacaacaatttatgtttttgtttcaaacacaacctatcatcatgtatgcctatgaaataacaaactaattagtctatttttttaggtgaagacatcaaatctagttgtatacaaagtacatgactgtaacatgtcttacatatagtaaaatgccttgttcattagtttatttggcatatatatatatatatactcgtatatgttaaataacttatatgtttattttggcatattgaaacaaaaataaaacctgatggtttctatcaaactaagaatgaaaaagacaaatgagttcgtcataaataaacaaacaagttatccatttgtataaaatttatattttttattttcttaaactgaaaaactaaatgatatataacatgcatattacataggaaattttttatatttatgacgttaccttgaacccaattctcatattcaaaatatccctcccactcctaacatgcatatatattttggtaatctaaatttatcgtaaaaactaattagttttcatagtataatataatctaattaactaaattctaaattaaatatgaactaatattaaaaaaattaaaaaataataactaattagtatatgatcggtatcatgagtaattcaataatttttttttattctagaaataaaaaaaaatatatgcttttcacattttgaaatattcacattaaagattagattacaataatatattttttaaactcaaccaactaatgatgtgaccagaaattctttttaaagttaaagataggagagaataataatataatgagaagagtaaactatatattcttacaaaatataaaataaataagtaaataaataaataaaaataatatttttctttcactttaaataactgaataaattttaaaaaaataaaaataaaaatatagtagtataaatatctcttcaatggttgatgtcatacatctactttttttttttttttaaacagtgtcatacatgtacttaaagcaaaataactattctacaaacggtatagaaaacgttattatgttatattaatttacatcacaatatttttataaataaattattagtaacgtggttaaatgtaaattttcctaaaaagtataccctctactagagaacttccctatatatatattatactatttaataagttataacgcaaacgaagataattgtaatattttttaaaatattattatatttatatgtatatattttctaaaaattaaacaattcgttgttgaagaaaaaatttattatttaaattttagtaaacgtaaaacaaacgtttttgaaccatttttgtctaataataatattatatcagtatttatttgttttttaacatgttttgagtctatttgcatttgagtataatgttgtgtatcattcttttatcactatcatttcttacctattgcaataatactcttattgttcgtcttgtttggcacagttagtcttccagtcgcaatggatgcatgcatatatattacgtgagagtgagagtgatgttgttcataatgttaagtgtgtgaaaatttaagataaatatttatgtatgtgaaaagaataatattttttgtaatagaaaaaagctaaaaccttttgcactattgaattgtatttttttttcgctaagaaactgaaattattttagccaaaacacaaagtttggtgagcacatgggtactcacctcccaaaagcgcaataaaccattacaagaatgggacagaccccatctagcaagagcatgcgcagccttattaaaaacacgagaaatccaactaacagaacagtcagagctaagtaacagatcatagagtttaacaaaagagaaatgagaatgccaggacggagagtttctgtcaatcaaacccttaaccagcatagtattatccgtgtgaaagtccaccccttcaatctgcagatcaagagccaaagaaactccaaagtgcagggactccgattccccttgaaaaacgtcatgaaccataactttcttcgcaccataagccaagatcgaaccagaggcatcataaagaaccacagccacagccccaacctccctgtccgaggcaaaatccacgaaaccctgcactcttccaggccttggaagaccccatctgagctccaccacaccgcgacacgaatcaggcctctcactctccttattccgaatcctgtcatgctcagagaagcatttctcaatactcttttgcagcatcttaaaatccacaggcaccccgttatgaaaagcatcatttcgacaaagccacaatttatgatacagcacagcaccataaagaaaaaagctagacagctcctgcgggttaagaagatgttgaaagggaggatgagagagccaagcgaccaattccctgccattgaggaatgagagaacatctaaacgaaggccccatcgagaggagaaccataacagtctcgtgacagaacatccagacacaaaatgatctacaacatcaccccctctcactaccacaaagagagcataaactagggggcttcccaaaaatgctctgcaactttgatccgaaaggcaaagcatcttgacaaagtttccataagaagaccttgaaacgttcgtggattttggaaagccaaatccttccacaagtatcatccttttcagcaaatctcatcttgttataatcccagtaagccgctttcaaagagaaacgaccatcgttagaagatttccagcaagccacgtcaaaagcagggaaaaaattcctatccaaagagttaattaacaaagccgttgcaggaacaaacacattctctaccattcgttcattccaccccgaagagccaagatcaaccaagtcatttaccaaagtcgtggtcttcgtcagcggattaataaggcccttatgcagaataggaccatccccacaaatccattgttggccccagtaatcaatagaggagttttggccaacgatccacacaccattctcagctatgaactcctgagtggcccaaattccattcgccaccggggaagctctagaaggaagagaggtagagagcaacccagcatgtttacagtattttgcattgataaccgaggtccaaagggacatagagccagaggctaaataccagccaagtttagcaagcagacaaaaattaatatccttagcacgcctaaaaccaaaacccccacaagacttgggtttatagagactgtcccaggccctcaaagagagatatctgccctctttacactggccagtccaccaaaattttctcacaatggaatcggtgcaatccgtagtctttcggggaagcaagaatgttgacatagtgtatatagggatagaggcaaggacacttttgataagagtcatccgcgcggcttgggataaaaggttagccctccaaccttctaaccgagagcaaatattgtcaataacaaaatcaaaatcagaacttcgacggccattgaaaatgatcggatcgcccagaaatttctcatcacccaacatctcttcaaaacccatctcctggagaaaatcttcatgacatctggcagaacaattcttagaaaagaaaatcttagatttggacacattaatcctctgcccagaccaccggcaatatttatcaatagcttgaatgaccgtattacgattgtgattgtcagccttaaggaaaatgagaaggtcgtccgcatacatcaaatgagaaatagaaggtccctcccgagagaaagaaaagccactcatattacccttgctttcttctatcaaaagaattcgagttaacacttccgcacctataataaataagtagggcgagagaggatcgccttgtctgaggcatcttttaggagagaaagacttagttaacccgccattgagcaaaagctaaaaattcactgaagaaatacagcaaagaatcattttgcaaaaatgatggttgaaacctaagcaacgcattaccttcaaaacaaagctccattccaagcgatcgtaagcttttgacatgtcacacttaaccccaacataagcagaatttccttgtctcttattcaactcaaagaacaactcatttgcaataattgaattctccgcgatccatctaccttgcacaaaagccgactggttaggagatataattttatctaacaccttgcaaagccgattcgccaatagcttagcaacaattttatacgaagtgttaaagaggctaatcggtctaaactcatcaaaacagttgcattggctctttcgggaataagaacaataaatgttcgattaatctccttgctaaaattctcagagcgaaagaactcctgcacaaactcaatagtctgaggtcccacgatatcccgatagtccttaaagaattttgtaggaaaaccgtccgggccaggagacttcaaagagggcatgttccacaccactttcttaatttcctccgaagtcgggggctgacttagaaggatattctcatcctcagtaatacacggctctaacagattctccaactcagaattaaagtgaggattcgtggaagtgaacaattccatgaaatgagttcggaaataatcaccaatagaatccctcccctcaatccaagttccatcttgttctttaatagcccaaataaagtttcttttgcgtctcagtgcgaccgaagcatgaaaaaaatctagagttacaatctccttcctttagccagcattcccgagacttctacttccaaatagattcaagtcgcttttcgacttcgtcaatctcaagcatgatagaaccttccaattcgacattctccttagaggggattcgattttgcacttcaatcaaaagacgttcaagagcctgaagtttaaattggcagtgaccaaaaacttccctattccacttactaagggccttggcagtggaatgaagtcggcgacagagcatgaagctctgaaacccgacaatagcaatgttccaggcttcttcaatgatccttggacaccgagggttacggctctaagcgtcaacgtatcaaaaaggcgtcttcaccacttctctgtccatacgagtgtctaacacaatagcgccatggtccgagtgtctcacagcaaggtttctaacacctgcttttttaaaataggaaatccaagcagcagacacaaccacacgatcaagcttctcacgaattaatcttttccaactttgaccattggaccatgtaaatatagctccaacaccctccaagtcaatccctcccagtttaaacataaaatctcgaagcccctgaccttccgctctagttaccgggcgacctccacttttttcatcggccgaaagaatcgaattgagatctgttggaaattattttannnnnnnnnnnnnnnnnnnnnnnnnnnnnnnnnnnnncaccctaaatatgaacttctaaaatg

SEQ ID NO: 31452 - DNA, 1324 bp, Cannabis sativa
gaaagagatacatgacctagctactatatggtatatttataatcaatatgcaccttattgacagctcatacatggtctgaacaagaccacaactcactagataattctctaaaatatatcttcaatcagttcagtaatttctatttctgtatctacaaaatcgtgagcagcaagtgcgactttttttatatagaaaaagaaagtcttgcttcaattttcttcacaacaaatctgatcaaatatattaagaatctcacacgagatcagatatacacaactggatagatagaaaaatgatgagttatcaaacttaccctttatgccatatttttcataaattgaaaagctagacatatttccttccatatataaatccattaatacaaaaatgtgaaagtcaaatatacaaactattgaaaccaaataaataactcagccgaaattaataaataaattataaaatatttttgtcaaattaaagatgtcaaaaatataattaatatatataaaaatgtataagtaataagtgtacttttttatttcttttttttttaacacttttttactctcttacaaaattttattttattattatttttttaaaaaaatacaaacacttattatatttttttctctcttttatattttattactattcacactcaaaatattctatactatttttctttaattaatcacatcttataaaaaaaatctcaattaattttttataacctttactaaaatatgattattttactttcacattttttctcatattttttaacactctttctctatcttaaaaaatgattaagagcactcctatatctttctctcttttacatgactaataaaagtagtaattttttttggatattttgtagtttattcggagttgatctatgaatgatttacatattttaacaatgatatgatgtcttgttatttttctattgaattatatatgctgtgtttttgttattctagagttgtttttatgttgttgtttagatgttttatcgttatttttctgttatttttatcttttttttgtacagttgttgtttagtttatgtgtattttttatggtgtatatttttagtttattctacacaattttttttgttgtatatatgtgcatttgttttgttatgtttaagtggttttcaaaatatttttttgtttagcagttattttttatttatctttattcatgtgtattttttatggtgtatattttcgtttcttcctcacaatttttttcggttgtatgtgtgttgttttgtagtttaaatatatatatatatttagtttatttttt

SEQ ID NO: 31453 - DNA, 4567 bp, Cannabis sativa
  modified_base (1938)..(1941): a, c, t, g, unknown or other
  modified_base (3880)..(3885): a, c, t, g, unknown or other
  modified_base (4242)..(4247): a, c, t, g, unknown or other
  modified_base (4509)..(4530): a, c, t, g, unknown or other
agtacctaccattgatagaattttcatacaacaacagttatcagagtactataaggatggatccttatgagatgttgtatcgcaggaagtgcatatctctaattcactagaatgaaactggagaaaggaaatatttaggtcctaaatcagtataatagactaacaaggctatagaaaaagatcaaggccaggatgcttgcctctcagagcaggcaaaagagttatgcagatccgaaacgcaaaaacgtagaatttcgagtagaatatcatgtaatcctatgagtgtcttcgatgaaggggatcaaacattttgggaagaaatgcaagttatgccctaggtttacagggcctttcgagattcccaagaaggttggactggtagcatatcgtctagccttgcctccagcactttcagcagtccataacgtgtgttcatgtctctatgttacataaatacgtatcagatgctactcatgtgctgagttatgaaagcctaaaacttcaatcggatttatcatacgaagaataaccagttaagatattagacagaaaagataaagtcattcgaaacaagaccataacttaggtcaaggtgctctggagaaacagtaaggtggaggaagccacttgggagttggagtctgacatgagagtttaatatccaaaaattttagggttagatttcgaggaagaaatccttttaacgaggggatatttgtaaagatcgaccgcttaatttttaatatggaaattagcaaataattagggtttaattcagaaattagatttctaattatgatttatgaatttatggagatatatttgaattctaggtgtattatttatgttatatatggaatttcatgtttttcatgttttatacccgataacaatagaacgcaacgtttggccgatataatcacatttttggatggtttagtattttagtaatagcgggacaatatagatagacattaggaatgtcagggttgttcgaggtattagttttaaccaaaatatccctaggtggtaaggatgcattttggctcaggcaagggcaaaatagtctttttgccataagttatttttgtcctgtagtggattgaattaataggaataatctgaggtttattttaatatattaatatatatatatattagtgttatcaaattagtgaggattagatagaaagatatatccctctctctcttcaacttactctatctcttgaactctcaagaattagcaagggaactagggtttttagctccaaatctagtgcactaacaaggtgttagtgattctaatccaaggtaaaactctctagcctatctctttgtgatttccttagttctaagctaagtttatgcatgaatttctatggttagggttttgtagtttattttggttgttgtggtgattgagcaagatttgagtttatgaactcaagctttgctctctaatggtgaattttgcttttgagagttttgtgtgatcttttcgcatggattctacttgttattgcattattaagaggtcttaaaagtttggtgacatttggggttgttttgagttgtttaggtggatttttgtgtttcctacaccaaactagttgaccggtttagcgagacctggaagaaccggaattccggttggtcctcaggaaatcccatagaaatgctcttctggttggggaaccggtctaccggttggggcattttagggcaccctagtttttcttgtttttgagatatttagggtattgtcatgtaatccattgatatggaaacttttaatttcgattttaagtccctgaaaagtgatttagcgtgttactcattagttttatgaatattgtgatttaggggcctgtaaatcgtcgagcaactgtttgacagacacacctgaatttgaaaatgaggtaagattagtataannnnatgcatatgtgtttacatgtttattaagcctattagattatatcaataacggtatcaatatacgtaaagttaaattggataccgatagatgtatgtttggctcagatactgatcgatgctatcacatcggtacgactagagtatgactagagtatcgattataggctgatattatggtcgatagtattgtcgtatgaacgttctagactcaataccgcctagggtgcggggatagggttacaattgggtgtatgggtgcctaattgtaatccgagttatatttatgattatgattatgcttttcttactgagtttgtcaactcacagatattgcttgcatgtgtaggtaaaggaaatgctaaggttgagcagccgtgagagcgagaagattacatgtcggggcagttagacttggagcgtacgatctgtgggacaattggttgcattttgtatagtcgcttggtgacaacttttgtattaagtattttaaatcagttgtaaatattttaaactcgggatctcaaatatataaatgttagttatttttaatattaatagtaattaagtaaaattttaattactcacgattttcaataaactcattgattagcaacgagctgcaccgttaatataaaatcacgataacatgcctaaactagtagggtgttacattattgatatatgcagttcaaacaacttttacattaaactctagatcatattcataaccccacagaatatccatatcacacatattttgattagacatggatataatataataaacaagctagaaatctagtcaaacttattcttgatcttgtataagtgttccaatatatatgttacaatcgtaatagtaaattgatatcattgaagtccttggacattgaatcatagtaccttatcttagtggggggatttttccagcccattattatttagatgacattagtgattaacctactatgatatgttcaaaaacagctttaaaataaaacaaaaaaagttaatctgatcattcacatggatagtaataacttatcagaataatgaggataagataagaaatcttgcaatgtctatacgaaagacttaggcataattcctagtccttatgaaatattttatactatctctagtgattaattaatcttaagcaagtattttacattaatattaatactagaaaactatgttgatgacttagtctagaaggaacttattgtttcagattaagataaaaggtcacaacaacatacccctaagtatcaatagtaagaggttaaatgcacacttatgtatgcataaaaccagactcctactgttgagtgagagccatcaaagatgtaatcaaaaaaggaacacagggagacgatcaagaaagaatctctgaaagtgaccaatatgttagatgataggggtatatattagaatctttatttctacaccaactcttttcatgatatctgagatggtggttactctaggggtgaagaaattattctagaaggatgtaaaaacccgtctataataatttagttctaccagtgaagctaaataactaattaagtcacttttaaaaggcactagaagtttatttaaattgaagaaagttcttgactgattttatctctattccattttggatagaattagagttgtgtcttctgtacattcaaatgcacttatcaaccagtaataaattcagtatccctaaaggagtaatgcatatagaaaagtgatgttgcataatattttatgaacacaaaaggaagtaataatggagaaaaatgttgcttactataatcttacagttcctattacttgggtatagtcaaacacgctacacttgatatggatatcaagacaatggattgattgaaatacacttctagttttatgttagtgtaagtgagagtttgttgggattttatgnnnnnnataaaactcatttcaatattatcttatttgttatcaatagaagattagaagtcatttaagttaacatattattttgatgattatcgtttaatatacaatttttgataaatctagaacatattgttattcacaattacagtgatgtcatcacagtagaaggtttattgtgattatatgtttcaaagtttatgtcctatgattatcagtgcactagatttatactgatgtcataattagtgataaagcttacttagaccttggataagtattatgctctttcgaaggcattggaaaagtatgctagtatcggctgtatggtgtatacatcagactagaccaatattgaacttggataannnnnnataaacttaccgttatatctttttgagttaatattatttagttgatcttagatcaatatatcttaatcctgagatggttaggttctggcttaattgtgttatttttgttctttaagttgttcattaaagctgaccaattatattagcccaatacttacatcttgggaacatagtagtacaattagtgggagcactaatcacaaatacgcaatctatagcttctatttaatataaaagtgaaatgatgatttccttcgagctnnnnnnnnnnnnnnnnnnnnnntgagtactcatttcagttcactgaaatatcatttata

SEQ ID NO: 31454 - DNA, 2235 bp, Cannabis sativa
tgactttgaatttatagaagaagagttcaatccagccacacaaggggaagtggaaagggaacatgttgggacatcagatccaaacagatggtggaaccaggcaagtgagaatcctgttggcaatgatgatggcaatgatgggttagattcaggagatgaactacacagtgttcatagtgatgatgaagaaggtgatcatacctcgaggttggagttcaatccccaaaccaagaaagatgacttcaagtttgagttgaacatggagtttggtagtatcgaaatattgagggctgcactgaaggagcatttcatacatacagatagggaatatattctaattcacaatgatagagctaagttcagagctaagtgcagtgcagaggggtgcccatgggttctacatgcacatgtccaaccagatggaatgacattcaagatcactacaataactgaaggagggcaccaatgtggcatggtcttggagaacaggtacttttgctgttcaatgttattgattgttcattaagtataactattttcattcatactgattgttcattcatgggtattttcaggcttattgatgtgaattgggtgaccaaacacttcattgatcagtttaggcaacaccctgaaatggaattcaaacagtttgctgaaatgaccaaagacacaaagtattctaaggtcacttcatggcaattctacagagccagaactgcagcaaaggcattgcttgaagggtctgtggcagaacagtatgccatactagatgattacttccaaatgatcttgaagaccaacccagggagtacagccaagattcaaacagagttaaggggtgagagaaggatctttcagaggtgttatatttgccttcaagcatgcaaagaagggttttatagaggttgcaggccattaatagggttggatggttgcttcctcaaaggttactgcaaaggtgtgctattggcagcaattggtgtagatggagggaattccatatttcctgtagcttatgcagttgtggagaaggaaactactagcagttgggaatggttcctaacattattgaaggatgacttggcaccaagggatacaaggacactcaccatgatgagtgataggcaaaagggtcttcaaaatgctgttgagtctattttcaacagccctgacacaagattctgtgttaggcacatgtactgcaacttcaagaaagacttccctggcctattactgaagcaacttgtgtgggcagctgctagatcaacaattcctgctcattttgaccagaggatgaaagaaatcaaggatataaatgaaggagcttacaattggttagcagccaaacaaaagtcagagtggacaaaggcatacttcaaggaaggtgttaaatgtgacatgttattgaacaacatgtgtgaaagcttcaatatggccattatggatggaagggacaagcccattgtcacactgttggagacaatcagaggttggttaatgtctacttttacaaagagaagggaaggcatacaaaagtggaagcatggagtgcacaacaacatagcaaagcttgtagcaaaaaatgctgaaattggtaggaagtgctctgtcacaagagcaaatgctgttttatttgaagttaaaatgtcagaagctggtgcctttatggttgatctggacaaacatgagtgcacatgcagaaggttccagctcactggaattccttgtggtcatgccttggcagccatttggttttgtggccataatgaatggggttacatacataggtactacaaacctgaagcttatgcagcagcatatgcaggcacaatttcccccatgcctagccctgacaagtggccaaacaagggccttaaccctatattccctccctgtgagcataaccttcctggcaggccaaaaaaaaagaaaaggagaaggggtgctgatgaaaaagatccacctgcagctgccacagttagaaaagccagcagagttggaactgtcatgcattgttctaaatgcagaaaatctggacacacagccccaagatgcaaggaacctgtaccaaatgtgccaaacgaggtatgattaagttttaattgccaatttatttgacttttacatttctattgtgttttgacattgtttatatgtccattgtaggctccaaagaataaaggaggtaggccaccaattcaaaatccatctgctgcaacactcaagaggagg

SEQ ID NO: 31455 - DNA, 2064 bp, Cannabis sativa
  modified_base (1935)..(1936): a, c, t, g, unknown or other
caaggctttggagatcccctctaagttcagaaatctagtgtggcatccatacactggcaaagaagaccctctctctcacacacgtacatacacagcttcaaagtacagactgacctataaggcattcgagacgattctcgttgtcgagtctttccagccacgctatcagaagtagcacaacagtggaatctaaagctttcctcgagatctatcgattcttgggatacgctcaagaaagcattcaatgaccaattatctccatcaaggcacagaccaatcgagcccaacgatttggtttgcatcaagcaacaagaagtcgaacctctaagggattacttacaacgattcttagaggaaaccgcacaaaaaaagatatacttagtgaagacgccaatgtcatggcaatgacagctggactaatagtaatgagtccattatggaaatacttgaaactcaaatcagtgtacaccattcaagcgtttttagagagagttgatggtttcatcaagctcgaagaagtcatcaagaaggtcagaggagttgctcaaccagaagcaatcgattacactgcttatctatttcctgagtctcgaacagacattgaccaggaaagtgaagaagaatcaacaactaatgcttccactgaaacagactcctcttttgtttcccaagatgaactcgagcagggagatagtgatgacgagtcccctgctatttctccaaaagatctcaaggaagaaagtagtgatgaagaatctccccctccttcccaaaatgactcaggagatgggggcagtgacgaagattctccctctatttccaacaatgatcgggaacaggggagcagcagtgaagatgtgtactatgagtcttttgaagatattaaccaagaaagtaacaccgaacactccgcatgagagagggagggaccttatattgttacaacgtcagaatccaggacaaacatgttggagtttgctatgactaccacttgaatctagtgccggtaccaaggaactggaacggggatcatctgagacaatatcattaataaagtagttgttccctaagtagtttgcttcaaagtgagatcaactttaccttgtacaagtgaatcgatcgcctctcgaaccgacaagatgcgacaaaatcatctctttgttgagatatccatcaataaggtatggcccctacactattattcgaacaaggaattagtgtagtggggatgacttcagctaagctttgatgaaaaacaaaaatctacaactactacttctttttcttttaacttagctcatagtgatgtaattgaatttaatatctaatgaataaaagcattgagtaactcttgttggtatatcattgttattaatcaattacaactcacaaacctcacgacactctcaagcgttgaacaaagcttatagagttggtcttgaggtaactacggttatttcttttagtgagttaagcactgccaacccacgaatctccagataagtggacgagtgcacacacatgtaacaactccctaagacccatgattaagaaagccaaacgagatttggtatggaaagtgcccatgaaggcattttttcgatcactcaaggggaaataaaaaatagtacacgggagctatccactttacatgagcttaacctacgatcactctaatgtgcatccgagatggggaagacatcacccccatcttgggtatattaattcaagagttggtcacatcctcaattgaccaaagaacagtcagcaactactacaacacactactacaaatatcagaattcgcgacggtcctaaaaataatttttttcggggaccgtcgctaaaaaaattaagtaactatttaaaactatcgggaaaaatttagtattcccgaaggtttaaaattgtagtaaacaaaataggcgacatttnnttaataaaatgcaattttttaatggacctttataggctacggtttaaaactttcgcctatactataggcgacggttttaacccgtcgcctataagggtccatttaaaaatcatcacctacttcttgcc

SEQ ID NO: 31456 - DNA, 1595 bp, Cannabis sativa
atgcggtttatgatttgaaaatcgtatagctgtgattttcccgcttttactgggccaaaactatcatgtattaaacacgtcttatatcgttgtatctggaaatgtctcgacagaaacgtgattatagtaatcccaatagtgagttggggccattcttccttccgaggtcgacaatgtatgtcttgtgtcaatagcggttatttacaaagaatcgttctgaatcgctagggttgtaagcctcgctcccattagctggatgaagctataagaagtcttcccatagcaagatggtcacttcgcttacttgttctttgagtcgatctgacttttacacttagtttgttcattgcacactaaggactttcacgattgatacgtgtcactttctccgacgcctcgctatttgcatttaacgacatatggtttctcgctaatatactaagtgacagcttgtacattgattcctcacctaagaccttacagtcagtaggttacaaatatactctgcctatttgtaattaatgagttattccataagagcaattacattgattcacattcccttcatcctgacacgtgtccttcattgaggtgacagtcgaattttgggtataacaattgccccttaaaaatttattttttagtaaaaagagctttttaataattacaaagggcatttttgccaaaatccttttttagaaaaaacgcatcctttgactctatcagttgtacgattttgaggatcattatgaatcgtctcatcatattttacccatctcccaaccgttagatttcccaatccttagctttcttgtcactgactttgtgtataaaagagcggctcaagcttgtcatttttcacaaacctctggctttttggtgaaatctgttttcagaatggatcacctctttcttgctagaatgtcccttctgagttcagaagttcatccttccaaactcatcttgcccagatgcaccaaccaatttcaacttgttctcaaaaacttcaagcctcaactagagccagaaacgatggattccaaggttgaggagcttctcaccaatccaaactaggggaaccccgtagcctgccatggacgatccttacaagtgatccctgagggtatagatcttgtgagcgatcgtgaaggtcctcctcaggctagtaaagaatttcagaggaaggtcggcatggttgcagatgaacctgggaagaaagttggtgtggtttctatcagagaatccagccaaccctggacccaaacctgtgccagaagatctttgcaccatcctctttctggtatcgaggaatttcctgaggctgggaaagagatatcgacttcaggaaatgggatcctttgatgatgaggagaatgaggtatgtgcagagatcaaggctctctacatgtagccggtctttctcgacctatgtgtagacggtctttctcaggctatatgcagatagtctatctcgagttcatcggcttctgctctcatccttggttaggaagatgacttaatggtttgcccctagtggcatttttgtaaagacaagtttgtaaccagttttaggttttttcttatcttaaatgcct

SEQ ID NO: 31457 - DNA, 2732 bp, Cannabis sativa
  modified_base (2689)..(2691): a, c, t, g, unknown or other
ctcacttttttatttctctatttttgacctcgcttttagcctacaatgctgagtcttcaaagcgattaaattgaatgatcaattaatagaataataataaagtaaagcaataagaagacaaaaaatttatagagattcgaccccatgataatggtaatagcctactccccttttagttgtattacttaaataattattaagatcacaagggtctgaccaagtgagtttcttaaaaatcttgagaaagcttacaaatattttagcaggacaataactcttttaaaagttggaaaaaaggtcccttcacagtgaaatgactccactatttatagagaaaatattgttagggtttataacctgaaaagcctgtaatgatatttctatttataaataagagatagacattttcatataagcttgaatgttacattattaatatttgatattgaataatttacatataaatatcagaaaattccttattcatatatgaggatgtgacttgtattgtacgaagaattaagatcacttaacaatgaataaaatagttaataacatattaaagttttaaaatctttaatcaacagttactagtacgattcattgatgctctttatttggtgcaacaaatcttgattcgaattgctaatgtagtataatatctaagtgaaagtgttatatctaatagagattatatatgatatggaccaataagtaattaagttgtcttaatcaaatatatcgtttactatatatacctaatacctaattcatatcataagggtgatcaatagtagatatgcctaaatcccgagtaatcatgaacttctgttcatattattagtttttttgattcactcgttaaagtttcttagagaagataattcttacaacttctgttttggaaatctaataatgtgaatgactgggaacataatctataattatagaatcacgactttcctaacagatcgaatgttagttccctttaagagttaattctagagctgaaaaagttgtccacaaatttagattagatgtaaattatactttcactagtaaattaacagtactaaaagataaataagtaattagaagggtaagatggtaattttaccaaaataaattacgaaccgacactaggagggctaatcactagaattgattatatcgatagatactccagtaaaactcagtaaatataattctatgattactaagagttcaattccatatttatagtagagtaatcatggaattaataaataacattatttggttgatgagattcaatgaataatataatttattggtgattagtaatataggtctgtggttcctgaattgccaccttgaaacactgtcaaggaaatggataaaattgtataatgatgttcagaaaaatatatttaaaattgtcaaaatagtaattatttattttgtaatgaataatttattttcaaatttattatttaaataaattggaaaaaagacaaattgttgtatggacaaagacaccaccattgtctggttaagataatggtggcaccacaaacactgtattaagacacagtgataggcgcctattaaataagatgagccctactattttaattaattaattcaaaagataattattatttaaaactttgaatttataattagttacaaatattgtggctgaaatattctctcaaagtggttaagagattctctctaggtggttgcaatattttttttaagtgattgagagattctctcaattagttattagatattttattcaaacctaaatatctataacagaatcagttataaatatttattcaaataattaaatattattattttaatatttaaaatataaatatttattttgataaaatatttattattattttattggttttattattatactattataatcctaaatctatatatacctataatttaggaaactgaaaaaggttaataaaaaatcattattcactccatagaaaagggttcttactcatgagttgagatcaaatcaagaacaattatataattttattctattagtccacactaatctttgtgtatggtagaagatctaaatatcacgacgtgagttcttcatcaccattttaggaatacaacttacaaaaagatttaaggataccctgttacacttcaagaggtaaatattttctttcatctcgttattgcaaatttaatatatgtacatatggagatctttgggatgtggtacaatgataataaaaaattattatttccctacttacctaatttagtactacaaaatcaacaaatagtatcacagatgattccattatgtatgtatattaaatgttgtgtggattttatgtatttatatatatgtgatatttatgtgaatggatggtgataatattgtaaatgcatgtgagatagtgaatcattaattgtatggcaaaaattaggtgtaggatatgcttttaattttttctagaaaatttgtaagctcttataggacataggtattttatgtaatttatttttcaaaaattattttacgtaatattacgttgtaatgctgaaagatgcagagcttggattctaatggaatctcggcgatgtatcaccacaaacacctttcatggagctcaggttgttagtgccccaaccttgtgttgggttttatgcnnnaaataaaactccattttaatgtaatccagattattcaatat

SEQ ID NO: 31458 - DNA, 5177 bp, Cannabis sativa
atatatatactaattaagatctagtacacgtacgaattgtttaattatttttatttatttaagccaaagagttacttattaggaaaggagccaaatcatgatatctgtcccattggacccattccctactcccaccagtagcaaccttaattgaaattccacctaacagaccagaaatgttaagggtaaaccttattagggtgtaaaacgtgttactacattttaatatatatcgaattaaataaattttaatttaataaataatgtaagaaatcgttaatcaattataaaatatcaaattggtgtggtgttaaacacttaaaagtaccaaataaatgtttttaataaacttttctaaaaactaactagagtaaaacctctatctatagctaagaataatactctattcaagaataattcataatttgttataaaaaaaatcaagtcccaattttaaatcaattataaataaaaataacctctaaattgtaattagagatacatttataagtcctgtattaacaaagtatacttctatataagaataattatatatcttaataaaatatatacatatattttataaatatttatttacataaaattaataatttcattccaaattataatatatatatataaacattatatttactctaaaataattctattatgatactaataattgtttattgttattattgttacattaatattttttggtattaatttaattttttttttctatttaggtaattataacctctcaattataatataatttacttaattacaattatattcttgaatagaaatttatatttatttgttttctatttaatattatattttaattataaaagtatcatcactactccatctgcctctctcatgatcttttaactcttctctaataaattattgggcatctaactgtcatttgccatttgttctagcatttggtaatatatgtatatatatttgataaatagaacacatttaacttgtttaattaatatgattaggactattaggtgaggttttaaataatttatctactacctactgaaagtctaataaacctgaaaaagtttataatttaaattagaagaataccaactcatttctggagaaaaatcttaactcgtttaaagaatttgaacacaacaatacatgactagacccacaaaaagcatactttctcgtaattaaagggtatatatataataaaactgtggcataaaacctctagaatagttaagtttaatatcaactatcgatctgaatatcgaagatgtatttatttccatggagctgcctttccaaagcatcaatcataaaaaatgtggatttcttgaacctaaaaaacaacccagttcagttcggaagagtatattttgtttacattagtatgatcacctatatattcttcctgttatacctatatattttgaataataatataatgctgacacgtgtaatgaaactggaatatggacccgcccaaaataaacaatataataaataaatttaaacaatttgtctcggaaagtacagttggtagaaatcttcgaactcgcccacttaaaaacaatggtgagctataaacaataactactaattgatgagaccagcgaaatgaatgaagaacaaaaatggttcatctcgggatacacaagatacacgacaaatggttgtttgaaaatggtagataatgaattcaaatagctcgcagctcattgacattactcgtgagtatgttgaaaaactaaagacaacatccccagcatggttcacctcgcaattgtcatactatgataaacgtctcgtatgcctcactcaatattaatagtaaaacgtgagaagtactacttaacgtatacttagacgctgatttttataataaagcgtctaaaggaaaatagttgcattgtgagaaggatgaggtagaggcaaagtcagcgtaactacttatagattaagttaaatgagttgttacgagaagttatttatcattatcacatgtgatgcaagtgtgaaacgtgaggattgtccacatttcacgaacagttatacgtgataagatcccaagagaataactatcaccctaaactcctataaatagggacagaacccgagaataaaagacgaccaatttgagaaagagagagctatactagtctttcattttgtatacaatttattaattgtattcagtatccaatttattaatcccagaataaaatagacttgtggactatgaaaagttaacttcaaaaagcacgttaaaaattttcttatcatttattactattattattattatcattgctcatttaattaatgagtatattaattacaaaaaaaaaggcttatttattagttaactaaaatctgtattaacagttggtgctttcattaagagccttgtaagaaaaaactcaggaaataccctccttgaaatatattcgaactttccatccatggcaaaaatgctcctcaaaatgaagagaatcaacaagggaaaacaactcaacgtccagggaaaaaaaaatatcaaaattctcataggacaaatacaactgagatttctcgctttgggagaggaaatattggagaatttgagaaaagtggggattaaatcccacgaagtgaggatgcctatgatcccactagatatgttctattagtggagctataaaataggcaactttgacagggactgactaagtcaaatcaaataaatgcaaaattagagcgcgaagtaacagctgcaagggctgcgtgcagtattgcccttcgaatcacatcaattagacgatctcgaggaagacttaaaggctctaggaccaaaagacatggggatacccctagagggaataaccttagaaatccacgaatactcaagatgatcaacctagctaagaacacgagggatatctcaatggatgaagagaactcccaaaatccaagaaataatagaaatagggaaactcgacccaatgatctaggaacttcctgtagaaatacaaactacgaaaatgtacaacctaaaaacccagagtcatctcgcatgaatatggatttcagacaatcacgacctgagaatcaaggattctctcaaaacaatgcgaggggtgttgccaatcggcctgggacaggtcaaccactgagacactcacaaaggccaaaccacaacgacaaaaacagcgcatacacttaagcaggggcgcatgtcaaatctatttcgaagacagaggccagtgtgagaagaacctctagagactgggtcaagtacatatcctaataggtctagatcaaggactcatgggcagagcagatcgaagaacccatgcacgtgatatgcaaacacgagatggggaaggtacgcgtcgccattatcaaggtgatcaagaaagcataagtaattctaagagttatcaatttgagagttattctgcaactaagttggttaattagcaattacgaccggagaaataaaaggcgacgcgaccctgatctacgcgaacatttaaactatagacaacctgacttgcacgagcacttgaattgtaacgttctagatcttcgagatcgattgaatcaaaacgtaggtcgatccctagcaacacaagatggagaatataggaagttatcaggatatatgattcagatgaagagacagagcatttttatcctattatattaacttttcaattcccttagggattcaagaacctgcatatcacacagtatgacgagacaactgatcttttagcacactgcacacctaaataattttaacacaataagacgagcaagtactagcattttatttccaacatcactaacaagagcgacgagaagttggtttgataaatcaactgacaatgaaaaatattatatgcatcttatatatatataatattatatttcaacatatatatattcttattatggacactcttaacacttctcaaatttattaccaacaaaatctatcacaccttcatcaccaaaaatacggtgtcccaataaatcatgattactttttttttttccgcatcagacaaagattttattgaaagaaagtgaaacaaagaaaatgctaaacgaataaaagcaccaatgaacttagctatgtaataatgtaaagaaccctcttcatgtttaatttggccatgccatcagctagctattagaagttctagctatataatgaatcacatcatgtttaatttgacattggaagctaaaattctttaactaaatcatacatcatatgtttctcttcttttttttttccaaagggaatcacacatcgtatgttttttttctttctttttcctttttttttaaagggaatcatacatcgtataaataaagttacaacttcttagtgtaacgaaaatatactaaatatatccatctttactctctattaaacgactgctgcaatcatgtgccagtttgtgcacattgttatcaacacaagtgtggctgcttggcatgccaggccacagatcaagccaatccacaatccctatatatatgtaccaaaatccaaatcaataaataaatcaaaactctaatttttatattagagtattactattgacatgatatataacaatttaaaatcaaatctcaaatattttgagaaataaaaataaatattaaaatgactaacatattaccttaacatatagtttcattttaaatgcaaggaggctcccaacagtcacgccaaccaaataaaatgttatcaaattcacataaacaaccatgcgctgccacccgcatcctctagccacacctgaagaaattatttattaagtaacaacacctctcaaagctcaaatgcttgacactactcaaaattggcacactttggacgaaaaatcacaaatagaggttaaaaggggagacaatggaacgattaggctcacaacaaatttgataccatgttagaatttgagataagatgcatgagtttcgattcaaaatgaaatgataataagaagagtaacacattcttatatataaatattttattttcacaaattaataatatgagactaagtctaatagaattcttttttttttttttttgagtatagcgtaatgaattttacaatcatttaatagcttaatagcttcaaggtcctaggttcgaa

SEQ ID NO: 31459 - DNA, 1182 bp, Cannabis sativa
gctgaagattgatcataaaggaccggttttaatgcattgtgataacaaggcagcacaacacattgctgcaaacccggtttttcatgagagaacaaaacatattgaaattgattgtcaccttgttagagagaaagtgcagcaaggaataatcaaaacaacccacatctcaactaaagagcagattgcagaccttttaaccaaagccctgcttcctggacagtttaagaatcttaaagacaagatgggattgatcaatatctattctccatcttgagggggagtgttaattgttggttagttagagttagttgagtttgttagttagttagaggctgtcagttgttgttgttgtgtaaagggtgtgttctctggttttgtactggtttttaattcattttttcttctgctgtatataagctctggtgagcttaattgtaatctatgagattcaatcaagtgatttcattctcccctttctattgctaaaaaggtatgcagtattttctaacataaatttatattgatttttaagaataatattatactacaaaattacaaatatttttacttttctacaagttatattttaaaataagactcattgtattaaaaggagttgtcacatatgtgtttaacattttggtgtatatattttctatgcaaatatcattttaacaacgaaaaaatttattgtaagtatggtatcattttcattaacacatcatttttatgaatgaaaatttacaatcatgtatacattataaaattttattatattatatgtgaaaaaaattatttataaaaaattgtacattttataacttctattttattatattatattagtaaagacattttttgtgttcaaaaaaaaaaaaaaaaagagatttttttaaaaaaaaaaagttttttaatacgtatgaatataaagttgtgttgttacttgcataattgttttgtgttatacattttatacgtttagttataattttattcattaatattatttcaaatttattttattttattttgtacattgaatttaatggtttgtttgttttgtaatttggtttgtatcattatcataataccaaatagttttgttacgtgccaagtcacctatgttaattttattttaatttttagttttttttaatatcataattttaaaattaataatat

SEQ ID NO: 31460 - DNA, 2737 bp, Cannabis sativa
gacagctagttatattttgtatagtcgctaggcgacaacttttgtattaaacattttaatcaattgtaaatattttatacatgggatcccggttttatatatgaattatttaggttggtatttataattatttaaataaaattttaattactcacgattttcaatcaatttgttgattatcaacgagttgtacaattattataaaatcatgataacactcctaatctagtagggtgttacaatttggtatcaaagctttcaggttttcttctgaagattgtcacaacatgtacaatcatcatcagagataagctcaactcatagttcagtaagcttttattgctttagtagtttattttattagtatgttataagaaaatcctgatagaaagcatgttaatagcctgatagctgaataggcgcatgttttaatttccaaaataagcagtaattagtaatttattcttgattgcggtctgaccaggctagctcttggtttcataggctgttctattagaatggatgctgggcgaaacacgagaattcaaggtaactcggtcgaatctagtggcggtcagggagttcaaattcccccgaatatatgtggctgagacagaggccttaaaggcagggcatgcgatcagggagatgttaacccaccgtaggctacccaggattggaaagacaggtttgcagcaatgcaaactagaatcaatgaacaagacgaagaaatcagaggcatgaggcagtagagtgctcctgcaatgcttgttccagagatgtaggtggctcatacccttactgtgtaggcaggtccaattgctacaatgaatcaaatgaaaccactacacgaaaggttctgcaagcaagcacatccagtctttctgggaggtcccaatgtgatgaaacccgagcagtggctgacaattactacacaaatcttgaactttatgggtgtcatcgacaacaatagagtggttggtgccacattccaattctaggaagatgccctagtttggtgggacatggtggccctaactcgggatgttactaccattacctgggaagagttctaggatttttttaaatgtaaagtattacaatgaggcagtcaaaagtgcaaagagaaaggaatttacccagctgacttagaaggagaatatgacagttactgaatacacaactcagtttaattaattagctaggttggcctcgggaattgtgccaaccgacttcagtaagaaagaaaagtacctggatggactaaaccccaaaatcatgcatgaccttgtgatcaccattgatgataacaccacctatgctgatatggtgggaaaggcattgcgagctaagggtgcagttgagtgcacccaagagtcttgagggactcaggttgttggtggagccactactctccctacctctggttatggtaggggtggtagtgactcgaccactaaccaaaaaaagaaaggcaccatttgcacccagtggcttaaattagaacaagaggttttgaggaaccagggtcgaggcaaccattaaggtgcttccaaaactcgatatacttgcccagaatgtcccagtcgtaagaagcatcatctgccctcagctcaagaaagaagagcaaaagacattagcaaagctcgctccagaaagggtgtttactcttagccaggctgatgtagaagctagcccctcaggttttacaggttagctattggtaaacaactcttacttctctgtattgtttgactctggggccactcattcatatgtggcggctagaatttttgataaattgggtagactgtatgacacctatgataaagggtttggaaccctactgcctggcgaagaattagttatctccaaaaggtgagttaggtatatgccaatcagaattgaagatagagagttgagcgctgatttagtggaattgggcttagtagattttgatatcatacttggaatggatctcttgtcccagtacttagtcagtattgattgtaaatagaagatggtgatcttccaaacccgagggcgaggaaccatttgttttgtgggattagtttagggatctcaaattccagtgatctctgtactaaaagctagagatttgttacaagatggatgcttagggtttctggcagtggtattggatacaacaagattagaatcaattcagccagaggatatcagggtgatttaaggaatttttagatatttttcctgatgaacttccgagtttaccaccacagcgagaaatagattttattattgatttagaacctggtgctaaaccagtttctaaggcaccgtacagaatggcttcggcagagcttaaagagttgaagattcaacttcagggttgacctagggttttcacggcctagttaaattcttatagtgagtaaaattaaagcttgttgaagtaattgtaaagtttatcttctttaaaattacttggggggcatatatgtgtgtataataactggaattcatcaagaagtacatattatattgcaaacctaaaaaattaaaaaaattccataaaggaaaagataactgattaaaattatctatggacaatatacagtcaaaaatttaaaaaaacctttttctttataaaggaaaaataaaaaatagcagttgtaaatgagatcaactcataagacaacataaagctatatgcgaatttaagggtgttcacggattggtttggttcggattttca

SEQ ID NO: 31461 - DNA, 2565 bp, Cannabis sativa
ttgttgtgcttttattttctttccagcgcttatgtatatgtctgtagtggccaaaaattgcacaaggcccaaatgcctcttacgacccaaatcggaattacaatccttcaaagtcaattcaataaatataaccaactcatataaaatgtattaggctttaactaaaatataaggcccaaacgagcccaatagctacaagaccaatttaatacaaaggataggaactagtctataatggatccaaaagaatcgatccttcctcctggaaaaggggaagactacttctcacgttcgttcttcaaaatggatgaattggacaatcaaaagctctataaaaggagaacccatggatcttgaaagatcagatcatcttcactcactgaacactcactcaagcattcacgcaatacgttactattattatcaccaatccttctccatcactctacggtggaaatatttattttttatcttctttatttacattaggctattctttattcaaattatttaatgacttgatcgtcgaagtcccttcggctggcaccatctcagtgtcccaaggtctcaacggtcttttttcctttgttctacaggttgtcagtgctcgtgatccttccatttcgatcattgtagattttgtcctctacaatttggcgcccatcgtggggccctgacaaactgaatcaggagcaagggacatatatccaataccatggcaaatctggaagaaggagagatcaacgttcaagcccagatagctactcttatgtcttagatgagggaaaccaatgaaagcctcaaaatggtacaagaagagaataaatcattctgggaagaaaatgctctgctgaaatcaaaggtggagatactgaagtctgttcaacgtagtacgacagagtctcaatcaaggtttcgtgttccaattccatccatgcaatcccttgattacactctgatgacaaacttaggccaacgtccagcgatcacaagaacgccaccaaaccaaacaacacaccagtagtcaactacaacgactactggagcagatgggtcagtatcagggggatcaactctaacacatggaccctctttggtaggtgacgaagctatgaccgaggcctaggtcacatcaattccagacggaagaattcccacgccaagcgctcatgaaggacaactcaggtgctctggcccaatccctccaagtattttgatatctaatgttcctatcatccatctgcaggtcaaatcgtcgcaatgacacctgaggatatgatcgaacaaatggtaacaaggaagcttgaaggcatggagactatgattcacagaatcccaagagtccttgcacctatcaaaaagagcttaccaagtagcttcacagactccccattcgtggatgctatagctctcgtggagatgccaaaaaagttcatcttcccatcaatgaagatgtacgacagaacaacgggccctaacgatcacatagcgagttacaattacgagaggcttgtatgtgtaaggggtttggttctagtctggtagggccagccctccagtggtacacaaacctacctaacaattttatttcttcatttgctcaattaactgacatatttgtggagcaattttctaataacaggaaactggagaaattgtctgacgatctttacaggatcaaacaaaggatgggtgaattgttgcgatattatgttgctaggttcaacacagagaaagtatccataacctcatgcaacgtggacacgacaatctcatccttatgaaaatacctaatggtacattctgacctttataaagaattaacaaaatatccttgcaggatatggaagacgtactagccaaagcttgggcccaaattaaatgggaagaagacgagtccaacaggcatacccccgcatcctactcatatataagagaaaataggagcacaaggagagtggaacgcaagtacagtacgcatcatgagccatacccaacttccagaagcaacagacaaggaaagggacctgtgcgtaggtttccttcaccaagaccaagagaataagagaaggcacacaacccacaatacaacctaaatgtagaactaacagagatcgtggctatcatgaaagaaatagagaacaaagtcaagtggcccaaaaagaccaagaagccagcagatcagagagacaaaaccaaatggtgtgaattccacgacaatcatggtcacacaacggcagaatgcattgcttttcattttgaagtcgttgggctcctccgatggggacatcttaaagaattcttatctaacaaggggaagagtatcatagctggaggggacaccaggcctgttacaccaccagaacttccacaacacactagaacttgcagtgtaatatctagagggtccgaagttagtgaggtgacatattcaatcactaagaggcatgcaagagaagttgtaggaacagacggaaggccatggaggctagcaataagttacatttgacaaatcataaacttcgtagacgatgaagccttagatttgctcaatcctcatcatga

SEQ ID NO: 31462 - DNA, 1014 bp, Cannabis sativa
atatttgcctacaaatcatcttgacagacgacagaagaaagaatttgatggtactgaagagggagatatggctcctttggcactgtcaggggaacaaatcctctaagaagtagtagattttaagtatgaaaagacgcaaaaatttaacaatttaatgcaggcacatttaggaaagcataaacgattagagaagaattttcaagttttatagtaaatggtatcaacgatgaagagaagagtgagtatttttagaatgtgtcacaacaattggccctttagttatcattgatgaataacaaccaccaaatattctttattcccttgataatcgggtaaacactatttaattttttagtgctaattgttttctatattataacttgaaattatttttatactatcttacatacatccaaatataattttttagtgcacattggatgctagagatcattacgctaggggaaattattcatttagaccctatacgtgtccacaaagttccccaacaaattattgaaatgttagaaatgtaataatttaattactctttatgtaacaaattttttaatgaactaatgaattgaaatgttaatataatttttaaacagagcataccagattataggggcatcaaatgcgtatcttgggccgtggccaggaatttcactagcaaattgtccaagaaaacctgaaaaccaagaatgtagtttctatgttttgaaatatatgacttacatcgtcgcacgtgcaaagccaaaccattatatacaagatcaaaaagttgtaagttttaattattagttattgtaatgaccgctatagtattggaattagtaaaggcaattaacactaatttctaacatttttataactatttttgagtttatttatttgtgggccccattattagaaatgagcactagagttctaattgctcaattccggagattttactaaaatctaggggtattttattaattatatatgaaatatgctatttttgtaattttt

SEQ ID NO: 31463 - DNA, 1656 bp, Cannabis sativa
atatttttgtaaatagcccttacttattttattttaatggtgttgtcttgtgcagcaaatttcaaaggcattttgggtgaaatattgtgagtccttatcgaatcaagtatttcgtaatcttccatgtggatcaacagaggagacagagttggccaaaagtagtgatggaaaggtatgaattaacagaaaaagagttggaataaatttgcacaacacaattaattaatgctattattctttaagtaaactctgagttcaatgttatggtatttgattatcctaatcatttttaggagcataatgttgatattgatgactctaatgaaaattcagactctcgacccaacaagataagaaagactagtccttatggtaattctgaaggtatatattcatcatcatcattatcataactgaatgcaaatatggttacagagttaacttaattatgtaatttttgttttcagctgcaaataagacaaaatcagtatctgaagcaaatactgatcatgacaatcaaggcacaggcactaataataataataagaggccttcatttgaagcagccaccaatagtataagttttcttctggatgggctgcatttgcaagagacaactctcttcagaaaattgatgtttgcttctttgagctgatcaacaagaatcaacctgcagagatcaaagttaccatatttagacaaagtgaaagtagtatggctcaacaataaactcttcgtaattatatatatacaagttttaacaaccaaatcttctacttatacaatttaccccagctgaaggggttttattttttataattgacccttaatcaatatcaggactaaaatggttgctaattaatgttgatgttattagtgttttgttaatttgtaattaattctcttaagccatgcatgcctatttgatttctaaagttcactttaaaatatactttaaaccaacaagaagattacatcttaacaagtaatgatgatatgagtatttttattgtattgagatatgtaatgaggaaaatcaaaatcaattttcaatcctacaagcaaatcaatttcaactccttaaaatatggtcggatttagacttattattatctttagttatattaaaattttaattattgcctattttattttacatctatttatcatgtaagttcaatgtaagtccaatatatatggattgattgaataatggacaataaactttctcaatttttttttttaccagtcacatattgttgttatctttttattagaccatctccaatactaaataagtatcactaaaaattagttagtatttctaagcttaccaaagataacagggtttgagtgtagttggagataattgcacaatttacatatttgtcgaccatgaccatgtatataattacattgtaattgtgtaattaagagttattgaggagtttcaattacactctacgaatcttatgaccctatgaaaattgagtgtaattattataatttttttattttaaatattaacattaaaaaatattgttttcttatataattattaattattttgacaaataaaatattaagaatttatatatcattaacaacacataccacattatattttaaaacataatgtaattaatagacactgta

SEQ ID NO: 31464 - DNA, 1706 bp, Cannabis sativa
  modified_base (1669)..(1678): a, c, t, g, unknown or other
ttacttttactgatttctctactaaacaaactcagagcaaaaaaggatttttacttcaagtctgtcatgagattcccaccaaaggcatccgaacagcttcatctctggaaatcatttaggcttcaagcagtgagtaagttttcaatcttctcctcttttaactttgcatgtttaatttctgagttttcgtagaaaatgccattattcttgacttattgtagaagatagattgaaaatctaggctcaaaactttgtggtcttctctgtaatagtccgtatggcttcatagtttacgaaatttgcctttaatctcacattgttcgtctttcactttgctcattcgaagctttgtgaaatttaacccgaaactcaaaaatttcaaactttagggttttgacttgatttttatacattttttgtccttttaatctattgagtactcctggtcggcatatttgcctgtttattgtttgatatcccggccaaacactcatctcgtgtgttttcttttttaaattaaccgtggtgagtttttgggaggcaaacaccgaattgaccagggtttgcttcaacttctgtatgaggatcagcctcgtcttcgcgccagtccgtcgtcttcgagtgacggactttctaactcgagctttgaagattaggaggtgagtagtgatctttctcctactccataaatcgtagtgcaacaccattattactcctactagattgccagagagggatacggacgcttcatttgggaagtacaaaaaggttggaagcattatcttccgtccaactagagatacattgtccggtcaggtgttgctgatactcttcctattggtcgtccaagtttgggtaacttcggcatcccaattgttgtccctgttgttcaggttgcacgacatacacatcagtacccgtcttagaggaggatgatggcccgcacaaagcagatgatgcggaaggtcaacgcttctgatcctcatgtcgcccagcttgccacatttccaagtgtcgaacaagatctgcccgccatggaggagggagatcatgaggaggacattgaggtccaagagattaaggagcaggatgacatctgtcctggcagccgttccgaggctgaggaggaaggagtggctgagcctccaaactttggagggtataatgaggccaggaagtcgatgtttgtgaagggtaaagtcttggtcgaaggggaggactacgtcatcgaggagcttactcaagtagtttctcacaaaggcaatgtgccttaggtgccaaatgggtgagtcctccgtccaaaataagcgaggcacgcatgaaggccttagataaggctggatatttgggcggactggagtgttacattccttctttgaatcaccgggtgacaaactcgtagagagggatgtgtgcttggtcgggtgctcacacaaaacaaggggcaatggtgccttgcacccgtaattgaagagggtggcagactattttcacctttgtccgacccagttcactcccaagggcattaagtacctatctaccctcttcgtcctctacgccattcaaggatggggtatgccttcccaacacgaggtcaattagttctttcacttgaagtctacccctaagcaaagcaggttggggtacttctgttggaatttattttacnnnnnnnnnngatctactcacaagtatgttggttaaca

SEQ ID NO: 31465 - DNA, 2214 bp, Cannabis sativa
ccaacttctatgaggaagttggtctatcccttgatgtcctgtttgagtgtcgggatccctgttggctgagtgacttgaccttcttgttggtgagctgtgttgtcatatggcactaattttgtccatgtaagcaatggcacatcaagtgggcaaaaattaagataacaactttttttttcatatatttttttatatcatgtataattttttctaataaaatttatataattttttttatcataatatctaaaatatatttatttgataagtgtattttttaagaatatgcaaagaaagattatttttttcaatttaagatatatattttacatgtaaaaaaatatatattagggggcttttacaatgcacccctaaaataggtgtattgatgcacctctatttgtttcaacattcagaagaattatttagtctatttttttatagtcgtgtatgttatagttatataagatattttgcaaacttttgagaaatttaaaataatttacaatagaaaccaatgttcaaatagtttatttcacacgtgtataaaataaaaaagtcacgcgtgaaacagacagtttaaccctatttttagcgtgttagatttttctgaattacttaacatcttctaggatgtcgtaaataactatgatgtacacgatcataaaaatattaaactagaaaagtctctcgaatgtccaaatagataggagtgcattggtacttcttttaggaggtgtattgtagaattttctatattttatataaaataaaattattaaaatagagtaactttatttgaaccccattaagtacgccctgatattaaaaaagaataagttgaaaataatttttaaaaattcctctaaatatttttgttttaaaaaaagttcacattatgttgtgttagtttcaatacttattttatatttatatttttgtttaaaattatgtatatatttttattttttttctaataaaatttcatataattattttttttaatttttttatcataatatttataatataatttttttttaatatgtatattttttaagaatataaattagaagaatttttttttttaaaaaataatgtaaattaaagatatatattttatgaaaaacaaaaattgttaaaatactatgtttttataaattttttaaatgtaaatatatgtaccctgaaaactaataaatacaaatactctattttaatatttttgttttacataaaatatatatctttaatatattagttttgatccccaatttatattcttaaatagtatataaaacaaaagtaaaatatattttaaatattataacaaaaaaaaattatgtgaaattttatcaaaaaaaaaattatatatgattttctttaaaaataaatatgaaaatataatcaaaataagtattgaaattaaagtaaaataatttgagaagaaaattaaaaaaaattaacagtaatttttaaaattatattaaacttaatttttgtaaggattaaggtgtacttatcttgtggttatagacatagtttagtgattataaatttttttctcggagaggttccaagtttgaatcctccttctcaatgtcagaaaaaatgaatttttttacttttacactttaaaacattttttttctttgtatttttacggaaattcatataaaaactcacatagcaactaacggggtaacttaaatcccatttaaaatccacatataaactatcggagcaacctaaactataaattaaaaaaatatataaaaatagtatataacataggaaaattctataatgcaccccttaaaagaaatataccgatatatctctatccgttttagtattcgaaataattttctagtcaaattttttctcacgatcatgtaaattatatttatttaagtcatcctgcaaaattttaagaaattcgaaaatatttaacacgttgaaaattacgttaaagcagtatgttgtatgcgtgactattttattgtaaaataaactgtttgaacattgttatatgaaaaaaatttggctaaaaaaattcttctgaaagccaaaacaattaaaagttgtatgagtacataacttttaaaaggtgcattataaaagggaaatttgacaatatatgcttaaatatagcatatattgttttaatatactatgtaaaaaaaaattaaaaaaatactctccaattaatta

SEQ ID NO: 31466 - DNA, 2456 bp, Cannabis sativa
  modified_base (48)..(58): a, c, t, g, unknown or other
ttgacttcaccgacctcaacaaggcgtgccccaaagactgttttccannnnnnnnnnncgatcagctcgtcgatgcaatagctgggcacaagattctttgctttatggaggcatattaggggtataatcaaatcaaaatgcatccaacagaccaagaacatacaagtttccaaacagatatgggtctatactgttataaggtcatgccatttggtctaaagaacgctagagctacctaccaaagattggtacacaaaatgttcaaagaccagatcagacgaaatatggaagtatacgtggatgacatgctcatcaaatccaggaaggcagggggcatatagatgacatggatgaatgcttcaaagtcctcaaaaaatactacatgaaactcaatccctcaaagtgctcctttggagtcagctcaggtaagtttcttggttttattgtcaatgcttgaggtattgaagccaatccagagaaaattcaagccctcctggatatgaaatcgcctacaaaaaccaacgaagtccaaagcttaactagtcggatagccgcactcagtagatttgtttcaaagtcaactgacaagtgtgttcctttttccaacatccagcgagtaaataagaaatttgaatggatagaggagtgcaaaaatgcctttcaagagctaaaaagacaacttgcaaaacctcctgtactctcaaaacatgttgtaagcaccgtgctgatcaggaaagaaaacaatgtccagcatccggtctactacatcagaaaaatacttgttgaagctgaaggacagtatctgctgatagaaaagcttacttgctgactaatcttagcaacaaggaagctaaggccttactttcaagctcaacctgttcgggtatacactaaccaaccatcatgccaaatattataaaaacctgacgcctctggacggttactcaaatggatagtggaattgggtcaatatgaaataatctttcaaccccaaacaacagtcaaaggacaggctttagcagactttgtagttgaatgtacgggcaaagaagaaatcatttcaaaagacaactcagagccagtacaagaacctcagccgagcaacaatgaagacaaaccaacctggaaattacacgtagatgggtcggctacagatcaactatctggtgcagggattgccctcgtcacacctggggggaaacacttgcatggggcggtcaaatttgggtttagagcctccaacaatgaggcaaaatacgaagtcctcattgtcggtctaaaacttgctcgggaactacatgctgaacacattgagatctgcagtgactcacagttggtagtaaatcaggtgtctagagagtatgaggcctgggggagaaaatgatagcctacttatgcaaaatacatgacatgctcgcacaatttaagagctacgttattaggaaaattccaagagaagaaaatacaactgttgatgcgttggcttgacttgcaagcagcaacatagctgataaggctaatctaatcccaattcaattccttaaagaacccagcatcacctgcttggaagaaattgaaatgattgacgcgtctccgaactggatgacaccaatagcagcctacctcaactctggagaacttccaaataatagaaatgaagctcggaagatgaggagaaaggttgcatggtacatcatcgtagaaggagtcatgtatagaagagggttctctatgctactactcagatgtgttacacaagaagaagctgcacaacttttgtttgaggtacacgatggattctgtggtaaccacgcagctgggcaaagcctatgaaagaaaatgctaaggcaaggatatttatggccgactatgattgaagattcaaaagcctatgttaagaaatgtgataaatgccaaagattttctaagataccccatgcaccgcccaacaaactaactcagatgcaaagtccttggccttttgctatttggggaattgatctaatcaaataattgcctaaaggtaaagggggagtacagtacgcagtggttgtagtggattattttactaaatggatggaagccgagccattgacaacaatcacatctaagaaagtgctagactttttggttaaaaacataatatgccagttcgaactcccgtacaagatagtctcagacaatggcacacagtttgacagtcaattgttcactgagttttgtgcaaaccatggaatcataaagagtttctttacagtagcacacccacaggtaaatggtcaagtcgaagcagtcaacaagacacttaaagatactttaaagaaacgacttgaagatgctaaggggaattggtcggaagaacttctagaggtactatggtcttaccgcacaatagagaaaatagcgaccggacagactccatttgccatggcatatggttatgaagctatgctgcc

SEQ ID NO: 31467 - DNA, 1250 bp, Cannabis sativa
tgaaaccagacgaaagaggaatcgcgaaaccccaccagacgaagaagatattgtgaaactagaatacacccaaattgtgaaacctcaaacccacatccgaaatcgtaaaaaaaagtatttgtctaaactttttttttattttaattgggttttttgttgtttgtgcttcattgtaaagaaatttatttggtttatgttcaatttttatgatttcatttgaattttattgacgcccttcgagttctgagtttttgaacaattagcgacatatcgcgacattgttcgcgacgttttgcgatttcatcttaaaatgttgttagttttttctatgggtgatgttttcacaacatgttagttgtttagcgatgtatcgcgatatatggggcgaaaattcctgaaatattgcagaatagtacctgggattctctttcacgatgattagggacatattgcaatatattttacgatattcattttattgattttaaacaaaaattcttacaattttgcatatgactcctgaacttaaacttctagtttgtcaacatttcacaagacgtcttacctatcgaggtacagataggtttagatatatcaaggagtttacgaagcttgatttgattgatatagttaaggctagccctttccggacacttctgggaagctggagagttgactttctctggcgctttggtccatagtctcctcttacagaaaatgaaagtagatactgaaaaggaacatgaggtttggtttcatgtagggaagaatgacatgagattcggacggatagagtttggacttattaccgcttacctatgggtagtgcccctacagaggaggaaatagaagctaagttcaacgaccatctagttccgacatattttgaagggaagagttccgtgcagttggattcacttattctccaacttaagaggtgcgaagtaaaaaatattgcctacaaacttggactgatcgctttcattgaaggggtattagtatcaaaagagggcaatgtccaagtttagcctggcatgttaaaatttgttaacaatcttgaattcttctaagttatccgtgaggcgagcgtgcttttcgtaagttgatggagacattgaataaggatatgtaacattacaagtataatgttaacaagaagaaggggaagaagattgctcaggaggcaaagtacactgttagtggctatgtacctgcctttcagtacggggcatacgaagccattgagaaag

SEQ ID NO: 31468 - DNA, 2341 bp, Cannabis sativa
ccagtagtgcttgaagaaaagaatggacatcccatgcggacccggggccttgtggttagtcatagcaaacagagtcctatggatttcttcatgagtagggcatttcataatctctgtctcatcagcagcagatattctgtccctaatgagatcatcaaaaattagcttctgaccattatccaatctggaaaaaattccttggaaaaactccatgaattccttgccaatcaagaccagactggtaatccaaacattatctttatttaagatacattcaatagcattccatctccctctgattgcagccaataggaagaaattttttgaacatctatccccatcctttagccaagaaaccctggcccgttgcttctagtaaagctctttttctgaacataagcctcattaagagcccgtcaaatattgcactcagtgccccagtctctagatcccactggcatgccctggatgaggttgaatttactttccagctcttttattaagctgtcaactttaccaaacttggttctactccaatgcaagagaacgacccgagttgcaccaattttctggaaaactttggcgggagcccaagaataacaaattgagttccaggcgctatcaaacactagcttgctcctatcatcccgggtccaactttcttcaaacttaaagcttcatttgaattattcctccagaccatcaaaaagaagacacagaggcctatggtgagagttgcagatctgagaggaacacagaacagtctttgggaacaggttaagccacactccattgattaaacctttatcaagagctgacttgacatgattctccctagatctatgattatcccatgtaagcttatctccatcaataggcatgttaatgagcccccttgagtataccaaatttatgatgaacgggataaataggtccctatccttacagccaactctttccgattcattcaaaataaaatttgtatctcccagaatgagccacggaccaccaaacctatccccaagcttcatgaacttagtccaaaaagatttcttagcatagcaatacggagggccatacacacaagacagcaaccaagagtcggggggtccgaatagacaagaccagtaatatggttttgggagtaggcaatacattcaaactcaaaccctaacttccaagctaaaatgattcccctcacattaccaacagttggaaaatggatatgaaaataaaattaaagtgaggagagtgtacgtacaagaggagtggcattaactttgagctcggtcaggaaaaaaatatccggggaacgagaccgaatcagggacttcaactcacgaactgtagaggtctgccctaaccctctatagtttcaagcaatccctctcatgactcctgtggaggagataaaaaattctccaccataggggtatgagagtaagccgaagcaagagagctagcatcatcaatcagaaaagtgccaaccatctgtcgattcaagatagcatctttaccattgggacttccggcactcgggttaacatagcatccaaaggagttcgagttatcattagaggattcttccaacgccactttggaaataagatcctggctacttttgtcccacggaaagtcaagaacaacgtcggggtgttggcgaaggagcttgagaggtctcgagcaaagagtagcagaagcattatcgaattttcttttcttaaacaaagtgattctctcattaatattaaatatagaattaatatgttctttactccattaatattaaatataaaattaacacacttatttataaacatgttatcgaaatttgcttatataatattgagtgtttttataatgtacccctaaaaaatatgtattgatgtatcttttactgtatctacatctaagataattttttagtctaatttttttttcatgttaacataaattatagttatttaaaacatatagtaaaattcaaaaaattcaaaataatttataatatagaaaatagtattcaaacagttttaaacgcatataaaataaaatagttacgtgtataacatactatttaaatcttattttctgtgtgttaaattttttcaaatttctcaaagttttactagatgttttaaacaactataacatataccgtaaaaaaatagactaaaaaaaattctattatatgttaaaacagataatactgcatcggtgcactcctgttaaagaatccaccataaaatattgagtaaataccattttggaccttatgttttgcaaaagttacagattagaccctgtgttttgttaaatgataaaatggatcttgtatttt

SEQ ID NO: 31469 - DNA, 2537 bp, Cannabis sativa
ggaactaccacgaggttggcgagctaagttggatattgtacctcctcaatggtatcgttttctagcatttttgcgacttcatcatttactgccttgtttcgatcgtcccccatttttctcctcttctgcttgaccgggatgtaattcgggtttacattcaatctgtgagtaattacggccggatttatcctaggcatgtccgagtgttcccacgcaaatacttggaaatattcttttaataatcctatgatttgattcttccggtctccggtaagtcccatgccgatataggttgtttttgttgggtccgtcgggtgtatgggtacttcctgcaactcctccaccgcgggtgattgttctttcgccggggtcgaggagttgattaattgctataacttgtttttactcctcaaagatgaggtgtaacactcgcgggcccccaattggtcccctcgaatctcccttacctcacccttgtaggggaacttgattacttgatggtaggatgacgcgaccgccttcattgcatggatccatggtctgccaaggatggcgttgtaggccgacgggcaatccacaattagaaactttactgatttgttgactctgttcgcgtagacgggtagttggacgaaacttcgagcgacagcgctttcccccaagaatcctactagtgtgacctaagtgtcctgggcttttaaatcctcgatttccatttctttcaaaactccggcaaataaaatgttggctgagcttccagtgtcgacgagcatgcttttcattcgaacatgggctacgtccagagtgatgacaagagcgtcatcgtgggggtgttgcaatttggaggcttccccttggttgaatgataagtgtacgtcgaggccatcgctgtcgattaccgccatcgcccttacagactggacccgacgggcgtgtgccattgaagctcgtactgaattcctgcttaggtctgaccctcccaagatcacactcacggttttcttaatgtacggtggaggagattgatcttggcctttgccacttccccgctggatgtggagcgtggcatccgaagcgaggcagtcctggaagaatccttctttcaccagacggttgcactcgtaagttgcgtgaccatgttctccatgaaaggtgcaataccgccctttgtccctcttatcggggtcagtggtcattctcgggggccacttcgtttccttcaatccccgcagtcgtcttatcaactcagttaaagtaatggtcatccatggtagctcctcttctccccgttgagcgtgtggctgccccggctcgcccatactcaccataactgcccctcgggtgtttctttcgttggctgagcggttgtcagtcctattatgaggccgtgcagctggtgtccggttttttggttcgaagaggaaagtatctcccaacgacgaggtttcgcgcgacacctcctcactgtgtcgtttttcttctacttccaaggccatgtatcctcttgccatggttagggcccttgtgagggacaggccaggttccactatcatcaccttctttaattctgaaccatgtatcaatccttgcattaacgctttcgttgccactgaatcggtgcatttcacgatactgacgtattcttcactaaatttttctagaggttcgtcgaggcgctggtgtattagcattaggtccgtatccactttaacagtctgcacacttatcgtaaagtttgtctgaaatctcctgatgagatcctggtacgaatttactgtaccggatggtaagttgtggaaccagcgtaaagcgggtcctcttaacccttgcgtaaaggtcttgcatttgattgcttccaagtcctctaacgggacggagacggttaacatttttgctcaaactggcatacgtattccaaggggtctcccatcctgctatactctggtaatttaggggctacataacgctgaggatgtggttcccaaagggtgaaagggttgatccctccattcgagcccattcgctgtgtactcccatttggctttttgcctctaacgctaataatttgttccacatcatttcctgtaacctctggtctctttactctccattgatggacttccaaaaactgttggttccatggttcgctttcggggtgttgtgcggagcgcctctacgtctgttatctcttctacctcgtctctagcccttctgggctgatctcgatggtgaattggggcctcttgaattgccaagtttcctttttctccagtttcttcatgcatgcatcggggatggttgcctgagtggtcgttattgttagcgtggttctctttctcggtccctccttccacttggcgattaccagtttcttccgtatgcgggggtcgttggtacccttcgaggacaactctcatctgtttttttcgctctcaagcctttgaatatgttccttttaaagggcgatttccataccctgagttgtcattctgccttcttgttgtttcagcctttcgaggatctctcgccatggcggg

SEQ ID NO: 31470 - DNA, 4178 bp, Cannabis sativa
tgcatgtaattacgagtttatttaaccaacttaagttagttataactaaatataataattttaaatatttaaccattaattctaaattacggatacacaatcctatattttatagtggaatagccgtagattagtcttacataagagaactaagttatatttaagtttaattatttacggtaacattagttaagctatatttttagaactttcgtaagtagctggccgttaagtgtcaagtcattattcacattttaatttcttattggtatatttaaatgaatttttaaataaaaaataaaaatttaataacattcaccaatcaaggactgctatgtagctattgacttaacacttaacggttaggtaccaacataagttctaaaaatataacttaagtattattacaatcgtttttttttttaaatatattattacgataaaaaattaaatttaagtatttatatgtagttgatagttaaatttgaatatttatggcgcaattaatcttattttttttttttaaaaaaaaaagaataatttgttgcataaatacttaattttaactcctgatggtagataaatacctaattttaaattttgacgataataatacctaaattatatttctcgaacttctgtaagtacttgaccaagtaaatgatcacgtgacagttcgtaatagattcaaatcattaaatttttatttttaatttaaatataccaataaaaaaatgatacgtgaataattaatttacacttaacaactaaatactaacagaagttacggaaatataacttaagtattattaccttcaaaaattaaacttaaatatttatctgtaaccgagagttaaacttaaataattatgctgcaaattactcaaaaaagaacgattttggtacatttggagagagtaaaattttttgcggctccactatctcaactatcattacactagcacttaaccccccaagctcaaattttggtggtaaaatctttcaaattactaaactgttagcaaatagaatttgaaataataaaattaagtgtactaatataaacatgtcacacaagagtctacgcataaacagtccatagcaacagttaattggatgatatcttaaatttgctaatagttcggtaatttaaaagattttaccactaaaatttaaatttaaaaaattaaataaaaatgaaataatagttaagagaatttaactgcaaaaaaacacgtttgtggagcatgtgtatcatgtggtggtaaatagtaaatagtaaatagtaaatagtaaaaagtaagggaagcggcgagcgtagctgcattgcatatcttcggccgccgtacaatgacagctgtctcctgctaatacccagctcatatcacaccattttccccttctcatttttatttttaatttatttatttatttatttattgcccttgctccttcttttgtctcattattcacactccatccttctatttttatttatttattattattattgtttgtttgacattgattcaaattttgatattattatgtctttttggctaacttttgtgtttaatgttgttggattagggtagatacaagtgtctttgttgtaacacaacatcatatgacacttgtacaattctcatctttttctctatgtatgttttttgactcctatttcccataccatattctctataatatatataaataaataaattaaaagaattaaattgggtaattacaaaataaataaaatgccaacaatcaactacttttggatgtgaattctgaaaataataccgatgactcaattaaagttggttgaggtttaaaattcctataaccgataaagttttcaaaattgtaaaaacaaaaatagaaaaaaaaaatgggaaaaaaatttacaccaaatgatcccattcttatgggcaagcattagcaaaagagataattgaaaacaataggctaatcatgccgtttacacatttgaacgattataacaaaagataaaattaacctccaacaaagattgacaactcaaaaaggtaaaatgtgtgagtaaaaattttcggacaacaaatataaatttagattacaatctctcttgctaaaattaatcttgacgttaaatttttatacatttcttatgagcaacaatgcgttagaatcttgaaaataaatagtgtcgcgcttaaaattgatgggcctaaaataaattttgttttatttgcttaggtaaaggttataggtaagtgggcttgggcctaattcataaaatttaacaaacaaattttttctctacaaattacataagattttttgaccctgaatttgagtgggtcataaacacgaacttaactcatcttaatctagaatccggttgaagattgagttttttttttcatgttgatgtctaagttgaatgctaacaataatggagattgatttcatttccaaatgagagatattgtatgtatttatagaataagagaaatatgcttaagagtatatgctcaaaagtattagtaatgtctaacattatttaaagtattatattgttattagtataattaaatatttgagtcctacataatttaatgtaataacttttatgaaatattactaattattctttaggcatcaaatcgcattaatgttgagcaccactaaaacctaatagtaatgctagtagaaaaataagtgaaagaaggggttagaagagcttactctcatttgtccatatgtcattcttatcatttctatttcttacttaattagaactgatatatttttctttttttgagtcgagtttttctagctcatttttaataaaatgtgttctcaaagtattttcaacatcaatattcctctaatatttactataactatatacatgcattaattatataaaatgtaatttgatgaagataaatgaatatttaatttatatattcgtaaaatatgaaaaatgaaaaaaatttcccagttaagggaaggagatgccaaatgccattatttcaacattataagggaaaacaaaataattgacttaattcaaaacgaccaatgtgtattattggtccaaatttactttataattctcctaaaaagtaagtttactttataataattaaaaaaaatctattaattaattcatataattatataaataatttgtgtagtgaaatatttgagaaaaaaatgtacaagtaatagtgttttactagttatgacaatgaaagaaaagtctttacaattataatttaatttcacatatatatatatttatattaaagtttgaaattgttggactacaattaaatatgaaatttgatttatatttatattaattgaataatagattgatgtatgaatctaattaaaattgtattaaaatcttaattttgtaacacgattattaaatgagtaatatttatgtcagactgtacatttttaacacaaaattttacccttaagataaactaatattacaaaccttatttttgtattagtaaaattaagcttcatgtattaattaatatagccacataaatttgttatagtatttaaggtagtgaattggtggaaattaatggattagtgataatgagaatgatagggtgaaaatgaggcatcacaaaagcactaagaaaaggcatgagataatagatatgccactttcatgaatattttactaagatttgggggacctttacttttcaatttcatctacatctatgactagtataagaaccaattatattgtaacatggaagaaagaaagaagcaaatggtaaaaattgagtggtgccttttttgtcccttataacaaaaaaaaaagtaatatataaatataatattatatatgtgacatatgtgagatgatgaacctatgtcacatatttcaatctcaacttttgaatattaccatttaaaaacaaaaacatgatttgacccaataattaaagataaattaacaaaatatatgctatagcctatagtgaattttgttgcattactaaatatctatataaagccaatatattctttttttttccatcgatttacatggtgaaaaataatttttgaatttacttggttagtaaaaaaagtttattaaggaatttttttttttaaaaaaagagaatatatatatattttaaaaaaaaact

SEQ ID NO: 31471 - DNA, 1490 bp, Cannabis sativa
  modified_base (636)..(643): a, c, t, g, unknown or other
  modified_base (1462)..(1464): a, c, t, g, unknown or other
ggcacaggccactttgtcattgccggtgacgcccatgaaattcaaaattcttgtaataacagttagccactactcgactttcattacgaggggacctcccagaaagacgagaggtgcctgcttgtggaacctttcatatagtggttccattcgattcactacaacaactgtcctgcttgcacagtaggggcaggagccacctgcatttctgggcaggcattgtaagagcaccttgttgtctcaggcatctaatttcttcatcttgctcattaattgtggcttgcatttctgcaaacctattttcccaatcctgggcaacctacggtgggttaacatcaccctgaacacgtgccctgcctctagggcctctgcctcggccacgaacatttgggggaatctaaactccttgactgccactagatccgaccgagttaccttgactcctggtatttttcctagcatccatactactagagcagcctacataaccaagagctagtctggtcagatcacaatcaagaaacttactaattgtcgcttactttggaaatttaaaacatgcgcctattcagctatcaggctacgaacatgcttcctatcaggcttttcttaaaacatactattaaaataaactannnnnnnnataaaggcttactgaaccgtgagatgagatacttgctaatgatgattgtacatgtcgtgacaatctttagaatacaacttggtggctctgataccaaattgtaataccctactagtttaggcgtgttaacgtgatttttaacttaactaagtagctccttgctaatcaacaactttattgaaaatcatgattaataaaaattttaattacttaactacttataaacataaaaataaaatatgcatattatgttgggatcccgtttacaaaagtattaacaaatgttttaatgtgcatatacaaaagtttgtcgcctaacgactatacaaaaaagcactgatgtcccaaagatcgtatgctccaggcctaaccgctaatggatgagtgaaaatagatattgtaaggctaaaattgaagtgtagttgaaatcagacgtcgtggttaagtacaatcaatatttctaaactttaaacctaggatttctatagttatcctaaaacagttcaagaacagcaagaaacccaaaaaaattagtcatgcaaatatgtaaaggacagaaatgaagaactgactcactggtctgaagcttcttgttctgcttggttgatatcgccaagagttttcttgagaatccttcgaaaaatttgacagaaaaatttgcttgaaatttttttgctctggcttttctggagttaaaatggctaaaaaggttgttaaaagtccctaatcatatttataagaaacctggggagagaagtaatcatttcaaaattcaaactcctcaaagttcccccaaaattatgttgggttttatgcccnnnataaaactctttacaatctgattagt

SEQ ID NO: 31472 - DNA, 6236 bp, Cannabis sativa
tactttttcactcagaaggatttaaatatgaggcaacgacgatggttagaactggtcaaagattatgactgcgagtttccataatcggtaagagcatcctcaactttgttgtcaaaaacattgtctgcaggtttggaattccaataaagatagtatccgacaatagaactcagttcgatgggatcagagttctgcgagaggaacaatataattaaaagcttctcgtcagtatccaggcctcaggcgaatggacaagtggaagctattaacaagaccttgaaggatactatcaataagaaattagatgctgccaagggtagatgggtcgacgaactacctcaagtaccaagtactttgggctctttgggctcatagggctcatagaacgaatagaacgactgagaaaattgcaacgggacatactccattcgcgctagcatttggctcagaggcaatgttgcctgtagaagtaaatatctcagctcacagaagagagttttgtaatcaagaagaaaaccaagaacttctaaaattatccttggttctacttgatgaaaatgtactgagtcacagattactaatgcagcataccaacaccaagtaataagatacttcaacaaaagagtgaaaaagaggcttttcaacgttggagacttggtgctaaggcgagtgtttgcaaatatgagagacgcatctgcagaagtattcaacccaaactgggagggtccttatgtgatcaaagcaatagtaggaatcggggtttacaaattggctcagctgaatggctcgctgataaagaactacgagaacgtggaacatttgcgaccctactaccagtaaattgatgttgtaactcatatttctgatgtaatattttgaacttcagattttaataaagttaatcattttttcaagtaattacaaagtgttgttctttaaaattacttgaggggcatatgtgtatgattaaccaaaatctatctggaaatacatgatatattgcaaacccaccactttaaaaattttcaaaattttttaaagttttttttttcgattgaacctttttgacgagaaaggaaaatcaaaaattgtgaatgacgtttgattaaacctttctgacgagaaaggaaaatcaaaatttgtaaaggagatataactcataagttacatgaaaaactgaatactaacggctcgcattgtataggaaagtattaaacaagacaccaagatgtcttggaaaatacttaaacctaatatatgaatagacggcctaattattcatataagcaatcaaaaatataaaaagtgataatcattaacagtgtattaaagttttcttaaaaacagattataactgtttatgcgaagcagaatcgataactactcgtaaatctaaagcagaacataatataattactcgcacacatagtagattgctgactacttaaataataccaaaggaaatcacgaacaatggaaaggccttgagtattttaaatttgatcaaaatatgattgtttaagttgtgaatgaaaacgcacgcaaacaaatatatattaagttcaaatgtaaaagtacgaagcattcaagaaagataaaataaaagcaaagttggccatcgaaccttgtaaatatgtctttacaaaagtgccacaagaggcaaactactatctcggccttagggccatttgcctaaataaaataaaaataaataaaaacaaagcctacatagtaggagacttggacaatttttcttctgctgccacctcaacatcttcttcctccttcctagtcttcttgtagaaggccaggatttcctcctcaaattctaacaagaaactcgtatccatcttcgggttttccatccaagcttggtaagtggtacggaggccaacggtgttgcatcgttcaatggtttcagcctctttcccatcaactgttaccttagctgcatcaagttccccttggaacttctcgcatgcatcggtcttgtcctttgcctccttcttggcagcttcaagattcttcgacatcctctcggcatctttagtaaggtgagtaatttccagttgggcatcattccattacttggccataacctcgcgctggcctatcaagttatggacctcacccttcagatacttgatcttatccatgcctcaccgctgggcggctaaagaaatgaaagatgtctggaccaacaaacaaaaatacataagtattttgaaggatagaagaaaaaatatgtgagcaaataaaggaaaggaactttactgagagactgtgagataaactccttgtgagcatttcccctagatccccatgattgattaaatcccattcatgggggaggaaagacttgaagtgacgctagcatattgcgccaaactctgcagtatactctgagccagtttttttagcctcgacaggcaaagttttgagggcttcgctcgaggaggcagaagattaggtcgctttgggggtaggctcgttggtacttgcggaggtcagaggagggattggatcctaggtctctgtttcagggaccttgagattagcattctgagaggctcgcttcttgttagccttagtcttcttgggcctcttttggggctccgccttgacgttcgatggggcctccgagatggctagcctcttctttcccatcctgtggacgagaccctcgaaattcatttcttcaagacaagataaagtgttagcatatattgaaaaacaagaaaaggggagattggggcataatttcctgcctaaggaatttaccataatcagtagaagatgacgaagaaggactataatatccactaaaatccctacaacctatgatcctgaatttaacatagggattaattggttttaaatctcagctcatgtctaaatgacttgccctatctgttatggttccgtatagctcggccatcccataatacgaatcaacacagttaatttggacgtggaacctgagataccaactatcaaacttatgtgtaatatgatctataaggaggggattccaggtgcaaaagttatagcggatatcttgatatgaaactagagtattacgcttggccctaagaattatgggtgaccaaccacattgattacctcgggatgctccttcttcggcttctcgaggggcggtattctggaggtattgtccccgagcaacacgatcttgagctctctcctcgtctgggacagggacctgctgccaagaaatatacttgggatatttataatcacaagtaaactccttctcagttaggagatcaacagacctcaggttgacctcattcagaagaaagttgcatgacctaagaccgtatgggagggtcaacaagagcctgtgtcgctcgaccatctcaagagtaggggcaggtctttttgagacggctgtcaaaaataaagcaaagttacaattaggtaaacccgaataaaaggcatggattaatttaaccaagtcttgtgaaaataatcacttacgtataatctgaaagtggttgtgccgatgggggagagactggtcgtccagaaaaattcatccttgaaggaagttttatttggaaaatccacaatgatcttgcgattgcctgtgtgagtcccaagatagtaaaaactcttgttgcattcttcctccctggaacagccttaacagagtagagatactctattttccaagggagtggggcactcccaattcaagattttgtataaaaccctcaaacttgtgaggattctatatgtaatgggattcaattggaatggggcaagcccgaggtggtttagaaagtccttgaagtagtatcgtagggggattattactccagccctgatgtgctcgaggctctaagcgtctattctagtcaagccactagtaatggtctcaccactggcgccctcggatgtttcgcttgtaagtcgcacttgaggatagcaactaaactcaccggcacgtaccgatctaacccaacagtctctcctatattcgaccccacaagtcctcaaggtgttacctacatagtctctgatggctcgcacctttgactctattagctcagccttgaaggtgacattagggtcttaggaagtctttgatttacgtggcttggaagacataattttaaagtccaagtcacctggttcaaaagcaattgtgacattgggtaaaaacaaatgcttagacaaaggaaatgaagacacattgagaggttcaagccaagcagcatctcacaagaaacggcgtctgccttctgtaatttcttgcaagaagcgtctatggcaagtagcaatgtcatcatggtgggttttcagtaagtgctccctaatttttgcatcatttatctccaatttttatttggcttctgaaattttgggtttgtatgggatggcaagttctgtaggatactctatttctaaatcttctggacgataaaattctgaaccagattgggacactgctggaaggagaaagcaatcccaatccctgaaagaaatttatcaaactagaagttggtaaattggtgaatctcaaaaacctacgttctgtctaaaccctaacatttacccagatacaatttggccctaaaattgctaaaatctaatgaggtgtcaaaggtgctaactaagaaattagtaatcaaacccggaaatacaacataaaaaatatgcaagaaaataaggaaaaaagtcacttactgtttggagttggtttctgggacgatgagcggctctgcaatctacgaaacaataaacgacatgaagatcccttgaaatgcttgaagttaaaagtcaaatcagatgaaactcgcaggaagaatgttaatgacaaagatggcatgcaaggttttgggaaaatctgggaatggttttttggcagaaaagcttgaaattttttagagtttctgaaatgacaaaagtaatgcaaaggcggttccttttctcattttatactcttgggttaatctctattagatcagggaaacaattgatccaacgggtagaatttgaaagagaagtggaaaagatggtcactaaatgttgatgtaccttgaaaccataaaactgccaaaattaaaggacatacattttttcaaaatggattataacaaataccctctgtaatcatttaaaaaccacttttcattaaaaagaactttttaaggggcaaatgttatacccgaaattcagctggcacttcagaaggggacacgtgtcaacctaagagaatgtgaatcaacgaatataataattattatattcaaagatatgaaaattgaataactaattaaatgaaaaactaatagtgtatatctataactcgttggtaataaagtcttaagcgagacacagatgtaccatctattaattcacatattgacgagaaaccatttcgtatatgaagacgcaatcataaggatgatgacatcagtaatacaaaacgaggccccaacctcgctacgtatgaagagatgtaaacaagacatgataactgttaaaacacttagcttataacatacattatacaaactaaacataacagttgaataaacttgaacaacaaatagcgaggcatccatctcgctgtaataaggcaaactcatggtaccttcactaataagcttcagatatctttcaatgagattcactgttccgtcgagtccgctctctaagatagaagctgacattcaaatgatgtttactgctaatgtaaagaccagttaacttaaatttggaaaatagcagataaatagggtttaattatgaaacttgcacattagtatgaattatcagtttacggagatttacttgaattcagaatgcattttatatgtcatctatggaatttcatatttttgcatgttttgtgcccagcaacattagaacgcgacgtttggctattagaatcacatcttagtatttttagtatagcggggcaacatagttagacattgggaatgttgagaatagtcgagattttagaatttgactaattacccctaagtaattttatgactttttggtgtaggcaagggcattatggtctttttgcctttttggatttttgtcctttagtgtgggattaagtgattagttaatctgattgttatggctgatattatttaataaaaccttttcttttattcatttattttacacaaaaataataaattaagaaaaaagactttgtctctctcttttcaactctctctctctctctc

SEQ ID NO: 31473 - DNA, 1865 bp, Cannabis sativa
agctcgtcaaatgtatttttaggagaaccaaaataaaaaaataaccacaaaataaccatagagaaggaagaagaaatgtattttataccctctattttctacacccacggatagaaccaccacatcaccacgagaacacccataaaataatcattaattccagcaagatagagcaagaacaatgaaattgatgttaaaaaaataaattatggaaagcaactgtaaaacaacactaaaacaacaccaaaaataaaaaaaactaaagaataaacacagtatacaacagtatgaaatttataaaaatacacagtaaaaaagtaaaaaataccgcctgacagtatttttgcaaaaaaaaaatgacaaaagttagtataccatgtaaaattctctaagaaaaatacatatacaaaagggccaatttttttcaggaccggccttgggtccgattttggattcggtggaggtaggatgagttcatgtcatggtagggtgtagaatattaatttttatattaaaaatatctaaaaataattttaaaaaacttaagccaaacactattaaattttttatagtgacaaaaaattatttcctattcttacttttatacaattctaaaaattaaaaacatagccaaacaacctctaatttcctctaaatgttttagtaaaaattttcacttcaaattatttgtttttttctttgttttatcacgtaaagtttcacagatcatgaaaaatatatttaaagaaacatgtggctgtataaatttgagtaaatatgtgatttgtcaaattattagtagaacagacataaaatatggagaatttttatttttttaaaaaatgttagtaatgaaaacgaaaaaatactgtgtccaatacgaatacagacatactagtatttcataatttatcaggaattttccataaacatttctgacaccatcccaagagttgctaaggattttttctttaggggccaagagttgttaagtttaatgctcttggaaatgtgatatgccaataaaaaaaaatacagatttgggaatcttaaactagagaagtgtatattgtattctttggtaaaactagatttgactgaatagttaactggttgggccacacacaccaccacaaattacagactttagaacatctctaatagagtgcaaaaaaaaaaaaaaaaaaaaatagtgtattgctatattttagcacacctaaaaaaattatactctaatagtgttctaaaaaatgtgctaaatttagcacttgttaaaagttgtgccacaagatatagctgtgtcaaatttaactcacaataaatattacttttttatttactataatactactaattattgtgattaattgacttttattaaactttatttaccatattatcattatttaaataataaaagaataaaaaataattaattttgtatattctcaataaaatatgaaatgatcatcaatataatcaattgtttttcccttatcttacatttttttcattggaacacaattgtaaatagtggactaaatatagcacaaacttattttttgtgccaaacacaaattttagatcttccattaaagatggtcttataatcggtctaaattgataaaataacaagagcattgttattgggcaccagtagtacccagcacctttcataggtgttagcttatgattgattagcgatattccctaaaatttattttcttaagttatatgagactcactatttaattacaccaatagcgatatgacactaaggagggtgctacgcagcaagagtgccctttagcaattctcaaataacaatgggcattttacaattttgtatacattattttaattaa

SEQ ID NO: 31474 - DNA, 2434 bp, Cannabis sativa
aatattattataattttggaatgatatttctaggcatctaaaaactacatttgtatctttcaaaaaaaaaaaaaaactacatttgtaatgcaggtaatgaggtatctgtaaacaaaattttactggttatgctattgctcgacaaaatgaaaggaggatctttcccattcatttctccattttcctttccaatgaaaggagaatgtgatataaaaatggtgaatgaagttcaaaacatgacatgcatttagcttcaaaagtactgcgtacacatattaattaacatgggtaaacttccaatacatgaaatgcaaagctggaaattgttccacctgaagtcgagatcacttcagcatttgtccaaaaagggtttattaccaaaatatgaacacgattccatgatccatctagagagtaaaacatcaactataaacctcaacagctccctgaaattaaaatttaaaaaaaaaatgctgaagataagaatagaaaaacaaaatgagagcatgaaataaaagctccaatataccattaaaataaatagctattacaggagaatgtgtatagatcactagcaaaaaaattaatataaacaatacctatggcttcattcacagcactactttgaatcccttcgacaggaaatcatccctacttagagcagaaaacaatgtatgtaagtgcagtaatgttagcatgcaatattcatatgtcaagtttcaaacagttgctattggaaagtactataattagctactctaaaggaactaattaatttttgaacatctatcatatattgactattgctaaactactaaagtgatcttgaccaatttaacaggtacacctttacctactttctttcaattgaactctaaatatgataaagcagagagcagttttaagatcaaatattagaaatgtattaagcaaagaacaaaacgaaaaaattggccagttcttggttttaaagtaagcaatttacaactatatatgtctgagtgcaataaatagatgattaagttattatggagaaaacataaagtggtggaagataactcagctttacctcttagcagcttcctcctccttaggcttcatctccttcttcagcttccttttccacctaagcttctctgccttcttgccagagatttccccatccctaccaccaagtccaacaaggctttgcaggcacacacacacacttgaaattggataggcataacagaaaccatcacattcttagccttattactttccaaatcatacaaaataaactttttggaatcctgatccattagaatttgattaccacgatgcttcaagtatgtaacagggaatacataacagaaaaagtttatctcatctgatggcaccactgaacacagcttagtccaagattccttaaccccataatccttcatcacccatatgtcaatacgatctgccttggtttcccaaaaataagaagatcgttcagaggtgtaattagcaatcaggcaaaggcaacttcctaagacattcagagtcatgtgaaaatcacaatccacaaaatttggttgaggcaccacatagtattcctcactcacaatatcaaaagcagcaattaagttggaaacatcagatactggtttcttatatacaacccaatgtaaagcattgccgacaagaacaccgtcctctttataacaaaggtatcctcttccacgaattggcttttaggctataaactttaacctgagtcaaaagagtcattctgtttcgcataatactgtaccaaccttattaacttgtaatcattttttttcattttttatttttattattaacttgtaatcatcgttaatggggtcatacctaaatccgtaaactatgtaaaaaaaaaaaagcctttcgtgcaaattcaatatcagcattgggtaagttcctgtaccttttcgtaaatgggttccacaaagccacattatcatacgaattgaacaggacaagtaagccgagcaccatggcttggatacgcacctgtagcggaggaggtccttgacggaaagccgaacaagtatgtcggtgatgatctccgacccttgctggttacttggttaagaggttactaggataggtagagtcaatgggtcatagcaggagtcacattgaaactatggtaggggcctagggatggattgtacaacaagtttcgtctcatggctagtgggattaatgtgcaaactgggtacaccttaagttggtgcacctacctacactagcttccaaataaaaaaaaaaaaacttttacataagcattgttattggacagtggtgtccaaattaggggtgtacgtcggtcggtttagtcgggttatagcatatttttattaacccaatataaatatcgggttgcaaaatttaatcgtaacccgcccaatgaaaatttaga

SEQ ID NO: 31475 - DNA, 1748 bp, Cannabis sativa
aatggtatttaccttaaattttaacatgtaacattcctatgtattaattaattgttaataaactaatataatattaatgtgccttagtgtattaaaatgattgttaaataatttttctattaatttttaatgtaaaataatacttttgtcatcttaatttatattaaaagaataaatagaaagctgaaaactgatttatagatttattatatatttatttatttattttgacgtggtgaacagagtcacacatgattaataaagtaacaaatcacaatcgacggtggaatcttcttgaaccaggatagctcatcgtctaaccgaatgacatgttttgtcaaaccatgagctacagaattcttattacgatccacatgggacaaaactgtccctaagaatttaaacaataaaactataactttttcaaatagcaccccatcacattgaaaaaccattttcaatattaatagttatcgccagagctagcagaactgaaaaaacatcgcaacccaaaccaaaaaacaaaataatatcatatatatgttacgcgaaacgaggtttgtcatcaagaggctggtgggaggtctttgtgtttctggggttggttttcatcatcgatgacgagagccttctataacaattatctgatgaaatcagagggacccattggttgatattgggttggattctatcatcgaagtctaaattcatggtttgaacactaaagcatcatcacatgggattaatttttagaatgaattggcatatcaattagaaacaatactaatatagtttcaaaaactgagtgcttcttatgtcgtaatttttatttaagggtatctattagactatcggcatcaatctaaacaattagaggtttatgccgcaaaatataattaacttagtattgcttaattaattgtacatttttgaatgaatgcaaggaagattcttgaattaattaatattttgtcaaaactttaaaatttaaattaatctttaattgcatttaaaaatgaaaacaaagctttatttaaaaaaaaaattgtcaaataatagaagattataatttatattctgtcttgctatttatgatataaattttttactttaaaattatacaaaattaattacattaacaaaattatatattttttggtcaattattgaaaggaccgcgcaacgcgcggttacgttacctagttttataaaaaactaggaaacaaaaaccgcggtgttaaataatcttaagctatgtacattattaaaacaaatttacgttttaagaatgttaaatcaataaaatagtattaattaattattggacaaataaaaactttattacagtttacatattaaaaactataatattttctaaatgtgagatttttacaaagttagatcattaaaaaaattgaagttttcaaaaaataataaaaatgtattgaaaaaaatataatcgatcttatcattcttagtcttaaatataaaaatttacattttttcttaatttttaacaattaatttattaaaatatcttttgagaaaaattattgaggtataccgtatattttttttttcttagacatggataattactatttttcaaaaaaaaaaaaaattaataatcactaataatatacatatttttttgggctttttttttttataaatgtacaacaaaaataaaataattacaaaaaatgtgcaaaaaaaattatttgaaaaacttatacattttgaaaatt

SEQ ID NO: 31476 - DNA, 1034 bp, Cannabis sativa
gttgtttcacattggcggtcatccactcttggatcgcctgcaccttttccaaatccatacggatcttcccatgttccatgacatgacccaggaacttgacactttcttaagcaatcgagcacttctctctcttcacatataatttctctttcttcaacttccaaaacaccgtagccaagtgtttttgatgctcttctaaggtggtattgtaaaccacgatatcatctaggtacaccaccacgaactcgtctaagtcttcatggaagacttcattcatgagtgtacagaatatggctggcgcatttgtcaacccaaacggcacgacgcaaaactcgaatgccccataccgagtaacacaagtagtctttggttcatccccttctgcgattcgaacttgatagtagcctgatctcaagtccaacttcatgaagtattttgctccacttagctggtcaaacagatcagcgatcaagggaatgtggtatctattttgcacagtcaccttattgagggtgcggtagtctaggcacagtctcaaggtcatatccttcttcttctagaacaacacggggcaccatttggtgcctttgatggcttgatgaatcttgcctccaacatctccgttagctgcctcttcaactccttaagttctgggggagacaatcggtatgctactttagccgaggcctttgcacttagcaccagctttatttggtgatcaactcccctcctggtaggcaatctctttgggagttcttccgacatcacatctttaaattcatctaacacctgcttaattataggtggagcggactcctccactttcgcatcgtacgcggtgggagcaatgacaaatgttggcttcttcttcttcagacccctcttcagttgcagggttgatagtagcttgacttctggggctgtctcactttagcagtaaccattgaaggattctcacccatgatcagtagattctttgttgatagaattggaatggcccccttctctgctagaaattgttggaaattatttta

SEQ ID NO: 31477 - DNA, 1750 bp, Cannabis sativa
acaactaaaagattataattgcgaagagtctagtgtagatctaacacttgatgattaaacatttgaaatcagctgaccacctatggttgacaacatcgtggacgaaatcatatcatcccgtgaagacggagaaggattatggattgattgaactattaatgcacaaatattggtttgtttgtctattaatttgtatttttttaaaatcaatcaaaactttttgtggtactttaatatatgatttgtttttgtttttatttgtaggttcgttgattatagatgacgattttttcctttggagtcaattcattggcgaagaaccacaacctgaacatgatttagttgaagttgaagtagaacccgaacccgaacctcaaccaaagaaaaaaggaaggggagcatataaaggcaagaaacatataaaggataggagcgaaggaaaaaaaaaggaagtcgagttcaaccaatggagccaattatatggtgagaatgggactcagattattagcaagattggcctctatgcaagaagaaattttccattggcgtacaaaaattggcatttaatgtcgggagaaaataaagatagcttatggacttacattacggtaatattatgaaactgattctatatagaatatgaaatttaatatttgatgtaattctaattatcgttcataattattgcagtctatgtttaagttgaacccagatgataagcacttagtgttaaaaattgctggagatagatggaaagatcataagacaaagcttacaaataaccacatttacaaatagaaagacaaagctcctaaaatgctcgacaatcctccagataattttgccgactgctacaaacctgaagactggaaagcatttgttgcttcaagattaactcctgaatgggaaaaattgagagcaaaaatgcaaggagttagggccaaaaatcaatataaccaccacggggggcgaggtggtattaagaaagtggaagaaaatatgaaaagagagttgggctaccaacttactacatacgacaaatgtgacttgtggatcagattacacactaacaagaagggcaagctttatggccctcctcaggaagttaaatttaccatttatattatttaaattcttagtaactattattttcaatgtaggatgagttacggaagtaagttgaagaaggtcggtaatattggaaggcaaaaaagacatacttactatggcgggacagaagagcacggaggacatgttaggggtatggggcgtggcgtaacacacacacacacacaattttttaaaactccacatccaaaaagaaagagatctaatgataatgatcgcatgggtgagatggagaagcgacttcaggagtaagaggaaaggggtaggcggactgacgaattattaaaacaactcctccaagtagtccaaggccaacaaagcgatgttactggcacctcacacacatctggttcaggtgttagaagagcatccaacgaaccagctcctgctaccagggcctctacactaggtatttagttacctcgtgttaatactacctctgttccagcacctgctaccaaggagtattctcctccacgaccaccaacagtcgttagggcatctactccaccagcacggtcttcagatacttcaaataaggtattttgtacttgcatttttaaaataattataattccatttagtgaatttgtttaatttttatattgtaatacaagtttgt

SEQ ID NO: 31478 - DNA, 3113 bp, Cannabis sativa
cattatagtcggagttcctcacccaccacaaaaatcacccactaccgaaatagaaaaaacaaaattcattaataagcacatttatataatgaattaaaactaaacataaacatgaacatgtgtcatgggaacaatacatacaaaatgaaaaaaaaaaagtaaaaaaaaatcttagacgattgtcggagtctacgccagatctagctctgccgccacggttctgttttttttttaaggggattaacaaattaagggtggggcctgctttacaggataatattttaggctaatttttggtttaaaattgatttttggtggttggaggcggagagggataggggaaaatattggtaaaaataaaaaaaaaaatatggatgaaatgaatggagaagagaaggtttctgatttaaaacccttgcaaaatgggcctgacttatgtcggccccattatcgtgcaaatagattcaatcggtacgatgtggcagaccactggggccgacatatgtcgtgcccataagtttgcccgagaaaattcccgcctaagaatcaacgttccattttcaaaaattaaaaaacaatggagcacgacattttaatgcctaaaagggacttgtggtgtccaagtaacattttaattaaataaaataaaagaaaaaacaaatggacacgacattctctctatcgaccctaaatacccttctctatgggcaccacacaatgtcggcccaaattgcatcgtccctaaatccattatttcttgtagtgattggtgagctccttaaaaccttctagagttgcacaatgacttatgatgtgtacaagatggggttatgcttattcgttgaggatgttttgtacgctcgtgaggagaatttgaatgtttggactgacatgctgatggtagaaactatcgaattattcttccagttttcgtggggaaagttatcgttcaacaaattgataggagtttgccataaagacatgatacaacataagaagaatttagagaataaatttagaagaaaaaatcacaaaaggagtagaagtactccttttacagatatgtctgggcattgcagtattgggcctttgagtccatcatggagttggttgatgattatgatgtgaaattggagcaacattttccaagaatgcccaactggaagagcagagcgaacatggagatacacaaggatcaactttttccaatgttttcaaaaaaggttagttttaactagctttgataaatggtttaaatattgtaatatgtttttttttaatatttgtaattttgtagccactacatgatatgatacgatagtggtacaattgttagttagataaataaaaaatgttaggctagataggggtacgattgtggtacgatgggaagaaggatgatgtcaatgagttgaggagaccttagtcatagcagtcgacctgggaggggaccctagcactgctcccaggttgacttcgggagctttgggatgaaagtttggacttcaataacttgaatccaactcactatctttcagtaatctataccataaatacatggagcaatcaaatccaagcctcatgagctgaaattacacaaacctgcaccgaaaaagccaacttgggcacctagggtttcatctggcgcccaagttaaggttcccaactagggtttcagtttttgggaccatcttagtgaaaatggatcaaaccttgcattgggacataacctagacatactacagacatatttgaggcatcagaattaggttcagagcaagttcatttttgagcacctggagcacttggtgcctgagcacccagtgcccaggttgacaatttgtcaatctgggcaccctccaagtatcagatcgatgatccaacttttgcatcttattcttcatcatcaaaaatgggggaatagatactttagggaagaaacaacacttcctgggtgccagaagcaaggcccagcgcccaagttgacacttggggctgacccaacacctaggttgacattttgtcaacctaggtcaatttcgatgatttattctgagagatctttcaagaaacttctccattttcagtaaagattaagattcaactatttttggggaccaaatgaaactttcaaagggccataactaggacccattgcccaggttgacacctaggattaggctccgcgcctaagttgatatgttgtcaacttggggtgtttccaatcaagttcgtggaaaagtgatctagaaattttgtccataaaaaaaaataataaagattcaagcaaactcggggagaaaaccacaaacctgagcccctagaaacaagacctagtgcccaggtttacaattaacttggtgtgcaggtttcgatcattcaaattccaaatcttattcgaccaatgaatctagaatgttaaaaaacaaggtaggagaccttttcctcaagttcaaaaaccttggaagtatcaaaacaacaacccaagagcttagaaataggtacccaatgccgaagttgacaaatggcctagtgcgatgtgttctgcttatccaattctgattttgtttcgaccgtctatctagtttttcactataactaaaatccttggaagtttttacagttacccaacgtctaggttgacgtcatatgtcaacatgggcgttgggatgtcaaccttagcactaggtcatgaattgtctttagtaaaacaatcataacttactcaatattgatcaaattgacaagattcaacttgcatttcaaatgtaattcaattctctaccaagtcatgtctcacacttcaatcttaattctgaatctatcaaccttaaattttacaaacaagggagttacgaaaataagctttgggttacccacaacgggtcccgccagaattccaaaaatgactatcaccatcagaagctaattttaatcgttggctcatcatctacggtcaaaaacatataatttatatttttctcctctttttttgtgcctccttcacttatgaaaggagagcttcgttagcttatttttcacattcagaaaattacccacaaggtcagagcttctctctctagaaattggagcttcttacacttagcctattt

SEQ ID NO: 31479 - DNA, 1545 bp, Cannabis sativa
tttggtgctttcattgagagttgtgggaagcattgtttgaaaaatgacaacaaaagatctcagctacaatggtggaaactcgaaaccacacacgccaaccttgtccgccctaggatccttggaacccagaggacgaagaagcagcctcacgagtaaatgtgggttctgaggaacaagacgaatcaaacgacgaagaatataaagaaacccagaagggtcatatgcctatgatgatggtagctataccgagttactggccctaaggcaaaaagcaactgatcatgaggccgaactggccgctcaaatgcaaacaatagtaaatccagtaaatccacatgttttggtggtactggtactagtagtggtgtcaatactcataccctccttcatccccaaattcactatgacaataaaaagcagtacctatatcttcccctagaaagcatgcatcatctgaattacacaataaattattaataaatctctagatttataaaaggtacctttatatacatgttgtgttttgaatttgaacccaaaccaatgacccaaccattgaagatggtgagttgtgagagagaggataccgatttaatgattgggaaattgaaaagttcttaatagttgccgactggagttagcagcgaaagtggttgaggcagaaaattggatcgtggttagtttgggtttcaggagagggaaagagagcgagagagataggtcggtggttcaaaaataagaaattacaaaatacggtatttcaaatcttgtttataaaatatagcgtagactaacccataaaaatgcaaagattgctaaaactccataaccttaataaattaaaaaaatgtcataaaaaggtaaatccttaattttttttccataatttatgcaatttctactacatttttttcccttatgtttgttttgcctctgaatacacttttctaacaagtatttttactctgaatttttgagtacaaatttcaactaatttattaaataatagcaacaatgttcattataaggtagcaataaccacctgtcctagtaacaaatatgtggggttttttctacatcagccaacactatgaacattaacaaccatattaaaaacactatgaactgtacatattaaaaactattcgagctaagttataaaaagtaaaacaaaaagggattcatggatatattccataacaagtagtgacaatattgaaagattacgtacaaaagattttcaattatgacccacacaaaataaatacatcaccagattagctgctcttaaaaaattggatcttgaccaccctttccttgcattggaaacagaacctgcaattagcaacctaaactatcagaattctaggcagtttaagattaagtattgtttaaaatttattgtatcaaggacttggttttgtttagtgtttaagcttccaactattaagttactaatcttattacttagatccaatagttttaaagtgaatgggatgatgttttttaacaccaatttccatgactcattgtgtatatatatat

SEQ ID NO: 31480 - DNA, 2471 bp, Cannabis sativa
tagtcgtttgtaataatgcttgttgttcaacttataaatcctgcttgatgtgatgatcatacaaaagaaaaacaaagcagaaaccttattattgttcaattactttacacggtacctagtttaggattgttttatgttgattttgaataatgtttggttcaaaagaaaattttaatattgtgtatggtagtgttgcatattcactacatgactcttgtcattatttatttagcaaaatagtaaaaaggaatgctatcataggaaacattcaaccgactcaaagaattttaattacattaattaggataaacaagacaatccaagattgtggaagccatttttacatagacccacgtccttattgaatagattgaagctttaattgtcgagcgtgaagaagacaccagtgacttcaacaatgattgaagtaaaaaagaccacagattcaatgatagagttgatagaatcgttctcgaaattatttataagtatcctaatggataagtcacatagagatagaatggaaataaaatgaaacaaaatggccatactgtatattttttttctcttcaatatatactatccctaaattataagataaaacaataaagcaaaacaaacgacaattagagaagaaaaaaaataaagttaaaagaaaaaagaagctttatcaaacaaaaaaggcacaaatagattgaataagattatgattattttgaataaagtcattcattaaaaaaaattgaatgaaactaattattttttgtttttttggagaggattgaataatcaattgaaagagagttgcatcagcgaaaaagaaagaaaaaaagaccaaagaatggcatcctccaattgattggtaacttgcgaaatttttcaagcaattaattttggtgattccaatatgaacacctcaaaaagagtaatttgttagaaaaaaaaatatataattaaaccatattatttgttgatatatgactgattttttttttttaactatgacgaattcttaatattagtattcgtgtttctggataagtgacacgtgtactttcaagatctaagattaaccaagacgagcctattatcagtcccaattaagttagtgaatcaactcaccacgaagtcagatcacagctccagattcggagatgaatccaacctacagacatgataaaattagactttcagagtttcagaagagctatctactcaagaaggcgaagggcctagtagagcacattcaataccctcatggggtaatccagaattggcaactcaaatgacatctggaggcatctagaaatcatcctacgtggcatcctctaaacacagggtctcaccaagtcagaggtttatcccctacgtcatacctggggggtgcgtgcaccaccaaaaggagcatatctttttgtccaatgccatattctctgacagttattgtacataattggttgcacacgacaactgtcactatcaaatggtctccacgagtacagacgattgttatcctttaaacgggacctcacctaattggcccaaagtcaatataaattgtattttaccccatcaatgaatagaagcacatgttcttgtctctaaaacagacaaggactatccattaacttacgaagaagcaatggaagaccctgactcagacaagtagaataattccatggattaagatatgaattccatgtgcatcaacaaagtcagggaatatgaaactctacctgaggatattacgcccatagggtgtaagtggattttcaagaagaagaaaaatgttgaagggaaggtagagacatttaaattaaagctaggcgtgtagcctagccaagccaaaggctacacacaacgagaaggcgtcaattatgatgaaaccttctctcctttggcaatgcttaaatccattcacattcttctttccatagctaccacttaaaattatgagatatggcaaatagatgtcaagactgcttttctaaatggcgatcttgatgaagtcatttatatagaacaaccaaaagggtaccatggaaagattgaaaggtgtggaagtttcttaaatccatttatagattgaagcaagcctttagattatagaatattacctttaataagactattaaagagtatgacttcgaacaaaatgaagacggagcatgtgtatacaaatacagtaaaggtgatgtagtggtattcctagctctattatgttgatggcattctacttattggaaacaattgagaaagattatcagacgtaaaaaagtggttaaccgataaattcctataaggatttgggagaagcaagctatgttcttgggatcaaaatctatagagatagaaagtgaagaatattagcactttcttaagtaacttatattgataaggtgctaaaaggattctcaatggagaattccaagaaaggacaattatagtccagacatggaattactctatgt

SEQ ID NO: 31481 - DNA, 4655 bp, Cannabis sativa
  modified_base (1134)..(1142): a, c, t, g, unknown or other
  modified_base (1795)..(1797): a, c, t, g, unknown or other
  modified_base (2794)..(2800): a, c, t, g, unknown or other
ttttattatatgggtcaaaaaaaaagaaaaagaaaattaaatgacatgacatgacataaaagtataattatatatatataagctataatgatgatatgtgagaatgatcagacttattattactaatgcatggagaaaaaaaaaatgtcagaagaaaaaagaaaaaaggtaaaaaactagagaagtgtgtgcgtcagtgtcagtgtaagaaaaacaaacaattttttaacggtatgcgtgtaacggtatatatgccaattaattgaccaacaatattatgacaattaattttaaattttagtatgttgatgcaattaattctaaataaagagtataattttacaacttgttattcatatttaaaagttattatatgataactaattagtttctacactaaattaatgttaccaaaatatattttgaataatattaggataccatattatatttttaaaataactaattggttattaatttagatgtctaaaatttttactaataaattatgtgatttattttactttattgtaacatgatagtttcttcaatgaaattgaacgaaacataaatattgttacacaaaagaacttaaaagtaacgtaaaaatatatatcttaaataagtagtataaactataataatgtgcatacaatattaaagtaactaatctaaaaatcattatttatgtgagatatttttattttaaaattgatcattttatcaaaataaccaattggtatcttatcaaaattataattagttggtctaaaaaaaaaaaccgtatattatttgtaataatttaaaagttttttgtaactttattctttatttaattaatcaaaatatatagaaaacacgtcttattctatctttttctaaatcttctttaatttacatttaaagaatatgggtgacttaaacatgtatgatatattggttcgtttggtacaccgtattgtattctatagtattatattaaattacattttatgaaatatttttatgtaaaattatatgtggtattggtctgtatgaacatataaatatataatatttaagtgtatatatatatatattaaagtttcacataatattatatgaaaatatgatatataatccaatttaatatannnnnnnnnaatacgacctaatacaacgtaccaaacgagccctatatattttaaaatacagtttactaaaatattaacttactgcatgatagcttataattttttaaaataaacttaaaagttactcaaatatgctaatataacctaataattaattgattattaacgtgtatacatataaatttttgaggtaaccaaaatatattttaaattatataatataaaagtgatacattttctaaaaaatttacttattgatttttatcaacttcataattaaccaaaatgttacttttaaatgtaggaaaattaaaaaaaaactaaaaaatttgagattagtttcatttcaaatatattaatttagaattaagatattttttaatgacgtggcaaaatattattataaataagatttgttaagttatttttataattattttacatttcacatatatatttttttaaaagggctcagatgcaaaatgaccctaaatttgaaaactacgttagtaaatgtcccatttttaaaaaaaaaattaagaaaattgccaaatataataaattagctaataaaaattataaaaaatatatataatagttaaattaagttatataattttttagtattacatattattatattgtaacaaaaacaaataaannnattagatcattaaatatatacaactgtatttgatatatcgtatcactaaaagtaatacacagtagtaacaaaattatataccacaaaaaaattataacaatactaaattaatactcaaatatatatatatatatatattatgtgaacacaattatatataccattattaaaatatgtatgcataccaaaaaaatatatataataaaataaaaactaaatattatcttaaataaatgatatactattgttgcctttgattttacccaaaatacgtggacgcggataagggtgacacgtggatctgaaagaacatcgactcatgaaaatcaactaagtcttggacaaaaaagaagaccacatggagtgggactcccggaggagaacataagacacatctttactctccgggaggctagagccatgctaaggcatttccgggaggtaaagattacttgaacaatcactttgcatttaatgtcgcatgggggaaaacgtattggaacctccataaaagatatgaaagatggcgtaaggccatttttacggcgattagacaacaattgataagtctagtgacagctatattatgaggaatcacatcagtcaagagaggataaaacattatatccacctaaaccttaagatacctacggtataggtcatgtatttcctattttgtatgtgctaggaatatgtgcccctaagaagctaacacaaaaagacaagtgaccccttcttagggatccccccaggaaaacactataattaccccacaaacagactgaaaaggggttgatcgattttaattaaggaatcgtagagagaaaagagtagagagatccaccaagaatattctttgtaataaacactctcataaataacaaagactcgtgtactaaggctcattaatgccccaaccacgtaaaaatctcctgcattaaattttctacaactcttctcattatattatttgattggttgccgaaaacctcggtcnnnnnnntggtgctttcattgagagcttaagaaagtgtctttaaatagacaacaatcagaaatgttagatcaacaatggtagaaactcgcaaaaatacacgtcagcctcgtcctccccaggatgctcaaaacctagaggacaaagaagtagccttaagagtgaatgtgggttctgaggagcgagatgaggccaatgacaaagagtacgaagagaactttgatgagtatgacacttacaaaaaaggtagctatacagagttactggtcttgaggcaaaaggctgctgatcatgaagccgagatcgcagcccaaaaagagaaaaatagaaaaatgcaagaggtgatggtcgccatgcaaaaagccatggagacggcagggattcacatacaccataaggccatcccagcaggactcaaagaaacaccggaagaatcctcacaaagcactcagaaacccaagaccagggaacaaggccctatacggtacccttctgaggaaaactatgggaaaaatcccacttcaatccctcagagaaagaaaagggtacaggattcgcagaaagtccgctcagatttccttaaaggaaaaggtttgcagaggggcaagctccctaaagtaagtgttggccctcaggatcaagaggaccgaaaaagcgtatccatgcactaggagcccggagagagaggaaggaaaaaccggagataccatccaattgacctaagacaaaaaatcaacgaaaaacacggtgatctacgagattacctagacaaaaagaaacatgcaccagcggtctctgggggaacactaaaagaaggaattctggctgagttggcaacgctgcgcaaagacattgctagggtctcccggaggtaaaaggggatgactcagattccgattgcgaggtctgagagccatgtgcccggcacatattggaggcagaggtccccaagaattttaagatgcccgaaatggcagcatatatcggagacttggaccctagtgatcatttatcccgtttcaaccgggtgatgacagtcatgggggtcaacaatgatgccaagtgtctatgctttccgctaacattaagtggttccgctgacgaatgattcaaaaagttggaaccaggatcactggactgctggagcaaactacaagttagcttccggagacaatttgcccacagaaaccttaaagaacttcataaaggaagcttcaaagaccaagaaggtggatgatagacaatagcttgcccttctccaagctgggatctgtacggggaccccattctggaacgaattacaacaggagggagcagccaatctccatgatttctagaagagggtccaaaggtacatcaatttggaagaaacccagatagtggcatatgaggaatactatccaaccggagtgtcatgatatgtacccggagtttagctctcgggagccatgcccccagccactcctcaaatgagcgacatacaattctctgctacactaggatataatcaaagcctatccttggatcccgcatcatcacactttgggaaccccataaacaacccaacggggatgaatggtcaagctccatctcagtccgctcctaccgcaagcttgacagaacctcctcagagctcccggagcaagaggttctcaaagggtagcaaccagacggaggataagcgacaacggaagggatacaccccttggtgtactcaatacacggagctcacgaacacacaagagcgactatatttcgccacaaagcaaaatacgcattatcggaagcctcttcccctgtatagggacagttcctgaagggatcctagcaagagatgcgaataccacaacgacattggccatag

SEQ ID NO: 31482 - DNA, 4713 bp, Cannabis sativa
aggaaatatcctcattctcgtagaacgctgaagtaatgaggatgataaacattttcttttaagtacaacacataattgtggggcacaagagtattatttgtgcctctcctgttgacacagccaacagaatattttgtattttttttttgtactgaattatttgcattttatagttaaaaaaagaaatgtttcaaggtgtctttgtggacaagattggtgctgttcatccttttctttctcatcatccagttataagagacctccagtttcttgaggttgtatattagaagtatagaaaccatgaatggcttgtgaatcataaatgttgaatgaatcaaagtattgggcaccgttcgtgtcctatagcaatattgtagattaattcatgttctttagaaccacggtagttgtcctgttttatttgggatgactaacaccttcttggcaatctgtcatccatggactggtttatggtggtctttaggtgccttgatctatggtgaatttcttagaatctatcattcatggacttgatctatggtaataaaccagggtgtttagcttgaaagagaaagcatagagaagagcttttagttgcacaagaacttagcaactcgattgttagttgttagtctctcctttatttgcttcaccctgtcgaattttataggtgttagctatttagagcccgagaagtatcgggaaaagacagtcgtccttgtctcatatcttattagtgaccatatttgtattcagtattgtctgttacttataggtatttattcaaaggttaagttttttttccctctattttactctttacttatactaataccatattcaatgtcgttcaaagaagcattgtttgggaggatggttactaggaaacaataatatttcacagttccttttgatgcagctaattcttctttaagagtttttatcatcaaaatcatgagaaggataataatttttaatgagttatttgcgaccaaatcccctatatttcacttacggcaacaactaaccctactttctttttctttttgtggaaaaacctctcaaactctactttcctttgcaaatttaattctgtcgttaacatcctatgtggctctaacttattttgtctaggtcattttttagtgtcatgttgtctttaataaaattacattaaaataaacatttagggttagagtttttatttgagtttacattaatttttattggttttattagaatttgagttgattggatagttctttgctgtcttagcctatattgttagttgtcaatagttaataaacttaacatctagatatataaagtctagttgaagcataaatgtagacttttttaagttgactgtagtctttgatgaacaggtctagttcaattaaggttatgtagttaagtcccctccctaactctataatacatattgtctcatcacaattgtatactttagataatcagacaaataaaatttcttctgatttagagacctaaggagaaagacttagttgatagtattttattattaaattgaagtaattattgtggatcaattatatatgtatacctaattatcatctattgttattgtattctatattatatacaaatcaggattttagaattattaatttttctaacaattaagttttcactaatatagtttttcaggtttgtgtatgaacaaagatcattttgggttatatgagaccatttgttaatttttttcaaaaaacttgtcatcttttttctttttggttttccatcaaaacgattcacaaatgactcatttgttaagttttcattaatgtatacacaaaattgaaattttggattagagaaagtagataagtggttaaaatttgtattgagtgtataaataaatgttactaaaattataatactcaattgtgggtaatgttaacaaataatacaacaataataagctacaataattaatagataactgcatgaaatttttcaaccaataactttcaaaacattattaagttcataatgatgtaagacacttttaaagtattaagcataataagatgtgggatacttatactgatattgttattagtatattttaatatcgagtcttatatattttaatttaataaataatatgaataatcactaactaattatatgatatattatcagtgtggtattggaaatcttaaggtatcaaataacaatttttatagtagtgagctaatcttttatttatactaatgaaaataggtttttggaaaccatctaagaaattttgtagaattctaagtattcttttaaaaatatttttgggttcttatttagagtaaaatgtggtaatttttaaaattagtaaaaaaaaatatgtaattttaaaaagaattttttttttttgagcccatgtgttggatgggctctaagtataggactagcctgtctattgctcagaatcggacttgatacattgttatattataaaaataaactagagttagaactattcaaataccaaaaatactaatacaatgtaacgagtatcattgttagatccccctattcttattttttcctccctatatatatcaaacttgaagctaatgtggtatttttttttcttttacaatgcaatccttaaaaaaggtgtattgatgtatcctatcaattttgatatcttggaaaaaaaaaaaattacgttgtaattatttaagacattttgtaaaattttaaaagatttgaaaaaaaaattaatctggtaaaatagagttcaaacagtttgttgtacgcaagattttttttattttgtacgcgtgtgaaataaattatttaaatcttattttcggcatgttaaattttactaattttactaaattttgtaaattattttaaataactacaacttaaacgattataaaaattattagagtaatttttttttctcaaatagcgaaacagataaaatgtgcattgttgaatttttttatagtaagcttttttcaatttcaaagtaagaaattaccgaaattgcccttgacattgatgagtgagtgagcattttttctcaacttccaaaacgaataacttatgaaacggttgatgatgaattagttcactcacacactctgtaaagtagaagtactatgctcttccccaaagctactctatgctattccccaaagctactctatgctcttctcatacttgtaattcggatcaccgtccactttttctaaacactaatggtaatccccctccttttaaaagatttttcaagttcgaagaaggctggacgagggatgatagaagtaaattggtcgtggccaatgcttgggattcggtgattcactcctgggctccagctcgtctctttaaaaagctgggggctaccaggcttgcgcttttgcattggaacagaacgcagtatggtagaattgattgggttattaaagacctggagcagaaactggatagcatacaaagactccctgtgggtgctcgggattggaaccaggagtgtgaagtccgcaagtcgctgaatgaaatgcaatccaggaaagccctctattggaaacaacgagccagaatttcttggctcaaggaaggagataagtgctctaagttcttttttctttcggctgcaattagaggaaggagaaacgccattgaaagtatcttgagtaaggataatatatggctcactgatagggactctataggtcgtgaatttattgactttttcaaaagtatctttgaaggatctgagcttgacccgagtatgaattgtaggcaattgttcgctgagaggttgtcttctctagacctacaggaatcccttcattgcccttcgcgggaggaaatcaagagtactttgtttgctatgaatagtcataagtcaccggggccggatggaatgtcagtactcttcttcaaacattattgggattctgtgggtaatgacttttgtgatgcagtttcggacttcttcagaaatggccagatgcacaaaggaataaatgctacaaatgtagttctgattcctaaggttccgaacccgatgagacctggtcagtttcgcccaatttccctttgcaacgtcatctataaagtcatttccaaaatagttgcgaatagaataaaaccgtttctgcctactttaatctgccctacccaagcagcgtttgttcctggtaggaacatacaagataataatgttatagtgcaggagatcattcattccttcaaacggaagaaaggtagagaaggtttttttgcaattaaaattgatttggttaaagcgtatgacagattgagctggaggttcattgaccatgctctggattgtatgggcttccctctgaaggtgcgttcttggatttctcaatgtatctccaccaccacccttaatatttgcttaaatgggggccaagtcggccagattttgccatcgtgtggcatccgacagggagaccccctttccccttacctgttcatctgtgctgcagagattctatcgcgtctcctagaagaggatctggggaaaggtaattttcaggggataaagttaagtaggggaggtccaattattacccacctgttttttgcagacgaccttatcctggtgggcagggctaatatgaatgaagctaagagtatttggaattgtttggaaaggttttgctcttggtctggccagaatgtaaa

SEQ ID NO: 31483 - DNA, 4233 bp, Cannabis sativa
aagtaagaaacctatccgcaatttcaagagtaattacgtgtaacagtaatgacccatttccaactatcggtcgtaaccgaggcatatcaaacacataaccaagatctcgataataattaaaactatatcaaacacaatcgctaatcacttaatcctaactgatgcgtaacacttttcttacctcagtctagaaatcaggtgtgtgggccgaactaagtggaaacaaaactagacgatcccggtcctatgtcacgacaactaaaattcaataaatgccttaaatcaaaactccagagacaaaccctaatccgaaaccgaacaaaacctaatctccaataacccaaaataggccatactacacataaataagctgaaccagatactagacaccaccctaagccaaaaccgaactcgaagaaaactcaggaaatccccctacagggcaaccggttgaccaattctggtgcaccagaacgaaccggtcaaccagctctggcagaccagaaaacttttggttttcttcctaaactccacaaacacttaaccaaatcttcccaacaactctagaatagtatataaacataaaaataaagtattcaactcaacaattcacaacaattcatcatattacacataaatccatgtttaaacctaaattgaaatcctaaaatccaatcttttccatcttcacacacaacaaccacaaacttaagctaatagaacctaattaaccttaaaatcaacacccaaaataaaccttaaactcagtcgaaacatacagttctaaaactctagaaaagttcaatcaaacttacataaaacttaagtaacatcaagggtagagttcaaattcttacttcaaatgcttctaggttgccttaaggagtaataacaactataattaaatgaattttgctgtagaaatctccaaccctaggctggtttctaggtttctcaaaaggaagaagaagaaaagggttacttttggcttattttcttaattatccttcaataaatctcatttcagcaagtatataacctattatcctaaaacttaaaataattaaagcactacaagacaaaataagaaaacacacctatgaaattactattacaccctcgcttgcaaattcaagttctataaaacttaggggtaattcagtaaatttaactaatccgccaaactgacaacttaatattctaaacttattcggtataattcccattccaatccatattttattatcgtgaaatttctgaccactctgccaagtttccacgttcggcgggcctgaaaatattttatttcaaaaatgttatctatgatacccacataatctaataaaatctctgttattaaaaaattacgctttatctaatcatttattaaattcacattaattaacctaagtaggaccataatcacttcattaccagaataattacatatttaataaaatatgccaaattaattaccatattattttgtgagatattacaactatcccctccttatagaaatcttgtcctcaaaatttacctgaatagctcaggatactgctcccgcatctgtgactctaagtcccaagttacctctttaacctagttgttcctccacaacatttttactagtggaataatcttattccgcaacacattttctttcctgtcgtggatttaattggtcttcatatgacaggtcagtatgaagctcgaaatcctcataacttaaacatgaattgtatcagagacatacgttcaaagcatcgagacgtgaaacacattatgaaccctagatagagcagggggtgaagccaaccgataagttttcccctctttctaaacctctaaattcctttcattggggacacccgaaggaaaataaaatacccaaccttgaattcaatatctctacgctttggatcaacatagctcttctttctactctgtgaggcaagcatacgagctcgaatcttttcaatagcctcactcgttctttggacagcctctagtccaagatacctatgttcatcgacttcatcccagtgaatgggcgaatgacacttccttccataaagcatctcatatggagccatgccaatagtactctgataactattgttataagaaaactcgatcagaggaagatatttgttccaagaaccttcaaaatccattacacatgctctcagcatatcctcaagtatctgaggagtcctctcagattgaccatcagtttgagaatggaaggttgtactgaactttaaattggtacccattgctcgttgtagactttcctagaacttggatgtaaacttagatctcaatttgaaactatcgactttggggaccatgaagccgaactatctccttgatgtataaatcagcatactgatccactgcatacgttgttagcatcggtaaaaagtgtgttgacttagtatatcgacccactatcacccaaatagagtcatagtaccctaccgttcttggcgatccaaccacgaaatccatggtgatgtcttcccatttccactcgagaatcttcagaggctgaagcaaacccgctagtctctaatgctctgccttgatttgctaacaagttaagcatctcgacgcatactcaacaatgtcactcttcatacctggccaccaatacaggatcttcacatcatgatacattttagttgttcccaggtgtaaagagtatggtgtggtatgagactcatcaagaatctcctgtctggtatttttctcgactggtacacaaatcctgctcttatatcgcaacaagccatcagatgaaagtgaaacgtcttttgttgatccagcttctaacttcttcttgtaacgctgtagctcggaatcactttattgggtcgttctaattctttcaagcaaattagactgcaaggtgatgttagcaatttttctgaccacaaactcaattgccgctctagtcatatcttcagccaactctgttaaaatcttatataattcataaacttgccctgggccttttcgacttagagcatccgctaccacatttgctttttcagggtggtagagaatctcgcagtcataatccttgaccagttctaaccatcgtcgttgcctcatatttaagtccctctaagtaaaaaagtatttgaggcttttgtgatcgatgtagatcttgcacttttcgcgataaagataatgacgctaaacttttagtggaaagacgactgctgccagcttaatatcatgaattagataccgctgcttatactctttcagttgcctggatgcataagcaatcacttttctagactgcatgagaacacaacctaacccttgtttggatgcatcgtaataaatcatgaacttttcatcactgaccggtaaagttagcacaggagcggtaaataatttttgcttcagtttctagaaactattttcacacttatccgtccaaacaaacttgcagttctttcaagtcaattttgttaagggcatagaaatcttagcgaagcactcaacaaatcttctataataccctgctaatcccagaaaactcctaacctcaattcgagacttaggtcaaggccactctcgtaccacttcaattttcaccagatccaccaaaatgccatctttattcaccacatgccccaagaaactcacttgaggcaactagaattcacatttcttaaacttagcatacaacttatgctccttgaggtgttgcaacaccatccaaatatgtctttcatgtgtctcttcggtatctaaataaattaaaatatcatcaatagagaagataacaaaatcatccaaaaagtctttgaacaatcagttcatcaaatccatgaatgccgtcggggcgtttgctattccgaaggacattactagaaattcatagtgtccatactgggttcaaaaagctatcttggggatatcctcttcccaaatcctcaattggtgataaccaaatcaaagattgatcttggagaagacggtcttcccttgtaactactcaaataagtcgtctatccttggcacaggatatttatttttcattgtgaatttttttaactccttgtaatcaatacacaatcgtaaagttccgtccttcttcttcacaaacaaaactggtgcaccccaaggagaagtacttggtttagtaaattttagatcctacatcccctgtaagtaaacttttagctcttttaaaacaataaaataaacaca

SEQ ID NO: 31484 - DNA, 2918 bp, Cannabis sativa
  modified_base (44)..(50): a, c, t, g, unknown or other
tattttaccaacgcaatactaacttttgccagcacaaaaatgtnnnnnnnaaagtgacatttcttatagtgagaactaggcatgttcttatactttcgtgccgtatgacctggcttgttacatttgtaacatatgaataaatcagaatcatttctactagggggtacttgttgcctattattttggttcctttggtggttccaattctaattgttattattagtttgaggttgattgttgcagtttgaattcactttgcaattcaaaacagcatggtggatcttttattagtgttgttgttgtttccatcaacaagtacctcttccttttgtcttgtttttaagctccatcctcaatttgaagatgagtgatcagactttccaataaaaactcttttattttgtgactgagagtattttttaaatctttccataaaggggataatttatcaatgataacagtaacttgaaattgttcatcaataatcataccttcagacagaattttgtgagctattttctgaacctcgtgagattaggcttcgactgatttatcatcggtcattaaaacttcaagtagcgactcacagcgtgtttctttgttcctgcctcctctgtatcatattttttctgtaatacttcccatatttatttagtagatttaccaaaattataataatcatacaaaccgttagacaggccattcaaaataaaaattttacaaagacaatcattctctacctggaagtccctttccttaaccattgattcgtacttctcaacttcatcattcttctcggtaggaggaggtgtttcagacacaacttgtaaaccccccgcttcaagcattataaccctaccaatcttgctctttaatgtatacgcagtgaacccaatgaacccaaagattatcttttttgatggcagtatcccacacgtacttgctaatagctcccatattccaaatataaatatttctaaagccaagacccccgttatttttttatcattgacaaatattatgccaagaaacttacctcgggcaagatgagtccgaaacacccttccataagaagctcctacaaatattattaattttaccaagaatgtactttggtaaaatcataagttgagcccaataggagtgtatggacatcaaaacagaattaattaacactcatcgtccaacataagaaatgtgtctagtgctctaaagtctaattctagcaaccattttctcaataataacatcaccatcagacttggagatacgcttagcacaaataggaatgcccagatatttgaaagggagggaactaagagtgaaacccgagctatctaaaataaattgaatatccaaagaagacatacctgaacaataaattgaagtgttgctaggactgccttgtaaactggatgtttcaaagaaatgctgaaaagtcctaagcaagagcatcacagattgaatatctcctttagaaaatggcaaaatgtcatcagtaaaacacaaatgattaagcttcatactcttacatctcggatggaagctgaaatcatctttcttagtaactttaaccatcaatctagaaaagtattccatacctataacaaacaggaggggagaaaaatgagatctccttgacgaaaactcttttgatggaaaagaagtcattaaaagcactattgatgagtaaggagaacttgagggtagaaacacatgtcataatcaaggaaataaaagcattaggaaaacaaagcctctaacatctcatggataaaatcctagtccttttgtatcataagtttttttaagatctattttgatcatacaagaaggggagttacatttcctactataaaatttaaccaagtcttgacatataagtatattatgaccaatatacctagctaccatgctcaaagtcaccttggttatctgcagggccggtcctgagctaagacgaagcaggcggccgccttaggccttccaccgctcagggccccatttcgaaaaaaaattaaaatataattagtaataaaataaataataatacttttaatgttaaatatgtgttgtagcttagtggtaatttgattagtttaacaactaagaggttgagagtaaatcccaatagtcttattttttttcactgggctctaatttttatttttgcctaaggcccaaattaatataagattggccctagttatctacatatatacgctagatgcactacattttttattaatttttctcaacatattttttaattttactagaattatacattattttaagaaacggtttttttttttttttttgtcacaatatttttcttattaatttactagaactaacatttattcaaaacacataataatcatataggatccatcaaaagctagggactagaatatatagcttcattgagtggctaattaatgtgcatgtgatatatatatatatatatgctaaaaaaaatcaacgtttaatcatattaagttataaatatttatgatcatcactaatataactttggtacacttgggtgacactaaattgaacaatttttttttaaaaaaaaaaaaaatttacacgtcccttgggaaaaaagtaaataataaaagttatggtaatatgcatgtacatatatatatttttcaaatgttatctcttactttaattttatttttttgaaatgatatgatgatttcaatttcattatatataatatttacacgtaaaaagaaaatattgttattatttgtggtgaatatgcaaaatttatgtatggatataagccacgtgtcacgtgtgggagagtgaaagtgcatggaaatcctatcagcaaaaaaagaagaattagaagaaaaaaagataacaatattataaattataattgactctcaaaatcaaaa

SEQ ID NO: 31485 - DNA, 1117 bp, Cannabis sativa
gtagttcttgttgattcattaccaaccggccaatcttgctgtgatcaagatataaataaatgcataataaacaattacatcacattatatcaagtactatcatatatagttatcaaattatatgtgttacataaatataaatatatattgcaaaaatcatatgtatatataggtgagaaaaagacccttatgatgtttataattagatttagggctcacctagaagggcggtgtgctgtgttgtattataattgtgacatagagttttggcagattacctgaaattgcatactcatcaattccttctatttattagccgtttcaactactaattattatataactattatttatttagtactactgttttacttatattatatatacaatactcattatttattttagacacattatcactatactgttgtgtgctgcagggtgggcatccgatccaatccaatcttcttttcctcatttgatctaatccacttagtaatgagatttagaaaaatatcatccgatccaatccaattagacctcaaaatctaatccaattatcggttttttaattggatatccaaatacacacctaaatttcaatattagcttaaaaatataaagaaaaatacgttaaaaaaataagtatcactttttatttaagtttaatacttcataaatatacgatttttacaagtgtattgtagttaaaagttttaaataattaaaacaataacatttttaagtaataaaataaaacaaaacatgatgaaaataaatacactaaacaattaagtgttacaaattcaatatacaaaaaaatctaataaaaatataataaatatttattatataaataattgtttaatatgtataaatgtaattggattggatcggtttttaactggattttgagattgacattcaataactgatctaatccaattggaatctaacttttagcatccaatccaattcaattgtaattggatatccaactttttgtcattggattggattggatcggttcggttcaattggattggattggataatgcccacccctaatgatcagtaccctcacccaattatttatagggaaatttacacccattac

SEQ ID NO: 31486 - DNA, 2161 bp, Cannabis sativa
ttatggtttagggtttagggtataaggtttcaaggtttaatgtttagggtttagagtttaggacttacggtttacagtttaggtttttggatcaggatttagggtttagggtttatggtataggggttagggtttagggtataaggtttagggtttcgtgtttaggtttagggtttaggatttaggatttatggtttagggtttacggtttaatgtttaggatatagggctaagggttgaggggttaggtttagggtatcgagtttgtggtttagggttatgggtttagggtttgggcggtttagggtttaggatttagggcttaaggtttatggttaaaagtttaggggtttggcctttagggtttagtgtttacgatataggtggcatagggtttaggggtggggtttagggtttatggtttagcttttagggtttcgggatttgcatttagggtttagtgtttaggggttagggtttaggctttatggtttagggtttgtgatttagggtttagggtttagtgtttatggtttcgggtatagaggatagggtttagggtttagttttattgtataggttttggatttagggattagggtttagggtttacagtttaggtttgggattttttgtttagtgtttaggatttaggctttagggttttgggtttagggtttataacttaggatttagtatttacagtttagggtttcaggtttagggttttacatttttttagatttaggatttatggtatagggctttgagttttagtgtttacagtttacagttttatggtttatggtttatggtttagggtttagggtataaggttttgttgtttaaggtttagggtttagggtttagagtttagggcttagggtttagggtttagggtttaggttctgggtttaggatttagggtttagagttttcagtttagagcttagggtttaggacttagggtatatagtttaggggttagggtttagggtatatggtttaggatttagggtttatcctttagggtttaggtttcttgtttaggttttgaattcagaatgcattctatatgttatatttagaaatttcatatttttgcatgttcagtgcccagcaacattagaacgcggtgtatggctcagtagaatcacatcttggtattttactatggtggggcggtataattagacattgagaatgttgagattagtcgggaatttagaatttcccaaaatactcttagtacccctttttatgtcaatttaatgtgagggcaaaaaggtcattttgcccatatgtgctttgtcttttgtggatttttaattaaattattaatctgatttttatagctttgtttggctgatacaatgtgataaaataaggaaaatcaagtcttttattcatttttatgcaaaaatcaaaagttagacaaaagtaaggaaattcattttctctcaagctctctctccctttcgatttttcttagggctactagggttggatttttcttcaataattcaatctttctcagctaattgttagtaaatccaagccaaggtatagctcttgctcctcctttgtattttcttgaagtttaaggaagtgaaatgttgcatgcttggtgattttgatgttgtggttgtggtttatgttttatgttgaattctaaagcttaattgtgtttagatatggagatttaagcaggttctagtggttgttggttggttttattcaagttggagtttaaactcaaactttggttttgattggcgaaatgttgtttagcttgctgttcttgctattgtgattagattgtgtaatctgtagttatattatggtattgtagagtggtttgagcaggttttgatagctaattagttggatgagcaagctttgagtttttgaactcaagcttgactcattaatggtgaatttcgtttctgtgtttgggtgaatgtgttattgccttgaaaatgttctctagggtgtataaaagacgtctggaaagtttggattggattgggtttgttttggtcgagttatgaaattttgaatcattcttgaactaaaccgaaattccggttcagagaggcctgtaggaaccgaaattccggttggcttctaggaatttttccccagaaccagaattccggtt

SEQ ID NO: 31487 - DNA, 1116 bp, Cannabis sativa
ataggtcttgcaaaatatagaatcgaaagagtgcaagacgactagaaaaatctaggagactttagagaatttgtacatgtccaagaatatttctaataagttttacttgtggaaggagttgtaccagatacggaagcaagataatgtggatatgcttcagcatttgagtaattttaatggcatgatttttcaattgatacggttcgaagtgaagtttagtgatgaggaaaaggctgtgctgataatggcaacacttcctccttcatatgatcaccttatcacaacttttacttatgggaaagacaggttggagtatgaagtcattgcagaagtcttggtttcgtttgaaagcaaaacaaggcgagaagtgtggagtctcaagcccttatttctgaaaataaggggagaagtctaaacaaagaaggtaggaatagaaatgacaagtccaaaggcagatcaaaatccagaagcagaattgatggttgctttcactgtggcaagccagaccacattaagaaaaattataggattttgaagcgggaaatgcaggaggccaacgacttaaacttgtatttgtgtttcaatttacataactaaaacatagtttttgccttaaatatattgtaacttttttattcacatgacatcaattttgtagtttgtagtgttcaacatatttttaataaatcatattcaagaaacgtgatttattattattatttttagttagaaagatttattatttaaatatttacacggattttgaaattatatatatattttttaatttttattgtatcaatcaactaaataaatggtttattttgatttatttgatgtgtttgtttttgtaaattaacataaaaaaaataaaaaattatcccaattaactagattcaatagatattattaaaaaaatttatgatgtataaatttaatttcataataaatatcaactaaatatctaagtgattttataataaatattttaaatttttaaattaaaatttttattttatcattttaaattttaaaaatattttattttttaataattagaaaaattaaatatttaaagtaatttatgaaaataaatatttaaaaccatcaaggacg

SEQ ID NO: 31488 - DNA, 3568 bp, Cannabis sativa
  modified_base (171)..(175): a, c, t, g, unknown or other
aatcatatctttgtatggtagcatcacaaatgtcgtcgatcgtttacttcttattaattaaagtatagtgtaacattaaataataatatccatatatgcatggtcaaaaatgggttccagctcgaagtcaaagagaaacatgttcacacttatataaatatatatttatannnnnatatatatatatattcttcttttgtttttgattttagggaagtgatcgatcataaaatggaggaagaaatagttggttatgaggaaagaagaagaaataaaagaaaagcttttgtagtttttctgattgcttttgtagtgtttcctgtggtgttagggtttgttgtttacaaagtgagattagtactaattaataatattaatcataataatgatgtgattaatgataatattgatgatcaatggggtttggtagatttggcttatgaaaactctaccaatggtggtgtgattatttacacatgcaccactggtggttgggtaaaacgagttcgtcttaatgacgtctcgcgagtgagcgagaattgggtcaacacgggcggtacgccgctcggtatcgttcttgactataacaacgacaatcttgttttcgttaccgattctcaaaaggttagtctctcttaattttgacatcataaatgattatttaataaatatgttgtattattattagtataatttaatatcgaattttttatttatttataggttccatatatcacactcgtttataatttaaactaatgatgataattatcaattgatatatcttattaattaattgttcacaataattaataaaaaaaattgtataaaactccacatggtggctaggtgctgtcaacccatcatggtggatttaaattatatataataatatattatagtaaaatattgataattaaatttagtttatttataatccatcacatgcacgtttattattataaaattcctctagttgatattattaacatatatatattttaggtgagtatgttaatatttcattgccaaaaaattaattaatatattgtatgagattttaataaactaattaaaactattcaaccatatatctatataattttgttcttattattattatttataactattggtcaatcaatattgatatagtaaatatattttaagagcaattatattactttttatttttatcaaagagtggcattttttattcccgaaattaaaatttataattaactgcatgcatataaaataacagagttgcgttgaaatattggatgaactctatttctcacaccgtaaaatttttcaaaattaaataataaattatttgctataactataatatttattaactaaaatcttaagccaagttaaataagataataggctataacagaatctagctcaaagtctcttccttttatcatcactcccttttttattatccctttatttatataatataataaatattttttatacaaatattcataagagtaatatgcactacactttaaaaaaaaaaaaaaacaaatcataatatcttgtggtctcgatacacatgattctaaataatttttcctattttagagtttatgaagtttttttagttttgaaaattaaatgaagtattaattgataattttgtttaataaaaggcctaattttaattattttgcccgagactcccaaactgcttgggccggccctgcgcactattatggtctccgaaatatttttttacaatttttttagtaataattttttttttttcatcaaaaatttatttattggccaaccttacaaatagtttttgcctatatgggaaaatgtgaagttagggtttttttgttatctgtttttgacaagtacattataatatatataacacatggttattaatattaggggctactaagcataacaaaagacaaaggtgagatgaagatattaacagatgaagctgagagtgtaaagtttaagttaacagcaggcttagatgtggctgatgatggcatcatttacttcacagactcttcttcttcttctcatgatcaattatctattaatggaagattactcagctatgatccactcactaaccaaaccctagttcttcttactaatctttatgccaatggagttggactctcacctgaccaatcttatctccacttctgtgaaaccccattgtaagtaattatataactaatacatatacatgcatgtatatatgtactagagttagcaattttctatattattagttattaaactaaaatgtacgaaatttcatcgatataataaattgaatcatgttacaattgagttagttagatttctgttaaattatttttgtcggttagttaccgagtgagttggtttagtaaccagttagtataattactgagttggttcttgagctcaatgaattctttctataaatactcttatttgtaacaacatattagagctatgatatagtattaattattttcaaatgttaatatatttaaaatgtagttcgaaaataaaagaaaattacagttttataaacattggaaatttatgctgttaaaaaaatcattagatttatgctgcttacaaattcaaaattttgaatagtacttatgcctctatttatcatttaactattcacaaagtgttattcgtacactatagtgttgggcgcacaccaatagtacataatagcaatgctcattataattttaatacgtacaaaacttgcatgcatgtttaagtcaggtcaaactctggacataggcgggataggcttgtgcctacagtacacctagcatagggattcaaaaaaaattctcttttaaaattacatatttttttcttactaattttgaaaaatacgatatattgttattgttggatgatacaggaaaaggtgtatgaaatattacataaaaggagagaaaaaaggaagtgttgagacactaatggaggaaagtcgtaagaagtattacataaataaaacaagtgtagttgatcagacaatattaatggaaaccacaaaagttgatgatgatgatgattatgagtacatgtctgaagattatttcattacaatggagaaagcccttactcgagtccattctccacggtacataaaaatatacataataattaatcatctaaaaatatttataattgacattaattttcttctaattgatcatgtaattaattattgtttaatcaaaattaatccttgtgttgtttgcaggaagaagcttcccaatattgacattaattctcactaaagacacattatatttaatcgactggaatcgataagagggataacttgaagattacctgatttttgtgttagttaactaaaattaccggcaaactatattcatttaaattatactcatttttataataaggagatttctcatcaatatcttctcacattagcattaaagactgaaaattaaatcttactatatatttcgggttggaaaaagagtattagaaaaacattaactataaaagtaaatataaaagatgaaatattaaaaag

SEQ ID NO: 31489 - DNA, 1943 bp, Cannabis sativa
catggaaaataagtagcttggtactttaagagaataattagaaaaaaccttgttccatttagatgtttcaccaatgcactttcttttcacaccacgagtagaagaaggggattgcgtatttttagatgttttcttcggagattcaaaatcagatgaagacattctctaaatatgattaatgacctgaaaaataaagaagacacaataaagagcttagtttaagggaaaaatgattgcttagcaaaggtctggaatcaatatttgcacctttaccataaagatatatactgagcttgctgaatgacacatgaattcctctacttgtttttaggaaaaaagaaatatagcataaaaagaatgcaaaaaccaatcaatataaaactactgtagagaaaattattagttatatcctaccgtctttataggctcttctgggcgccctgtggcacaatcaataacagtgtgaatgccaaccaacgttacaggaattgtctctggtttgctaagatctgcctgctccaaaaatacttcgcagtgagtaattcaacttcaggttaccaaaaatgctacacaaatttatcatgtgtataggagctcaaagaatagataagcacaccatattgtagatagatacataccctttcatcagcaataacaaaaattttcccaacttcatcagcagctacagaataaacatctgaaagaaacccagtgacggatctagcagacaagaatcctcttgcaaaggtgggatctcgggtcaattgtagtgttacccaaccctgaaatagaaacattcagattaaaaggtataatcaaatgctaattgcatgacttggaaaatcacaaccttacatgttggttacccaacaaagggaaggttacataataaaaatgttttcgcgattaaatgattgataagtgtgctctacaagctataaactaaatcctgtacacctatattgaaagttaaactcagagaagctttaaatttatcatggttatgaaatgttaggtacaaaatacaatttaaatgcaaagacatgaaagtgatggcttgggtcaactttgagtagagaagaagggatattcaatgcagaagcatattatttttcttggggtcttttaaaacattttatcaaacacttgcagagcattgagtaatagttgaacagttccatgaaaagtagaagcaagaaaactaaccagaggagagggcagaggtggctgtccgaagaaaaggggtcagaggacgtagagggacgacgggacctcacgatgttttataggctcctcttttcgcttcgacggcgtaaatcgatgcctcctcttcaggtaagatggaacaatggtgaagagaaatggtggaggagaagacaaagaggtaagagagaaaacaatggtgaagatggaacaatggtgaagagaagacagagaggtgaagagaaacaatggtggtggagaagacaaagaggtaagagagaaaatgattttctggaaaatataaaaaaaaaaagttaaaaatatggaaaagaaaacccacataataatttaaaatagaaaaataccataatttacctaaaattaaaatttatccatatttatctaaacatttaataaaaatccatactacaggtaatttccactaaaaaaaaatatttaatgtaaaaaattatcccaactttattcacttgccaaagtaaaacctccacaatcacaaattcaatcaattagttattagaggtaaacattaaaaatgtacacaaacaagaagttaaattataaaattgaatttaaatgtttcctcgaccaatggaaggcagctcaaaactctcatttagagtcatctcgaattagtctaagttaggggtgtacatcaaactgctcaaaccgcctgcaccgcaaaaaaaaaaaatgcaatttgaaattcttcgcggtgcggt

SEQ ID NO: 31490 - DNA, 3195 bp, Cannabis sativa
  modified_base (3162)..(3170): a, c, t, g, unknown or other
ctggtggtccatgagaacaaggagatggggccgattataccttcccggggaattcgacaaggggatccgttatccccgtatctgtttatcctttgcgccgagggcctctcggctttgctgaacaagtatgaaagggctggcctcattcatggatgtaaagtggctaatggagcacctcgtatttcccatatgctttttgcggatgatagttatttgtattgcaaggctaccatcttggaagctactagaataaaagatatcctccaaaagtttgaagcagcttcaggccaaaaggtgaacttttcgaagtcgtccatttttatagcactaacactacccagggagtttgtgatagtatatgtaacactttaggcatggctattgcggatgaaggaagtctgtatttgggacttccaagtactctaagcagaaacaagtctgcggtgttgggttatctcaaggaacgggttcgaaaaaggattgaaggttgggagatgaaattcttgtcacgggctggtaaagaagttctgatcaaaacagtggctcagtctcttccaagttatgcgatgagcgtttttttgttgcctttgaatattactcgtgatatggagaaagccatgaacaagttctggtggcaaggtgcaaataatgctaaaaatggtattcattggttctcatgggataggctttgctcacataagtctaaaggaggcatggggtttagacatttgcgcgatttcaatgtagctatgcttgccaaacaagggtggaggctactatcctgtcctaattcacttgtagctaaagtattcaaggctaggtattattctaatggctccttcttcaccgcacagttggggtctaatccaagttacgtgtggcagagtgtgttggaagcccaagatctaattaggaaaggcactcggtggtgtgtttttaatggggaggagataaacgttcttcaggaaccgtggctgccatgtgaaggtgatccttatgttcactcaagccatcctagtttgagtgaagctaaagtgtgtaatttaatggccatggagggtgggagttgggatgttgagattttgaatgacttgtttaatgagcgggaaaagaagcttattttggatatctcgttgaatataggccacgacagtgataagcttacttggagctatgaaacgtcaggcatttactctgttaaaagtggttataatctacttcaaaaactttatggaagatggagtgccaatgaagatgatctcaccaagttttggactaagttttgaaaactgaaaatccctccaaaagtgaagaatctggtttggagagctgctcgagaatgtctgccgacactgcagcagctgaagattaagtgagtagacgtacaaacactctgtcctatctgccatggtgaagacgaatccatcatccatgccctcattacttgtacaagagtgaaacaagtgtgggacagagttggcattggaacacatgttgcagcagccgaaccagcaagttttctggactggtttactgctgtgtttgcgactgctgatgcagagaagaagctgcttctcccggttctttgttgggccatttggaacgcccgtaatgatgtcatatggcagaagaaaaatgttactgcagccagcattgtagtgctagcaactggttaccttgaacaatggaagaatgctcaaaattctcgaattgagacgtcatggtcaggtattaaagcggatgacagtgccgagcattggactgtaccaaatgtaaattttatcaaggtaaaatgttgacgctgctctctttgacggtggtaacatatatggatgcggattagtggcaagagatcattatggtatgctaattgaggggaagatggtgctctgttctggttcggttacacccgaagtagcggaatcaattggcattcgtgaagcgctaagttggatcaagagtcataattggcagcatgttacactcgaaacggattgcttaacggtggtccaagcgataagaagtgaggtgaatatgatttcaatttttggtcaaattatccaagagtgtaaaaaactgttgttcgaattaaaaactatttctgtgttatttgttaaacgatcagcaaatgtggtagctcataactgtgctagagcttccatattttttcctggttgtatcttcgatatggagtctgttccattcgacttgctaccttctttggtagcggattttattggttaataaagatgcattttccgttcaaaaagaaaaaagatgtattagtcatttttataaatttttaaagagtatttatttatttatttatttatttttgaaagaaatgagtattttatttattaattagttaaattggaacaaagttataaattctaaaggtaaatacaaatctcactaatagataatctaaataatttttttttttcaaaaatatagcaaagtgtgaatagatttttttttttttttttgaaatttaaatagaattgattatgagtaaaattaataataataatttttgttagtgatgagagtcaatcaaaagtgaagaaaatagaagctctcatttttcctttgataacaagttatttaaatctcctagaagaccttagggccctagtgcttcaaagatgtctccctccaccaaaaaaaatttcttacctgaattgatgtgttcaacgaatttaaagtattaaaaataaattaacattaccgacaaccctatttattacattcactcatactaaattactaatcatatcaaccgacttttctttttctttttctttatatgatgctatatcctctttcacttcatatgtatgattttgatgagtgatagccacacgtgctataaaccaatcagaggatgacaagtggtgccacgtacacatgagccaatcacgggtgagattgttacacaaaattaggctaagtgtccccctttcttttaaactctaattttgagtataattaacctataaataattcttaatgccatcatgatgattaagttcataagcttaaataataaaagctaagaacccacatatatatatatatatatataaaatatttagggttgttcgctttaacagttccaattttgacctatttaacttatgggtaaataccattttggannnnnnnnnttgcaaaagttacagattggaccct

SEQ ID NO: 31491 - DNA, 1897 bp, Cannabis sativa
  modified_base (353)..(368): a, c, t, g, unknown or other
atcctctacaaaactttgaaattttaaaggatcgacatttaattcatattgtgcatctccaatcatttctggaatgtgatcatcctcatagtccaaataaacacccttaattaaccttgttcgacttagacgttccctcgccaggaactctattcttttcctcgtggtacccaaaccttataactcttgtctattctgttcctaaataaatgctcttgtaatcggacattcccgaaaattaaaaacatgaaaaaataattaataaacacataaaacaatacaataataacaaaattaaattaacaatataaattatccacctatccgcagtacatgtattcacagaacctacnnnnnnnnnnnnnnnnatttaagatattcaaactcttctaccatgcatatatatatttcacccatccgaccacagtataattaatcgcagaacctacttcactaaggatgaatatctatcatattcaatctccactagataaagatttataaagttttaaagattatacctttctccaataaagatagctacaatttcacaatcttcattcaacacaaagaacccaaaacctataaaacatttaaataattaaagtaatcaaatatgtataaactaaatatacacaaatatatatatatatattactgataatttattaacttcacaaagtatattaataatcaaccaagtctaataaagctaccagtcaacatagtcaaacaagatcaccactaatgtcctaaaataattaaaattaataatgttaaacacctcaataaaaatgtttaagtagcttaccaaggttaatatagcgtcccaaaagttttcgaacggtatcaccacaaataaatacctacacaaaattatccattaacaattaattaaaggtttaaatcaaactaattaaacttaaacttattgcataaaaaataattaaacatttaactaaacttttgttttacctaataataatttaaaattatacataaactaaattatacaactatttattttttacaataccaaattaaacaaataaagttcttgcctaaactaaaatctttcctattcaaaaaacttttctccaaatatatttttatctaagtttataacccattatattttttaaaacacaacaaaaattcttttacacattacacatttatatacataaataaatatatttacatatgttcagttttttaaaaaataattatatataaataaatatataaataataatttataccttacgtcatcgcggtcgtggtgtcttcctctcagacgtcgccgtggtggcgaggcgcgatggtgttcgcgggttttagggattgagggttcgagggaggagggaggtggaggcactgtgggtttgacggaggagggacgtgcgaggttcgtgtggtgggtttagggttggacggaggagggaggcgtgggttcgacggaggagagagggggcggcgagaagagaactgaaatgaagtgggttagtttgcgaatggggaggcgtgggttttgggttggaaccgtggctgaaaatgaaatgaaatggggttagatttttgctgaaatgaaatagggtactttttgcttaaataaaaaaaatttgggggtagtactattcctgacggtttaaaaccgtcgggtatagaggggtacttttaattttttcttcttttttaattacaaaaacctttgcctacttttgttgctacggttccaaaccgtcgggaatactcatttttcccgacaattttaaattgtggctcaatttttttagcaatggtcctaaaaaaaatcgtttttaggatcgtcgcgaattgtcgtttttgtagtagtgaatagagataaatgattgagatctcatttcagtaattatat

SEQ ID NO: 31492 - DNA, 4842 bp, Cannabis sativa
aaagaggatttagtggtgtttcaaaacttgagtagagttatgaccacatcgatctatcagacttgaaccagtatatatcttggtgttaattttatcattttactactttaatcatttctaatttttaataatctgctcattcgtgttttctctgattactattttgtgtttgttattcttgtcatttataactgtttggtgattaaattttagttcatttgatttttcactttagtcctaatttgccaacaaatcagagcttggtagtccatcaacaacatagaattaagattctttccgttgcaattcatgaaaaaaaatagtttatgtcatcaatggcgagattcgaattggagaagttcgatggaactagggactttgcactaaggagagaaagtttaaaagggatcctagagcatcagaaggtctctaaagttcttggcaggggtgtagaaagtcatccaatccaattacaactgatcgatccaatcctaatcaatctaatagtattagatatccaatcataattggatcagattggatgtaaattttgaaaatccaatcggattggatgggacattcgatctaatggataattgaactgatccaatccacttatcatccaattatatttatttaaaatatatttataatttcatatatttaatatatttatttaaaaaatatattaattgattttattcttattgtgtacctgtacacatgagattaaagaaaaaaaacttaaatctaaaatattaattctcatcttcctaaacattaataaaattatcaatgcgtattgaataaattttattttttggcagttttattataggatcatgagaattaggttggactaaactaatgtttattatgtatgttgaattattaggttttaaattatgtttatatatatatatatttctttttattgaaattagcttaaatggtagctaaaatgaattggatggatccaatccaatccaatagaaaaccaattaatgcatctaatggttagaatcgatccaatctaatacatctattggaatggatcggatcgaatgactcaatttggctggattggatcagatgacaaaatccaatgtctaataaataattagattggatcagttgtgtccaaatccattggatttgatccaataaatacccctagttttttaacatgagaagttattggccgaaaacaaattgaaagagaaagcaaaattggaagagatggcatattatacgatcatcatgtatctgtcaaacagtgtttgaagaaaactcatcacagagaagacggtgaaaggattctagaacaagttggaagaattatacttaaaaccatcaattgctagaaatgttatacggttttagaatgatttcttctatttctttagatgataatattgagaggtttaatgaaattattgtaggattggataatataaatcaaaaggttaatgaaaaaagccacaccaccattttgttgagatcgctcccaattgcatatcaagaagtcaaggctgctatcatgtgtggcagtgacgtgattgtattagaggatgttcttgctgaacttaagtcaaaggattttgaattgcaattggaaaaggaatccaagaaagaataagtgtatctagaaagaacaatatcacctaaaaaagtaaggtcgaagagtaaacaccatcactctcaatcaagatcgaattctagagagaaggaaactcaaaagtgttacttttgtggaaggtttagacacttgcaaagattttgcaagaaggaaaaggagcagtgaggcttctacaaatctcacgatggagataggaaggacaacagacgacatcaccgtaggaaggattcaactgtaatcccagaggatagtgatgattgctcaacatatggagaataattcttcatctcagaatcttcaatgaacatgtattggattcttgactctgtatgcactcatcacatgtgtccaagtcaaaactcattttttaactatagatgagttgatggaggtaaagttctaatgggaaatgatgattcatgcaagatcattagaaccaaaaaggttgccatcatacagtatgatggtgaaatcaaggttctgacaaacgtaaggtacatttcaaacttaagatgaaacctcatatccctaggtgcacttgaagatgaaggttacagatacaagtccatgcaaggaagcatggagatcactaaaggttcattgatagtgatgaaaggtgaaaagatcaatggtttatatattctccaagaagaaattgttccaatcggagaagcaagtttggtgaaagggctagaattagatatgtaggtgtggcatcacagactttggcatatcagtgaacaaggcctcaaaaaaatgcacaaaaaaggtataactgaaaatttaaattcttgtgccttaccattttgtgaagcttatgttttatggaaacaacataagctgaagttcactctggcaaggcacacaactaagaagatacttgaatatgggcatgataatctttggggccataaaaagttctcactcatttcggtaagcaatatttcctttctgtagttgatgattgtaacaggtgtgttttgacttatttgctaacaactaagattgagtgtctagaacagtttagaattcggagaactcaggtggaaaaaaaatcaaccttaaagttaagaaccttaggataaacaagaggttagaatttattaactctgaatttgataagttgtgtcaggagtataggatcactaagcataatagtgaagaccgcagagcaaaataatggatctaaaaggatgaaccaaaccttgttgaacaaagttagatgcttatagtttagttctagattagagaaaccattttgggggaagctctaacaactacaacctaccttataaatagaagcccaaaccaagttataggcttgaaaaccccttataaaatgtcgtacaacaaaatcccaaacctcacatttaagaacctttaggggtacaacatatgtacaccaatctattgatgagctggaatctagataagttaagggaactttcctaggttatgccttatgtacaaaggggtatagaatttacatttctaggaagggtagacaaaaggttgtgagtgatagaaatgttgtttttaatgagttggaatatgctcccttgacatccaggaaaggtagtgtgtctccatgtgatatagaaaaataggaaacaagaacactacacgcatggaagtggaatacagagtgaaacatcctgacgaaggttcacagctggaagctatgtggaactgaaagacagtgtgcagacagaagctgttgttgagttggaagataacaaagactaaataaggcttcaaaattactcagacagataggtttgaaaggttcttagttggcgcgtgatagaaccagaagagagattcaccctctgacaaggtttgcagaagcacacttaatagcttttgcactagacgcagtacaacaaattaaaattgaagagcccaaaagctaggaacaggaaatttcaggtgaaaacaagtccaaatggctttcatccatggatgggaagatggattcactctagaagaacaaggcttgagtagtggtaccaaagccagagaacaaaaagattgtggagtgcaaatggattctcaaggtgaaagagaaaaattgataagaatgaacaagtgcaaagctaggttagtggctaagggcttaatcaggttgaaggaattgattacattaaaatctcctgacgtgtggtaaaaaacaagacaataagactttttttcaatgggttctaagatgaagagatctacatgaggcaaccacctgggtttcaggtggaaggaaaaggagttgagctagtttgcaaactcaataggtccatatatggtttaaaacagtcccaagatagtggaacaaaatatttgattcttatatgcaacagattgggttcaaacgatcaacatatggtcactacttatattttaagaaccaggagtaatcaataactgtgttttcattgctgtatgtggatgatatgctcatcgtgagcaaggataaattaatgatcaaaagtatcaaagccaagcttaaaagaaaattttagatgaaggagcttggactaattcaaaagatacttggtattgaagtttgtaggagcaagagggaagaggcgataaacttaaagcagtttgggtacatcaagaaagttattcaaaagttcaacatggaagttgcaaagagtacatctgctatatttggttgaaagtttgttttgtcaaaggaatagtgtctgaacggtttgcaggggaaagagaaaatgaaggatgtaccctatacaatggttttgggatttttaatgtatgtaatgtgagcaccaaaccggacatagctcattcactaagcatcataagtcgtatcatgtccaatccagacattgaacattggaaggcccttaaaaagttattaaggtacttaaagggcacttgagattatggtctgacctatgagaaagaaaaagtagaattcgagttaaaagggtttgtggaaggtaactatgcctcaaacagagataccagaaaatcaaccactttctacgttatcttgacaaaccaaaaatgtatatattagaaggcccagttacagtctatggtcggcctttcaaccgcagaagcagaatttatggcaacgacaaaagaattcaaggaagcgttatggttttggggagttttgtttatataaaaaaataagatgaggagtgactttttactctgatagtgagtcatccatctatctt

SEQ ID NO: 31493 - DNA, 1933 bp, Cannabis sativa
  modified_base (1867)..(1876): a, c, t, g, unknown or other
agaactcaacccgacgttggtcctagtacgcggacaacccgctcgaggagaactcagcgtgggaatggtcagaatcctggggcgagggatgaagagctaaaccgtggaggtgcccaatctatgggagaaaaaacttatgaaacggaaagctaccttctgagacaccgtttagaagaggcgcagcgtcgaaacactgagctagaacgtgacgtagcctcggccagggcggcgcaggggatgaacactcaaaattaacctgaaccttgagtgagaagaccacgaggcagacctcatggctcacaaactaggagacaggaaaaggcccgggaagaacaagctggggaaaatgagacaccccctaagaatcaggatgaacagccagaaaggagacaatcggaaactgatgaaggagaaatccctcatgaaaatgaggaggatcttgggactcaactgggagaacggagatcacctgctagaaatcaccaatgttcttcccaaacccatagagcgaggactcatacataccttgatgggggaaatgcgacaaactgctctcgggaggaaagaacatagcgtgaagaagcaagtgtgacttcgaggcaatccagaacccatagccgatcaactcaaagaggagaaagtactcaacgagctaatgatcgagaaagtatgggaactagtaaatctacgagccttttaaaaacaaagtctatgagtaggacgcggtctatgagtaggacgtggtctatgagtaagacgatgtcttccagcaattactcccaaccaactctgcgagagcacttgaatcagaggaaacctgaccttcaccaacatcttggtccaaagcaagaggatccaatccaattgtggataaacgagctggaggacaagttctggagatatcaagtgggggaattagggaaattatttgaatacgaatctgatgaggagcttgagccgtatcacccagatattatgaataccccttttccttcaggattcaaaaaccccatgtctcgcctatgacggaaccacatatccggtctggcatttgaataactttaacacgataatgcgagcgagtaacgtgataaacaatttacgctgtattttgtttcccacctcgcttgttggagaagcgagtagctagtttaacaagtttactcatctttcaataacttcctaggaacagctgtccagggatttcaagaagcatattcaggtcgctagggataggcaacccgaagcgacctcgctaaccaatataaagcagcagcttggagaaacacttaaggcgtacttaagtcattttagcacggctgccactagggttagaaatttggatgacagcacgcaacttacagcccttcaggcgaggatctccactgatccattaagcgccgggggcgagttatgggatgatttacaaggacctccggtaagaaccatcactgagttcaacgagagggctcaggtgtttgtccgaaaggaagaagcctaaaaggaaatgaacttgttgaaaacaagctcatgaggtaaactcagcaatgtttcaacatggactgcttccacgagaattgataactcgggggcaacggtccgaaaagaaaagaaagaattagggaatcgtcgaaagatagaaagaaacaaaagaagcatgacgaattacgagtcagtgtatactatttacaccgagcttaatgaaactcgagaaaatatttacctcgcacatgagcagaaggtagccttcggcaagcccgagcctatcaggaattcgaggagcaaaagagatcctaacaaatattgtaaattccaaaaagatattgggcatacgactaacgaatgtcaccaattgaaagatgagatnnnnnnnnnnatcgctcgaggccattttaaacagtatgtgaagagacagggccaaggatacaaccag

SEQ ID NO: 31494 - DNA, 4718 bp, Cannabis sativa
atctacgcaatcacataaacctgatcttcgccatcaactcggtccaaagcaagggaatcctatccaattgcgaatagatgagttggaagataagttcaagatgtattaagtcggggaacaaggaaagcattctggttatgactcagatgaagaactcgagccattccatctcgacatcattaatactccattcccctggggattcaaaaaccctcacgtctcatcatatgacgggaccacagatccagtctcgcatttcaataatgtcaatactataatgctagccaccaatgttacgaacaatctacgctgtattttgtttcccacattgcttgttggagcagtgagaaactagttcaataaatttactcatcattcaatcattcttgggagcagttgtctaaggacttcaaaaaacaattttaggccgcaaggaatagccaacctgaagcatcatcactcaccaacataaagcaacagccaggcgagacacttaaggccttcttaagtcattttagcatagctcatgtgagggtgagaaaacctagatgatagtacccagcttactgctcttccggcagggatcactactgatatctccactgttggaggcgagctatgggataatctacaaggtcgcctagtaaaaaacattactgagttcaatgaaatggctcaagtatttttttgaaaagaagaagctagaaaggagatgaagttgttgcagactggctccagaaacaaacatagcaatgtctcaataagtactgtcttgaccaaggctgataatctaggagcctctagttcaaagaggaaggataactctaaggagtcatcgaaggacaagaaaaagcaaaagaagcacgataagtatgtgtcaatctacaccatttacaccgagctcaataaaactctggaaaatatttatctcgtgcatgagcacagggtggcattttgtaaacctgagcccatgaggtacgcgagacataagagagatgcaaccaaattttgcaagtaccacaaagacattgggaatacgacagatgagtgtcgtcaacagaaggatgagatagagagcctcatcacttgagggcacttcaagaaatatgtgaaaagacaggacaatggatacaaccagccaaatccacccaataaccaaagcaacaagggattacaacctcctcctcttgaaggagaggatatcctggttatctcgggagggccacatattgtaggagagagcaataatgcccaaaataggtatttgaaggaagtaaagatcgagcagtctgcctttgctccgaaaccttctaagaaagcaaagacttaagaacctccgattatattctcagaggaagatgaaaaagatgtgagacatcctcacgttgacccattggtaatcaccatccagctcaccaataagaggataaaaaaggtgttgctggacaacggaagttcagtgaacatcctttatagggaaacacttgagaaaatggggcttgaataacctaaattaagaccttgcatggtaaatctttgcggatttacaggcgacagtgtcgccagtgaacgaataattgacctcccattaacattgggtaaagcacctttatccaccacgataatgcaagactttttggttgtcgacttaccatcaacttacaacataatgctgggtcgaccagcattaattggtctaggggcagttagttcaattaagcacttatccttgaagtttcaaacaccaatgtgtgtgggagtagtgcggggtgatcaaatgctggctatgctatcgcatagagctgcaacccagaaaggctggtcactagttaatggcagtgttggctgaagaaggcgagaagaaggatgaagatcttgatccacgaattcaagatgaaagaaatttgttgaaaccaattgaggagcgggaagaaattattctagatccaggaaatcccacaaagtgtgtatacattgggaagaacctaaatgaacaattgaaatatcagctaataagctttttaagggtgaactgccatggatatatgataggaattgaccttaagattatctgtcatcacttaaatgtcgatccgaattacccagctaagagacagaagaggcgcccttggattctgagatataagggtcgctcaagcaggaattggataagttgttggtgaacaactttatacaggaggcattttatccctcgtggatatgcaatcctgttctcctcccaaagccaaatggaacttggagaacttgtattgacttttctgatctgaataaggcgtgtccaaaggattgctttccactaccaaggattgaccagttggtggatgcaactgctggacacgagcttatgccgttcttagatgcatactctagatataaccagataaaaatgcatgtcccagatcaagaacatacaagcttcataaccaacatggactttattgctataaagtcatgtcgttggtaaaaatgttggggaacatatcagacttgtgaatgaaatgtttgcaaatcaaattagacggaacatggaagtctacatccatgatatgttggtgaagttggtaaagagtagaattcatacaacagacctcgcagagtgcttcgaaatattaaggaggtacaatatgaagcttaacccgaaaaaaatgttcctttagagtttccaaagaaaagtttttgggattcatagtcaacgcgaagggcattgaagcaatccccaagaaaatcaaggctttgatagatatgccctcaccaaccaaactaaaggaagttcaagccttgacaagaaggatggttgcacttaacagattcatttcgaagtcaactgataagtgtctgccatttttcaatgtatcgcatggcaacaagaaattcaaatggacagaggaatgcgaggaggcctttaggagcattaaaaggcacttttcaacacctctagttttggcaaaaccaataactggagagacattactcctctatttggctgtctcaaagaatgcgactagtgcagcgatagtgcgagaagagggaaagtaccagcaacatgtttactatgttagtaagaggttattgggggaagaattgaggtatccccctcttaaaaaacttgccttatgcctaatctacacatctcgcaagctacgaccttactttcaagcccatccgattaaggtgttagctgatcaacccctgagacatattttatcaaaaccagatgcttctagaagattggtaaaatggtcaattgaactgggtcagtttgacataacttatcacccacaaacatccatcaagggccaagccttggctgatttcctgatagaaggaataacttcaaaggaaaatccacttgttcagggagacgcgaatacttggagattatttgtggatggtgcatccaaggagcagggctcgggtgtaggggtaatattaatttctccagaaggcgttaagtttcattatgccttgagcttccaattcaatgcatcaaaacatgaggctgagtatgaagccttgatcacttgtttgaggatagctgaagtgttgaagataaaaaatctcatgtgtcataatgattcacaattgattgtaaatcaagttctcggggaataccaggctaagggcctgaaaatggctaagtatctagagaaagttcagaagaacttggaaaagtttgattatttcaaaatcgagcaaatcccaagagaaaaaactctaatgtcgatgccttagcaaaactagcctcgtagaatgacttggatgaactaaacttggttccggtggaattgttaaaggagccaagtatatgcgaaaaaggaagatgtcaagatgatagatagctcgcccacgtggatgactcctataatcaactatctgctcaacggataacttccaactgacaagaatgaggcacgaaaactcctgtattaagtgcctcgctacaccatagtagatggcaagttgtatagaaggggctattcaatgcctctcctttggtgtgttcttcctgcagaataaaacgagatcctcagagaaattaatgaaggattttgaaaatttttaaagtggtgggtttgcaatatatcaataaagatcatgacaaggacattattggccaacaatcaacaagcacacccatgaatttgtaaaaaagtgtgataagtgtcagagattctcgcatatacctcgcgtaccaccaacggaactgagaatgatgacctcaccttacccatttgctatatgggggattgacttgattggggcacttcccacagggcgaggaggagccaagtacgcagtggtggctgtcaatttctttactaaattgacagaggctaaacctctagtttccataacctacaagaaagtcctagactttgttgttaaaaacattatctacaggtttggaattctaatgaagataatatcagaaaatgggattcagttcgatggtggattattcattgagttctttgaaaggaacaagataattaaaagcttctcgtcagtatccaggcctaaggcaaatggacaagtggaagctgttaacaagaccttgaaggatactatcaaaaagaaactagacgctgccaagggtagatgggttgacgagctacctcaagtactttgggctcataggaaaattgagaagacactaacggaacatagtatattctcgctagcattttgctcggagg

SEQ ID NO: 31495 - DNA, 2488 bp, Cannabis sativa
  modified_base (34)..(48): a, c, t, g, unknown or other
ttaaatctgaatatcttttcaatttcaaatttcnnnnnnnnnnnnnnnaattttaggaattggttattaaaattctttagattttttttaattaagtgtgtttcttatgaattaaatgacctataaaaggaaggtgaaagcttcattataggcatcatttctgctacattctcaaaatccaattattctttcaaaaaacttcttcaaatgttcttcaaactctctcaaagatgaaaaatctattatagaattcttgaagccttaaacttttattctttcatctgattcgaaagcaaaagcattaaaaattctacagtagctgagatatcatggagaatcgatcaggggaaagaaaaaaatccacgaagaccaaccagggctatcatggttttatgtactaaatcaggtgcatagaggataaatgtttttcaaatattattgtatcatattctcaggattacatatatattatatctaaagtaaaatagaagaattttttttttctctcgaagcctatcagggtatcctcgagtctttttgtatgttgtatatatccttagctaatctcgatatactcacaccgcagtctttcagatctttaaccacacactaggactagtgtaagctagtaggataaagtgtttacaaagttcttatttaattcttaacacatgagcaagaattattctatattaattatggagaaaaaatattaatcagattaattctttttcggcttaccaaaaataatatgtatcagtttttggttaatacgatgtatttaaataaaaaacaataaaatatttatttaaatgattatttaaatttaaatcatatttaattatttgaataaataatataactaaattatattatagatgattattccgtataactgattgagagaatctctcaattacttgagggaatctcttaactatcttgagagaatatctaaaccaataaaaatatctataactactttttaaattcaaatttaaataaatatttatcttttgaattaattaacccaaaaacaaatcaagtggggacaaccttataaatagagcgcctatcattgtgtcaggacacaatgatagcggcgacacctaaatcttaatgagactttggcagtttcttttgtccagaaaacttttatctttttcccaatctatttattaataagttatttattacaaaataaataattactattttgacaaatcaaaatagatttttctgaacttccatacgcaacttttatctctacccttgatagtgtttcaagatggcaatccaaggaccatagacctataattctaagctctaataaacttgttgatttattgaatctcatcaatcaaatactcatgtttattagttccatgattactcaactataaatattgagttgaaatcttagtaattgtagaattatatttactgagttttactgcagtgtccattgatataatcaattccagtggttagccctccttgtattagttcgtaattagttttggttaaattacttttttacccttctaattagttccttatcctttagtaccattaattcactaattagagtataatttagatccaatataaatttgtgaacaaattttttttttccagaattaacacttaaaggggaccaacatttgatcattaaggaaagttagtattccataattgtagatcatgttctccaccatctacgttactagattccaaaaatagaagttgtcagaatcatcttctctgaaaactttaacgagtgaatcaaagaagctaataacatggacaagagttcatgcatgattactcaatattcaggccaatctacatatatataggtccttgtcatatatagtgtcgattatatacaccacattcacttagatgtcatactacatcagtaatccgaatcgagattgcttgcactaaatacaagcaacagtgaactgcactagtaaccattgattaaagattctgtaactttaatatgttgctgactattttattcatggcttagtgattttaattctctgtacagtataagtcacaacatcaagtatgaataatgaacttttcgatatttatatatagatcattcaatattaaatatttataatttaacatttaagcatatataaaaatgtcaaacttatatttataaacagaattatctttactgacattttagagcataaaccctaacacgctaaacatgtgctttagcaccctgggttccttgtctttgttcctgcaatctcattaaaagcaatatagccctaaacataagtgttttggttttataacgatggttggtgggaacaaaggttcagagagtgttcttgtgcccagttaaatgaagggaaagaaaaattcatataagttttactaataagctgatccaaagcaacgatgaagcttagtgttgtcgagtgaatttcgcaacaccaaattatattattttattaat

SEQ ID NO: 31496 - DNA, 2652 bp, Cannabis sativa
ttatagaataaaataatgtataaatcatagttggcaaaaatactaaacaggcatagagtgctacctatgctaacagtcccatttgcaacttagtacatagaaaataattaagttgaggaaacataaacaaaaaagacacctcattcaaaataaatgtttataaaatgacaaaactaaaagaaaagaaaaaacacaaaacaaaacgctacgaaatccatgctaaaatgtcaacaaaagattcccaagctcttaactacatggctttaggtctcaatcaaagtcttaacctcccaataaaaaaaaagagtatgtatatttatagagtaaatataatcaaaggatcctttcatattgttgacatttggatagttttaatcatgctttttttgaatgacaatgtaaaacatttttatttaaaatatttgataaatttttaaaaaattcaaaatatttaacgaatcaaaaataaagtttaaataattgattaatgtgtattttatttttatttttattttatacacctgaaataaactcttaatttgaactcttgtaaatcattctaaattttttaaaattttataaaatatcttaataactaaatatatatcattatatatataataaaaattaagattacaactattggaatattaaaaacacaaaaggaccctttttttaaggtgcaccttacaaccctaaaatctttattaaaaacaaatttagcccctacacataaattctaattcggtcattgccccaagaatatttagagcatgtttcatattgttttctgttttttgtttttaaaaaattatttttagaaaggagaacaaaaaatagtttttgaagtttttaaaaacaagtcatgtttggttagtattttttaaaaacaaaacagaaaacaacattttgttgttttcaaaattcttgttttttgaaactgttttcaaaaccaaggccaaacaaaccaaattattttcaaaacacaattttctatttttaaaaacaaaaaacagtttttttgttatgatgctaaacatgcacttagtttcaaacaataaatttttaggaaggactcattatttctactaaaaataaaatattgtaaaaattttacaatgcacctcttaaatataagtgcaccaatagagtctctttagtgtttttcgatatccacaaaactttagttttaatttttaaaatttagcccctacaaataaattctaatttggtcattgtcacaaaatatatagtttcaaacaataattgtttatagacgactgatacattaaatatatctattgaatataaaatataaaaaaattctacaatacatccccttaaaatatatttcggtatctaaaaaattacttagtttaattttttttatagtcgtatacattatcattatttaagacatctgacaaaattttgagaaattcagaaaaatttaacacgttaaaaatagtgttcgaagagtttgttagacgcgtgacttttttattttacacgtgtgtgaaatagacggtttaaacattaaattttatattgtaaattattccaaatttctcaaaaatttgcagaatgtcttaaataactataataatttaaagtaaaaaattttttagataccaaaatagttaagaattgcatcaatacatccattttgatgaggtgtattgtagtagcccctaaaatatattgtggagattttatggtggaggagtaccaattaatgtattgtttttaatattagataattttaatggacattctattttttttaagagatcccgtaaatttttgagaatttcaaaataatctaatacattgagaataatttcaatagtttaaataatttgctgaaagcattcttcgctcaaaatagacaatttaaactctactttcttttgatttcaaaaaaaaaaaaaaagaaataataagaaaaaaaatttactttctctattataaattgtctcaaatttcttaaaaatttacaaaatatcttcactaattaaaatatagatcatcattaaaaaaatcattaagataataattttttacaaatcaaaaaatagcaagtgataaatttttattggggatacacatttttctcatagtgatggccccatggggacccgcccctaatgggcggggacggaaattattttttattctcgaatgttaaatggggcgggggcagagacgacactccctgtcccgatggaaacccgtttggtattttattttatgtttctaataataatttataatttatgtttatattttactagtatattattataatgaattttaagttgtgttttagataataattagtttattgaataataattaatgtgtaatattttaatttttatatagtttaatcttttaatatatttaaatttttattataaattttattttattattagaggatttctagccctatcccgtcccgggaataaaaattaaaattcttaataaaaatagagatgggataggagagtactctaggccaattctccttcccgtatgcatctctaattttgtaccatttatattatatgctggacccacaagtgagattatctcaaattaattaattctgaaattaatacattagcatttatttaaccatagcaagaa

SEQ ID NO: 31497 - DNA, 1938 bp, Cannabis sativa
attttggtaatttctagctaatctgccaaaccgacaacttaaaattctaaactagtctggtataattcccattcgatccatattttattatcgtgacatttccgaccactctgttgagttcccatagtcgtcgggctcgaaaatattttattccataaatggtatctacgatactcccataatttaataaaatattcgtaattaataaattatgctttatttaatcatttattgaatacacactaattaacctaagtaagatcataatcttactttattaccagaaaattacatatttaataaaatatgcccaattaaataccataatattttttgggatattacatctactttttcaagaatgccattcgggctgtgtaatgctccagcaacattgtaaaggtgtatgatggcaatcttttcatatctaattgagaagtgcatcgaggtgttcatggatgacttttcggtatttggctcatcttttgatcaatgtctaagcaacttagaactggtattaatgagatgtgaagattccaatttggtgctcaattgggaaaaatgtcacttcatggtaaaagaggggatagtattgggtcacaagatttcaaaaagtggtattaaggtcgacaaagccaaggtatcaacaattgagaacttaccccctccagtatcagttaagggagttcgaagcttcttggggcatgccaggttttatagaagatttattaaagacttctccaagattaccaaacccttatctaatcttcttgctaatagagtgccttttgaatttgggaaggattgtcttgaagccttccaaattctcaagtagaaactaatttcagcgccgattgtgactacaccagattgggagctaccttttcaaatcatgtgtgatgccagtgattatgctattggtgcagtattggaatgaatggttgacaaggtatttcggactatctactatgcaagtagaaccttgaatgatgcccaattaaattatgctactacacaaaaggagatgatggctatagtgtttgcataagacaaattctgacattacttgattggaaataaagtgatagtgtacactggccattcagcaatcaagtacttaatgactaaaaaggatgcataatcaagactaattcaatgggttcttattctacaagaatttgatttagaaataaaagataagaagggcatagagaatttggtagcagatcatctgttatggttggaacttgaagagagtcaatgcaagagaggttcagattaatgaagattttcctgatgagtaagtgtttctcttagattctacggtaccttagtttgcagattatgtgaactttttagccgccaacattacaccaccagatttgacaaggcaacagttgaagaaattctactcagaagtcaaacactactattgggaggagcctatcctctataagcattttgctaatcagattatcactagaagaggagatgttctctatattaactcactaccatagcttacaatgtggaggacactttagtggaaatcgaactgtggcaaaagtgcttcaaaatgaatttttttagcctactctatttaaagatgctcaccaatttgtccaagcatgttgaccgttgtcaaagaactacaaatatctcaagaaggaatgagatgcctttgactggtatattggaagttgaactgttcgatgtgtgggacattgacttcatgggaccttttctgtcatcatacaacaattcttacatatttctagctgtggatgatgtgtcaaaatgggtagaagcagaagcaacacacttgaatgacggcaaaacaatgctacattttttttaagaaaaatatattcactcggtttagaactcctagagcaatcattagtgatgatggaagccatttttgcaataaacaatttg

SEQ ID NO: 31498 - DNA, 2008 bp, Cannabis sativa
  modified_base (1619)..(1638): a, c, t, g, unknown or other
tttattaaaataaattaaataaacaattaaataaataaacatgtaacaaacaaggaaagttggttgagatattttcatttttaataaataaaatattattaaaaaaatatgataatttgaatttaaattaggtagttaaataatataaaaaaaaatgttaaatctaacaatatcctaaaatatttcaattcaaattaaatatacaattaactttcaattttctagcttatttaaataaattgtaataaattaaataactaaaaagataatatgatataatatcttcatttgaatattaagatatttaatcttataatttaataaattaaactgaacaaaataaatcaaatttgaaaatttggtatttatagttagcatattattattttatattttaattaaaaaaataaaataaaataatataccctaatttttcaaaaatttagggttgttaaaccctaaatatctattcaaaaaaagaatactaactaaatatcaaaatttatatcatttaaatgaaatataatttaataaaataaatatctaataagataaaatgcaattaataagtagtcatttatctaatcttataatgtaaattaataatatatatcaaaaataagaaatttttgaaagctgatatttatggttaagtttttttaaaaaatatatctagattattttcaaattttatcattattttaatgtcaaaaaggtcattacatattttattaaataaataaataaaatatctaaaatatctaatcctataattaaaatgaataaataattaaattttaaaataaccattataggaaatttatcgaaaactcaaattttcaaatttaaagcctacttatatctaaaattaatttaaattaataaaaattaatcttaatctaatagttagatttatattaaaaaataagattctacaaaaaaatctaccaaaatttagatttcatatcattaaaaaataatttttaaaagttaaaaaaattttgaaaattggaatggttggggtttttggttactgtatggtccctcatgtggcatttcttggttaggctcgagccttgtttgagaaatctcggtcaggatgttgtctgaactgagttttgtaaaaaaattgcccaaaaaatcaggccatgcacgcgcagataggggaaaccctcatccgatttttccaaaatttaaaaatatcatctcttttttaattttaaacacaatcttccacactatcttgaatattgacatgaattgtgtgagaaactcctcaattcactttaggcttcaaaatttcaaggagagaagaaggtaattttgaaattaaagaggctcttttctattttctattttgtctaataagagagactaataggctgagttatcagggtagaaaataagagcatcttattctatttattggatagcttcaaggattaagtttagaataaaatagaattaaaaaaaaataaaataatggctttaattgaacctttatggtcgaaccatagtggaccctacagagtttcaattttgccattttatttaaaacttatattttcctttcacaaatgtcataatttaattctaactctataaatatcaaatctatnnnnnnnnnnnnnnnnnnnnattatcaaataaaattataatttaacttatttattaacttgaccttacaaagtctcttaattaataaacaaaccctaaatcttctttttcttctcaaataagtcattgcttagtaaaaatttagaaacaagacatagtcttatttagaattctaattgataaattaaaactaattaattgagtctacaagacaatatgatctcaactagtgtggggaccatgggcctatataatctaggctccaaataagtagttttagaatttaccatgcaaattctctatcttattaattcttcctgactccactatagattcaaaattgtactcatgattagatagaacactatattcaccaagaataaatacgcta

SEQ ID NO: 31499 - DNA, 1537 bp, Cannabis sativa
  modified_base (947)..(955): a, c, t, g, unknown or other
aaaattggatacattggcattgtagggccagattactcccctataaatatatatgtcacttgcatatatttggaccatctcttccaatatattttctagtcaataagtcaagctagctaaaaccctaatctcatcatgtccactcaaatcttagcatcatcatcatcttcaaatgaaaacccaaataaaattgttcgtcctacaaaaacatttcatccacatatttggggagaacaattcttacattacaatatttcagaacaagatttggtaagcatatatatatatatattatatatatatatagtatataatattggatatatataactatggggagactaattatatttaattaatgtgtttattatatatagtattgtcaacaagaaaaggttgaggaattaaaagaagtggttagaagggaaatatttggagaatcatcaatatcatcatcagcttattatgatggttggaaaaatcaattgaagataattgatgtggtagaacgtttgggattggcttatcattttgaaactgaaatagaaaatatgatagaacaaatctgcaaccaaaccaatattgatgatgaagatttacatcatgtttctgatcggtttagacttctacgacaacatggatttagaatttcttcgggtaacactacaaaaaactgttacttttagtgacagctttttagtcacaacaatttttttttttatgactaaatgtgattttcgtcatgataacaaaatgttacttgtgactaaaacatagtatttagttacaagttgtcattaatttagttttagtaacaagtattgtgactaaaaatacatttagttacaataaattgtaatttttgtgattaggctacagactttttagtcataacataggaatcatgatttatagttagttacaatttttttcacttttagtcacannnnnnnnngtgactaaaagtaagatttttgtagtgaagctacttttcataacaatcttttagtgacatacaacataactaatttttttgtgattaaatgtaactttgagtcacaacaaaaagttacttatgactaaaacatattatttagatacaaattatcattaatataattttagtcacaataagtatattgtaactaaaaatacatttagtcataacaaactgtaatttttgtgactaaacttttaatcacgaatcttttaatcacaacataagaatatatgatttataattagtatacatatatatacatgcatatacaaattaagaattgtactctatatactaattatgcatacatatacacatgcagatatatttgaaaaattcaaagatgaggatgggaactttaaaaaatgcttggtaagtgatacccttggtttgcttagcttatatgaagcctcacatttgagttgtgttggagaaaatatacttgatgaagcacttgctttcacaacaacacacctaaatgagtttttggcgaagaaaaaagaacaccataaagacgatgatccattatcgaaagaa

SEQ ID NO: 31500 - DNA, 1108 bp, Cannabis sativa
tttttatttattaaaaaattaaatttttaactaagtcaacaaaagtagttagcatatttaatataaattaagttagttgacgtattaaatttagattgatttagcacaatatggaacaccaccttttattagagatcttaattccacttcaacatagacaatagtaaaatgttgtagacaaaatttgaataaatgcatttcacggtagactttgaacttgaagatgtccttctttgggacatactacatgttgacaaagaaaagtctcacaaaatgttcatgaactattgggcacctgtagtgcccaacaccttcgataggtagcacttcacgaatggttatcgatatttcttaaaaattattttcttaagttatatgggaccttatatttaattacactattagcggtatgacatcgaagaaggtgctagccaccagtaatactgatgagtgcacatttgtacacgaattcctagtcaattactagttaaattagtatttatttcttaaattttgtataaatttgatgtgttttctataatgtgcaatattatgctgaaagtgatgaaattatgataaattaaaagtgaaccgtacataattgagcaaagtgtcgaaatcaaggagcaaccaagtcgagaaacaagttaaagtgcaaaaaattggtgcttggtgctatagcgtagggtgtaggcgctatagcgcaggactaggaaaaaatattgcaaggaaaaaaagataatttcagcacgtgattattttgggatatttctcttaggcgctataacgcagggtgtaggcgctatagcgcagggtgtaggcgttatagcgcaacacttatctttttttaaaaataaatcctaattctaaggggattcatctatcttttgttggcctatataaagaataatgtaaattggattgagggacactgaagagatagaaacaagcaactctgagattagaaaacacattgaagagcaagagagaagggattcgaagtgattatcatcaactttcatcattaagagtttttttcttcttcttcttctttattctgttgtttagttatttaattatgaacatgattatcgtggttattatgttt

SEQ ID NO: 31501 - DNA, 1112 bp, Cannabis sativa
cccatttatgggtaatatccattagaagtgcatctatagatacatatatacacatttacatatatatatatacatatacacacacattcataaaaatacacataaatatatatatttacacacacatataaactcataaaaataaatacatatatatattctaactatacacaaaattaaactaaaattactatacataaaattaaacctaaagttatatatacaaaatttaacccaaatttttacacaaataagacttaaaataaataaaatatagattaccttgactgatatgatgaaatgcgggagtataatcggaggctcagggcagtggtttccagaggtgcggtagcatgtcgtcgtcggatttcggcgaagatttttttctaattattttttagaaaaaaaaagaaaaaatggatgagaaatgggggcaggaggttcaggctgaagttttatttagcttggaattttttcagtgcacttagggtcgccgacaaaagtcgaaccccaaaatatttaatgaaacacaacgtttcattaggtttaatactttttccgtagcatattagtgcgccgaaaaaagtttccacgtaatttttcgaacacgtttcaattgggcgagaaattgaccgccaaaaaatctcacagcttttgccggcaaaagccaaaatcctgatgaaacgtgtcgcttcatttaatgtgaatactattgtcggcgcaactcagtgcgccgataaaagttttcacttcctttttcgcgcacgtttttcactgtgagggaatttgaccaccaatgttttcaccacttttgctggcgcatttacgcgttgacaaacgtgaaaaaaaataatttaactttgtcggcgcatttacattcgccggtaagtgtactcgaacagccaaaagttctcaccttttggcggttggtttgccaacatttgctggcgaatctatgttggtttgccgggaaaagttcctactgccggcaccatatatcgccggtaaaactgtgagttaggccaaatttttggctcacttctgccgaagaatgtgctaagtttttttttggcaattgtatgctttttccggcacaatttaataattgcgtc

SEQ ID NO: 31502 - DNA, 1383 bp, Cannabis sativa
ggtgctctattgtgtaggcaacggtaaaataaaatagtgttgagtcagccatgattttgggggttttaaagataaattgtacatgtttcggccaagctagaccacatgggttgggtccaacaaggatttgcataaaaattccatatttgtcgcttatgttggccggtatgaaataacttgtgatattttgaaaatgaattttatgggatcccggatatgtaactttaaatgttttagtttgaagtaaagtatatattattacaagctatttatttaattaagtttaatattagtttcaaatcacttggcttatggaccccaattaactggattagtctagtcgcatactatgcccaacatagtcaaaagataagcaagactaagagaagttaatactagttgcgcatatctcttatattcgatgagcaagtatgtctctcctatgtaaagtaaagattatttctttacatagttttgttctgaatatgcaatcaaggctaattggagacactctttaagccaaataggaccaaagacccattatgcgattctaacaccacaaaaccttttagctcgcgttcttggaatatggacaggcaatatgcgacttaacaagttacatacattattgtaattaagacaagaacagaagaaaatgttcttatatttatacttgtaaatgtttatcttaataaattatgtgaagttatggtaattgttagaatttatttaagtaggatctaaatttattaacatgtagttgattataattctataatctaacactctaaatatgaatatcttaatacgatgaaataaacacataaaaagttaaggaaaccttcattgatggcaatggaataatatgtttccttctactcagatctccaacctttgtttctttctatccgagagtaataaaaagatccgagtccggatctccttctccttcaattttgttaaccactgtcttccgcactatgattgagtacttgagttgctatgtgtgggcatggtactctatcactaaaggtttaaattgatgaagaacagtaagaggagttcgaaaccactatgaaggaggctctcatttacaagttgtctgacaatgaataaaaactaggtttagataggttggatgagaatgagagcatcatgttccttatatagtatttcaactagggtttaggatttaattatatggattaaaaaagataaaataatagacaaatattcactaagtggtcagccacacatgtgggtctcactagttttaattttgcaattttatatcaaccatttatcttttctttcagtaataccatatttttcaatttcaatcctataaatgtcaaaactgtttatttaataattaaaattaat

SEQ ID NO: 31503 - DNA, 1963 bp, Cannabis sativa
atataaatatttcaatttattttaagtcaaattgtgtttatttataaatttgactctctcaaaaataacgaaaaaaataacaaaataatatagttatataatatcatttatatcatatagagaagaaaagtgcacataatttaaaaatgaactttttattttatgtaaactattgcttatatgtatataatgctgaataaaagttatacttataacataaatattaaatgtgatacaacagattagaatggtgagctatgcttaagctaaatccgtgtcaacaatggggataatctgtaaattaagaaactcttgactttactatttaatgtgtttgcagtgtgtggtgtgttttttagctattttttcaaaccaatttgtacatgcaatttttacaatttgactccgcttctgaacatacagtagccttgttggttagctaatttgttaataactaatctagttggttagattagttgtaatcacaactgttagctttcttgttactatgttacttcgtgtaactatttttagctttctttttagccaattcatttagcttgtataaatacaattcgctctgtaattcttatcagactgaaaatttcaaattacctaattactacgattgattaccaattttcaatttaatctaattatcaattcatttaaccaattcaagaatcaattgatcaatttcaaatagatagagacagaaattttacaagcttcccctgcatcgtaaacataattcggtcgggtagtgcttggatttcgcgaaccagggtaaataactccactaaaatgatttggaaatttacaatttccagtttttacaatcttgcaagatccttacagaagtaattaccccaaacaaccaaaacccttggcagctcaagcaagatccccttacttcaaatcattgaactcccttcaatggaagtctcgatctgaactccttcagatctcatggtgaggatgcaactaaaatcccttcagtctgaactcatcatcttcaaatcttaatcaacaactttggatcttcatccacaaagttctgagctttaacctgtaaaatagagaaagatagaatacaaaacaacaaagcccgacctaaagaatctccgatcaaaaagttatttaatgaaaataatagcaataaaaagtctcagtgttaacagaaaaccaagacagttgtaacaaaaaaacctaaaaaagtctgacgtggaaaatactaaatcataaaaagctagttacagcagtctaacatgctagacatgacaagacataagctctcatgactggacatgacttggaagtgtttgcatgtgacttttatttgatccatatgggaagtgccgagacagttgagtggggtgtgttggcttgtaaaagtttcaatgggtgtaagtcacacaaagacatccatagagatgtgaagttgttgaatgaatgcatcaaagaagccagcaggactaagaagacggagcgcaagcgttaagatggcgctaagtttgagtggaggccagagggatgtgccagtgagacttagtagtcatgtgagcctgcgaaggtcaagaagggtgctagagtttgctataaagccagaggactgcatcattcgaacttaatacatcgtgggagccggtacgacgtgatgctagtgcaaattagtcggatggttgagtggacaatgcatgcatatggaaatcgataggagtgctatttgagatagttgactcaaaagtcacatcatgcgggatgcacttttagatggcatggtgtgcatgaagagttgcgcggtcagacattcgcgcgtgtgagcttgttgtcaaggacgctaacagatgaagtgggggagagaccctcatggttcactcatcagactagggattcattacaagcatcgagatgagtatcatgtggattgatagttgttcaggatgtaaggtcaagaagactc

SEQ ID NO: 31504 - DNA, 2363 bp, Cannabis sativa
  modified_base (49)..(55): a, c, t, g, unknown or other
cttagcatggaacaactcattggaaacataattcgcagagtatgtttannnnnnngctggctgaatagccttctgtgagacaaaaacatacaaactgcaaacttatgtattaacgagaaaccatgtgagtacacgtgtgcatgacgaggcctcaacctcattgtatggaagagaaacgataaacgttaaaaacacttagggtatattatacgatatacaaactaagtgtagatagtttggcgagacaagataacaaatagcgaggagtttatttcgctagaggatggcatgcatgcgaggaagatcatctcgacaccagaaaatatagttatcagagttaaaacaatattagtcttgggaagtcagatgacaagcaactgctcgccattaaagttaacttggttccattatcagggagacatccctatgggataaggtttaccatatatctttaattacgcgttcatctcggcccaataagcgggatactcacagttgagggaataattattgtaacgattgttgtaaacttttgtaaatcactgcccactatgtaattataaatggtggcagacaagatcaagaagggggatgaaaaaaaaactcatatgaaagaggcccctaaaaatactcaaaaatctaaataagattgaatcgtggactacgtagaattttaactgcaaaaccacgtaaaaaccctgtgttcatattcttcattttaatagcttttattttttttttctgtgtgagataaaaattgtgaggctcaattttagttaacgaaaatctgcgttaacagtttggtgctttcattgagagcctttgtgaaaatgctcagaaaaatcctcctgatataaaagtgatggatgacaccaaagataataatcctcaagaaggaatcaatcattgtcccagaaaagaaccattgagtcctcagggatctattgagtcatcgcatgaacaaactgcaagccccaagaagacctagtattggggctcctggcttgacggaccttggataaacaacaatcggccacttcttaaccagattgatgaggatggtgcctacgacccaacaagatacataccaattgtggaattagaaaatcgccatcttaggcgtcaattggaggaagtaaaccggcataatgccgagttagaacgtgaaatagctacagtaaaggcagcgcaggaggatggtacccaaaatcaacctgaccttgggaaaagagattcacgaggcaaaacctcgtagctcgcagaccaaggggcagtggacaacccagagatatactcgaaactctcaaaagaggcaacctgcgggaattgaggaaaacctagagacacaacctgagatacgtagaacatcggatggaaatcgccaaccctctcttcaggcttaaaagaaagaaactcccacaaacccttatagggagaaaaaggtgaatcaaaccttgagaggaagggcaaggtctgaccgcagtcatgacaagagtgatctacaagaacatctgaacttgaaaaagcctgaccttcgtcaacgactcggtccaaagcaaaaggattcactccatttgcgaatggatgagttggagaataagttcaaaaggcatcaagtcacgaaactaaggagacaaccggggcacgatattgttgaagaacttgattcagaagcctcgggatcaaagagaaaagacaattccaaaaggctacccaaggataagaagcccaacaagtatatccctttatgctgaatataccgagctcaatcaaactcgggaagaaatctacctcggacatgcacaagaaaccgtttttggtgagccaagacctatgaaacatgcgaggcgcaagagggatccaaataagcggtgtgaatatcatggtgatattggtcataccacggaagagtgtcgtcagttgaaagatgagataaaaggtctcatattgcaaggacaccttcaacgatatataaaggggtaggaagatgcctatgatcagctcgctctgcccaataactcgagcgacccaagattataaccctcctccgtgagaggaagggacaccttggttatctcgagagggagcgagtcacaagaatacaaggggcagttactctggtaaatcgattttgtaaaagaattgtgacatgagtagacatcggcccactgtggttgccatatcaagctgccacgtggaaagctagacgacaaccagtagcagtcaaagacaaataactaaaacaaggattacattacttggaaccccggtatatgtcagggattgaccttggatattgaaacaattgtgggagtatgttaggaattgaccctaaacaacaaaacccgttttatcaaaactag

SEQ ID NO: 31505 - DNA, 2149 bp, Cannabis sativa
gaatcaagtttggtctagactcaattatcctaagcatagctttatactatggatggctgtgttggacagacttaagacaagagatcggttgaaaagaatgcacataacagatgttgaagattgttgtttttgtagcagtcaacccgaaagcaagcttcatctattctttcaatgcagcaaaacaagaagcttgctccaacaaatgaaagagtggatcggctggaaggctactgcttatgatctaaactcacttatccggagcattagcaggtccaagcgctcaaaattccagcagcaagttttttcggctgctattgctggtttagtttatttcatttggcagcagagaaatggacatatatggcagcagagcccgaagtctatgaatattcaggagcttaaatggcacatcaaaacaagaatatcttgtgttttaccgaagaaaatcaaagtgaaagataggatatggtttgataatttgtaaatactgactgtatagttatttgcttccttaaaggagtgtttagtttgttaaaagaagtttgtgcaatgaaactatttgattcatcaaaaaaaaaaaaatattgaaatgcacaataactgtatgttacttcttgtagtgcttgatttttaaatgtgccccttcatattttcgttattaatatgtatatatctttattatcttcgattatattttttgtgatttgaattttttttttattaatctcaatatatttttttttaaaatcttaaatttgtttcctttttttttttaattttttaatctcaattgttgtatttttttttttaaatctcaattatttcctttttttaatctcattttatttttatatatgtcaaatttttaatctcaattatatacatatattatctcaatatatatgtatataaatatatttgaaaaaaaaatcaccatatttttcactcattttttttttaaaaaagaaacatcaatttgtttttttttttacctatcttccttctgtcttttctttttaaattttggtttacctttatttttagtttttttctttaaaagaaacatctctcgttctatgtactctatttttaaaaatatcactgatatataaatgtggttatgtagcagaattgttggtttaatggtattttttagttttctctattaaatttaatagaatataaaattacttacatactctttattaattttataatattatatatatttattcaaaaataaaaaattatgtagatattttatatataaaaaaaatttaatctaaatttaaaatacttaaaatattgtagatattataatcgtatctttaatattgttggtttaactttgattaaaataagagacaattctgctcaatcggacacacaacaatttaccatgatattccacttacattttattgtacatataaaataccctaaaaaatccttaaagataaaaatctcaaatcatattttgaaaaaaaaaatacattacctaataaaaaaaattaaacatacatgttgtacacttaaacatcaccaattaaacttaattaaaaaaaaaactaattatacgtgcattgcatgtaacatcaaccttatatatatacatataggaattttctactataggaccttctaaaaacaacccataggtgggggtattctacagcgtataaataagtgacacctggcagaatttatatgtttgagaagtaggtgataattacttaatcttaaaaaactttctctgtctcccacttcactagacgactgggacaaagcctagatgcccacatccttgccattgcgcctcatctccatgactgtatatgtattttcccacattctcttacattttattttaatctcttaatctcaaagggcccgtttggttgcaggtaatgggccagaaaggaatggaatggaatactaatgggcctgattattttgtttggttgaaaaataaaaattttggaatagaattccatagtaatgctattcccccaaactaatggaattgctattccattttttatttagtagaattataattccattccaaccgatatctctcctctactctagccatggcccaatcccaacaaaccctaaccctagaaaactgaagattaaccattgtgac

SEQ ID NO: 31506 - DNA, 2965 bp, Cannabis sativa
  modified_base (39)..(61): a, c, t, g, unknown or other
  modified_base (100)..(114): a, c, t, g, unknown or other
attccgctgcacctactgtaaggttttctaaactttatnnnnnnnnnnnnnnnnnnnnnnngaattcatattagggtgttaataaacatacttgttagtnnnnnnnnnnnnnnntaaaataatttccaacaggtggttcttattcatgttctagttccaggtcgcgggtttggctcagggtccgggtttgggtcctggtctgagtcccagatctggatccctatcacgtgtctcggtcttgttctggttcaggtgctgggtcctaggtccaagtttgggttcgggactgagacttgggtgcagttctaggtcccaaccctagttccgtgtcccgattctggttccatgtttaggtctgagttcggttctaggttccgaactaagtcgacgtctgggttgggatctgggtctaggtccaggtccagttacggttctaggtccaggtccaagtcctagttctggtcctattcttaggtctcggtctacttctggtttcggttccaattttgggtcacagggtttgggtctaggattcggtttgggtacgggtctaggttcgggtcctggtctgggttagggtctgggtcccaaatctagacactgactacgagttcaatccaagccccgagtccagataaggatcccgatcttggttcccagtctggttccatttcgggtgccgggtcacgagttgggtcctaggttcaagtccgcgtttggggtcgggtcttaggtccagtcctagttttgttgcccaggtccttatctagttcctgggtccaggtctcggttttggtcttggtttgggtcacgctctatgttcagtttgggtcctagttgcgatttgggtttgggtttgggtctaggtcctgatccttgtcctagtcctagtccgattctagttccatttgtaattctgagttcgagttcgggtcggggtttgaaaacttgtccaaggttgggttagggttcgaatctcggtctaggtctggatcgggctccaggtgtgggatagggtccaacgtttcggtctaggttcgagtctgagtcccaagttttgatctctgtctgagtcaaggtttttttctgagtctatgtcttgggttacgatcctggtctgggttcgagtttgtgtctgggttctaggtttgggtctgattctagtatgggtcagagttcgaatcctgggttcaggtctgatttttggtttaggttcaggttcaggtttggtcctggtatgggttcgtgttcaggttcttgtcctggtttgggtccaagggaggtttccagtctgggtctgggtccgacttcagattcctgggtccagttcaggtcctggttcgggttcgagtcctgaatttagatatggatctgggtttcagggcctaggtccctagtctttgtcccccatcaaagactggttcctaggtccgggtctggggttgggtcttgagactcgatcccaattctgatgcccgtgtctcgtgtccaggtcccatccaagtccgagtcctaggtcctggtccgacaccaggacccaatcggggttcaagtcctggatcgagtcggggttcaggtttcgatcttggtctatgttcaagtctaggtctatgttcgggtccaagtcccgagtttcaatctaggtttgggttttaaggcctaggtgcaagtgccccatccaggtctgggtcctagatcccgactcggtccatgtttgggtttggtcatggtctcgatccggatctatgtgctaagtttcaatcccagtgtgggtttgggtttgggttcgagtccaagttcgtatttggatccgtatctaagtttgacattgggtctggtatcaggtctgaggtctaggtctgggtccgggttcgggtacgggtctcggtccctgtctggttacacgaccgtgtctgggcccgagttcaagtatcagtttgggtctagggcttggtccgagttcgattcgaggtttaagtccaagttctggtcctggtcacggtcctagtcttgttcaagggtcttggtctagtggttcttattcaagttctagtttaaggtcgcgggtctggctcagtgtccaagtttggatcctgctctgagtcccagatctggatccctgtcacgtgtcccggtcttgttctggttcaggtctagggtcctaggtcaaagtttgggttcaggttcgagacttgggtgcggttctaggtcccgaccctagttctgtgtctcgagtctggttctatgtttaggtctgagttcgagtctaggtttataaccgagtcgaggtgtgggttgggatccgggtcctggtctcggttcaggtctaggtctgggttggagtccaggtcctggtccagttacggttccaagtcttggtccaggtctagttacgactccaggtctagatccaagtcctggttccggtcgtattcctgggtcccggtctacttctggtttcggttgcaatttcgggtcataaggtatgggttcgggtccaggtttgggactagggcttggttcgggctctggtctaggttagggtctggggctaggtcccagatcaagataccgactacgggttcggtccaagctctaagtccacatctagatcctaatcttgtgtcccggtctgatttcatttcgagtgtcgagtcacgagctgggtcttaggttcaagtccgggtctagggtcgagttttgggtcccagacctagttctgttgccaaggtccctatccggattctgggtccaggtcccggttctggtctgggtttgggtcccgcgataggttcggttttgggtcttagtcgcggttcgggtttgggtctcggtctagatttctatttgggtttgggtacgggtacgggtctgggtcctgctccttgtcctagtcctagtctaattctaggtccaattgcgattctgagttcgagtttgggttcgagttcgggtcagagttcga

SEQ ID NO: 31507 - DNA, 1278 bp, Cannabis sativa
cttacatcttgggaactcggtagttcaattgagtgagaatgttaatcatagatatagaatttgaagcttctataactaatagaagtaaaacgatggtttttttagagcttggctaatacgtttaaatgattgaggcttcatttcggtaactatattagttttccaaaatattatttacaactagctaagtgctttaaggataaaatacattgaagggtaaaatagtaatttagtccctcttcaatgtaaactatctatagaggatcattgactatttagattgtaacaatggataattcatagcgtatctatatttggtgtatagagtatcttatgtaattaaaagtgcaattctaaatctatagtggagtcaggaagaattaataagttagaaaatttacttggtaaattttggatctacttattaggagcttggttacataggcacatagtctctgcactaaatgggataatattttttttgtctcaattaattgatttatttaatcaattaggattctaaataatgactatgtcttatttatgaattttactaaggattggcatatttgagaagaaaaaagaaataaaagtttgtttattaattaagagtccttggagcgtctaattaataaatatatttaaatgataattttattaattaattaattataattattacatagataaaattagcatttaagtaattagaatagataagtgaaatttttgaagatataaaaaattatttcattaaggaaataaaataatgacaaaattcaaactcatggaccttattgggaatttggccatgggttattatttatgtcattggatcttttaaatcaaaccatttagttctaaacttaatcctagtatcttcctataaatagaacataatggtctttgactcaaagactaatgactctctgtgtcagacaaaattgaatcaaaaggaaagttattattattctattcattaatttcaaaattctcttggtttctgactcaaaattttgtgctcattggtattgagagcttgctcacacatgttaaagtaatattcagcatagtgaggaagattatgtagttcaatcgtcatcagaaggagaatctagattcagatcttgatcatactctacaacagaaaggatcaagcgttagagatgtaaatggaaggagtcatattattctattgtcattactgtaagaatttcttaattcctaatgtgtttatttatttgtttttaagaatttcatatttaggatgttagatta

SEQ ID NO: 31508 - DNA, 1639 bp, Cannabis sativa
tgcaatcttgggaatggattggttaaacaagtacaatgctaccatagattgtaagagaaagatggtgacatttgaactaaagggttaaaccccatttgtttttacgagaaagattttgggatctcgaattccaatgatatcggcactcaagacaagagaattattgggagaagtgtaaagaccgcttagtttaaatttgggaaactagcagataattaggatttaattatgaaaattacttattaattctaaattattgatttatgatgttttatttgaattcagaatgcattttttatgtcatatatagaaatttcatgttttttcttgttcagtgcccgacaacattggaacgcggtgtatggctaagtagaatcacatcttggtattttagtatagcggggcagtatttagacattaggaatgtcgagatttgttgggaatttagaattttccaaaatacccttagtgccttttaagttgttttggtaggggaagggcaaaataatctttttggcattattagtttgtcctttagtggacttggttttattaattaattggttttcttttatgagttataagctgatattagtatgataataaagattaatctattcattttacaagaaaataagaaatttccaaaagattacatttcactctcaagttctctctctctttcgaaaccctcaaaaccagctggagttgctgtgtttttctccattttcttgttggtttcagcagattttaagggatcttgaactctaggtaagcctcttgtagttccctctttaatttcttgtttttgaagaaaaagattaattcatgtttttgggtttttggttactgttcttgctgttggagtttaattatgttttcagtagttaaagtatgtttatttaagttgatttgagtagattttgatagctagttcgtagatgagcaagctttgagtttttgaactcaagcttggctcatcaatggtggtttataagaacctgtaggaaccaatttgagatttagtatgacttttcatcatcaaacagacggtcagtctgagataactactcagatactgaaagacatactacgagcatgtgttatggatattgaagaatcttggggcatatttctatgcttgatttaattttcatataataacagttatcaaagtactatcgatatggcgccatacgagatgttatacgataggaaatgttgatcatctatttactgtgatgagaccagttagagacattaccttagacctaaattggtccaaaggaccgatgaagccattgaaaagatttggtcctgtatgctcgcttcacaaagtggatagaaaagctatgccgatctgaagcgtagggatattgaattcaagtgggagactcgatgttactcagagtatcacctatgaaagggttgcatagacttggaaataaagtgaagttgagtcctagatttatcggtccttttgagatactagagcaaataggccaggtgacctatcgattagctttaccacggccgtggtttggggtgcataatgtcttttataatctctatgttgagaaagtacgtgtcagattcgacacatattttgagttatgatgatattgagctctagacagac

SEQ ID NO: 31509 - DNA, 1483 bp, Cannabis sativa
atctagagatattatgataaaatttgttatattttctgtatttgttcgggttaaaaattgtcttaaagttagttattttaaaaaataaaattattaaaaattaagctgatgctcttatttttactattttagaaaatacagagtccattattagtaatttttataaaatacaggatccaaaataacatttactcataatttaatatgtgcaatataagcgttacatatatacatatatacactcatttaataatgtcaagtggtacttaaaatattgaccattaccaacacacttggtatcatgtagaaaacaccatgattatagttggcattatatctaaccattagaggaactcattatctatttatgaaatttaagtttgagatttttctttaaaaaaaaattgcataataagggatcacataaaatttaaaatcattttatgaaacaaagaatctaaattaaaaataagacaaaatataaaaattaaaatagtattatcctaatattttatttaagtaataaaaagaattttattatgaagtagaaggataatctcaagtatccacactaataaattaaaatatattgtatatagaagaaaattatgataaatttttgttcatatgattctttagaaataatcatagtcacctttcaagtttgtgtggaaagaatttattagggacccatattagataattggaatctttttattcattatttggtgaatatatttgaatcaaacagctgtcaatggtgtaataatgcaaatagtgaccctctaaaagagcaacactatatgtaaggtatggcttgcaacaccctatattgttattatttatatttaagttaatttaaggaaaatgatgtggactcattatttaattatattaataataatatattatataaaacatgtattgatgcatttttattattttattattgaaaatgattttttagttaaattttttctcgtatattatgttgcacgcgtgattattttattttttctctgcgacgatggatttaggtttcagatttgtgattgtagagagtgactcgagattagtgatcaatgttctcaatgggaaggagttccattgggctattgagaactatgtctctttttgtattaagtcctctccttcttttatatgttgtaattttatgaatgttagtagaacttgtaactatgttgcccataatgtggctaagtgagggtttacccactagatgtacggaagctattcgatctcctcctttttggggaacctgttttgtaatgaccgggaggtctaactattatctttcatttaatgcatgattatgttgtttttattataaattattttaaatttcttaaaattctgtaggatatcacgaatataaaaaaaaataaaaaattcttctaaatatcaaaacaagtaaaaaaatgtatcaagtttattaatatattccttttaaggagattcaata

SEQ ID NO: 31510 - DNA, 2206 bp, Cannabis sativa
  modified_base (1213)..(1213): a, c, t, g, unknown or other
  modified_base (2174)..(2180): a, c, t, g, unknown or other
ccttaaactttgaaggggcaacacaagctccaagacatgcacgatgggttgagtacattgagacattccatgtgtcattgggtataaaaaaatgtaaggagaatgtggttgatgatgccctttcttgcaggtatggcttaatctctactcttgatgctaaattacttagttttgaacatattaaagaacattatcctgatgaccatgattttggggaaatttgtggtgcttgttaaaaccttaggggtacattatcccatggaggagggcttatgggacattttagagttgctaaaaccttagttatattacaagaacacatcttttggccccatatgaaaagagatgttgagtgaatttgttgtagatgtgtcacttgtaaacaagctaaatcgagggtttagccaaatggtctttacacagccctacctattcctagttcaccatgggttgatatttcaatggattttgtgttgggtttacctaggactaaacatgggagggactcaatttttgtggtggtagacagattttctaaggtgtctcattttatcccttgtcataaaattgatgatgcttctaatgttccagatttatttttcagggagattgtgagattacatggtatgcctagaataattgtatccgatagggatgctaagttgttaagttacttttggaaaaaattatggggaatacttgggacaaaacttttattttctacaacttgtcatcctcaaactgatggtcaaacagaagtagttaattgaacattatccactttattgagggctatcatatgtaaaattattaagacttggaaagattatttaccacatgttgagtttgcttataatcgttttatgcattctgctaccaaattttcagcatttgaaattgtttatggttttaatcctttgactcctttggatgtatcacctttacctgtttctgagcatttgaatttagatggctaaaagaaaacagaatttgtgaagaaaattcatgagagggcacgactcaacatagagagaagaatcgagcactgcataaagcaagctaacaagggtcgtcacaagcaggtttttgatcccagtgattgggtatggttacattcctagccaaagacgttccaaattgctacctcgaggagatgttctgttttgagttcttgaaaggatcaatgacaatgcctaccgactcgatttacctngagaatataatgttagtgctacttttaacgttttttatttgagcccttttgatgcaagtgaagatttgaggacaaatcctcttcaagaggcgagaatgatgagaatactaaggccaaagaaataagtcaagttccagttggcccggtgatgagggtgtgagccaagagattcaaagaagaactcaacaacatagtcaacagagtcttaaaactagaggagactacagtcaacagtgaaggagaacaaagatttgtgcttcttatcaaagtagactcaatttagacccaaattgagatgatcacgttttttaaggaattttggcagctttcatttttaattttgtttcctttattctatctttgttttatttggaaaattgtctttcttttagtttccttttttcttggttggaagttggctatataaagccttgtaaacacttacaaaatcagaatatttttgaataaaatttaaagaggttttcttcttgagttctttagagaattattcgaacttatcaaggagtattcgttgtgaggttcaactgactcatcaaacggatttccaccactgtttgtggcgtcctccttcataccaaggttcatgcttaactaagcattgggtcgcagttccacatctaaattttgagaattcttagaggctgctataattggtatcgggtttcatcacaatattggtttggttcgtatcaagagtataatgacaacccactcataaaagtgggtatattttaataaaatataatatgaagctatttttaattaatagatacaaaaaagatgtatttctcaattaatccctcattcttatgatacattctaacatacatatttttatttttaaaattatatatatatattttttataacatatttatttattttttcaataaaaaaattaaaacaattaagtccattaatgtaaagaccgcttagtttnnnnnnnaaattagcagttaatcatgattaatt

SEQ ID NO: 31511 - DNA, 2972 bp, Cannabis sativa
  modified_base (2604)..(2607): a, c, t, g, unknown or other
aattctaaggcaaggttatttctagccgacaatgatcgagaattcaaaggcctatgttaaaaaatgtgataaatgccagagattttcaaagatacctcgtgaacggccaaatgagctaacccaaatgcaaagtccttggcccttcgccatttggggaattgatatgatcggacaattacccaaggcaaaggaggcgtacagtatgtgttggttgcagttgattacttccccaaatggacagaagtcaagccactagcaaccatcgcgtccaaaaaagttcaagactaaaatccaaaatccccgtgctgctcttggaatcatgcagggacataccaacacccgacatcaagatcaagaggaactccatgctgcggtgaacctcatgtttgaagagcaaaggtgcatgttcactgaatggagggacaaggagttggaaacattgaaggctcagcaagcagtcattgacgatcgtagtcgacaagttactgtgttgatacaaaaagcctatcaaattgccacgaaacaacctgtgaccgtcatccccttgggcaaaacagacaaagatctatcgatgaatacctctcacactataaatggtcagtcatcaaatccccggtcataggttccacctatgggccaagtgtaggcattcataccttatctagtaattcatcaggagaagtgatacccaataattccaaccaagttaatggtgtcggtcagcacgttggccaaatcaatcagtcactaagacaaccatgcgttttcttatttgataggttggggacgactcatgatctcagaaatgatctaaacaggatgggaggagtggacgatcaacttgacacaccaatcgtgcaacccggaacccatgctcaaaatcccactcaaaatcatgctgatgtgactcagatctgccaaaaggccgaacaggttagtctagttgtgctagcacagttgaacgaactaaaaatatgttccaaggcctggccggtcagaggaacaaatattttgagttggcccgagcacgcggaactcctttctcccccaagattaatatcctggagttgccgcaaaaatttaagatgccaacctcgaagatttatactgggaaggaagatcccttatcccaccttaagtattttaagatgcaaatgaacctgcaaggagtacgacgagatgtatgttgcagagttttgcctgccaccctttcaaaagaacccagcaatggtatttaaagttggcacctggaaattttaactcatggaaggctttctcctcgcagttccatgcgtaattttcctcatctcgccaacttttgttgcacctaggagatctggtcgaagtaaaacaaagcctaggagagcctgtcgagcctagctcaaaagattcatgacggaggcgactaaggtttcacgggtaaacgaggacggaaagttcttcgcaatactggggggcattgaagtcctcggtgagctttggaaggacaaaactaagaacgaagcagtagactcgatgagtgattttcttgaccgtgcaaaatgttttatcaaacttcaagaggccattcagctagcagaaggtgaacaaaaacctggcaagtcaaaagttccttctcccaagacattcgtccaactcccccattacccaagcaattcaagctcaaatggtaaacggttcagcaacaataataggcaagggaataggaaaaagggaaagttcactggcaagatcgaacaagctccccgggagaatcctgccaagtatactgcatttaccgtcctaccggaggacatagaaagtgtttatattgctactcagtcattagccccgtacaagaagctcgcacccatggaaaaagatgtgagcaagagagatatgaccaagttttgtcgatttcatggggattacggccacgagaccattgaaggcaacaatctgaagcacgaaattgaattcatgttaaggaaaaataacccgcacgtatagaagtatgtcaaagccgatcaaaatcagtgaggcaataacaaccaagacttgccaccaccactagtagatggacatctgcaagtcattattggaggtccgcacatagctggagattcagacaaagcccgggagaggtatgtccgaatagtacaacatgagcaagaagaagtagtcctagccgtagaagagaggaagccgaagatcccatgggcgggggaacccaccataacatttaatgatgaagatgctgtcaagatcatatttccacacaatgacccgttggtcgtggaagtcaagatatccaacaagatggtggccagaacaatgatagataatgcagcctcttccaacatcttattcaagataacatatgaaacgatggggctgcagctcaaagatctcacccccagtcttctgcccgtatatggtttcttcggcaaagaagtcgcacctttagggcaaattcgcttacccctcactattggacaagctctgacaagcataactataatggcacaatttttggtattggacgttccatcaacctttaacatcatgttgggccgaccagccttgtacgacataaaggctattacgtcgatattccattcatgnnnnaagtttccaacaaagaatggggcagggcgtttaagaagaaaccaacagattgctcgggaatgttataacattgccatagccaaggctaaaaaggaagtatcctttagccagagctcagacaagggaaaaaacatttctaagtagggaacttcccaaggcggggatgaagatgcggatcctcgacttgaggacccaaacagcaatgttagacctgtgaaagaactagaagagatcgagatcgatccagatattccgggcaacaagctaaaaattggaaaaggtttgttgctcgaagtaaaatcagcattgattaaatttttgagagcagacctggacatttttgcttggtcacatgaggatatggt

SEQ ID NO: 31512 - DNA, 1773 bp, Cannabis sativa
tagaaaaaaaaaattgaagaagaaccaatcaaatctatctaagagaaaaaaatatctctattaattattaaattaaaattacgtaaataaaataataattttgcattaaagtgtacatatgcttagttttttataggagaatctttaaagatatattttatgttttattcatacttttatgacttgaaatttttatttacaaaaatatgattttatagttttaaaattattaaaatatcattttctcaaaaaataagaaaattcataaaaaataatctcaccacaattataaatcaattataaataaactataaatcaacaaaaaataacaagaaaaccaaactcatgacaactataaataaattataaaacaaaaaaaataatttattattcttattgaagtccgtatttttataaataaaaagttcaaaccttaaaaataaatttttttccgtattaacatatttttataattgttttcaagatttttgtttattattagaaaatttcttttcatatatatatatatatgtatatgttattaataatagggttaattgcggcaaaacccctaaaacttttattccactagcaattaaccaccaaaacaaaaattttaggggcaaaacctccaaaatccgtgttctgttagcagtttaacatttccattcattttttactgtaagtgtcatgttgaaatatccacgtggcacaatttaattggtccacgtaaataaatatttaaaattaaaataaaatttaaaaataaattaatttaaaattgttatacccaagttttaaaaaatataaaaaaaagtcaaccttacgactttgaccaaggctcataaatgttaaataaatcaagacatccttcttgagggcctcatggcacttctagagggctcgaaaacgtcaaccaaccttttggcgccggcactcacacacccaagtgtgcccaaactaggattcatgggcccgtgtgagcgttttcaccctagaaatatcaatttgccaaggaaaccaataaggacttgtcttatttgggcatcaattgactaaagtttaagcataaagccaatatggcattaaatcctcaagaaaaaaggcatatgcgcccactataaggaaatgggagtgctctccaattttggggagcactaccataaggagatggcagtggtctctctttacaaaccatgaagggaaaattgttcaaatggattttctcaataccaaggagtaaaaaacaagtgagaaaaatcatttcctgcctgtaaatttccctagctgactagtgtcataaggaaatggcagtgctccccaatttcgatgagcactgccataaggagatgacagtggtcggccaataagaagggaagtgagattccttttcaacaatgcattttcatcaataatatgtcaaaaccaagtgagaaaagccaccaagtggtaaagaaaccacttggccgaccactgccacaatggagtggcagtggtcggcccctacacaagaaattggccaagttacatttccaacatatatgtatcaaatacaaatgagaaaagtaacccaatgctttacaagacactaccatagtggagtggtagtggtcggctactacacaaggaaaaggtatttatgggtcaaattgtatttttaacatccatttatcaaatacaaatgagaaacaccacccatggcttcccacaagccatgatcgaccgttgccattgtctggctccaactggtggcagttgttaacgcagattttt

SEQ ID NO: 31513 - DNA, 1769 bp, Cannabis sativa
  modified_base (1617)..(1619): a, c, t, g, unknown or other
gaagtgtttaaacagctgaagtcccaggctcttggttcgggtcttctgggcaagtaggagctagaggatctgttgtttgaaccggaggtacatcagaatttttgcctgaggtagaagcacctgcctcagttggaccataagccacttgggaagtgcagaactcgaggtacatgtccttagcaccacccaagtagtcgaagtttgcctaaggattagccttccaaaagtcatagaagagctcaagaccaactgtctccagagtattaactttctctttcagcctcgccacctcggccgtaagctcctcctccttggagttcttctcctcctccacccgaagaaggaccgctcgaagggatatcatttcatcttgaaggctgttcactttagcagataaggtctcgatggtctcttcaagtcagtcagaagcctcaagatccttagtcagctcagcgatcttctttggggcggtaaaaagcttcttgttggcttcacccagctccatccaaatagatccaagttctaccctggcgtcatcagcgtccttcttggccaagtccacctccgccctcacggtgttggacagagtcgtgttcctggaagcggcagacttagcccgggagtaggtgtaggccaacttcagactagcctgcacagaaaaataaactttagtatttgagccaagtaaagaggcttaaagaaaagtgtcaaggaagacttaccatggtgaattccttcaaaactccgcccatcaacagctccaaagaagagtcgttgtcagcaccggccagttgctcactaacttcaggaaccaaccgtttcatatagtgggcaagcatctctttgcccttcttggcctctagaagcatcgacaaaggtggagtaggggcccgcatcttttcgagtccactcttagtcagcttagacccactcctcagttgttcaagcgtgtccgaactccctccttgagactccttggattaggcaacttttggagtagaggggtttgcaaccgttagctcctcagaaagatcaatgacctccctgataggcacctttcccttggaagaagacccctcaccgcctttatacttcttggctggaggaaatgcgctggaacttccgccaattctcttcttcagagagtcaagcatcttttaagagatgtctatatggaataaaaacaacatagttagagaaaacagacatcagaaacgcaaggcataatggtcaagaagcttaaaaatgagatgaagtaatatgtaaagtgattgcccgagccaagcgcctaagtatcatcacctgacatgcctcttattttggatataatagctttccattttccgatcatgaaagaaggcggccgagcgggcgagatgggctccctaatgcgaattgcatgttcaataggcttgggcggggccggaaatttcttcctcctcttgaggggagtcactgctcttcctcagccacaaggctcctgagcatactgcttcgcccttgcacctcccttcaacttagcctcgcgcttcagttgaatcagctcattctctgggtgagctcgttcagccagtctagcatcagatttcctcttcctccccttcactggtttgggannnaagtcctttggatagagcccgtacttcacaaaattatcctcggaggtcaactggatgatatttcggtcttcccccagaagtcgagcaagcttttgagctctatcccggagagtaagagtaaggggagaaggtgatatgttggaatctact

SEQ ID NO: 31514 - DNA, 1247 bp, Cannabis sativa
agacaaagatttcagacatgtgttgctggacaaaaatgatgtatttattttggtggtgtgcgcactgcaatgttctgacataggagacaaggtttggtttagtgggactgggcattagagggcggccacatcaccccttaaaggcttccgtaggcctctattggaattcctctctgagtgcgtcccaatgttcatctgaagggtttttcttattttgattttaggaaggtgtgaagcattccagattcaagtaagtctcctacttggatgtgaggcttctgggcttcagatgggctcgggcccatctcccgttaagaccaaccttcttatgtggaagggctttggcctaggtgtttcttgcttgatcattctctggaaattccatgtgtcatccttccaaaaacatgaataacgataaccaaaactaaaggctttgatatttccttttaaaagaaaaactgaggttaagactcaaaagttctctaatggcgaagtcaaagaacaatggaaaaaaaagcttttatacatatttctcctctcagatcatcaactatctatcatcttccaatcttcattctctcattctctctcccaaaatatcatgaagaaaaacttataggagaccaagattttgttttccatgtttgtgcgtattagaagtcaaatatggggcataaattcaagtgagtttaaactaaagaaattggatatgttgccacaaatagttttagtatgtatgatcacctatctctaataaatacatgtaagttatatatattattgcataagtctaggggtgaagtcagaaataaaatttaggtggggcaattatctatttttatagtaaaatgctaaaatgtatttatggtgcctagcaccctttatgaagtgtcacaagctattggagctatttattatctaatcccacctattgtagttttaataatgattatagaaaactaatgactatttatagaacaccacctcaagtgatgctaaataccatagtgcttaataacaatgtttatttttatttatgtggacttcaaaatttaataaaaattatagaattgactataataaaatagaaaataatacacaattatgttaaaaaaaatcttagtataatcacattttacattaattgattggttcaattccccaacaattatacaaaaaataaaatgaaggtatgaagttttgaacttgtgacctcattgacttttaaatatactcttaccaatgtt

SEQ ID NO: 31515 - DNA, 1834 bp, Cannabis sativa
aattaaaaaataattttagctacatcgatactcgtttgagctcaagactagtaccagtatcatctatttttcaagataatcattttgatatatagaaagtaagattttttctatattatcgaataaatgttcggaatcaaaagttattttattgtctattttatattttatcaactaaaaaagaactaaccaataaaatttattagtcaactatttttataggttactaaaaatatttgttatttcatatctaaaatttaccttatgacatgtattttatataagctcattttataggtttatttcaataagttttttttttttttgaaaaaaaaaattataaagaaattgaatgaatgatatcttaaatattatgaatatctttatatgtcaaaagtgcctatctaacatcaattcttggtttaacagtatattctttttttattttgttaaatttaactggcctttaacgctaacgttagttttaaataatctaaattaaactcctaaaatataaattaacccttaaaatcctaaatctttcgctatgaactatgcaagacgaatactctcccaagccatcaagtgggattaaatgatttgactccgcagtcttcttccatcactctgctccatggagatggtatcgctccagaaatcatcccggttgctaaaactattcttaatctcactctctctttccatgatcaatatgatctatttttctcttttaaatcccattttgtacatttgtattttcacgaaaggtctcaaccttttctctttgttgataattttgggtttttttttttaatttaaatgcaaatgttgacctttaaggataaattgattctgtgaaagacttttacctcagctgcaaccacaaccatcgacgactcccacacaccatttttgtccaaaggattgagtcgtatggctgagctctcgttgattagggaacaccagggcttcgaaacacgcctgtatttatttcaaattctgccagctctttattaaaaatttgcttgaaaaatcaagcaggttttagttttcttcttgactttaatctattggattttcattgaaatgtattccaccattgaaattgattttcttctctttgttaatttttgagtttctttatcccaaattgtagtttcttgcattttcttaggtaattctgctaatgattagaattaggcttttgatggttattgaaattttttagccatcaaccttttttggtatcaaatgggttctgtcatttgtaaaattctgaccaaaaccataactactctcatttcaaacctcatgtttcaggatgacttatccttatcattataaactgtacaagagggtggatgaaccttctgtgaaggagaagtatgttatcttgttgtaaatttaacaaatgcggagatcaaaagaagaaagagtctggaattcagtaagaattttgttctgatgtgatattaaatattatatatgcttagactaattagtctagcgttgtcgatccaactcttttttcttttctttcttttttattacaggggattcttgagtagtatattcctgtaagcaacatggtggatgtatagtcttaatctgcatcactagtatatacataattttgcttttgaactaattacctactattagaaggagttgcatatcatgtctcaaattagaaatgattttatttttagtgactttccactttatgcagcatatacattgacaaaagtaataatatttacagaccacttatcatttcagaaaaaactcatttacccaaaagaaaagtacatcgaagaccatttattgtgctgcc

SEQ ID NO: 31516 - DNA, 1596 bp, Cannabis sativa
gaagcatcagtcgctagagcaaagaaattaaaaggaggtggtatccatcgagtaggtcggtttacaattgggtttgcaaggccgagtctcaaatgaagaccccgccaaccatactccttaaactttgacaggttactatgggataaatctagaataacatctaatctcgactgtttattgccaaacaatactgagtttcgattataccaaaaccaccaaagagttgtcatcatcaattcaaaaatttcacgagatagcctatcaaagataaataggaatatttcctgcattggtctatgtacacatcgacagagcaccaatcacaccctcaatcgatgccacacaaaaatcaaattagagtaggaaaaaagagcatgcttaggagtttcagattcttctctgcttcatgaacaacaataaggtacctgaactttctaggagataagttgagttgctacttgtaatgccaaacaaaaattttcacctttggtggcatagcaagattccatactccattccaccatcgaattaacctggatgagtttgcaacaccctcctcaacctgaagcgatcatgccaacgagtagccactcttaacattatagaccttatctcgatcatagtgccagcaccacccatcttttgctgcttgcctcgctaatggaatagacagaattatatccacattcattggcaagaaaacctgttgtagcttcaccacatcccaagcaccagagggaagtataaactcacttactcgacaataatcataatcatcctcgtgattggcttaaaagacgtcggacgtgggagccaagggtccttgaatgcccaaacttacattccatcacaaatggatctccgaagaccgcatttaagcaactctaatccccagatcaaacttgaccagagatgacatgaactatccttctagtggcttctaaaatagagaaatttggaaatatttatgtttcagaattcaagcatataaggaatctgggtatagaaataatctccacacttgtttagccaaaagagcttgattaaaaagttgaaaatcctgaaatcctagcccaccaattaccttaggctgacataccttttcccatcacccaaggattcttcttttgatcaacataggagccccgccgaattatctgacaattgattttaatttttcacatgttgtcatcgggagcttaaacacactcatcatataagttggaataacttgaagaataaatttgataagtatctctctgccacctgctgaaaagaaactcctcttccaccctcgtacacgtttcctcaccttctcacaaatctccttcaacgctcatttttttatttctacaaattaccataggcaaccccaagtacttgtcatgagtagccaatgatgttaatcccaatactctcagaaccccatctcgatccttgcactactcggactaaaaataatagtagacttctcaaaatttatcttctgaccagaagttgcctcataagttagaatagtttcagtatcacctccattagtgtgatagtcagtagtcccgtgatccgtaaagagaaataccaagtaagctgtacaat

SEQ ID NO: 31517 - DNA, 1508 bp, Cannabis sativa
tccacgccagcagcaacaacggggaactttccacccatcactccggcggtagtatccgaaggaatcgtccagctcaccactgaccaatacaccgcgatctaggatcaactacgcgccccgcaggccgaggtggatgtacagaacaggggtcgacgcccccctcgagcccccactactcgcacagataaccctcaggtaacaaattccaggcatcgtaataaccgtgttcgcagggaacgaagaaccaaccttgaaggtctggacctgaatcaaccaacctcgagagaccaatctgcgaggtatcctaaccaagaaacgcaggttgatgaagaccccgagcgacgtaatcctcgcagcaggccttcaagagacaacgatgtagaatccacctcctcgtcttcacatggtcgcacacctagcaggtatacaaggtgatctgcgtgatcacctcaacgttatttttagagcacgctcctacgcccctcgtgacgaggaaacaccccgtgatccccaaatgggcgatcaaggtgtaaacactcgcataaacccccctaacgcaccagtagcgactactggggttaatgtcccagcaaaccttgccgcagtagccacagctcccgcagtcgcagcagtcccggctcccatagccggaggtattgatcaaagcatgcttttgcaagctttgaaaatactcgagcagtagagaaagcccatatacaagctgcatgggacctctccttttactatggaagtgcgacaagctcagcttcccaagggattccaattatccgaatccctaaaatacaaaggtacctctaatcccatagattattaagaaaaatttaatactataatggaagtagatcaagtacctcagctcgcgaaatgtcgcattcttgcggcaacgctagaggaaaatacccccgattggttcagccaattgcttgaggcctcaatctcgacatgggagacctttgtcgatctattcctcacgcattttcaagccatgatgacttataggtcgccctatactaccctggctaacatcaagcaagaacccggtgagtctttgcaagattattttaaacgttttaatgtcgaagtaacaaaagttgagaaggctcccgagtcttcacttgtttgcatgttaataacatgtgtcctgccaataaccgatttttggaaggagttacaggctcgaagaccagaattgctagttgagttctttgccatggccgaactacataagagaattgaaaaattctctggcagaattggagaaaagcaaagacaagcgtaagtcaccagtgtcgtggtcacgatcccgcagtccccgagcgaaaaagtttcagaggtcgaagcccaagaagacgcaatccacagagacagcgaagcccgaaattggccaagtcccctccaaagaatgagtcctcgccaaaaagaaaaggcagaccacgctttgtgaattatactgaactcgaggtgccacgagaccacatctacgcaat

SEQ ID NO: 31518 - DNA, 1845 bp, Cannabis sativa
agcaaattcttcatctctaaaccagaagaacttgtccactatatttaaataacattaaaaaactctagattagtgtatatatctaattaaatgtttggtaaatcaactctttaaatttgaccaaacaatataattcaataaaataaaatactattattttacttactatcagcagtgggtggttgtttaaacttgatgacattatcaacaaggctctcagcaaccaaaacagatgagtggagtttagttccaacatgtaacaacaacatttctttgagtgacttatctcccgaaattgatttatcagtaatttcgtagccttctttgaacatcttgtcaatatctgtgaaatttgggaatttttcatcgaacatgttgttttctaagaatggaagtagggtttttaacgctaattgcattctcctcgacccgaaatcactgtgtttcacttcagcaaatgtttcatctcgaggaacatagaacgtcttactccttgactctgatgataagtctgtacacatatatatacatgcattaattttatgaagctaataattaacaaatgttcaatcaacctaattattaattcaacgataacgaaatgagtgaaataacgtaaatttcttataaaaaaaaaaaagttgtcctagtatacttttatccgttttgacatctctagccttttagtttatttttttaatgattaattgagtacattaatcattttatttaaaacaccacatctacatttttgaaaaaatgtgaatattttgagcactaatagttattaatattccctaaacgttatttttttaagttatacaagactatacttaattcaccaaaagcagtataacaccaataaagatgttaaacacatataataccttttagcaattctttattatttttcttacacaattctttgttaaatgtggttgaaataaataagaaatgtatgaaaacaactcttttgaaaaataaagaggttattattctaaaggattaattaagactttttcaaagataatatataatttaattacctgttttagctggaggacgaccagtcctgcaacgtcttggataaggacgttgggaaccaccaagaactggtctagtgaggtctgaggttttatcaggatcaccaagatcattatacacatcataatcatacactctttcatactcctttctctctccttttccatttcctctcaatcttttcagttcttcatttctcaattcctttagcccacttggtgtttgtgatggtaaatatgactgtaattatatatatatatatatatattcacatacatatataaaatatatgttaaagttacaatatgtcacatgcctataaaataaaataaataaatatatactttatgtgttatcctgaaaatatatgagcataaaacaaattagattttagagtactcattttcataaatttatgattcgaatctatgacattttataatatgtcaataaccccaaccgactaaaatataaatatttgttatttattatacatttaattttacttaaataaaaacttaatgattttttttttatttcggccccctaaaaagtgtaggccctaagtacgtgcctagtccatttatgcttaaggccaatcttgactgcagtattcattgacatgcatatgaaaaattagaattatataactattcatgtgcataaaacacgaaatatataggattcctttagtacactatattatattgaattatttttaatacaatatttttttatgtaaaattatatgtatggtagattgacttttatagatattcctaaatatataatattttagta

SEQ ID NO: 31519 - DNA, 2962 bp, Cannabis sativa
attttttggaaaaccgtaaaaatgtaaaaaaaacattctttgaacgtaaaaatgtaaatattttacgaaaaatggtgctttatgtaattattccataatataaaggagaggcatctttaaactatattaagttattatccaaccctaaaacatgttttgctaagtcatgagcggccaaattagcatctctccgaacatgagagacaacaactctagaaaaaaatgatagaagactaacaacttctacaattatatctataaaagtagataacttagatgatgtctgattaatcgccatagaatttgtttccacctcagttattggtagttgtaattgagaagcccaatgtagactgtgaaatatcgtcgtcattgcttctatttcgcgagccttaaaatattccttaagtggcttacacaaagttgcaatcacttggccatgtccatttatgaaaatagcacgcataccagtaacacgagcaaccatgttgacaatttcatcaacgtttagcttcagacccgaatttgcaggaggcttacatggtacctgcgatgctggaacatttgttggtgggacaaaaatcaggttagcaggggtttgagctgctctatattgcaatagaaaataagcagcgtaagtagagatagccaccgctggtgaagtggtttgggttaatacggctatattggagttttcggaggcttgttgtggcgaggtggttgcgtgttgcttagctattgaaacggcaaagatcaaagggcacaaggtcatcattgtggaaagcgactcaagagtggtgattaatttcctctatcatttatcttcttgttgggaattcgagaactattcttgtttttatttgagactctctaattgttttgatggttgcatttttatttgtatccccaaatcttgtaactttactgcttataatgtggccaagtagaccattacccacaaatagtatgacagcttgtatattccttctattctgaaagacttattttataatgagcatgtctaattttatttatcaatgaacgcttattataggaaaaaaaaaaaggtattaaaagtgcattaaatgttaggcatgttccttctcaatgttctcactaattaaagaaatatccaatacatgagttagcgagggactattataacaattgagaactagttatacttgtgagtttgttagaatactgctatatactagattgtactagacttaaactgtccatgtaaaaaaaaaaataccagattcaatctctttcttcttctgataatatagctcattgtaaaacaggaacccataacatagggggaaacaaatgtaacatttcacaggttagatttatggttaaaaaaaaatcatatattcttccaaaaataaaagtcactttttcatgtactgattcagatcacatctatattatcacaaagaaataaagatatagtagcatagagtcatatgcaaataaaagataagattttgagacaaactatgaataatgaggagaatgagtgaaatttaattagtaaaatacctttagaaaaacctattttgagacgaaatttatgtcccctccttgttcctttggttttcttcatcatattttaaaacttgataatataccttggccttgctgggatcaatgccgaacattagtatctctaacttattttattattatatgtaacaagaaatatatttaattctacatatcatttttttaatgaacttagatactaaaactctgattccacaacaaggaacctagcttactcctaattcaacatagataccatatagtatatattttaacagatgtcttgatagataccccgtaaaccttaagatgcttttcacattgatagatactctttggcacttgccatacacattacagtaagaaaagtcatttaatgatcattttattttattttttaaactaaagattcccccttattctcaatatttgagaactatataggtacctaaaaaagaactccgaatgaccattttaggtaggatatttaaaaaatactctaaggtaaagtgtagatatttacgcttgtgaagattagattgaatcgaaaattcaaaatccatacttatacggattgaattgacatgtaaaaattactaattaaatctaattcacatatatttatatttatatatatattttttaaagaaattatatatacaataaatattcttaatacaaaaaaaatattaatttaaaaatctactacatattatacaaatatattttaaaaatcaaaagtatatttcattcttagaaaatataatttaaaataaaattaaacatttatttctacatacaatttttttcttactttaaatgtgttattttatttattttagtatattattggagacataaaataacaataatttattctattttgttgttaattaggtaaataaatacattttttaataaatattaaataattcaatatgaaaaaataaccgatccaatccgtactttcacagattgaattagattggatttgaactatggtgcagattagattggatcttaaatatgaaatccgcgcttagtgtagatcgaatgtactataaacaaaatagagaatttgatgaacacccctaatttcaactaccttttgagtaattgatcaatgcattttcttttggaattatttcataaatatacaaaaacaacaacaaaaattacaaaaatacgatttcatgggattttaaacatttttacgattttttgattttatttatagaaatacgatctttttatattgtactcttgttcattttttgttatctacatgttattttttattgttattttgatgttagctaaatgttattttcatattatttttatgtaattttgttgttgttttcgtgttgtttttatagaaaatcgtaaaaaaaaaaaaaaaaaaaaaaaa

SEQ ID NO: 31520 - DNA, 1356 bp, Cannabis sativa
gatactgatggagtatctcacctataaatattggatctcgttccccgagctcttcacttattctatgaaaacaacaaaatttcatctaaagagagttgagagagcgaggaagcctgaattcccatatcgaagctatcactgggattgaagctcaaacatcaatagctataggtatttcggtcttttcatcgcatatgcgatttcgatatgtctatagttattctgctttacatatcgttcacatatgttttatttttatattatattatagtttaacattaaggacttttatcgaatttttataaagaaagtctagcataattaaagtttaggaggtataattttgtatatcaaaatttggagggcatgatttgatagtatcaaagttttggaagtagaatttagtatatggaaaatcatcaaattaataaaattgaatgaaatcagacaaaagttgtcaaatctaacaatctcaataattcaagaagaatttttaacggccaaaatagttcaagagatatcatttaatacatgtcaaaatttagaggcaaaaaatcttaattaaccgtttcaataatactagctatattctcgaacaaaacaatataaatttatatataattatcattttacatctaaacacatttatttatactaggtgaggctacacgtgcaattcacgtgcctaactcttcatgttcaattttatttatatttttgttagttttataaataattgaaatagaaatttatgtatatttctttttgcatcttaattattgtgaaaattataaatatatattttattattatattagagatacaagtgtaaagaacaaatttctatgggcattataagactatttgaacattacttttttatattataacttattcttaattttaaaattttataggatgtcttaaataaccacaatgtacacgaccataaaaaacttaattgactaaaaaattcttctaaatgcaaaaatattaaggaagtgcatcggtgcaccaaagaagtttcctacgatattactactattagtcaacctgtaatcatttaaaaaagaattaaaaataattgtagttcaccactccaaatggatatttttttagactctcttatctgttttgacattcaagagagttttttagtttatttttttatgatcgtggatgttatagttatttattaggaccatcggtaaattatttagaaagttataaataatttataacactgaaaataaatttcaaacattttgtatatatattatatttataatattttgagcatattaatttttgtatatatataattataatatgatatttttattaaataagatatga

SEQ ID NO: 31521 - DNA, 2336 bp, Cannabis sativa
tatatcatgtttctactatgagatacatgttgatatacattgtgtgaaatttctatgtatgacatgttattcactaatgcatgagcatgttattaatcaactattaatgaatatttatttaaaataataaataaacagtgatgataaatcgggtataaattaggtatttctaattttacaacctttgaaattagaaactaaaaattacacaactaatctccatagtagcaatgatatttttgtaattttgtaagatcgtcgtaagcctcagaattaattaaagtaattttaattaattattattaaattaagctttaatttaatacatcttttaaacccttttaattaattaattcttaaataaactttttatttaagataaattaattattttttagttttgtcttaaaatattaatatttattatttattttggattaagacaacttttttcttaatttggttttaggtttaagtttgaatttcaaagctaaaaataattatatttttttagtttaaatatgaatttaaaaaaataaatatcccacaaaactttattattttggtttaattgttaaaaataataaaactgatttattatttattaatcaataattaggataattattatttgaatttagaattcaaatagaattcaaataataactatgatattcatttaaaatcaaattcaaataaatatcccaaaataaactcaagtatttacattaaatatttaatagataatttatagtgtatatactatatattatatatttatacattatatatataatatatatacattatatcttttaattatatacatatacatatatacacggttggatatcaaaaaggatagggacagccaccaccatcagtcaccgtggccggcagcttgacagccaccaggtcggcagtggccatggtggccacaggaatggagcaacgtcacatggcgcggaacatagggaggaatctctcagcccatatgagtctttctcgtatgagcaggaggccgagcacgggaggaagggatcaagtccctatggtgctcgacggtggtccgaccacctttgaaccctcacggatttgtgctccattcgccactcatgcatagtcgcacgggtccaattggacccggctgtgcttgctctactttaagggactcgcgtccctattgcatgtcatgcatgcatggtttttacatgggcactgtacttgaatccactcaggtggttgtgcatggctgggggaaaattccaagctcacatgcatatgatattttctatgtgcatgatcggtttcaagattagaaactgagctcacatgctgaacattacaatgtgtaatttttacataaaataaataaattacataaaaatttatatgccccatattggcttacattattttctaaaaaataataacaacaaaacctacacccaattgtaacatctaattaacaattcattacctctcatacattcataataatataaccatcatacatatcacatatatataaatgaataaaactcacacaacatttaatgtatacacatttatggaactgcttttgataccaattattatggtactaaattaggtatgtagcagaagagttttatattatctaattatcactgtaccatagctcaatagatatccagatgtgtgtacattaaatcaaaataattataaaagtaataaatttacagtatacctcttgaagcctattaaggtatccttgaaacttcttgtaagctgtatctttaaatccagctgatgaggaatatacaaattggactcacacaagggtcttccaaattaatccatcacacacaaggaatagtatgagctattaggataaagtgtatagcctttgttcttcttgagttctcaacacatgagcaagaacaacacagagaaaaataattagcagtgtaaaagtcgtcttctgatttatcaaattagggttctatttatagtagttaaatctctttaattaaataattatttaattttttaaataaataaatatatataaccaaattccgttatttatatttatgagggaatctcttaaccacttaaggaaatatctcaacaaccttgaaatatctataactactttttaactttagatatttatctaattgaattaattaaataattaattaacccaaaaagaaaaatcccatagggatagggacaagtgctaagcccctaccattgtctttacggcaaggttggtgtcttttgtgctgataaatttttcttgactaatcttatcttaacaaattctatcttaataatttttgtcatttttt

SEQ ID NO: 31522 - DNA, 2133 bp, Cannabis sativa
  modified_base (1779)..(1788): a, c, t, g, unknown or other
  modified_base (1889)..(1892): a, c, t, g, unknown or other
  modified_base (2070)..(2075): a, c, t, g, unknown or other
tccactagataaattgtgaaaattagatctgttattggatgtcacatctgatctaataaataaccgaattcaatagtcatctaattatatttatatatttttaaaatacatttataattttatatatatattgtttaaaaaatatattaattgatttaatatgtattgataatatgagattaaaaaaaaactttacatttaaaatattaattctcatcttcttaaacattaataaaattgtcaatgcgtattgaataagttttatttttttgacagttttattataagatcatgagaataggttggatttaactaatgtctctcctgtatgttggattattatgctttaaataattatgttttttatttatacatttttttaatgaaattaacttaaatagtagctaaaattgattgggttgatccaatctaatccaataaaaaaaccagttaatatatccaatggttagaaccgatccaatccaatacattcattagatcggattggatcggatgactcaattcgattggattggatcggatgaccaaattcaatattcaataaataattggattagatcggttaggtcaaaatacattgaatgagatccaatgtacagtaccccttcatgctggttcagtacaatttatataatttcatattttttcacaagaagccctcaatcttttattataatattttagtttatatatgtttagttaatttatgtgctttaattaaaaaagaaaagttaatctctctgcccaaatacatattgcaatatttttttatgacagtattttttatactaacaatattattcttgtaaatgtttttaaaaaattcaaataatttatcatgccaaaaatacatttaaagttttttaaacacgtgtgatccacacaaacaagtctccggtatgctatgttgtgtcagtttgtatcatatatatatactagttggggagtacgtgtcagaggcatgtaacacccgtcaaaatctgtggttataatcatatctcttacattcatcaattatatttaaataattattaaacaaattatatttaaacaatgacgtataggttcgcttgttgaaagtaaggttaccaattgtcctgtctaaatataaattattggaatatattttaccaggacctagatttacaaacaagtatgtttttatgtataaatttctaaaacaataaaagttaaacacatataaagtatgagaaaccttacattgattgtagcggaattaaatgactccttccgcttacatctctaacctttgttcctttctgtcccagagtataatcaagatctgagcccgaaattccttcagttgtttggattcttcacaatcttacacactatgattaaggactcacttactatgggtgagcatacactcaatcactaaggcttgaaattgtttgtgaagaacactcttaaggattggaaaattagaagagaagaaaaagaagtctcaaactctctaattgtctgacaagatgtaaactagatttagagtcattagttggataatgagactattcttttctttttatactaattcaattagagttaggattgaattatatagaataaaaaatgataaattaattgaaaaataacacttaacggccggtcatgatgtgggccctacactaattatatttttgttatttttctcaactatttatctattattttacaaatgttatattttttaattctaatcctataaatgccaaactgtttatttaataattatannnnnnnnnnaaataaaattatcatttatatttttttattaattaaactccacaaagtctcttaattaataaataaaccctaaaatcttatttcttcacaatcaagccatnnnntagtgaaaattcataaataggacatagtataatttataattatgattgattaactaaaatcaattaactaagtcttacaagcagtttatctcaactagtataaggaccatgggcctctattaccgtgcttccaataagcagatctagaatttaccgagtaaatttcctaacttattannnnnnccttgcaccactatagatttgaaattgcactctcaattatatagaacattctatatgt

SEQ ID NO: 31523 - DNA, 2240 bp, Cannabis sativa
  modified_base (282)..(284): a, c, t, g, unknown or other
tcttgaagaggcaaatggcaactagtccgaacaacttccagaagtactttagtcacataggttcacctagacgatggccaccgagcagacaccctttgcattagcctatggctatgataggggtggcaaaatgggttttgccacaaccacgaacacaacacgagttttatgggttagggtcaggaaaattagatgcatgtaaaaaatgggtctatataacttgacacgatatgcttaacacgaacttggcacgtttgacacgattttttaaataaaataaannnaaaaattattaataataatataatcgtgcaaaatatatatatatttagtaatttattgttaagttaaataattttaaatttaattgtctttaccatgaaattgaaaatgttttaaattttttaatttttattctaaatagaacctaaatgtatcatttttttctacaacttcaatgatagtaaatgggtcaaagtgggtcaacacgaacacaacatgattttttacgtgtcgggttagggttgagaaaattagacacgagtaaaaaaattgatcaacacgcctgacatgaaatatacacaatgaactattttgtcaaccctagttatgaaacaatgttgcccgtcgaattagaactaccatctcataggagggtatcctacaaccaaaaagtaaatcactctcctaacaaaatcacttgacgaaatcaaagaaataagagatcataccaacttaaagctacaagcttatcaataaaaaagtggccaaatattttaacaagcacgtcaagaacagaaaattctttgtaggagatatgatacttcaaagagtatttcttaacacaaaaagatcctacaactagagtacttggcccaaactgagaagggccataccaagtcacggacatcacaaattcaagcacatacaaacttgaccggtataataagatcatagaattgattttgttaccaagatattggaatgaagaacatcacagattgtattatcaataaggtagattgtaaaaaatactattcttaagtaatggttattgggcagtatgtcgcacaggaattcgtaaataaaatatcacttttaaatgatggcttctacacgatatgtcgtgcaaaagtgtgtgaatacttatgattttaaaagcagccttgaggcatttaagtttttatttttaatgtatgtatgttgccccagtaacaacacatttgtaaaacatatgaatgaataaagtgatcttttcactcagaatgtcaaataatttgctaataattgacttattaaagttaatattttgtctaacatgtacgcaaataggtccgcccaagaaattagacagacaaaggttcatacacttggttaattataagtgaccaagacaccataagtctacttaatcacttcggggcacctacaatgcacaacatatgataagcacagtgaatagcaaaatatttaaagcaaggttaatgcaaaaaatttgaaagctaagtatgtgcaaatatgactttgttaaacataaaaggaaagattgtctgggcaaccatatatcttgaaaaaaaaaataaagctaggattaaaagtcgcctggccatctatatgtctcaaatgtaatggccttcttggttgtgcaacaaataaagagaaaaaaaaataaagagatttaaagctctggcacgtcaaaaggggtcgacgggttcaggttattgctggcctattcctgggcggcaaattaagaagttgtctcgccaggagggtctaagggagtagcaagctagttggcagcatgagtaagctgcccgacaacatcactagattggtcgagaagatcctgcgcggaagttttctctcctggtggcttggatacctccatttcctaaccctgagctatcgaccctttaagcaagtcaggcttcatgtaactgtagtcacccttgggattccatttccaaaactcgtagaaggtttcgatggctaggttgccatactcttccttctccgcagcccgggtctgctctgattttgcaatttttcctccaaattggccttctcatcttccaatgttgtcttgttagctttagactcctcctttagtctaatgatctcttcattccgggcaaccatcggttgacccaaggcctcctcctttagttgttaacaacctccttggccttttctgcccaggctggagtaggggtgttcaataaaatttacaaaccgctcaa

SEQ ID NO: 31524 - DNA, 1767 bp, Cannabis sativa
  modified_base (685)..(685): a, c, t, g, unknown or other
gagagaaaaggccgtgatatttttacttcaagaatacttcaactaagatctttaaataccattttaagtccttgttattgcgttgacaaattctaaccatcaacaatttcgcattgtctatgggaattgacacgtaaaagtaatgtcgtttctttacctaaaatcgttgagaagatgccgaggcattctcgccgtctccaggaggtggaaatgcaacttaatcgcctttagttgatcgccttaaggcttgacccaccaacgcctggtgctgagagaggaggtacaagtggcctggtgcctcagaatggaggaggcacgaattgtcatgaaccctgagaggaagaagagaataggcagcttgtggacagcccaacaaataactaccaacactagtacagtgatggtactaaatgtattggtatagtgtacgatgtttaaagagtatagtatgttattaccaacaccaatacagataggtatggagtgtctgtggtataacacttaggggtactcgagctacggagtaagccctaccaatactcgtatagtaccggtacgtagtgcatgtggtataatggtcgtaccttaataaagaacgttattatttatctgataagccttgtggatagttttataggcgcctagatgcaagtcagtgttatattatatgttatatgcttttctnactgagtctgttgactcacagatattatttctgtgtgtatgtaaaggaaaggcaaaggctgaacatgagtgagttccaagctcggaggatgaatgtacatgtcgagacgatgtgacctggagtgttcagtctctggacaacttgggttgtattttgtagtcgttgtgtgacaagtttgtaaaagtattttgataaagattgtaaaagtttaaacacaggaaatgcagcatcattagagaatatatggcaagaggagccataatattctgctgccaccaatgtaaggttttctcgaacgttatatgtgtttatttcattgctttagaaaattcatgtttagggtgttagcttatagaatataatccaacatacttgttagtaattctagatccttgtaaaatatattccaacactttccagggcattggtaaagtatactagtatcagatgtatggagtaggcatcagacatgaccgatattaaacttagaaaagatatcataaacttattgttatatctttctaagtccatatcacttagttgatcttaagatcttaatcttgagatggttaggttctagcttaactgtattatttgtgtccaacaagaatttgtacacttggtcggactgtagtggacactctgggcagttggccagaatgtggtggttggccatcccctcctgggttggtcaccacgggtggcttttggacattagggcctgtggccataggatctcattattcagtcaaattttcacgtcttgtgataaccatgctgaagatgagagcttcttgaatgagaattctaggctctcaatgaaagtaccaaaatattgactgcaaatttagctagcagactcggtgtctgactaggattgtagcttatgactgccacgtgtggaataataataaatgtaaagagacacacaaattttatagaggttcaactccttttatttaggtaatgacctactccccttttagttgtatttactattgagataataccaagcactagcctaggctctttttcagtattacaatgagtttgcaggcgagaagtgtgaaaagagagagaag

SEQ ID NO: 31525 - DNA, 1260 bp, Cannabis sativa
atcaataaaacacaaggggagtaggctgttaccgacatctagggctaaacctctttaaattctagtgtctttctttacatttattgcaaattccggtatcattatttacatttattgttacgattttggtttaaatctcatttattacgactccgcgttgattgactaaaaatccagtcaacaactttatctcctttagtttcagaaaatagcactcttaatgcatttcttgtaaaatataatcaaaagagcaatatacccttaaagtcaaaaattccacttataaaccataaaagggaaattcattcatttcatcccgcatacacattcaaatattcccaaataaattatgttataacacaatcacaccataaaataattttagaccccgaacttggttcggacccaaaatactcggttgtgactaaatcgtgccaacttgtcaaaatttacctgcagtaagacaacatgaacatactatataataatatagtcgaatagcataatatacatcaaaattatgactttacccttcccaggtcaaaattacaaaaataccctaactcattaataggatcttataaatgataattctcaattaattttaatataattaattatataataatataattgatcaattataattaattaattttaactagggtagctaatccattttactaattttggaatattacaacaacaatgaaagctctaaaatgggttataaggtatgtcaaaggcactattgatgttggattaatctacaattcaaaggataaaaacaaagagcaagttccagggtatgttgacttagatttttcagggtatttagacactaaaagatcaaccacagggtatgtgttcactgctcaaggtggttacatcagttggaaagctacacttgaaaaagttgtagcaccatcgtcaatagaagctaagtatatggctactacagaagcccttaaagaagcaatatggttaaaaggtttaacaaaggaactagaattcaaatatgaagatatttttgtgtattgtgataatcaaagttctttgcacttagtcaaaaatcctatgctccataaaagatctaaacacattaacatcaagtataatttcataagagacattgtcaatggaaaagaatttcaaatgaagaaagtcaacatcaatgataacatcaatgataacatcaatgataaccctgtaaatatgttcaccaaagtgataatagtgagtaagtttagacattgtcta

SEQ ID NO: 31526 - DNA, 5043 bp, Cannabis sativa
ttcaccatacactctcccagggtatggccagccagcccctatctcttcataatttgcagcctccctaagggtgtcaatcaaccaagtccccacaggaccagatccttctgtgcaagcatagttggaccaactcagggacatgatccagggcataactggcctgaagccttcatacctttaactttattggtaaaggggatcaccattctcaacatagatatataccttgcccttgccaaagttcaaaatatatgaattaccggacgagaagacccactagcttagaacaaatacttgaagatgcaactcaatctctagaaggttactagggatgtgcgctgccacatattcctagccacattgtcaaagacagctcaataatggtacttcaaactcaccccagggaaattcaactcttacgctgagttctcacgagaattttacacacaattcgcgtcctcaagacttgtaccatcacaactagaagaccttgtcgaagtcaaatagcaacaaggggaacctttgaaagactacatccagaggtttattgtcgaggcttccaaattccaaggccttacaaaagaaggctgatatacgaccataatggggcgcatactcctattgagtgatttctagaaagatatctggagaatctccaccaataacatgaaggatttccttgatagagctgacggctttatcaaacttgcagaagccatatgataggcccaggtggggcatgtgaacaacaggcagtcacgaggcatccaacaacctcatgactctctaggcacacaaggaaaacaccagtaactctgcccagacttctagtggtaaaactactagaaataagcgccgcaccaacaactctgggaggaaaatgggaaaaaggggaagtttaataattctcccacaccatagaagaagaaggaggagaagtacacttgtttcaccctcctaacagagaggcttgaggtaatcttcacggttactcagggaatagtctcataccgaaaatcctttcctatcataacggagatgggtaagagggacatgtcaaagttctagagatatcacaacgactttggccacgacactaatgagttttaaaatctaaagagggagatagagtaccaaataaggcgtacaatccccacctacgtcgttatgtgcaagatgaccaaactcaggcacaaggtgcccagaatggagatctactgccatgtcatgtggcaggacacctatgggtcattataggctgaccccacgatgcaggcaaaaacagaaaagctacggagcactatgcttggacactccctcataagcccaatggagatatcttacctatccaagataggagctctaagcaacaaaagcctatagagcccacgatctctttcaccaaacaagatgcagctccagtcagcttcccaaacaatgatccccaggtcattattgtacaaattgggaacatgaccgtggcaagatgtatggtggatgacaaagtctcttccaacattcttttcaaattaacatatcaaaagatggggctctaactcaccaatctagcgccttgcaaccaagtaatgtatggcttttttggccaagacatcgtacttgtcaggtatatcagattacccctcacagttggagaaaatatgactaccaaaacactgatggcacatttcgtcgtgatggatgttccctcagcttttaataccatcattggcgaaccgacccttcatgaattgaaggcagtaacatctatctaccacttatgcctcaattttccaacgaggcatggggtggcatgcgtgaggggagaccaacagtctgcccgtcactattacagcttggccctatccaaggcaaaaaggagaagatgcccaccaaaagtccaaaggatgagccaaaggggaaatatattctagcccaaggcggggacacaaacatagatcctaagtttggggatcctgtgggacgcttcagacttgtagaagagtttgaagaagtggaggttgatcccacttttccgacaagaagattgaagattggaaaaggcttggctctagaaattaaatcaattatggtagaagttctaaggacaaacctagacctttttgcatggtcacatggagacatggtcggaatcgacccttccgtgctgacccatgcactcaacattgatccaagcatcctacatattcagttacaaaaatgtttgcttgacaaggagcacgcccaagcactcaaagaagaggtccaaaggctgagagccaatgacttcataacagaggcattctaacctcagtggatatccaacccagtacttgttcctaaacccaacaagaagtggagagtatgcatcaaattcaccaacctaaacaaagcatgtccaaaagactactttccactccccagaattgactgcttgtagatgttacaactggccatgaaatcctaagtttcatggacgcatattcaggttataatcaaataaaggtgcacccaccagatcaggagcacactagcttcatgacggaccttggcctatactgttacaaagtcatgccttttgggctgaaaaatgcaggggccacatatcaacggctggtaaacatgatgttcattgatctcattgaccgcaacatggaggtgtatttggaagacatgcttgtcacgtccaaaaaggttgggggggcatgtggatgacctacacaagtgcttcaaaatccttcgcaattacaacatgaagctcaataccctaaaatgctcttttggtgtaggatcaggaaaattccttggcttcatagtcaatgttaggggaatagaagcaaacccagaaaagatcccagcccttttggacatgaagtcgtcctcaaccgtcaacgaagtacaaagcctaacaggatgcagtgctgcattcagcagatttgtgtccaaggctacttacaaatgtgtaccattctttaacattctcagagacaacaaaaaattcgagtggacagaggaatgtgaaaaagcaatccaagagctaaagaaataattggctcaaccaccgtgttttctaaacccctagataatgaggagctaggcgtgtacttatcagtgacagagcatgttgagagtgttgtccttacaagagaagaagatggtgtacatcaccctatataccacatcagcaaaaggctaattgacgccaaaagtcgatacccactatggagaagctaacctatagcttgtcattggcttccaaaaagctaaggccctacttccaagcacaccccataaaggtgtacattgatcaaccactacagtaggttttgcgaaacttcaagcatcaggccaactacgcaaatgggccattgagcttggcctattcgagaacacataccaaccaagaatagccataaagggtcaagcccttacagtctttggggctgagtgcaccaactatactcttgagatcccttaagacttaggaaaaaagaaagagctaaagaagaagcgagagtaagagcaacaacaaaatcctgaagaactaagatggaaactccatgttgaaggaagctgtactgaccaattgtctggtgcaggcattgcccttacaacacttgggggggcagcaacctgcacaaagcaatcaaattcagcttcaaagcctcaaacactgaggctgagtatgaagccttgatagtcgtcctcaagctggcacataaagtacgggatgaccacttggacatattcaataattctaaattagttgtaaattaagtcctcggttaatacacaactcaaggtgaaaaaatggtggcctacttgagcaaaatcaaagacgtgctaagtcaactcaaaggctgcatgattacgaagatccccagagaacaaaatgccacaacaaatgcacttgcatgtctggcaagcagcaccattactgacaaagcaaacttggtgcctatacagatcctagaataactaagcattgttatcccagaagaagtcaacatattggatgacaccccaacatggatgatgcctattgcagcttacctccagactggagccttgcaagaagatgaaaatgaagcaggcaaactgagaagaaaagcagctaagtacttgatcctagacaggataatgtacagaaaaagtatttccatgcctctcttgaggtgtgtccccaaagccgaagatgaaagactaatgatagaagtgcatgaaggcttctacaacaatcatgctgccgggtaaagcctatccaaaaagatacactaacatgggtacttttggccaacaatgatcaaagactcgatagactatgtaagaaattgccagagatttttaaagataccaagagctccaccgaatgagctcacgatgatgtagtctttttagaccttggtagtgtgggggatagacctaattggtcaggttgcaaagggaaaaggaggggtacattttgctgtcgtcgcagtagattacttcaccaaatggaaagaagctgaaccctagcaacaatcacctccaaaaaggtccttgactttgttgtctagaacatcatatgccaattcaggcttccgcaaaagattgtgtcaaacaacggcaagtagtttgtcattgacacgttcacttatttctgaaatagacatggcaccatcaaaagcttctttgccttggcccatccttaagcaaatgagtaggtagaagttgtcaacaaaaccctcaaggacattttgaaaaaattcctcgaggaagcaaaagacaactagcctaaattgctcctagaggtcctatggtagtataggactgccgagaaggtggccactgggcaaactccattcgctctagcttatgcaaatgggctagtggaagctctcaaaaaaaccctcaaggaaactctgtagaaattcctcaaagaagcaaaaggcaactagcctaaattactcccagaggtgttatggttgcataggactactgagaagatgaccattgggaaaactccattcgctctagcttatggccatgaggtaatgttgcctgtag

SEQ ID NO: 31527 - DNA, 2135 bp, Cannabis sativa
acattgcctctacttcaaaatccacaaagaaaaagaagaagaagagcaagaagcctcttaaagttgttaacatagctaataagggtaaaaaggctgctaatccaaaagaaaagaaaaaaggaaagtgcttctattgcaacgaaaagggccactagaaaccccagtgtcctaattttttggcaaagaaacaaggtaattctaactttgttataagttcatgtgttctagaaaattattattccattaggttattaatctagatctattaaccatgtatatgttcttcttatttcaacttcagctacttaaaactggaatgttattctagcaagttgagacagatagttggacagaagggtggagattgtcaattttaacatgaagctctttttcgtctttaatttttgaattaattattttactcaatgaacactttagttttaattattatgagaattttactccttatttcatattattgcagacaattcattgtgatatttttcaaagttataatataatatttttcttaaaaggttttttatgaattgcttttatgaaattgagttttatattctataacttgtatgctagtactaattatatttatatgtttatcatgattttatgtggtgtatttattattgatacaaaatctatggtatattaatcgcaaagagataataccacataaataattagaatttaaattcaatgtttatgaataattgtcatttcttaagaaattattaagattttatttaataaaaagatcttttgatcttaccgggggggaagaagttaatgatatgtgcaattcaaaaatcttttatatctattaaactctagactatattcaaaactccacagaatctctataacagttaggggtggaagaagttattgatatatgtagtttaaactctttgaactatagactatacttaatataccacagaatctctatgacacagatattttgataagacacatatataatataataaacgaactagcgaactagtagaacttattcttgatcctgtaagtattccaataaacatgctactatcgtaactgtaaatagataccagtgaagtccttggacatagaatcacagtaccttatcttagtgggaggatttttccagtccattactatttggatgacactagtgatagcctactatgatatgttcaagaaaggaactttaaaataaaactaagaaaagttaatctaaccattcacgtggataataataacttattagaagaatgacgataagataggaaatttttaaattctatttaaaagactcaagcacaattcctggtccttatgaaatattttatggtatctaaaatgattacttaatcttaaacaatgctatgttgatgacttagtctagatggaaattattattttagactaagataaagtgtcacaacaagatgtccctaagtatcaatagtaagaggttaaatgcacacttgtgtatgcattaaaccagattcctattgttgagtgggagccatcaaagatataatcgaacaaggaacattgggagacaatcaagaaagaatctctaaaagtgacctatatgttagatgatagggttgtatattagaatccttatatctacactaagtcaaaacttagagatggtggttactctgggagtggaggaattattctagaaagatgtaaaaccccatctataataatttagttccactagggaagctaaataatttagttgcttttaaaaggcaccagaaagttattcaaactgaagaaagttcttaactggtttttgtctctcttccattgtgatagaattagagatgtgtcttctgtacatttagatgcacttaaagtagtaatgaattcagtatccttagaggagtaatatatacagaaaagtgatgttgcataacattttatgaacatgaagaaagtaatggtggagaaagcagttgtttaccacagccttaccgttcctgctatttgggtttagtcaaacacactaaacttgatatggatatcaagggaatgaattgattgaaatgtacttctagttttatgttagtgcaagtgggagtttgttaggattttatgccctaaataagacccat

SEQ ID NO: 31528 - DNA, 1899 bp, Cannabis sativa
  modified_base (1551)..(1566): a, c, t, g, unknown or other
ttattgatatttgaatagagaagattacattgaaatagagtcttatttagggcacaaagcccaacaagctcgactatgccaagactggcaatgctgtctccagtgaattcgcaaagatttactatacatggcctccatttggctttttcgagccccatcttccttagagtttcctaataaaggatatttaccgagcttcgattgtttattaacactctcttgatcgtttaattggctagttgaatggtaatcaccagtggatcgacgtgagaatatctcacgtttttctcatcttcctgtgtgaatataatagggggttcctcagttttcatcaccttccttcttgcttggaaggttgtgggtggggggggcaaatgccgactgctcgttctttatctctttcacatatcttttctgggcgttattactttcctctatgatatatggtccttcccaaaataaccaggatgtcctctccttcaataggaagagattgtaacccctggttgtttgggttattgggcagactaggctagttatatccatggccctatcttttcacgtactatttaaaatggcctcaagcgatgagattctctatctcatctttcaattggtgacattcatcggtcgtatgcccgatatccttatggaatttacaatacctgttaggatctcttttactcctcaaatttctcatgggctcgggcttgccaaaggcatccttttgctcatgtgcaaggtaaatattctcccaaatttcattaagcttggtataaatagtgtacactggcacgtacttatcgtgcttcttctgtttattttcatcctttaacggttccttagaactgtcctttctctttgaactactagccctcgagttatcaatccttgtagaaacagtacttgttcaaacattgctgggtttgcgtcccgagcttgttttcaacaaattcatttcctttcgggcttcttccttctgaacgaatacttgagccctttcgttgaacttagtgatgcttcttactggatgaccttgtaagtcatcccataacttaccccctacagttaatggatcagtagacatcctcgcctgaagggctgtaagttgtgtgctgtcatccaaattcctaacccttgccctagccgtgctgaaacgaattaagtatgccttaagtgtcttgctagcatgctgctttatattggttagcaaggccgcttcgggtcgcctatccctagcagactggaactgtttcttgaaattcctggatagctgctaccaggaagttattaagtggtgagtaaactttttaaactagctgctcgctgagcccacaagtaaggtgggaaacaagatacaacataaattgttcgtcacattgctcactcacattattgtattaaagttgttcaaatgtgagactgaattagtggttccgtcatatgacgagacaagctggtttttgtatcccgaaggaaaagcggtactcatgacatctggatgatacaactcaagttcctcatctgagtcgtattcagattgtctccctnnnnnnnnnnnnnnnnatctcctgaacttgtcctccagcttgtttatccgcaattggatcggatcctcttactgtggacaaagttgttggcgaaggtcaggtttagtttgattcgagtgctctcgcagattcggttgggagtaattgctgacagactccgtcttactaacagatcgcgtcctactcatagactttgttctactcatggacttcgccttagagtgactcgtggatttactggttcccatactttctcgatcattagcttgttgagtactttcttctctttcagttgatcgactgtgggtccttgactgcctcgaggtcacacttgattcttcacgctctg

SEQ ID NO: 31529 - DNA, 1820 bp, Cannabis sativa
  modified_base (729)..(735): a, c, t, g, unknown or other
gtgcactcaactacaaagtctaccaaggcctatccttgaactattgtacggggttgacagattattttgtactgacccaactctattccccatttaagtaatctcccagtggaatcaggcctttgtaatacttggcgctatagttggtcgatgtatacccaaacaacgtgaccttggaaatagggccttgacttccttgtttctaagattaggcagtaagtgagtttttctattaaaggatatcgacctccagcttcaacgagtctattgctaatatagtagactggatgttggacattgttttcttttcttatcagcacgttgcttacatcatattcggtgacaactaggtatattcttaattcttttctgtttagggttttgagagtaccgaaggttttgcaagttgtctttttaattcttgtaaagtattctcgcattcctccgtccattcaaactttttattatcacagaggatgttgaagaagggaacacacttgtttatcgattttgaaataaatctgctgagtgtggctacccggccaatcaagctttggacatcctttgtctttgttggagatttaatatccaaaagggcgtctattttctctagattagcctctattccctgaggattgacaatgaaaccaagaaacttacccgacttgaccccgaaggaacactttaagggattgagtttcgttgtattttttgaggattttgaagcannnnnnnagatcctctatgtgcccccagccttccttgatttgacgagcatatcatccacatatacctccatattttgtttgatctggtctttaaacattttgtttactagtctctagtaagtagctccagcattcttcacaccaaatgacactactttgtaatagcacagacccatatttgttcaaaaacttgtatgttcttggtttggtggatgcatcctgatttgattataccccaaataggtgtctataaagctcaggatttcatgcctagttgttgcatccacgagctgttcaattcctggaagtggaagatagtctttgggacacagctttttgaggttggtgaaatcaatacatactcgtcatttttcgtttggcttgggcactagtacagggttagccacccaagccgggtagaaagcttcaatgataacttgtttgcgtatagtctttctacctcttctttgagtgcttgcacccgttctttgtcaagtagtctttacttttgttggacagaatgaaagtttgggtcaatgtttagggcatgacatcacattggggtcaataccgaccatatcctcatgtgaccaggcaaaaatgtcgaagtttgctctcagaaattttgttaaagctaattttatttcgagcaacaaacccttaccaattttgagtttcctggctgggatatttaggtcaatttcaacttcttccagttcttccactgcccctacatttatgtttgttttcacaagtcgaggatccatgtcttcatctctgccttgggcgacttcctattggacaatgctcttttccttggctgaactctggccgcaggtactttccttcttgaccttctttagagcaaggttgtagcattcccgtgcaattttttgatttcctttgagacatcccaccccacattctctttgttgggaacttgacacacagcacaggtggaaaactgatgtaacatcttttaactcatatagggtcagtcggcctaacatgacattaaaagctaaagggacatcaattatcaggaattgtgccatcatagttatgcttctcagagcttgtccaacagtgagg

SEQ ID NO: 31530 - DNA, 1856 bp, Cannabis sativa
ttgatttgatatgtacaaaatggtacttcttaaatttttcaagtcattcaaaattttaaatttctaaatgattaaaattgttaaattcaaaaacttttggttactatcaactgcttttctatgataatttttttcaatgccaaaagattctttaaaaaaaattgtttttttttaagaagcctaattttaaaattgacgttatatgtgtatatttaaaaaaaaaaaaaaaacacacaaaaatactcttttaaaatgaccatttttattattttgtcaaaggcctcttaaatttttgattagtgtgcatacttattgaacatatcaacaattcaattagatagatcaccctcattgatatcttattttattattattatttattttaatggatattattaataattttaatgagtttattcattacctcaaaaaaataaaaaattatattgtatacttattttaatttttacattcatttttatattttttgaaatatacccatttttatagatgatgttcttatcataccccttaagttaatgtaaattatgtgctagacttaagtggatagtgatgatatattggacaatccactcacaaaagtatttacattttaataaaaaatataaaaatatttttaattaataaatacgatgtattctataatttatcccaaaaaaaatagattttttctgggctttgactcttaataaaactttaccccttaaatttctttttccccaaagtccctcctaaaatatacaaatcgttacaaatattattcttgagttacattatgttcattttcttaaaataatttgcttatttgatcatgagttacatttatagactatagttgtagtacaaaagtctatacaaatattagttttgagaatacacatacatattctcataattcatcattagactgtaatttatgtatttattttttatctaacttttgaattaagttagattaacgtcacattaatgctacatcaacaaattattttaaaaaaataagcagaatataactcgacgagaatattcacatcaatttttatagtttgcaaaaaaaattaagaaatgagctgaatgtaactcaatgaggatatttacaacaatttttatagttcagtaaaaaattttgcaacaaaaaaaaaaacagtttaaacaaatgagcactatatatctcgagaaagatatttgcagcgatgtttacagtttaggaagaatttttacaataaaaaaatttaaagaaaacagtagatgtaacttgatgaaggtatttgtaataatttttatactacattaggaatttttgtaaccgattttttaaaagaaaggagtagaatgtaacttggtggggatatttgtaccgatttttataatttgtaaaaaaatttcgtaacaaaaaaaataaagaaatgaataaaatataactcaatgtttacaataaaaaaaaaaattaaagaaataatccgaatgtatctcaaagacaaggtcgggtttgggctaaggcggactaggctcgcgtctagagcccacccatccagaggctcaaaaagaaatattttcgctttaaaaatatatatttttttaataaatttaaaaatactatatatttttaaaataaaaagttgaataatttttatttttctaagatccacccaataggtcgacctaacttaaaaagaatatttgtaacaatttttatacttcaataataaaaaaaaattaaaaaaatgagcaaaatataactcgaggaaaaattatttgtaacgatttttataattgaaaaacaaaattttacaataaaaaaaaaaatgagataactcgagaaaaatatttacaaa

SEQ ID NO: 31531 - DNA, 2720 bp, Cannabis sativa
  modified_base (2674)..(2682): a, c, t, g, unknown or other
tttttttttttttttttgcgaatagattagatttaagagttcatcataaacgcctgcagcagtcgttagtatgagtatttaattttataaaaattatacggaggctttcccgtttcttttccaaaattggggtgcaatcaaacaatcttggatgatcttttggtactcctacacaaattaacgaattaatagaaaattgtgttcaatttagcgtctttcttgttgaagcttccataacatccgctggttccaaagtctctctttgctccggacaacattccgtcaaaaagagataccatggccaacgacgctacacataaaattattcaagttggaagaagattactcttttcatgtatgatatgaagtttttgactcattttttttaattgattaattatatagcatttacttaattactaaaattgccgaaagatcaatagcagtaatattacatttggaaaagatgatgtcatgattatgacttgttttaaaaattatgtccatttgtttaataatactaaaatttttgataagacatgtttgataatgctaggtggtaattttttcatctaaagcttactaattaagacatttgctgacttcactactttcctttataaattgcaccgcttttccacgtggaaaaagcttctaaacaagattcagcccacaagaatttggacgcttattgtgagaagttttgtcttagaagcttaagagagattgaaaaaatccagcaattggtggttaggaattgaacgacaaaagcaacaatggtaatctacaacgtaaaatataagaataaaatataattgaagatatgatgttcgcaacgttatatggctcggaaaggctggtaggtttttaggtaagaatattgatttttgctagctaactgcgagtaactgtcttgttaattattattattattatcaataatattaatattataaaagataataaccagaggatagagagaataccttcatgatatactccaccacaagacctgtctcctggcccccaagagctaacgactgtagtgaaagaaataacgtcactataaacacaactgtcaaagaaaacgcatctaataataagttagttgaaattcaaaaagtaccttcatgaataaatcaagatcttcatcaggttttattcctgcaaccttttcccttcttgcaagttccagtaacatatctgtatgtaacaaagtattagtaatcgttatatgaatcaaagttaacaccaagtcataaatcatatatttccaagaatcgttctttacttagtaacttaccatatttaaatccaacaccttgacaacgccctgctaactcaagagtttccctgactgtcatctccgctacatgccaatcctgttggcttacatacgcagatgtcctttgaggaacaaactcatgaaaatcatgcccgttatatgtaatgcttcctgacatcttcaaaaacacaaaaagcaatagaaagaaatgaaataaagaaaagccagcaaaaaagcattataataatgcacaaatgtaacccaagtacctgcaaacctggtccaagacgcccagcaagagcaagcataagcgacgtctttccagaacttggaggacccaaaagcagggtcaatctagaattagaagaagagttagccacacaaaatcaatggagtgactttaaatgaaattcaacaattaccttgaaggtcttatgatcccatttatgttgtctaagatggtcaatttgctcctttgtcctctgtatatccggagttgtcttaacaaactctgtatggtattcacacaatgtaatgaagatttcatcaaaatcttcatagaaattgcaataaattgaaattttgagccagaattgaaggaaataattcaacctccgccatatttgatacgaagttaggaatggttggaagcgctctgcttcccacgtggacaaatgattcgaccttcaaattctgatatcgaacctcaaccttcggaaactctaaatctactctgcaaagccaccattttcagaacaaaattataaataagagaggaattactactcaattgatgataaaaacactcatatgctaccattagacttgagctaagcatactaacaagtcaaatctgaataagtggctaaacctcgtataatcaaatttttctttttaaaaataattttctcagcagccgaacagagtcacttaaaaaatgttcagctcaaacttatgcatcaaatcttcttctcattcgatcaaaaaaacggccaggatcatattcaacgacattgaccaaccgttccaaaagaagcttctgctccggagactcaagctcgctgacatcgacctccttggtatctccaacgacatccttaaaaattccacgccggacatgcttgtatgtcggaagcctctccagcaccgcccatcggagtgcctcctcgtcttccccattctctctgaacgatgacgatcacgcgaaaaacgttctccgccgagttccacatcccacatccaaaatcacacaaaatagaaaaaaaaatgtggaattgaaacttgaccaaataagaagaaaataaacgacattactctcgaataatcaaaacttacctttatattactcagaaggagagttgtgactctcgaataattagcatcaaatannnnnnnnnatattaatgggatttgttttatttttattttattattt

SEQ ID NO: 31532 - DNA, 1809 bp, Cannabis sativa
  modified_base (759)..(768): a, c, t, g, unknown or other
  modified_base (1294)..(1296): a, c, t, g, unknown or other
  modified_base (1603)..(1618): a, c, t, g, unknown or other
gcatataaaaaaatatcttcaaaataaatgttatcacaatatttcatttgcagtcaccactacatttaaaatcgatatcattaccgtatctcacttgtagtcatcattaatatatactgttatatattttgttaataattttaaattaattaataatctgtatttttttttgactaaattggtgatctttaattaaataatttagaataaaaaataattaattaatgatctctaattaaataaaaaataataaaaaatgaaaaaaaaacaatgagacaattagagaatttaaagtagaataaaaaaattcgaaaaataagagaattatggagaaattgatagaagtatttgaaagaaaaaatatcttgaaaattataatattttaaaatttaaattaaaataaaatttatataataaattttattgttataaatattttaatttaattttagtacatcttgcaaatcaaatttatgatcacaataaattaattaaaatatttaagtttaaaattattaatttgttcaaaataaaaattttgttaatgattggtacataatttagataaagatattttttttttttttaaaaaaaaaataaatatgtgtatgctagcacacaacatgacatatatataattagatttagagttaattaagtattttattacatatatttgcatttttttagaaaactatttgcaactcataaaatgataaatacactctattattaaaaatataaacttaaataattttnnnnnnnnnntcttaatatttttttttaattttttcctcacattattttatattaatttcaatacttatttttattttattttcatatttttttctaactcatgtatatatatatatattttctaaaaaaaagtttatataattttttattttaatatttttttcataatatttaaaatataatttatttttgtttgataggtatattattttaagaatatgaattagaaaaaaaaagttaaaaaaaaagcccttagtacaattaaagatataaattttatataaaatacaaattattaaaatggagtgtctttataaatttttggttaatagatattttagacaaataaaattttaagaatgatttagagacataatttaagatacatataaagaatcgtgatagaaaaaaataataaaagataaagtaaaaaatattcaaaaaaacgtatgatattttttttaatttatcatatatatgtatagattttggaattaagtgatgatatataatttttaaaaaaattatttttttnnnaaaaaaaaaagaaaagaaaaagccaaaatatggccaaaacataacttgaatatgttaattttgatgatattttttaaaaaagtattatttttaaaattttcaatttaaaaaaaaaaaaccaaaacgtggataaatatacttagatttcataattatatatattatattaattaatatttatgaaactaataaaaaaattaaaaaaagagagaattaaggagagaagagatagtgagattaaagtgattttagagtgtcacatcaccgtttcatacttctccttttatatatatatatactagatgannnnnnnnnnnnnnnncacgtaaatattagttttatataatttctagtggtttttgtttaagaattcagtaactaagcaacgacaacaacaaaacaatggtcattagatctatttaagtttttcatatttgtaaagattataaatctaaacttttaattttcttgatttgagattttgaattgttctgatttatttgtttatgaatt

SEQ ID NO: 31533 - DNA, 1430 bp, Cannabis sativa
  modified_base (397)..(400): a, c, t, g, unknown or other
  modified_base (1385)..(1397): a, c, t, g, unknown or other
tcaaattaaattcttgcataatatataaactatcataaaacgataatgcaactataaggcagccaaaataaaaaattaacagacttatacgtaacttgttgtcccttaattcaaattttctcttcttattgtatattttaaaaaaatatattccacattggaaaccagtaatcaaccaaaatgcaactgtatataaagtagatctattattcttgaggttttttttaaaattttcacatcatactttgttttggattcgggggagctccagatctgtttgttacagatctacacttcatgaatctgaatttcaatattagggagagttgttttgatcgaataaaactgaaaacaattgtgtaatttcagtttcttcctagtttttctggtttttttnnnnaaatttctgtttagatcattgcaggtcttcttttccagttgatttcgctggaattaattaatggttgtatttccctcattttggtttcattttggttgttttgctgttttgaaacgatcgaggtatgatcatcttcatcgttcagtccgtgcggctgaaagtttagagcatgtggtatttttgtaaatatttgtatgtgggctgtataaatgttgaatgggccggcccatagtaattttgtaatttttttcccctttttgtatttttttgtttttttcccataataatttgctagcatagcactaatgtgagatactaatttagaatattaatgcagaaaaaagttatatattatataagaggaaaattttaccataaaaataaaaatagaaaaatcattcaaaaatggagagatatgagaaacataaaaattcactacaatattgtttaatccaaaggaaaaatttggctaaatattattggaacaaaagattaaaatttgaaaaacaattatacagagttcacttaaaagaatttaaaccgatctgctaacaaagttacacattgtgttactcgcggtgcttgttattggtctgatcgtctttttactgagagcaatattccttctgctcttcaatctattgtaatagcggatgttgttatttaatgaattactttcattcaaaaaaaaaatctaaaccaaaaaagaaattaaaaaatgagaaatttttaaattcgccatacaatatcaaattaatataatggaaattatggatgtagatattataataaaaataccattaattaaaataaaaattttaaatactaaaaataaatacaatcaactaaaactcaaataagtagtaagtatgaaatataaaataattcttattttactttcgttttttgaatcatcaataaataaaagtttaaatttgaaataaatatttaataaaatagtgtacgtattttttttttttttttnnnnnnnnnnnnntttttttttagaaaaaaaaaaattttttttttt

SEQ ID NO: 31534 - DNA, 1185 bp, Cannabis sativa
tttcttaaaattttgcaagatgtcttaaatagctataacgtacatgaccatgaaaaaaaatttgactaaaaaattattgcggatgctaaaaaagatagaggtgcatcaatgcatccatttaaagggagtgcattgtaaaattttccaaacattatttatatcttctttctttttttttttttaaattattttatggtaaacaaaaaaattaaatcatttactatatattaaataataatataatattatttcaataattttaccattaacatatttaaaaaaaatatataaaatatggctatttaaccatttttattagtttaacaaaatattttataaatataaaaatattccgttaaatttaacagtgttagtagatttagttttataaatattaatattatttattttagattaatttaattaatatatatataaatattaatattatttgttttaagttaattgaacttacactaattttaaattaattgaaatatatataaatattaatatattatttgtgatattattatttttaatattaagaaatatgttcaattttaatattcttaaactttatatttattttccttaactttttaaaactttaaatatttttttataaaaaacaaaatcaaaaaattaattcgttttcattaatttatataatttaaaaaatacacataaaaataaaaactaaaaagataactaagtatacgtgcaatgcacgtaacaataactagttttaaaaaaaaagtgcaaaaactaatgtggaagagtaaaaataaaatcttatatttttaagtaatgtagaagtttttgaaacccttaaagaatgtcaccatcggacatatcctaagtagctctccctcatgagattcattatcagctttatccatattcgaacgtatccaattgttcctcttttggttttaatttgaattcttggtgaggtttagtcaatgggaacgacattcaacatttcgatgtctttgatggtggccaactttgctaagggataaaattagtattctattttcacggtacttgttttattgtatacttcttgaagtgtatcgtttcttgtactttggccaagtatgtttctattttagtcccttaagcaaggtcggtcctgagttgaaatgggctataggcaaaaaaaaaaaaatttgggccctt

SEQ ID NO: 31535 - DNA, 1896 bp, Cannabis sativa
atttagatcctggtaaaatattcccaccagccactacttctttgagcaaggccattcagaccttgtcggccgcagaaggagaggttgagtctgaatttgcccaagcgtatggagttgcctgctggcgcaaacttcaaactcttcttccccatgattgggattttctcaatcttaggagtccaaaagagatgctttcaaggagcttggactataacttcatggtaagttggccttgttattataattatattattcttttttatacctctttcatattcatttattttcaattctctgggcttcttttgcatccaatcgacgactctctgagcggctcgaatacttggagggcgaggtccacaaattactatcctaatgcaaggttgcaagtaagcaaagggacgtcacctaacttgaaaacacctgcctcaagcaagaagccgagaaagcaaaagaggaagccgagaaggcaagagaggaagccgagaatgcaaaagaggaagcagagaagacccttaaagcccaagccgatgaatttgagaagaagctcgctgaaaaagaagtcgaaactgtagaacgatgcaacaaggttggttttcgcaccgtataccgagcctggatggtgaaccctaatatggacaccagcttcttacaggagaaagaagaggaaactttggctctttgcgagaagaccacactactacaaaaaagtacaattctcgtcagtttttaagtgtcatttaaagaatttgcgtcggtttaaaaaacagacgtatatttcgtagtcgcaaatagtcttttattagcgtcatttttcaaaagacgcaaaaaataattatcttcatttaaaaaccgtcacaaaatatacattcttcttttatatcttctgcgtcggtttggaaatgacgtgaaatcatttgtggcattttaaaaccgtcactaaacagttataccgttagttataaaatgacacataaattgctgaaatacttttttttcacatattgcgtcggttataaaatgaagcagaaaaagaggtatgggaaaattgtaatttttcatgcaattttctccacctgcattatcaaattttagtatgattttatatattagtaaataaataatacaaaaaaagtttcaaaaatctcaatcgggcacaatgaaatctaatgatatagcttagctttgatgtatataaatattaaaaattctattaaattggaagttcatttccctataaaaatgagtgcataaatgtgtatatataaataaatgacagagagtgtatatctatgagacaattacttgattaaaatgtgattaaaaatactacagcatgtagtatccatttaaaactttggaactcttatatgtacaagatgagttagaagataaaagagtcataatttgcaagagtaccaagttagtaaaaaggtgcttcaatatgaccagctccaaaagaaagaaatgcctccattttcgatctcatgtattatctgtatacattttaaaataaataaaaaagaaatacaagtaaagcaaattaatctttagaaaatgcatgctttaaaaaaagtgaaatttattcaattgcattacactttgtaaataatgaaagtaactagcttaatttagttataaaatatcagctatagtacttattggtacgtgaaaacaacagaataaaatgcaatcaatacatgaaaatttaaagctgccacaaaatgtttcttatcaaagatctaaaagagaaacactcattacaaagtaacaaagtggacctttcacattttttttttctatttctttcaattatcttgaactaagaaagtaaaagtaaatatatatgcttactgcgggtatactctaaaactgcaacttttcacattattcaca

SEQ ID NO: 31536 - DNA, 2842 bp, Cannabis sativa
  modified_base (259)..(262): a, c, t, g, unknown or other
  modified_base (363)..(363): a, c, t, g, unknown or other
aaaaaagtaaaaaataccgtctgatagtatttttataaaaaaaattagcaaaagttagtataccatgtaaatttctccttatattacagtaaaatattatatttctaatagtataatttataaatgacaaaatttaatatttttttttttgagtcaaagtgaaaattttatttaaacactttcagccattacaatagacttgaaaccagcagatacattatgctgattaaaaacacaatctgacgaaaaataagactcnnnngcaagacaatgaacagccctatttgcagatcgtttaataaattttaaagacacattattcaaagacgaaattaaagcccgacaatccccaacaagtaatcnaaactgagaaggcattaaaattgagctattaatagcttgcactaccaccggagcatcagtttcaattactacattggaccattgttttttttctatccaactcaaggcctccttaatgccaatattagaagtgtatattgggtggttttattgagttttgggttttcgatttcgagtgtatagaattattgaaaaatatcatttattatacatgtagccaaataaaaacatattagtcaatatataatttatataatttaatctagtttaatctctttaatatggcattaatttaaaaaggcaatttaaaattatttccttaatttgttattataaaaagattatgtgatatagttggttggttttttagaaatatttatatttatgatagtaaagataattgattatgttatatttattataacatttttgtagtcaaaactgattctccttttatttcaaaatgtaatgtaattttcatagcttctttcattcacagctactctctcatggcccccaaattcatcactcggacaatatcaatggcggttacacgaaaccacctcttcactcccatttacagctctgcaattgctttacctcgtaggtacaacgtttctcaactctcttcatcactttcttctgtaatttttttccttaaagtttctatctttatactattctccaaaaccccaggtattgttcttcttcttctgaaactataaaccctagcaaaaatgaagataaacccaagtcatcatcattatcatcatcttccaagaataagaaggggaaagctacagcaatgtcaagactcataaactcaaacccatggtcaagtgagcttgaatcttctctctctaaactctctacctctttttccaagacaactgttattcaaattctcaatcttgtgaaaaacccatctaaagctcttcaatttttcaagtgggttcaacaaatgggtttctctcatactgaccattcatactttttgatgttggaaattttgggtagtagtcgaaatttgaatgctgcaaggaattttttactttcaattgagaaaaagtctaatgggtttgttaagcttgaagatcgtttctttaatagcttgattaggaattatggcagagctgggttgtttcaggagtcttttaagcttttcactactatgaaatcacttggtatttctccttctgttgttagttttaacaatctcttttcgattttgcttaaacgtggtagaactaatttggctaagaatttgtttgatgaaatgcttagcacttatggtgttacaccagatgcatttactttcaatattttgattaatgggttctgtatgaactccatggttgatgagggttttcggtttttcaaagacatggctcggtttcaatgcgaaccggatgtcattacttataatacattggttgatggattgtgtagagctgggaaagtcgatattgctcgaaatgtagtgaagggtatgagtaagaagagtttggatttgaatccaaatgttattacttatacaactttgattagggggtattgtatgaaacgagagattgatgaggctttggttgttttggaggaaatgactagtcaagggttgaaaccgaatagaattacatacaatactttaatcaatggcctcggtgaagcgcagaggcttgataagataaaagagattttggaaagaacaatgagagatggtgagtttgttcctgatacatgtacgttcaatacattgatgcacaaacattgccaagcgggaaatctggatgaagcgttgaaggtttttgggaagatgtcggagttaaaggttctgcaagattcagctacttatagtgttttgattcgtagtttatgtcaacgaggggagtatgatagagcggaggaattgtttgatgagttatcggagaaggaaattttgctcgatgatgctggttgtaaacctcttgctgctgcttataaccttgtgtttgagcatttatgtaaaaatggtaaaactataaaggccgagggagtttttaggcagttgatgagaagaggtactcaagatccgacatcgtttaagattttgattatggggcattgtaaggaaggtacttttgaagctggatatgaactcttagtcttgatgttaagaagagattttgtgcctgacgctgagatctacgaatctttaatcaatggtctcttgcagaaggataaacctattcttgcaaagcttactctagaaaagatgttgaggagctcccatttccctagaacatctgttttccatgctatacttgctgagctaattgaaaaccgatgtgctcgggattctgctagttttgttatgttaatgttggagagaaaaattagacaaaatatcactctctcaacggatcttatatcgctgctttttggtaatgggcaaggagataaagcatttgagattttaaagttgctttatgaaaacgattac

SEQ ID NO: 31537 - DNA, 2850 bp, Cannabis sativa
tagaggttctactgtaattatatatcactatatatccacagcactggtttgagtagataagtttagttgacatgtgaaagtttttttatttatttatttataaatagaatagtttacatatacttcttaaatagttcttgagagacatataaaatttattcctaaactatgtggtatcattttatacttaaattttattttataaagataagaatgagagttttaaaaatatatttattttattaattaattgtcacattttaattaagcaaaagaagtttttttattaaacataaataaaagtaagtttaatatttgtaacacttaattattaaaaagtagcaaatggtttggtaatattggtattagtagtattaagtaggtcgtctaaattgaaaacatttcaaagtaataaagggttttgggtaaatagtaaaagagatctgaccgattacaattttattttttttgaaacaactcaaccatggtcgtcgtcgcgttgccacctccacctttgccggaaacaaaaaaataatgagaccagtagcatctttgataaaccggattgagccgagcaacgtgaccaaacacatgattcatcttcctaagcttagctttacattttctgaagtgaaattaatgaccaatttttcttatttggctctactcttagctttacaaaaggtgaatttacaataaaaacataataattaagaaacaaaagaagctcactttcttacttctttaattcttattacattttaatagctacttttatttgtgcataatagacatagaagcattaactaatatataaatatatatatattgctagctagaataaatttgttatacataatcctcaaaataacattataacatagtgtagtttactatggattcagttcaatacaatatatagctctcaataaattgtaaatgtgttgttgactcaatgtgttgttgactcaccaaaaaaaaagaccaaaaaaaaaaaagaccaaaaaaaaaaaagaccaaaaaaaaaaaaaaaaaaaaaaaaggacaacattggcgcaaaaaaaataaagaggagaggtataataataaggtggatctatctatatcccagaattattattatgtttaagaaaaatttacaaaaatactaaaatttaaattaatttttacaaaaatattggaacacggaattttttttaaaaatactgtgtttttataaaataacagtagaagacaaaacgaaacaactaaacaacagcgaaacaactaaaaaacaacacttaaaatttaacacaatacacagtattttttaaaaaagttcaaaagtaaaaaaaaaaataaaaatttcagtagtatatgtgtaaataatcctaattttaatttcaacgtgaagtattttttttaaaattattattttaaaataattagatagtaagtaaattgagttaaattatgtttaatgaaaataatataataattaaatgacatttaaaaatattaaatccttttaatttcaaattcaccatttctccaaaccttacaaaaaaaatatcaaatatataatattaatttttaaataaattaaatttaaattgaattgatatttttcttttttttaaaaaaaaaatacatatataattatatctattctatataaaactaagaaatagcccgcgctttggtgtggttatttataattttttttgaattatataagagaaaaatatgttgttaatattactaaaactgaaattgtatatctagaattataattgatatattttaaagtatatgataaaaaattatttaataataattgaataataaaattatctaatatattatgatacttacattatacaatgcatatatgttatgtataattgtacatatatacatagtctgcaaaaattattcattaaataataataaataaatatattatcttgtaatacattatcttgtaatacattatcttgtaatacattatttttatatcctaattattcaaagtatttgtcatcaccaaaatataataataattagaacatgattattcaaatcttcaaatttaaaattaaataaatatgaaagagtttagaagtatttattaccaaaaataaaatagatcaaatatttaaattcaaatttatattagtgtataaataattcagaaatttttaattaatatttattatgaatttaaattatgtatgtttttttaattaatatttattatggatttaaattatatatctttttttaattaaaaatcatgatttgtggtaaagttgttgttattgtcggatctcacttgtaaattgccactatattcaaagtcattgtcatcgtcatatcttacttgtaatcactgttacactcaaagtcattatcattactgtagctaactttcaattgtatttgtcgctacattcgaagttgttgtcatcattacatttcacttgtaatcatcataaaattcaaaacttgtattaccatattgaaacttgaccaaacattacgaaaatcaataaaaacattaatataattattcaaatcaatttttttaattacataacaatgttaaaataaattagatttttgatttcgaactatggttattgtaccttcatcctgccccaattatattaaactcattataattgtttatttagttaattcataatacacaaatatattatctacaatatactaagagaaactacttttttaggtgaaaaaattggttggatgatgtcatccctccttcagaaattcaacataaatcccttgtgccttgccaatcactactctcaaactatcatctgatgatgagagtgatcagagttg

SEQ ID NO: 31538 - DNA, 4376 bp, Cannabis sativa
  modified_base (3919)..(3935): a, c, t, g, unknown or other
  modified_base (3984)..(4006): a, c, t, g, unknown or other
  modified_base (4066)..(4068): a, c, t, g, unknown or other
ttctcttttagttgcattattttagtttttactacataaataagtaatgtaacctggactcacatatataattatattataattatctatttgactaatttaagttaacctaaatcgagcgtattaacactaaatatacaattattagctctatatattcatattctcaaaatttatcatttgactattatttatgcttatattctgtctgtagactcttatgttattttagcgttaatgataaatgcacatttgtaaattcattctaagttatttatcagatgaattattatttatttcttatgttatgtatatatttgatgtgttttctatagttgtgaaattttgagctttaaacacgaaaatactatgaatttggtgtataaaaaagataatcgattcataaaacaaatcttgatcgaaagaagccaattaacccaaaccaacctagtaggtttgtagtcgttatggtcattcaacagctatctgttacaataaatatgatacatcatctatgggatctaattctaaagttggtaatcaagccaactagaaacaaaatcaataagcagcaacatacactgcttcactagaagttgctggcaatgaagcttggtttgtggatagtggagctagcaatcatgtgactgcaaatgagaacaatataatgcaaaaacatgactatggtgttaaggaaaaattaattataagtgatggtaatcaactaaatatttctcatcttgatactggaaagttgaacactaacattatgtctagaacactactacttaatgatatattgctagttcctaaaattgctaataacttgcttagtgtatcaagtttaacttcagataatgatgtatttgtagagtttcaccttgattgttgttttgtgaaggacaaaatcacaaagaaagtgctgctagaaggagtgcttagagatggtctctactagttcaactcatcactcaacaaattaagttgtagtgaaaaataacctcaatatttctttggtgtttcaagtctgtcaaaatcaagagttgcttaggcagccaattttcaagtttctaagaaagatgtttggcataagcgtctaggccattgatcctgtagaatactcaagcttgtttgtaattctaacaatgtaaaaattctcaaaaatgaaatagaaattttttgtgaagcttgtcaatttggcaatactttttaaattgtctacctatagagcttccaaagtgcttgaattgatccatattgatctataaggacctgccccaattgcatctaatacaaacttcaagttttacatacattttattgatgattttagtagatacacatggctataccccttgaaacacaaatcagatgcactcaatgctttcattgattttaaagccttgttgaaaatcaatttgaaactaaaatcaaaagtattaaatgtgattagggtggtgaatatcaaatttttgaaaatcttgtcagaaccattgacattcattttcagcactcttgtccacacacttcagctcaaaatagaagaactgaaaggaagcacagacacagtggaaatgggactaacacttcttgctcaaacagtatgccactcaaatacggggttgatgcatttcaaacctcggtgtaccttttaaacagacttccaacacttattcttaatgaaaaatctccatttgaaacactatactacaaaaaaccagattacaaacaacttaaaaccttttgaagctgcctgttgtccttgcataagaccttatcaaaattataaatttcaatttcattcactaaggtgtgtcaatttgggatatattgattctcacagaggctataaatgtttgagcataacaggtaggatctacatatctcgaaatattatctttaatgaaactaaatttccttttcaaattggttttctgaaaactcttgcacctgaaaaacaacttgttattcaaaatgaatcatgggatctgaactcccaaacatacatttcaaacctttcattacagtaaaacaaaacattatcactcgagtaccatcacaagcatctcttgactcatctccagtagcaacatcttctcaacatcaggttagtaactctaattcaacttgctcagcatttgatgctcttgatcatggtgttattcttcctgaagcagccaccaatctgcgatacaataatgaggatcaagcttcacaggaaccttcagttaaaaatgttgcagaatctaatagaagtgatactgatgcagctgcaataggatttataactgatgttgtacatgccagtaaaatgccttctcatcctatgattgccacaacaagagctggaatttttaaaccaaaaacttatctctataaagcaagatggacaccagtatgtgaagaaccaagcagtgttgcagaagctctaaagcacagtggctggaacagagcaatgggtgatgagattaaagctctaaaggccaaaaaaacttacactcttgttcccatatgtgataattataatttatttggctgtaaatgggtacttagagtgaaaaagaaatgttaatggttccttccagatgttcaaggcatgattagtggtaaaaggttttcatcaaagagcaagcttaggttatggggaaacattcagtctagtggttaagatatctactgtgaggattatgatgagcgttacaatctctgaaaattgggacattagacaactggacataaataataccttcttaaatgaccatctagaggaggatatatacatgtgtcaacccgaaggaattgaggatccacaaaagccagaccgtgtgtgcaaattgtataagtcattgtatggaccaaagcaatctccaagagcttggtttgacaatttaaagaatccctattgaaatggaattttcaaaattttcaaagctgatacctttctgttcttttacatcagaaacaatattatcatccttgtgctatttatgtggatgatattattgtaacaggtaacaacaatcaaagattgagtgagattgttcagcaactaaaaaacacttcactctcaaagaccttggtgcccttcacttcttccttgccattgaagtgacaagagatgaaacaggcttgtaccccactcaaactaaatatattgaagatctttaaggaggaacaacttgcaacatctgaagccttgtctaactcttacggttgctcgataatctttgtctattactaatgaaaaggaaatggataatccaataatttatagagcctaattggagcacttcaatacatgtgtcacacatggcctgatatcatttactcgataaactttctcaatcaatttcttaaagatccaacaaccacacatatgttaaggtaccttacggatttctcaatcaatacatgtgtcacacaaggaatgcagccatgagaatcttaaggtaccttacgggaaccgggacataaggtattcacatatgttacaatgatagaatgaacattactggctattcagatgcagattgggttaacaacattaatgatagaaagtctgtaggggttattgtatttatcttggtgatacatttatgtcctggtcatccaagaaacaagttgtttctagatccaacactcaatcagaatacagagcacttgctcatgttagttcaacgataacttggatagaatctttactcaaagaactcatgttttctcaacctgaaaaaccaatcacctagtgtgacaatatgagtgcaagtgctcttgtctccaatcctatttaccatgctcgcacaaaacacatcaagctagatattattggggattattttaccaggatttagatttactaccatgtatgttgtttaacatcctcaacatgaatttctaaaacaatagaatttaaacacannnnnnnnnnnnnnnnncttacattgattgcagcagaattaaatgactccttccacttagatctcnnnnnnnnnnnnnnnnnnnnnnnagagtattatcaagatctgacccagattttccttcaggtgttggattcttcatagtcttnnncactatgattgagtactaacttgctatgtgtaagcatgtactcaatcactaagagggataaaatttgaagaagaaaatagggagaaggattcgaaaattagagagagaaagagaagactcaaatgtgattgaaaggctaatgattctaagctgtcagttttgagtctatcactatctatttataggattccttctgagtttagatttggattatttggaattaaaaaattgataaataaatggctaaattgagcttaagtggccgaccattgggatgtggatccactaattacaattttgttatttta

SEQ ID NO: 31539 - DNA, 1482 bp, Cannabis sativa
agagagagagagagagacgagtgatgctggttctggtggtggagctcaaggccgtgtctgaccatggtggagcttgaacaggctttcatctatggtggagctcgtgaaagagaaagcaagaaagagagagtgagagacgagtgatgagtgatggagcttgtggactgccatctatgagaaagagagaggaagaaccatagagagagagagagagactgacattttgaaaatgtatagatttgaaaaatgttagatctaaaacacattatattggaatgagagaaaatgcgctatttgcaaaattttagatttgaactaattgctgacggttaaaactagtataggcgacggttttaaatcgtggcatatactatgggccacagtcgatttttaatcgtcggggtaattctcctttttttaaaaaaaattcgtaatttttaaggcacgcttaaaaatcgtcaagaataacactataggcgacgattttaaatcgtggcctatactattagcaacagtttaaaatcgtcgccaatagtattagccatggtttttaactgttgacaattccccttcaaaaaaaattcacaatttttaaagtacgtttaaaaaccgtcaggaatacatcactaatgtttaaagccgtcgagaatactcaatttttctcgataattttaaacactcacttaattattttagcgacggtcctctaaaaaattttttaggacacatgggaatagcgatatttgtagtagtggagtgtggtatctttttgttatttttctattttttgcaggtctgaatcttgaaattggaggtgttaatccatagttgcaaatcagagcttgacagtgctaagttcagactgaagggatttcagttacgtcttcatcactaaatctgaaaggatttcagattgaagaaaaatgttgaagaatagcttaacattcgcacaaggggatcttgtatctttgaccaaggaacttggttggtttgggtatagatttactgtattttgtaaaagattgtgttgtttactatattgtgaactggtatttgtaagatacatctatgaatatagtgaaaatgattactttagttcggggaactcaagcactagtcagctaaaatgcatttctagtgcaaatgaagcttgtaaattgctacctcctttgctttaagtcatttacttaattcttgagttgtgttgtcgaaattgatgatagattctttgatagacttagtaatctgaatctagtaattaggctaagttgttctttcaatatttaacattgtttgtttgtaattttcttcacatatgcataactaaaatcacatatcgttgcatttagctctgttaagagctagttagcataagttagttatgtttactgtctttctgttttttccgttatttgttctgttacaagaattagttggcttgtatgccaaatcctttgcctataaataagtgtaacattcctc

SEQ ID NO: 31540 - DNA, 844 bp, Cannabis sativa
gagacctcatcctcaagttaaaaaaccttggaagtataaaaaacaagatccttgggagctcgagggcaagtacccaacacccaagttgaaaagaggcatggtgtggtgggttctactaatctgaatctgatgtcattttgaccatccatctagtttttcacaatgacaaagatctatgaagttagagaattcaaattcacaactttgcatttccaatttcaagcttacccagaaatgaagagtttttagtctctcatttccctaaaacaacaacatctctgagaactggtgactagctttgctagagcacttactaagtgatataaaaatatcacttaggcatcttaaagtacatcccttagatgttcttacacttacccaatattcaggttgacgtcataggtcaaccttagtgctgcgatgtcaacatgggcgctggatgtgaacctatgcactgggtcatgaactaccttcagtaaataagccataactaagtcaattttgatccgttgacgcaactcaacttgcattttaaagttaatccaatgctctatcaattcattgtcttaaaatctagacgtaattctgaagctatggttgtcaaaattcacccctaagagagttaccaaaataagctctgggttacccgcagcaggacccgctgggcttcgaaaaatagccatcaccaccaagagctaatttttaccattagatcatcatcaactgtcaaaaacatcttatttgtatttcttcctatttttgtgggtctccttcacctacaaaaaggagagctcccttagctcatttttcacattatattaaactacccacaaggtcagagctt

SEQ ID NO: 31541 - DNA, 4257 bp, Cannabis sativa
taaagttaagcaccaactttgctaatacccgtttgaactgagaaaaatcccagcttggtgctggttcttgacaattcgagagagagggagagagatagtgtggtgaggaagaaggtgacttctagataaatccctaatttactaactatttctaacttaaatatttaataaccccctttctaaataaaacagcatataaattgttactacatgacaaaaagagacctcaaggaaaagacctttttgccctttaacctaaatctaaggttaaaacaaaatccaagggtagtttggccattacaaaccccgataaaacctgacaccttcaatattcaacaataataccccgctattaaaataattctatactatacgaaacgtgactctctactggcccaacatcacttttcactgccaccgaacattcacaggaaatgagaatttcacatatagcataattaatacattctaaatttaaataaatctccacaaacatgcaaatcataattaaaaactcaatattgtaattaaccctaattattcaataatccttgatattgattttaagcggtctttacaatcatccccctgttaaaaagatttcatccttgaaatctaacctgaacaactctggatgctgagtcctcaagtcagactccaattcccaagtggcttcttccactttactatttctccagtgtactttaaccaatattatgggtttgcttcgaaggactttctctttcctattcagaattagtactagatgttcttcataagaaaggtctagttgtaacttcaatgcttcataactcaggatatgcattggatcagatacatacttccttaacattgaaacatgaaatacattgtgtacatctgacaatgttggaggtaaggctaaccggtaagcaacctgtccaaccttctcaagtatttcaaaaggtccaataaacttaggacttaacttgcctttctttctaaagcacttgattcctttcattggtgaaacccgcaagaagacattattttctgattgaaatgtaatgtcccagcatttgggatcagcataacatttttctccttgctctgagaagcaagcattcgagctttaatcttatctattgcctcatttgtcttctagaccaattcaaggcctaaatatttccattctcgtatttcgttccaatgaattggggagcgacatttcctaccatagagcagctcgtagggagccattcctatggtactttggtaactattctgataggagaactcaatcagaggcagatatttacttcatgaacctccaaagtccttgacacaagctcgtaacaagtctttgagtatttggatagttcactcagactacccgttcgtttgaggatgaaaggccatgctgattttcatactagttcccatgggcttctgcaaacttacacagaaattcgaggtaaatttagggtctccatctgaaattatagattttggtatcccatgaagacgaacgatttctttcacatacagatcagcatactaatccactgtataggttacttttactggtaagaaatgtgctgattttgtaaagcgatccactacgacccatactgagtcatacattcctgtggtcttgagcaaaccaaccacaaaatccatcgcaatgtcttcccactttcattctcgaagtgttaatggctgaagtaaccctgctggttactgatgttctgctttaatttgctgggaggtcaagcatttagtaacataaactaccacatcccttttcataccataccaccagaaatagggttttagatcttgacacatcttggtggttcctggatgcaatgagtagggtagtgtgagcttcatctagaatttctttcttaagctcaatgttactcggaacacacacttgagctttaaacaacaacatcccactgctagagatcgaaaagtccttagctttgtctgctaagacatcttctcgagttttaagcagttcagggtcttctagttgtgtcattctaatcctttccaacaagtctgactaaagtgtcaaattatgcaatttctcgatcacaaactcaatattttccctagacatatccaaggctaactaaggagaaatcattaccatatagaaagtctgatcaggtcctttccaactcaaggcatctgccacaacatttgccttcctaggatgatataggatctcacaatcatagtctttcactaattctaaccaccgcctttgtctcatatttatatctttctgagtgaaaaagtacttgagacttttgtgatcagtgtagatctcacaccgttcaccatataagtagtgtcgccaaatcttcaaggcaaacaccactgctgcaagttccaggtcatggattagatagcgctactcataatcctttagttgtcgtaaagcataagctatgactttatccgcttgcattagcacacagcccaaaccttgtctggatgcatcacagtacactacaaacttttcttgatcagacgacagagctaaaactggagctgtaatcaaccattgtttcaactcttgaaaaatttcctcacatttatgtgaccatacaaaccgttgattctttctagttaactcagatagcgacattggaatcttggaaaatccttctacaaaacgtcgatagtagcctactaaaccgaggaaacttcgtacttcagtaactattttcggcctaggccaattctttactgcctcaattttccatgggtctatcataattccatcttttccgaaaatatgtcgcaaaaacgacacttgtgacagccaaaattcacacttttcaaactttgcgtagagtttatgatctctgagtcgttgcaaaaccataggaaggtgctgctcatgttctgcttccgaccgagagtacacaagaatatcgtcgataaaaacaattacaaagttatcgaggaaaactttaaatacgctattcatgagatccataaaggctgccggagcatttgtcaatctgaatgacataaccaggaactcataatggccatacctagtgcagaaagctgcctttggaatatcttcttaccagattctcaattgatgataaccagatctcaaatcaatcttagagaataccgccttaccttgaagttgatcgaacagatcatcaattctaggcaaaggatatttgtttttaatagttaacttatttagctcccggtagtcaatacacattcgaagagttccatctttcttctttataaacagaactggagctccccaaggtgacacactaggtcgggtgaaccctagatccataggtgtatctttagttctttcaattctataagtgccatgcggtaaggtgcttttgaaacaagttcttccctgggtatcagatcaataatgaaatctatctcctactgaggtggtagtcctagtaattcctgaggaaacacatccaggaattccttaaccactttgacctcctcaggtccaagcaacacaagtttaccaaaatcaattataaccgctaggaatcctagcatttagtgttgaaattctggggacacaagaaccgtaaactgatcccacaaaaacaaaaggttcctcattttctggttgaaaagttaccattttccgtttacaatcaatactggcagagtatttggacaaaaagtccattccgagtataatgtcaaactcggccaatggtaactccacaagatcaacactcagttatctgccttaaattctaattagcacagatctaacccactttcttgaaatagttagttccccattaggcaatagggttctaaatcccatttcaaatacattgctaggcctaaaaagctgactaagaacccttgttgcaacatatgagcgtgtagcttcggaatcaaataaaacagtataagtgaaaccattaataaagaactgtcctgtaaccactgaaggactggcgacagcatctgcctgaatgatggaaaatacacgcgctggtgcaggtcagcttcaggcttaggttcctctttcttcaactgaggacaatcccttttgagatgcccaactgatccacactgaaaacaagccctcagttacaagtcccagggtgatgtatcttacagcgtaggcattcaggatatgagtaggtctgacatccccctttactctggttctcacgaaacctcttgttttgccctggactccctgtaggtgggaacgttctcttctttttctcaatagtg

SEQ ID NO: 31542 - DNA, 1481 bp, Cannabis sativa
  modified_base (1438)..(1455): a, c, t, g, unknown or other
ccatctggatggtttgcctttgtcgagacggtacttgttgtgacagtgtcgggtttacctcccgagcgagtctttaacaatttcatctcgttccttgcttcctctttttgtacaaacacctgagctctttcattgaactcgctgatgtttttcacaaggtgaccctataagtcatcccaacactcgcccccaactgttgagaggtcagtcgtgatccctgcttgaagagtagtaagttggataccatcaatcaagtttctaactctaacagagggtgtactgaaacgacttaagtaagctagtgactcgcccggttgttattttacgttagtaagggaagtcgcttcaggtcgcccatctcttgttgcctgaaattgtttcttaaaatccttagacagttgttcccaagaggtaattgaatgatgggtgaatttattgaactagctactcattgctccagtcagcgaggtggggaacaaaatacaacgtaaattattcgatacgttactggctcgcattatagtattgaaattattaaggtgaaagactgggtctgaagtcccatcgtacgacgagatgtgagggtttttgaatccttagggaaattcaaagttcataatgactatatggaaaggctcgagctcttcatctgagtcataaccaggcagtttcccatattccccatcttggtatctcttgaatttattttccaactcaccgatttgcaattggattggatcctcttgctttcgattggcattaagttattggtgtaaattaggtgcattttgatttaagcacttgcgcaaattgggttcttttcgatttaaacattcacgaagatctggctatcttcgttaatggttgctcatagacctcgtatttgagtaactcttagatttactgctcctcgtattattcatactttctcgatcatcactacgccgaggtctatcccctcctcgcgtatgtctttctgattgactgtgatcttgggatcttgaacgtcccaagctagaacttgcctcgtcctgcacagtccttctccttcaggagaggttagatgtacgcacccaactggggtaagtgtctgcctcctccctattagtgtgaaaaggatgctgaggatgcctcattggtaacccacttgccctaggtgtcacaagatttctctcgttattacgagagatctccttttccctagttctgggctgtcttatgttctcgttcctacgagaggattctattcccctggtttgtgaatccttagaatctccgaggtacctctcgacgaggtgcctgattgttcggttattcgtctcctagaacatccctagtttccccaggttgcttctgttgggattttatgccttaaattttactcatttcaatctaatctaatttgttatcaataaaagattagaagtcatttatgttnnnnnnnnnnnnnnnnnnttatggtttaatatatacaaaatttg

SEQ ID NO: 31543 - DNA, 2384 bp, Cannabis sativa
  modified_base (2342)..(2357): a, c, t, g, unknown or other
aacttacataagaaaaacatgactgaacttatataaaagatactattaaatttggaagaaaaattatcagatgaagaataatttaataaatgagatatggagatgaagaataatttaataaatgagatatggagatgaaacacataggaatcaatatcaatattaaaaataagaagtacaaagctacactctaacctcagcaatattactattttaatacactcatttttgtcactaaaataagtataaataaaataataataggagagaaaaataaaataacaaaatgtattttctctactctaaaatctaataaattttacaataaaaagggtgtaatttatagtgaaagttggctctccaaaattgtatttttgtgtaccatttagtgggctaaatggcacaaaaaactgactgtagtggtagaagataatatgggagacacttggcgagatggtggagaaagtggagcaattggtgaatgtgacctacgctcatcagatgattgttgggggagtgggaacaaacatgactttctttgctgaagtccactcccatgttcaaatgaaatgaaatagtgccaattatatgatattgagatgttgtgtgaagagtggactcttgatcacttggataaatatcttgggctttgaccttgctttggcccacttgaagaaacgagtttgtaaaaggactaggcaatttacacgtgattcatcaagaccattatattccttgacactattgttaatttatagtagaaattaaatagtatatggaaaaattataagagttaacatttttatggcataaataaataatgttttggggttatggatattttagtttttttacattaatatatatttttttatgccatatttttataaaaaattgtaaaaatcccatagtttacttttttttttatatatataatattaaattaaatgcttgactcaagctaagtaccaatggcggtgtctctgtacgtgtgtggagaaaagcagtgggatcgaatgattagagttggcaataggtgggtttccagggccagttgatgagatcccgaccgttagatttattgtcagagatgcaatttcagtccttgaaaatctctttacgcgtatggtcgtaccttggggatgtcccaaccgggtcacgaatctaattttgatccgagtagtcacaggattcaggtgaagctgggttggataagccatttgttttggagaattaaattgatcgatgatgagaatgcaaaggaattgaaatagtgtttcttatggaagagagaaggagaaagatgaagacaaagcagataataaaaacaaaggggagtagaggaaccttcttatggtagagattgaatattataatatctgccatagacatcgtcacagcgtcaaaagtaagaactaagaaaattttctaaaacatgcaacaattagcagatttattgaataaatttcaaaattcaaagcattttttggaaagaaaagaaaaatgtgcaatagtatagaatatcttaggatgcttacttcttccactgtaattctaaaaaactaaggactttctcttcctctaattcccattatatcactctagaattgctactagatattatcaagtataaaacttttcaattcaataagatacccatacaattttcagtagcaaaatattatcaaatttaacatcacaatatagctaatataagatctttttggttcaaccacacccatttttatattaaaatgtcagaattttcgggctcagttcaccaaatataagaaaaattttagttttaaatacatgacataaattaaaaagacaaaagaggcatagaaaataccatatcttgcccataattgaggttcaactcctttgcattccaagatcaagaatggaagcctccgcttcaatgctttcaaatcttggtagtttttctctacaaatgttctgccaaataaaagagcacaaatcatttttgtaagtcattaacaaaagtctttattttgagttaattatgtgttattatttgttaatcttatttttttaataaaaataatcagtttcattatcttatatttttgagttatttgtgtgatataatttgttatggaaccggttctgtatatatttatgctttagtatttttggaattgatccccaacgtttcttaagaaaaacattataagcaattttatgaggtattatgtgttatttatttttgttcattttgttgtggaactcattttttttttaaattatattttagtttcttctttttcttttaattataaccagtttgaattattctgtgttatttatttttattcatnnnnnnnnnnnnnnnnttctattttaattataaccggtttgag

SEQ ID NO: 31544 - DNA, 2258 bp, Cannabis sativa
ggtaaaatatttccaacacattggaactcttctcactacttatccagtgactctcgccaattcctttgcaaggtagcaaaggactcttttagatgcttaacctcagggttgagcccaggctcctcatcatgcctcaagtgttcctctttgaggcccacatgctcaccgtcaaggtccacacacggcttacctagtggcacagaaccaagcccctactggcgtcttatttggtggtattgagccaagggatcttgacctacctcccaaggtcgtgccaactaaagcatcgcaaccaatactggtggaactagttgtcacaatttttttgaaagttcttaggttcttgtacttatgaactcctttcgaaatgaagcacttattctaaaaacttaaaggaaaccaaggtactcgagtggtgctctcaatgaaagcaccaaaatttttacattgaaaaacgatgaacttcgcactgtctaataagtagtggcagccaacgaatgtatgaacataatataaaaagagaacaccataattatagtagttcactccccttattgcaaaggtaatggagctacatctgcttagagttttaattatgacaaaaattcaattgccttacaagagaactcaagaaaaaatgactaagtctagcttcacttcacaatttttagagagagaaagtgtgaaaatagagaagcactgaccatgtagagagaatataaagtgtgtataatgagctaatgtagctctccttttatagagaaggaggtccaattaaattataataaaatgatagaaaattctcatgaaatttgctaaaaacttttgcacgaactcacgagtaaattttgaggtccgaaacttcaaaatttgcggcagtggtgtgagagtcatgtagagtcttgaaaatagatttaattttctacttgaatcgcatcatttggataaacattagagagttatggccattttactgagcgatgtgcaccgctaaaaagtgactacaaaatcaggctaacttttggacgcctaagttgacatttaggcacccataacttagtttcctgggatttaggcatattttttggtgcttgaatggtgtgatagctatcctttggtcattatttttccttgggaaagttctcttgcaaattttacttgatatgcacgggtgatgtccaatgaatcactagtgacgactaggtgacacccgtgtgatcactagtgcacatgagtgttggtggacttgcgcgtgatacatgtacatgagatattgacttgtggaagcatctaaatctaattttaggggtaaaataagactgatgctcgaagccaaactgatgtttgaaggataaaacaccgagctcgaggccaatatcaactaggcacccactgtgcttgcacactagtcctcagtgatgcctagggcctaactcactactcgaatgatattttctcctgattccaagtctcatatattatttttggagcaaaataagaaggattactgagatggaatcgtaatcggatccacgaaaccactagaagtaaggctacgtcaacctgggtacctagtgactggggtgttgtcgccttgggcgcccaacttttcatctagggcctagatggcttcattatctttccaaaagcacttgtatattccttgtggataaacataagggcaatgcccaaaaagcttctctagaaagaagtcccagtgtgccctaggttgagatacgtcaacctgggcacccatagtggcctcagggcatgcattgggcgcccaagtggggggcaacatttatgaaattgagctcgttgatgctcaatcttctttttggtgaaaagtgctccacaaatttcaatttcatcaaatttgtacattctttgccttgtgaagtaaaatttatgcccatgttagaatgacctggcacgcatagttgtggatgggctcttttgggatgtcatggatgaaatattatgtcttagtattcttccttaatggatttaaggaattaattggggtccaaggatgttccctccctagaaacctaaaccctagccatggtgcacccagatgaactagatttcaacgcgggcgcccattaaggcttcctagtgcttgagtgtcatttcatgtatatttatctccaaagtctgaaacttgtttacatgtctctcatgtattttaggacaatggcaaagcagattgtccataaaaagttgataagaaccacaattgatgagagaaggagtac

SEQ ID NO: 31545 - DNA, 3807 bp, Cannabis sativa
  modified_base (3775)..(3776): a, c, t, g, unknown or other
ccgaacagacaaaaagcatacttgcgaaaacaagtgaccaagagtcaaaagtctgctcagtcacttgggggcacctatacttgtacaaaacattttgtaaagaacaaaacgaaacacagttgcacaatgattttaaacaagggaggaaattcatttagaataacaaaagcattcaaacccaggattaaaggatgcccagtcagccagttgttcataaaatgaaaaatattccaagtttaaagaccgcttggccggtcactttgtctcaaaagaaggcctattagccaaatatacataaaataaagatagtaaaacgaaagcaattaaacagcaggagtcccaggctctttgtacaggtcaactggatctaaaggagctggagggtcagctaggtctgaagaggtcagacgatcatcagtttggatagcaggaaccttgacattctagttggtaggagaagcggaagtagtttcctcaggattctcattggctgcctgagttgtgccgtagttgagaaacatatatttagaagccttaaggtattcaaaattttctttgggattagccttccagaagtcataaaaaatctcaagaccagcatctctaaggcattcaccttctgcccaagcttctccacctcagcctcaagttcctcctccatggtcttcttacccttagcctcatcctccagcctgcgaaggagagtttagagaccctctctctcgtcttaaagaccgttaatttcctgagacaaagaaacattgtctgcctcaagttgctcagttgacaacatctcctcagcggcaagaagtttcttgttgacctctccaagttccatctgcatagtctcaagttgacccgtgcatcttcggcatcctttttggcaaagtctacctcccttcacattgtgttagaagtggaaaggttctttatagcagctgatttagctcgggaataggcgtaagccatcttcacaccagtctgcgcggaaacaggattaaaccccgaactagtcaaagagaaatgaaagaaaattattagaaaggacttactcgtgaaagctctttcaagactcctcccaagaccagctccaaagacaagtaattattggccctagacaactgttcattcacctttggaaccgatcggctcccataatggttgagcatgtctctacctctcttggtctccgtgcacaattctaaaggtagagtaggagccgtaacttgttcagatccactgctgactagctcagatccagttttagcctgctcatgtccatcctaactccctcctcgggaacttttgcacttggcgactttcaaggcaggagagtccacagtaggttgttcctcaaagagatcaataacctcttcagttggtgccttctctttggatggagtctcaccacccttagacttcttggccagaggggacaagcccgagcttccccctactcttttcttcagagcctcaatcatctattgagacatttttgcacgggaaaagcaatacagtcaaaaaaaacacaaaatatatgaaggcattaaaatcaagaaaaataagtgcaacttaaagtactctacacgctggtaggagcattttcccaaacaagcacagatggagcatcatcatcctaagcgtcttcctactcctctagtacatcatttccttttccttctataggagtagatggccgagtaggcatatcgggctccctgatcagtatagaacgttctttaggcctctactcggtcaggagggtcttctttttcttgggcggcccctcctgcttcgaatattcttgagcctccttctcttgctcagaatattcctcagcatactgcttggctccaacatcacacttcaacttaagcatagccccatgcttaagttgaatgagctccttctcttgctcagctccctcaacccggccagacctggacttcttcttcctctccttcacaggctgggggtacaaagcttgtcggataaagcttttactccacaaagttgtcctctgaggtaaaaaaagtgatgtcccaagcagcagtcggcagctgcagaattttttgggccctttccctatgtgccaatgtgaagggtggatggaaatacacaaggatctgttgaaactaagtataggtggtatccatgacttccacaaaaaacaaaatcttgctaacctccatgtccatggtgcctgttagccacttgtagtctagctgagagaaatagaagtaccccgccctactctccttaggggagacttcaaatcaaaaagccagttgatgtcgtgaggggacgacacgccccatctctgagaggcgtagagaacgaacaaagcaaatcaatacatgatgcccttgggcatgaactgggtcagacggaggcaacaataatctgcaaccctcttgaagtacgagtgcaaaggtagcatcgccccttgcttagtatgcgcacccgaccaggcacaaaaccctttctttgggttagttgcctggtgaattggataagggagataacacttaagttcgcccaggtacccagccttgtccaactctctcatacggccttcggttatgttggactgaggacacacccatctggcccctaaggaactttgcctcctgtgagggaccgcctcggtaaattcctcggtgacatagtctgctccctctaccaagacatcaccctgctcgaatactggcttcccaccctcattatatcctccaaagtgtacaggccctaccactccttcctcctcagctttggaaggattatcaagacggacatcttcctgctcctctatctcctggacctcaatgtacccctcgtaatcctcctcctactccacagcgagcaggtcctgctcggcacttggctacgtggcgtgctgggccacgtgagagtcggatgcactaactttctgcatcgtcttctttgtgcgggccatcatccttctctgtgatggaaattggtttgtatggcgtgcaacagtaacggtagagacaactattgggatactgaagttacgagaacttggatggccaacgggaagagtatcaacaacaccaagtcggacaatatacgtccagttatacagaagataatgtctccaacccttctttaattcccaaataaagcgactgtacccttctcatgtgatctgctcagggtaatagtggtgttgcacttcgggttttggagtaggagaacgttcgcttctcacttccccatcctcgaagcatgaataagaaagtttgtcgctcaaagaggacagactagcgcaaggacgaggttgatcctcaaacagaagttgaagctgatcctagtcaattcggtgttcacctccccaaaactcaatagggttcatctacaaaagacaacacacaagatgagtgtttggctgggatatcaaacaaaaaataggcaaatatgccgaccaggactactcaacagattaaaaagacgaaaaatgcataaagattaagtcataacccaagagtttgaaattttttgggttaaggctaaatttcacgaagctttgaacgagcaaggtgagaatcatacattgctagattaaagtcaagatatcataaataatgaggccgaacgaactattacagaggaaattacagagtttcgagcctagattttctacgtatcatctacaaccagtcaagaacaattatattttttataatgggaacccagaaatcatagatacaaagttaaaagaaaaagatcgaaaacttactcactgtttgaagcnnaggcgttgtccagatgaagctgctcggatac

SEQ ID NO: 31546 - DNA, 2237 bp, Cannabis sativa
tgggactcaaaccttgacctagacccagacccaggacccgaacccacacacggagcctgatccaaacctagactgaaatccagacccgaacccaaactaagataaggactcgaaccccgaccgaaactcaaaccctaactcaaattcagaatcgcaattagaactggaactggactaggactaggacaaggataaggaaataaacccgaaccccaacccagataaaaatccagaccgagacctaaacctgaaccgagactaggactcaaccccgaacatagaccgggacccaaaccaagataagaattggaacttgtaccaagaatcaggatagggacttgggcaacaaaactaggatcgggacctagtacccaaactcagaccccgacttgaacctaagacccagctcgtgacccaacacccgaaatggaaccaaagcaggagcccagattgggatccgaatttagacccggggcttggaccggacccgtagtcagtgtttggatctgggactcagccccggccccaaacccagacctggacctgaaccaagacccagacctcaactcagtcaaagacccaaaccgtgacccgaacccataccctatgaccgaaaattggaaccaaaattggaagtagaccgggacccaggatcgggaccagaacaaggacatggacttggaaccgtaatcatacatggacgtagacccagaaccgtaaccagaccaggacctagactccatctcagacctagacctaaacctggacccgaacctagatcccaaccaagacttggactcgaacccaaactcagacccaaacatggaaccgaaattaggataaggaactggggccgggacctaaaatcgcaccccagtcttgatcccgaatctagacttggacctgggacccaagacttgaacaagaacaagaccgggaccggtgatagggatccaaatcttaaatcaagatctgggaaacggggcttgcaacaaacccgtagtcggtgtttggatctaggacttagactaggacccaaacccagaccaggatccaaacacagacctagacctagacccaggacctgaaattggaacctgaacaagaactcccggaccaggaccatagaacaagactaggactgtgaccaggacccggacctagacctagaaccgaactcgaatcttgccctagacccaaactgagaccagatgtcgggcccagacccggacctaaatctgggacccgatcccaaacacaaactcggacctagattgggatcttgataggaactctaagtcggacaaagacccacaccgggattgaaacctgagacctagatctggactgagatcctgacccagacccaaacctggacccgcactagggacactaacttgaacctggacctgaacgcagacttggacaaggactgagaccccaacccagacccaaacccgaactcgaacctgaacccagacacagaatttgagtgcgggtttgtgtttgagtctgggtcatagtccagttacaattttgggtctaggtcctggtcctgctccttgtcttgatcctgggtcccgatacgcttctagtctcggttccaatttcatgtcacgcggtatgggtcgagtccaagcatcgagtcccttatcccaagtctcaaggtgggtcttaggtccaagtttgggtttgggttcagttctcggatcctgatccaagttctgaggcccaagttctagtcctagtttgcgggcccaattcttgggtctgggtcccccatttatgtttgggtcctaggtcccgatctgggtccaagttggtctttctgtttgggttcgggtctaaggtccaagtgtgggttcgggtccgaggtcaggtcccaatcctaatcttgttctgggttttgggtccctagtctgagtttggttcttgggtcctgggtcttgccttgattcttaggtctgggtctgggtccgggtcccggtatgggtccaagtcccagtcttggtttagatcccaggtcaccggtctcggtccgggtccaagtcccgatatgggttttggtctaagtgtgggtttaggtttgggtcctgttacagtcccaggtttgggttctcatcccagaccatgtccaattctaattttgggtcttggtacggatctggattcgggtcctggtgttaggttatatttagcctatgttttgggtttgtaaagtaagtattttctcgtct

SEQ ID NO: 31547 - DNA, 2249 bp, Cannabis sativa
  modified_base (1005)..(1009): a, c, t, g, unknown or other
  modified_base (1143)..(1143): a, c, t, g, unknown or other
aaaaaaaaaatcgttgaatttgaataggcataatttatacattatatatatataaaatataaaggaatgcacaagataatgtgatgtgacattcgaacaatctattttcctatatattttttacattttttttattaactttgttaattttgactcaatattagagagttctttacgagaagaaaaaatcccacatggtttagaaactattaagaatgttgtattataggttatatgagagtgtttagtaatccttgtaaaagttgtataatgggtgattaatagtatcagtctagctcacttagtcatttttttaataaaatatatattatttgattttttatcttggtaaaaatttaaaattttattttaacaaataaaaagattttattatttttttaaaaaaaattaagtttttttaatgttgtcaaattagttaaaatgtaaacattaaaaaataaaatattttttttaaaaaaaatacttgagatttttataaaattggcaaattatgacataataacttttcttttttacataaaagttgacatttccacaaaataacaaaattaaaaatacaattataagaagtatgagaagtcaattcaacacttcaaaattaacaaagtataagaaaccactttgaatatatacaaacatatatatggatgccctcttaatgggtattacccatgaatgggtcaaattagaaaaatttaagtttttatgcttaatttttctatctaattagaaaaatctcccatgtttacatcgtatggggtgagattattctatcggttgaaaaaaaaaataaaaaaaaaagtgttttagtaaaaaaaagataagtaaaagtaaagtttaacttatatattttaatatgaatatatttttgatatagtgtaaaaaaaagatatttttttaattaagtagttaaactaagcataaaaattcaaatttctcttttattattcgttattagatcaaaatttaatggtttaatatttnnnnnattaatatttataattaaaatttgcttagtaaccatttatggttaatacccattgagaagtattccatatatatatagaatacttctcaatgagtataactcattgatggttactaaataaatttaactataantattaattttaaaaatattaaaatattaaattttgatcaaatgacgaataataaaagaaaattttgaatttctatgcttaaattagctacttaattaaaaaatataaaaaaatatctcattttatactatatcaaaaatatgtctggatataaaatatttaagtcacacttaactttttttaatttttttgccgaaaaactctttttcgtgatttttttttttttttgcaatcgatggaacaaccccagctcatataatgtcaaaataagagatttttctaattagatagaaaaataaagcttaaaaagtcaatttttttttttaatattacccgttcatgggtaatgcccattaaaagtgcacctatatatacatatatataacttaagtgggcaatttacaaattttgaagaagaaaaaaaattattcaattggtatttatttatttattataattattttaaagttttctagttaactttgctaatatagcttcacaattttattttttaaatagtcttacgtggattaagagttatttttggtgatgcttgtgagatataaataaaatactttttattcatttggctttgatttgtctaaaaatatatgagtgattgataaattgatcttctccaattaattataattttattattattattttgagtcataaaatcaagtttatatatttatctaatgtataattgaagcaacatctaattatttaaggattctatcttttttaatttttattcatttttaagtggtgtttaatatacttataaaaaaaatattatacacaacaataaagtataaataataatataatagaatctaaatataattcaatataagtaatcaatttttatagtaattaataatgatatttaataatagttaaataatgagataagaaaaattaaggtgaaatatgaattaaaagattattctatttttattgaaaaataataaacgattatgatttataatattttactaatttattaaaaatgttaactacttaaaactaatgttttgaaataaaaaaatataaaaaataatcacaaattaattttttttcaatgattataataattatgcg

SEQ ID NO: 31548 - DNA, 3777 bp, Cannabis sativa
  modified_base (961)..(963): a, c, t, g, unknown or other
aatgcaacttatggcctatatagttacttagatatggtttatagtattttagaaataacggggtaatttagttagagattaaaaatattgggagtagtcggggttatggatttggaccataatacccctaggtttcaaggttacttcttagtgaagtaaaggttattttggtcattttagtgttagtattaatttgaggagtaagttggattgttagtgataatctatacttttatcttttatatatggatatgttatatgctgaatattagttaagataatttaaagaaaaacaagattaacatcactaaaaaatattctctcttcaaactctctccctcttttcgaccatagaaatccctagaagaaaccaagtactttctgagttagttcatcgattttgcaaggatttcagctagtaatttaagaaatcatctcaaggtaagctcactcactctcttttgtttgattttctcattcataaagctaggatttttagttatttttgagaattcagttgttgtatgttatgttgatgttagagagtgatttctggtgttggtttagagttatttgagctcttttaagtatgaattgttgcttgtcgttgtgtttggacaaagttgagctttgctcattaatggtaaatactgctatagttggttgatgatgcatttttcacttggattatggacatttctcccacggagattccccgtctaaatgggaaacagagcggggacggggattactttttgtccctcgaatgttaaacgggataggaacggggatcacactctccgcccccgacggggacccgtttagtattttatcttatatttctagtaatattttataatttataatttatgtttgcattttttagtatattacttcttcatgaattttaagttgtgttttggataataattaatttattgaataataattaatgtgtaannntttaatttttatgtagtttaatttttctgtatattaaaaattttcttataaacttaatttttctattagggaatttcccgccccgtcctcgcccccattacgggattccctgccctatccccgatagggaataagcagggatggggattaaaattcttaacgaggatgggaataggggggagcattctccgccaattcctcaccctgtgtgcatccctagttatgactcaaataggtgctttggagcttttggtaaggtttggaatcgaattagttgagttttgtgatttggggcttggccgtttctaggaaaacgacctaccatttttccaggaagaaaaacctagaaaaaagttctgccatttttacattgggggcctactgtttttttgggtactttttcccgaaatcacattttcaacattttctcgatacttaggttttagtcatgctatttatcgataggaaaacttttagtttcaagtctaagtccccgaaaagtgatctagcgtatcacttattagttttgcgtatgttgtgacttaggggcctataaaccgtcgagcagcatttccactcagtttgatcagcatacctgaatttggaatcgaggtaagatttgtataatgatatgcatatttgattacatgtttagcgtacatatttataaatgcctgttagataacatattgtaatagtggtatcactatacatagagttatattggataccgatgattgtatgtttggcttaagtactaattgatgttatcacatcggtacgactagagtatcgagtataggctgatattatggtcaatagtactgttgtacgaacactctaaactcaatacgtgtgggacgcggggttatgattgggtatatgggcgcttagttataatccagtttaagtttatgttatgattatgcttttcttactgagtttgtcgactcacagttattatttgcatgtgtaggtgagggcaaaagtatggttgagcagcagtgagtgcgagcagatgaagattgtacatatcgaggcggttagacctggagtttttgatcttccggacagcaggctgtatttttgaatagttgctaggcgataacttttgtaattattattttgtaacatggttgtaattttataaattcaggatctcggtttatgtaaatattatttattttcaattaaaggttaattaagtaaaattttaattagacacgttttccaacaaacccattgattagcaacagatattacaaataactttaaatcatgataacatgcctaacctagtagggtgttacatagaggatctttgattattcagattgaaataatggataatttatagtgtatcaatttttggtgaatagagtgttctatgtaatcagaagtgcaattctgaatctatagtggagttaggaggaattaataagatagagaatttaattggtaaattctagaactacttattgggagcctggttacacaaacccatagtcccccgcactaactggaataatattgtttttttttaacaagaaaaatggttccttattcaaaacaagcaaatgaatacaaaacaaacaaaggaaaacaaactagacaccaggtacaacagccgcaccctcataccaaccttccattacattgtttatataattgaaaagaggctcattcctcctactgttacagtataaaaatcttagtttaactaaagacttgacctctttgctaacaatcttagccagcttacatttctgttcaaacacatagctattacgatttgtccacactacatacaaggttgctaaaacaatagcattcaacacctgctcccttacattgttcgaaggcctagaaaaccaatttctgatgttgtttggctagctgaagtaaccaaacctggacataatctcttggatgattttttgagtgaagcagcagctataaaaaagatgactatgtgtttccttctcagtacaacatacaggacaactctcattggagatctcaataaatctgcttatattatctctaataagcagctgttcattcactaattgccaaccaataaacctgtgttttggcaatatcaatctattccatatgttctttgcataatcaacaatcggtacttgaacaaaggaaacatagaacagtttagagtggaatttacctctcctcaccaccaccttaacatcttcatcatctattattgagcggagttgaagaagctttttgatataccaactagcatcttgatgaaagttgataatccatatgctttgtcctttcaaataaatggcatcaatccatctgacccaaaggttatcttgcttgctcgaaacaacccaaagatacttagctattagagcaatattccatttcttcccttccctaaacccaatgcctccaaatttcttagggagacaaactttctcccaagaggggatgtgcattttgctacagttaccattactccccaaagaaaatccctgcagtatttgtcaatggccgtagtaactttttgcggaagcaagaaaaggttcatccagtagtttcgaactcccagaaggacagaatggattaactgagctctaccagcaaacgagagattcctgctagcctagttatgcaagtgtttatgaactttatcgatgatgataccacagtatgagaacctccattttgtgggcctgagatgcacaccgaggtatttgaggggaaaacttccctcatccatttgaaggatgttcagacgattttgcttgtcatcatctagaatccccccaaagtacactgtgg

SEQ ID NO: 31549 - DNA, 2127 bp, Cannabis sativa
tgtagctttccaaatgtgctctttagaagttactttccaataaggttgtagggtgattaatctgctatttgtgcttgcatggcagatgggttgtggccaaactacaatgatggaacatggcctgcctgctgcaccaagaagagttttgatgagaaagaggtttgtgttcttatattgatatttagggctatgattatgatgtatgagaaaatagtgtacacaaaggatcacaaatatacatatgtatacatgtatatatatttacatacatatgtatttcctcaatgactgaatttgatagttagttaccccaaaaagaacatcttatctgttatgcccttccaaagggtctcttctctgctatatgtacatagtactgtggcttttacttcagttcaacagttaacaaattcttttgtcacccaagtactacctctattcatgttaccatactaaatcctctttattcatttttgtaggtttcaacattacttggtgctttagagaagtattggccaacttatggttgttttccatatatcacctgtgatggcagtaacggatcattctgggctcatgaggtagtcattagttttaaagttatttcatgcctaatttcttaatcactatcatacatagctaacagtttattcatcttctgtttctatgatggccaaattggatgcattacattgccagtggggtaattctcttcattttattttccttatcttaatgttaaagggttacatatgtgcataaattttgcctgctgtcaagagtactttagcttgcttaagctttacattcttttgtatatttttttttaatattgtcactgctctagttcggggggaaaataatagtgtgttaggccctaggataaatatggtgtgctagaatagagtatataaaagggtaaatgagtctttgtttgggaaagtagttttgagtaagaaattagtatatatatagctgagtaaaagattattgggggtatgcaattagtggcggactcaggatttagagcgaaggggggtgtaattttttttgtaagataggtgggcgaaagtaaacttaaaaagacaaaaagagtgcacttggtgggatttgaatccttgacctctttcatgtatgcaatctagcttaatcattatgtgagtttatccttgtatgcaatgtattgaataaatcactctttgcatcaaaggggcttaagggctcccaccaattggaattgatttactcgtacatataatatcaatatacacctctagtgtttggctattgttttatcgtgttcttgagtttggagttttcggttcttatcatagcgttttacatgtttcagttaaggcttgtgtgtttcaaaaagttgttttaagacatatgaatgaaagtctatcaaagtttgtggaataccattgaggaagtgatgataacataaaagaagtgtttataaagaggtctaaatacactttgtaatatcattaagatagtaacaactaatttctggttttattagtgctttgtttttgttataacattagtacattctcttccatatggagtgtgttattcaacatagtcttctcatgaatcatattgagtgtgagttcttttattgattctttcaataatatcactattttcttccttatgtattgttacttgcagagaagcatgggacttgttcctctccagttgtttgggatgaatacaattactttttgactacccttaatctctatttcaaatacaatgtcacagtaagtcttcaagtcatcaaatctttcttattttatttttttaagaaattattaactcaaaatcctttatatggttaaagttgactgctctacattacgagatttagttgcttcataggttactcactgcatgaaaaattagacaaggattgatatctgaggtctgagatactctgagatacatcgaaatattttacgaaatttgattgatttggaaaggaagcttataggcaagtttttgctctttttcagtgtgtgtgtaccattgatgggaggtgtttataagcaagtctatagagtatgcgcatcattgaatgaattcaagttatattgtagaaatatatgaaattttaaaacc

SEQ ID NO: 31550 - DNA, 2624 bp, Cannabis sativa
atttcgaagcttgctcttcctaggctatcattcacacccgcatcaacattgatttagtgttgtctacctctgggcggtatccatttgacaacctgaggtggagacagagctgcgatattcattcatgaacttaccacaccattccacaatgtcaatcgctttgggtttggagccccatgtatatcagcattccttatataccatagttgttaggaaataataacaaaaaaattcaaaggtatcatcaaaccattcctagtgtaaggttgtcaaaatatctacgacaccctcgttaacaaatgtttaagcttcttccacacaccactttgtttacaaacatctgtaatagtgtgacatatgcatgatactcttctcttgctcattattacatttgttgtagcaagaactctcagagacctttcgcttaaacatcgtagcattggtaggaatccatgaatggcttacccactagagaaagtgttcgttaagcttctagattgctttccaccacgcttccaagctctgtgtaagagtaaggtcatcttgttcttgcattgtggcagtcataagccatccgctcttcacagagtattctccatttttagtgtagtgccacaaaactttgtgctcaatttctcaccctccacttggaatactgtgaatcaaaactgcatcatccccatttaaatactgctcgaataaaatcttcatcccatgaaccatcaactcgttttgaatctatgacatacaatatttcaagtagatgtggtttatcatagattttaaaactgattgggtgtggtaaccaagggccttccaacactctaacctcattcccacttacgaccctccatctataaacctgttgtatgatttcatttccccacaatagatttctctacaaaaatgaggccttactaccacacttggctcccaacaacccccgattagaaaggtacctctctttcaggacacgtctaaacaaggatttagggagtctaacacatctccatatttattttgctaaaaaagcttggttatagatgcctgagtcccaaaaatcaagtcccccttgctctttgggtttacacaagagacgtcatttacaccagtagattttattacttttttctaaagaaccccaccaaaatcttgtagtcatattcgatggaggctgttgattgtgccttttggtaactaaaaacaactcgtggtgtatgtgggaatttcttgaataatctctttaatcaatattcctttctcgctactgcaaacatcaagtaaatttactgagtaaatttcttaacttattaattcctcctgactctactatagattcgaaattatactcttgattacatagaacgctctacacaccaagtataaatatgctataatttgtccattgtttcaatcacagcaattattgatactttatagaaggtttacatcgagtatggacaaaattactattttacccttcaatctatttttttcttaaaatacttagctacttgtaaataatatttcgataaactaatataatcactgaaatgagcgctctatcatttatcgcgttaagacaaactctaagaaaaatattatttcacttctaataaacatagaagttatagatgtccatatctataattaacactcgcactcaattacactaccgagttcccaagatgtaagtattgggctggttctacggtaagttggtaacgaacaagttaaaaaactcatgtaatacatttgaggtagagcttaaccatctcaggattgagatcaaatgatctatgatcaactaagagatattgactcagaaaagatataacgataagtttatgatatctttttattgatcggtccagttcgatgtatagccgatacatacaatgctagtatactttactaataccctgaaaaatacattccacttatcaaagtgtaagcaaaaccccatcgtttatatcacgttaacataaatccaatgcattgataaatcatgaaactaaataatttgaagcatataatcataattactttctacttttatgatattactgtaattgtgaataactatatgttcagaatttaatagaacttatatattaaacatgtaattatatataaaacatgtgaacaaagtatatgactagatcaagatataatttttgatatttattgaaagtaaatacaattacgctgaattggattttatttaaggtataaaatttcaacaaaaactagatctaaacaatgggtaagcaaaaaaaaacaaagaagaagaagagttagagaccaaaaacgagaacgatcaacaccatggccctcgttcagctttagctttggtgatcccattcagatctgggatgcaggtctcatgagaaagagaaagaaattctagttttgggtattcttcaattaagtttggggtgtactgtaatatcttgaaaattatgattatgttaaattagacatattttattaaatatgtaattatatgaatattagagtaggattatactcttacttgagctaattatgagttaattagtaaatgtggaataaataaataattaaacgtaatttattaattacggagattttatcggaaacat

SEQ ID NO: 31551 - DNA, 2753 bp, Cannabis sativa
gccagttgtcctaaacaaaatgaatattttcctttaagtatgaattcaattttttgctttaagcttgttttttaccaatgcttgtataggtatagctgcccccccccaagtgaccgagcagacttttgactcttggtcacttgcatttctaaagttttattttacctgtctggttcacacaccttaatgatggcattaagaaacctcatctatacattacaccttccactattatgtaccgtgaaacctttctcatcatttttcaagcctcattcctgttgctcgaaagttttccggtattgagataggctgctatgggagtcatccagtttggtgcgttgtctttcatctcgattttctctgtgcaagtgatgctaggttctttcaaaaactaaattgggactaggttggctttatctattactgtttgcttgccagtcgtgctagtgcatcagctgttttcttttcttctttttggatttgcgtgagagtataacccttgtacgcattttaggtaattagataacttgctataattttcaaaaaatgtataaaagttacacaatttgaatgataattaatatctttattcatatataggtcgatatgtgctgttaccgtggcaacatatatttattgaattataaaagctattacatgatctctttatctttttctaattaaatataaaacatttgaatgatatattccgtccaaaagacattgctcaagagcaatgattttgaacaatctatactttgaaagtgttcacccgactttagtaccaattgttttttgaacctttgagcgaggttcgctcagaaggccaccacttaagagtggtgtttgagcattgtgcaacttgtgtggtccctggacctttttcacttattggtagtatttccttagatgttcatcattccaataccttggtaccagaactagctccatgtttttattataccaaccaagtttgtatgctctagattttgtaacttcggttacttggtatggtccttcctaattaggcccgagcacacctgctgcactgtcctttgtgttcaggaatactattatgagtaccatatctcccataaaaaatttcctttctttcacttgtttgttgaattatcgagctactttttgttgatgagctagtagctttggatttgctaaatctctcttttcttcaacttcatcaaacgattctgctgggagggcattgttagtatcctgggtgtaaatcaattttctatgggatggaggttctaactcaatgagagaaacattacctcatagccataggccatggcaaaaggtgtctgcctggttgccattctttcagttgttctatacaaataaagtacctttggtagttcctttggccagttccccttggcttctttgagcaattttttcatggtgtcttttaatgtcttgttgactacttcaacctgtctatttgtttgggcatggagaaacttcttctatacattacacatttcagtattatgtaccgtgcaacctttctcatcatcttttgagcttcatttctattgcttaaaagttctctagtgttaagatagactgttatgagagtcatttagtttggtgtgtggtctatcatctcaatttcctccgtgtatgtgatgctgggttcttttagaaactagattggaaccaagttgctttgtctattactatgttgctcgccaaccatgctagtgcatcaattgttgcattttcttctcttgaaatttgtttgagggtgtaccttcttctaaactgtgcgagcaggtcatggatcttactgagatatgccaccattatttctctttgagctgtggattcccccaagacatcatttaccaccaagagtaagtcactatagatctctagatatttagcacaaacttcccgagtaagttttagtctagcaataattgcttcatactctgcttcgtaattggatacattgaacccaaatttgattgctccttgcaaaggttgcccctaggtgttatgagaagaatgtcgacttcagacaactgatcggtggatgattagtccacatgtaacttctagataggtttatctttatagcttttcttccagtgggggtgttttttcttgctctctttttggctcgagattatcttttgaactatctatttctttacatgtgcattcaactacaaaatctaccaagtcttttcctttactattgtgcggggttggtaagttatttcatactgtaccaattcaattgcccatttgagtagccgtccagatgcatcaggctttagtagaatttggtataaaggttggtcggtgtaccctcaaacaggatgagcttggaagtagggccctaatttccttgtgggaaggatcagacagaaagttaatttttcaatcagggggtatcgaccttctgcctcaactagtcttttgttgatgtattaaactggatgttaaacattattttcctctcttattagcatgacacttacagtgtatttattgactggaaggtagattcctaattcttctctgtccagggaatttgagagtacggggattttccaagttgcttctttaattcttgaaaggcattctcatattcctctatccattcaaacttcttgttacctcagagaatgttaaagaaaggaacacatttgtctgttgactttgaaacgtatcttctttgtgcggctatctgaccagttaggctttgcacttcgttcaccttt

SEQ ID NO: 31552 - DNA, 1860 bp, Cannabis sativa
accataaaatggcttgctagggatatactaggctaaagaaccatagattagataaagagagcttaagtaaaaagtcgaaccttcactgacacttctcttgtgtctatgaaaataatcaaactaaattcaagtcaaccaacatgtacagatttgctccaacaaaagtttattgtgtttctttggtttcttacaaatatatatacccagctccactcctagtcttgagtttggggtgttatggctaaaagctcttagtttgattactctgtttctgcttcgaattaatctgattcttcacctctaatctgtaacaccctttaacccattttcctcttccaatcattttcttacctaaaaaaactgaatgagttgcagtgcaatagtattgcctacaaatgcgcttgttggatgagattcagtccatcataaagtatcagggaaagaatgatgtcctcgaccctgtcttggccacaatagatttctgcgcctttgaaccttgggatttacctcgtatgtgtgctagttcttaatttttaatgttgtttctttatctttacatcaatatatattcatttttatgtggttttagtttctgggtttgttgggattttaggtaaatcgatgatcgagtccaatcatctatagaagaaagagtaaccatgaagttgatagaatgggaaaggaaccataggtcagataaaaacctgccaattaatttttttctaaaaaaatcagcctttatcagtggagagaagattttaatagttccaagaattagctttaatgtaatgtaaacaataacataatagttccaagaattagctttaatgtaatgtaaacaataacataatagttaaaatattcccaatccccattgtcccctatcagttcagcaaccatctgaacatcagggattgggtcgcaaaatgattttgcataattgtcaaaatcgtgagtcaccaagggatcatcccaaattttggtatcttttccatcaataataactttacaggctccagacttagagataggtattgttttgacaatgcctttccagaaccaagagtcaaagttattgtaagaacaatttagaaattattccctctcaagtatttagcttcagacaccttacaacacaatgactatttgcctgaaattaaatgcccaccccacttgggaaccccaaacccccacgagattcagggagacatagtttatcccaaactttcgatagatgcctttgttccctcattcataaccccaccagaaatcacggagcatcccatccattcttgaagcaaacttgttagtcatcctgctagactatattaaccctaaaaattaaataggttgattcccgatattagtaaagattagtctcgagaaatgaaagaaattagcttaaacagttagttaaggaatcaacacatttaccccggggccactcaaccaaaccttattgtgagagccactcactcaagtagggttgatggtcactcgaccatgcatggtgaagagtcacgcagccatgcatggtgaaaagccatggtcactcggccatgtgaagaccaaagtcactcggccaagcatgtctttaagtcaccaggccatgtgaggaagaaatgtaactcggtcatgagaagaccaagttttctcagcaaccatggattaaagtcactcaaccatgtgaggaagaaacgtcactcgacatgcatgcaacggagaagtcactcggccatgcaatggagaagtcactactcggtcatgcattcaagaagtcactcaaccatgcttcttaacatgtcactcatccatgcttctcaacatttcactcagcatgcatgcaataagaagtcactc

SEQ ID NO: 31553 - DNA, 2873 bp, Cannabis sativa
cccgtactccttgtaaatccatttccatctcaaaatacttgatgtgacagagtggatcttcttttcctatatacgtcttccatgtgggcatcttaaacttgtgcgaaagattgagggtgttaatttcgggtgaaagtggtgaacctcgtgtttgttaaagctctaggttagtgagttttggatcagtcaggctttgtacaaggttgttgagttgatctatttgggcttgcaccactagattaacttggcttgcctgttggccgacctgtgtcacttgtggaccccctagaactttactgagcaagtagttgtccacattaattagttgaaccttaggagggatgaaatgtccatcatgtctccttatgcgattcacattgtctcttaaatcgtgtatgagtcccaatctgttgaaaacttattcacctagaggcccccttgttcggatgttctcaacagttgagtggttaggtatatttgtctaaggacaaatgttatattgaccattcccctaatataatgggttggcataacttgctcgtctaccgcgtggtccacacattgatccagtggcgttggattggacggtccattatcttgggtctgctaagtgttattggtcgaacgttcttctagctcataatgctgtccatttaggatataagtttctttccctctattcagatcctgtatgagtgcagtatctcccactaattgctgtccagttagctgataagcatgcctaaccagcacagtctcgtacatagatcgattatcggttgttgcttattgagctctcataatctccatatatttgtccatccaatcctagaattggcttttttagtgttcgaaggccaaattgacagttcctggggtatcctcttgatcatggtgaagtgtgttagggtgctcttgcatctggcctaaagtagtttgtaaattttgtagctcaatatcatcaccaatcaccactcgaggttctccacttaatggatttttagtaccttggccagtctatctagtatgagtactagtggttccagtctcctatgtgccttaagtgaacccatgaagaggggttgttactccctgtcctactgaccagtgaccccttagaggctgaggaatggttagatttgggtccatctgcactagatctctccgattctctacagttttcacataaggatccatagccattgcaaaagttatttctgtgggatttcccctccttgtaatcacaacaatcttcgtgtgttttgaagaaaatcaaagcaacgatcgtgctcttttacactcaatgaaagtaccaaaatgttgacctacttttagtcaacgacactaagttaattaaagcgattagactaaatgatatcgagtaagaattacatgaaattaagcaataagaacacaaaaatttatagatttgagctcgtgataattgtcatagcctactcctctttttcttgtatttactgatgagaagagaagcaattgagtttcttgattattgttgaaagcttacaattttactgcgtaagagctctcttaaaaaattgattttgaatccctaaatagtgaaatggttctcctatttgtaggaaagaattacattaattaggtttcccaaaacaatcaagaaataaaacgagaaacttttttattttcctaaaacagatgaaattaaaagagaaactaggaaggtttccttttatttcttgtcaaattatcccacaaaattagagatgtgatcgaaatttgaatgcttgaatatttatggaaagtatctctacagatcttcttaagccgaaaaaaccttgctcggaagacacggcattcctaaatgacatggatctgtacgggcgatcacggaaagattctacccgaataatccttgttgatgatgtaaccttaacaacttcaagtagaaagttctctgcccgggctcttaaggaaaaattacccgtccaagcttctcaatattcttcatgtgtcactatgttaaatgtcacatcatcctcctgtgcggaatttaggataacactaagttttactaacagtaatctaacaaaggtttgacaattttatgagcgagacagtgagagtgagagtgagagtttgatgtagtcttctttgttgaaaaggttatgtgttttttcttctctgagtattggtttcttgtcttgtgtctctctggtgtgtgtttgcttttaaggttcattgtgtctccccgttagtgacctttagtttttgtgtttggagccttctgagttgactctttttcgtttcttctgtagtggggcagtgtgggtggcttagtattttgtttctgctcctgtttgttagtagttattctgtgtatttggtggggttggtaaaggttcttgatattccttttctttgtctgctttctgtcgggtatttatggagaccattattgctaccaactctcctttaaaaggcaagtgtttttcatgcattgaaacctctgtcaacttatctccgtgtgtttcatctctaaatgccctatcttcttgttgtctatatggaaaagtggttactcctacggttgtggaagaaccaacggttgtggattttgtggcgaaagtgtggaagaaacatgtctctgttttgtccatggtggatgattcgaagacctctaatgtgttcagattcgggtttgactcttcggaggataggaactgggctctgcttaatggcccttggtgcatccgagggtatacgctagtgctccaagcttggactctggctactgatgggccggttgtgtttcatctcatgcgtgtgtggatccaacttcataaccttccccatgaatatttttttatctctaatggcaatctgctggg

SEQ ID NO: 31554 - DNA, 1211 bp, Cannabis sativa
ctctctctctctctcttcaatttcgaagccctatagtgatagagcaccttgtccactcatatctagtcagtactagtgtggaagattatgaagaattccaatacctgaacgagatctaagttcaaatcttgttattactatgcgacagaaaggaacaggcgttagagatctaaacggaggagaacaagggttagagatctgaacggaaggaaccataatattctgctgccaccaatgtatggttttctagaactttatatgtgtttaattcattattttaggaaattcatgtttaggatgttagattatagaatataatcaaacatacatgttagtaaatatagatcttgataaaatagctttcaaaaactggtcttagagtcatggtaataatttattttcatgaaatatagatttaaaatgatgatttggatgtgttcatattgatttatgtgcttaattaatgattgtctgttaattacaaaattttgacaaaaaataattttattttcatactggaagtatttttttttttttggaaagtagatgaaaaattaatcaatttaagcttttacagaactcaatttagatttaaattaaattagttatgatttttttaagttgaaaaaatatctaggctaggttgtaggtggacgcgcacggacgaggggtgtgactcgccattcacgcggattcaaacagtgcatgtccgagaattcttggacacaggattgtttgaagcacctcgtgaccaagttttctcggtcaagtaggatgcattgcagcctctcccctcaacaggttttccccctaacgcgcaggggagtatgcaatgcgtactcccctgtgttgcctaattttgccatttgttcaacttttaaaaatagtttgtcaatggaaataaaaaattcaaattttggtaagtgtagaatcttatttttctaattaaaatctaattatcagattaaaattaatttacaataatttttcaattaatttaaattagttttagatattagtaggctttaagtttgaaaattgattaatttctcaacaaacttgctattataatttaattctcaaattctaatttttcatgttatagagaaattactaaaaaaaattatattcgggttaggacatataaatctcaatctattttttactcttgtgataaatttaaacacataggaggcattaaacataaaaat

SEQ ID NO: 31555 - DNA, 2289 bp, Cannabis sativa
ctagaattaacacataaagggaaacagtattcgatctgttaggaaagtcagtattccataattatagatcatatttccaaccatccacattattagattcccaaaataaaagttgtaagaatcatcttctccgagaaactttaacgagtgaatcaaagaaactaataaaatgaatagaagctttgacttcactagatgctgagttgtggaatgaagctattaatggtgaaaatgacttttttaggtcaaatggaactttatatttagttgatttaacacttgggtgtaaaataataagttgtaagtggattcttaaaaggaaattgagacccaatggtactgttgaaagttgcaaggcacgtcttatggttaaagggtttagacaaataaataatgtaaatttcttttatacatattcacttgttactagaattatatctatttgtgtgcttagtgctcttgctgctactcataatcttgttgtgcagcaaatggatgtaaaaactacttttttgaatggtgaattagaacaagaaatttacatggaccaatagctaaaggttttgttgttcttggtcaagaacttagataaatatttgtatggtttgaaataggcacctaagaaatggcatgcggaatttgataatcatgtcatctcacatggttttaaagtaaatgaaagtgacaattgcataaatctgaaaatagtgtttgaactattatatgtctacatgtggatgacttgctcatttttggatcaaatattcatgtcgcgaataatgtgaaatttgtgttatgtaaacattttgacatgaaagatctaggtgaaacgaatgtgatccttggtgtacagatcactaggtcaaaaatgggaattctttagatcaatctcattacaaggagaagatcttgaagaaacataattacttcaagtataaacctgcttgtacaccatatgatcctcatgtaaaattatttaagaatactggtgatggtgtaatacaatctgaacatgcaagcatcattggcagtcctcgttatgccactgattgtactagacctgacgttgtgtatgttgtggtattgttatgcaagtttactagtagatctagtgtgaagcattgacatcttattgagagggtcatgagataccttaaaaggaccttgaaccttaaattacattatcaaaagtttgcatttgtcctgaaagggtacgatgatgttaacaagaacactttatcagataactccaaggcaaccatttgctatatttttagcgtaattggtggagctgtttcatggaagtctaagaaatagactattttggctcaatctacaataaagacaaaaatgattgcactagctactgcttgtgaagaaggagattggctgagaagcctgctagctgagatttctttataggaaaaacctattccagctgggttgatccattgcaatattaccacggctatttcaaaagttcagaactgttattataacggtaagagacgacaaatatgtcgtaaggacaacactactagagaatttctctctaaaagagctattagatgggatcatgtacgcattgatgataacttcactaatcctttagcgaaagatttagctagagagaaagtccttaaaacatcaaaaaggaatgtgactactacccctgaattgatgaatcactcataatggtaactcgacctatagactggagttcccaagaaatagattcaatgagtaataacaagttatgaagtgataagagtaagatcatgctatatttatatgaaaagtgaagcatgaattcctgaaagcgatgtaaggttgaatttaaatagaagctcttaatgagttctatactccaagtgaaatggagttttgagctacatgagtactcttgatagactcacctatgtgaatgtgggagtgaggtgtatggccattaacagactggctttttggctactcccttgaaaaggttgttgcgtggtacgatcttagagataaagttcaagactacgagtcactctagtaaaatctaaatcgtattcactatgcaaaggttcaaatcgaaagatacatttgtttatactcaatcttatcgttgaatgatactggaagatggaaatgctttttaaaaattcaagtgggggattgttgaaacattttacaaagtgagtgaatttttgacaaactatgacactttcctagtgtgtgtgtgtgcgcgcgcgcatgtgcgtgtgcgcgtgtgcgcgtgtgcgcatgtgcacgtgtgcgtgtgtg

SEQ ID NO: 31556 - DNA, 3624 bp, Cannabis sativa
ttaatatttataaagatatatgagtattgttattgctattagcacctttgtgacatgtcgcgttgcgattggttaacaatactctctaaaaactattatattaaagtatatgtgactcgataattagttgtaccaatagcgatattgacacatagaagggtgctaggcaccactagtgctctttaccatttctcaagatatatagattaggataatgtccacaaactagtttactttcaaatattattttttaataagaagaacttatttatgtttttttagcatattttaataaattctttaaacaaccacacttaagataatctcatagataaaataaaaaacaagagagaaacacactatatatgagaatattttataacttcattacaaaatataaagtacgtagaaaaaatatattcatttgtggaaaaatatttcaaaaataaatgcatatcaactcactgcaggtaataaaatgtctccctaaaaaacccacattttccaccccatatataaagtattaagagcgaaaacccgattactttagccaagcaattttttacaagtttttatttttaattatataacatgaacaaaaataacgttttcgctctttgagaacagcaactagaatattatcgatagcaatgaccacaaattcataattatgatataaaacgacactaataaaaatactgctctttttacgatatataataattactatataatagaaataaacacgaataatactgtttattgttaaaaaatattataattaaacatctaaaaagaaaaaagttattataatttttttttgttttctttttgatatgggggagggagatttgactatagtatatatttataattaaaatagaaaaagttatgccagtatatttatataaaagaagtactctttaatttaatgaaaaggaaagtcaacttttgtgattttgtaggaccaaaatgagatattattattacctgaacctctttcttctgaaggtttttgtataattcttccaaagcatggatgccactggtgtcaatgtcagttacagctgcagtaaagttgtgatgaaaaagataaatatgttaaattcagtagattttataatttggtaactaagaaagataattaatcctatagctaataatagcctaattaatggaattgcttacgcgacatctccacaatcaagtgctgaattcttggcaaattattttctttcactagctcttcttcctcagctaaccacctcaaaattctgacacaaattaaaattaaaataataataagtatatatataaacacacacgagtgttccccattgaaaaattaatagaatatataaatttatatgcacattatctcaaattctaatagaacaaaaataaaaatactaaggatctcaaaaaataaaaaaataaaaaactgatcaaaggaaaagtagagttacaaaaagaattacttgtaattcaggaataataaattaaaaagagttacaaaaaattttaaaaaaattgatccaaaatgaaaccaagagagtcattattaatatgtggaaaaataataaaatatgtaaaattcatagattaattctctcatagctaattaattttgagataacacaccttatctcaaattctagcaatatatcaaactatgcatctggctatatatatatatgattgcatatcctcaacatgattaccatgtttcacaagtatgctcatttttaattaacacttattaagaaagttgatctcataatagtgttagtcatatcattggttgtgtttttctgggtctaattcgtacctctctttaatatagttagaattggagaagtatatagcagagtcaactctgacaatcaaaactccaggaatcttccttgcctctgggtattgaagggtgttcctgtacacactagtcctcggtagttttcctagtacagcagttcgtggcctcgtcacttgcaaaagaattttagcaagagatagagaaacctatattcatggccataataaacaaacagtcaatattaaatattattaggcagtgttattcagtcattatataaatggtttttacaagttatagttttgaatgaacttccataaatttcaattttttttaaatacctgggtagaagattcgaacgtaaccactaaattatgattatgataactaatttaaacaatttgttactagctagtgtgtgtttgttccaatatttgtgcgtgtgtgcagttgattgaatttaaattttctaaattttaactacattatataatatcttaatttttctaaaaaagtagacaattaatataaagattacttataaaaacaattatatggatatgtatataaaaaatatgggtgttgattaccgcaattagtaaaccaatctcaacagacatgaaaacaacaccaaagaaagctcccatgcaagcgacaaagtcgaatttgtcgatcttccatatgaggatcacagcctcatagtcgagcaaattgaccacggcggcaataatgatggaagcgaggatggcgttgggtgtatacttgaatagcggcgtgatcagctctaacgttaggaacacaacaccagccattacgatgttcgacacagccgtgtggcaccctgacatgtagttcacagccgaccgagagaacgaccctgccagtataataatgaataatattatctgtattaattaattaattaatgaggaacaccactaaaggatttttgggtagattagggtgtttttaagtctaattagtatttagcactacaagtataacaaaaaaataattaattgaaaagctttctactgaaatactttttagaggttctcattattttatgcatgtgggaaattttcaaacattatagagagttctgttaattacacgaaatgattacctgtagctacataacaagatgtcaaagagccaataatgttcattgttcctaatgccaccatttctttgttaccgtcaatttgatagtccttcatggttgcaaatgttcttccaattgctattgcttcctgatatattcagaaaacaaaattgcctgaataatcatttgggttaaaattaacaaaaaatttcattccttaattttatcattgattttacttactgttagcgctatgatgccagcaacaacgcctatcctaaaggctttgccaacatattctccggagaggaataagtcattggctgagactggatttatacccttttcaatatggttcacctgaatagcgcaaacacatcatattcataaatgcatattaaattattattaagatactaaacacattggcaatagaacgaatgcaaacatgatcatttgcatgattaaattatgagaattaattatatcctaataaccaccaatgagcgtggcttactatttgaacaccatccttatcagcacgagttatgtagacacaaaaagtggacaccacaacagagatcataggagcgatagccggcacccaaaaatactttctgtttcgttttccctgtccatccaatccaatcaagataggaaaaaagattaataacaagattgaatatctcatgtgattggaaagtta

SEQ ID NO: 31557 - DNA, 1721 bp, Cannabis sativa
tgtaaggaattttgcattgttggaaggccaactttgcttttttatgcatttatctttacttttaatgccttgtatcttatgtttgaatagaatatatttgtttattgcattttattttacaatctaaatatttatattctcatccaacttattgatactttagggagcattctcattgttcctatttttcctttgatatgcttaagtaattattaatctactacgtatgtgccgagcagttataatctatgtgtagttttaatccgcgagcagttttattctgctatgccagcagtttacaatctgtcatatttaaacatatttcttgtagagcaaacttaaaaaatactttgaataattcacatttggaactattttgtatatcttttcattgatcatataaatagttatattatctattcataatttagctttaatattatttttcaaggcattcttatgcctcgttataatacatgccagattaatgagtcgttagaacattcaactcgcatatagctttatgttattttttgagttgatctatttacaactgttgatttgattttttctttctaaagaaaaggtttttcgattttttttttttgactttatattgtccatagaaaattttaattaactatccttctctttgtggaaaaaattttaattttctaggtttgtaacataatatgtatatctagatgaattccagttattatacacatatatatgcctcttaaataactttaaagatcataaactttgtaattactagaacaaactttaacattgttaataataacaatttaaatattacaaagataaatacaacatttatattttgaatttactggtaataaggccacaaatattcactattccagtggttcattattagcgagttattaagccaagttaatttgtaaactccggttcccactactacttcaataacataaggcccttcccagattgggttaaacagtccagcacttggatctcgtgtatttccaaatactcgtcttaacaccaaatctctaacattaaagagccttatcttaactcttttggtaaagtatctcgtgattccatattgataggttgcattagttatttgtgactcattacgtctttcttcaagtaagtccaaggacaggttcggaagctcttagttttctacttgattatagaattcacgcctataggtcgtaatgttaacttctagtgatagcattgccttcgagccaaatactaacgagaatggagtgtgtcccatcgctgttttctctgttgttctgtgagccaaaagtacttgaggtagttcatctacccatcttcctgtagtagcatccaacttcttcttcatagtatcttttaatgttttgttaacaacttctacttgtccgtttgcttggagtcttgatactgacaagaagcttttgataattatattcgtttcacaaaattcagtaaaaagtttgccgtcaaattgagttttgttatcagatactactttgattgctattccaaatctgcaaataatattcttgataacaaaatcgagaacttttttgcaagttatggaaactaaagattcagcctctttccactttgtaaagaactcaattgacactacagcgtactttgctcctcctcaccctgtgggtatgtaaagaccccttagctttaattttgaaattagcagataattagggttt

SEQ ID NO: 31558 - DNA, 1963 bp, Cannabis sativa
aaaaaaaagaaaaaaaaaaactcaccaaaagcctatattattgcatttacattaagttactatactttttcaattatcttgttcttcaaatcgctaacaaattgacacaaattcctttcagatgatccgttttcggccaaggcattcttcgatatttgtctcaattttatcatctctttcctcaatttatcatctaattttgtactcatcaacacattaaccttctctgcaacttcaaaccttgtcaacggcttcttatcacaaaggttgacaccaattctccaatcatcaactaataattttctaatagttaactgatctgcttttagagggaaacacaacattgggacaccataccaaatgctttctagtgtcgaattccatccacaatgtgttaaaaatcctcctatggcagagtgtgagatcacatcaatttgattcgtccatgtcacaatcaaagctctatctttaatctcatcttcaaacccagatggaaggacataaggttcttcataactcactgcatcaccacgaagaacccaaatgaaatttattttgctaagtagaagcccgtgggcaatttcgtcaattttctccttttcacaaggaataaagctaccaaaggagacgtataagactgagccttgaggcttggtgttgagccattgtgtgcagtcaaactcaggttttaagctagtgggtactagggttttggagttggagagcccagatggaaacaatgggccaattgcgtacatgggtcgttgctcttgtatggctaaaatgggctcaaactcaagctcatggactgtgttgcaaagaataaaatcagcacttttcatctctttcgaagtcatagaaattagacgatgcatagatgttgagaaatcagtatcttgaaggaatgataccaaatcttttggctcaatggctttgattcccggtatgtactcgatagtgtcttctctattatctagtccacacaaaaaataaaataaatttactgtatacatcaatatcccaaagctaataactataactatttttttttgaacaataactataactattaatatacatgggaaatgaataaaaatataataaagttgtacgtctctatggtaattatataataacgttaagatcaaattgttattcttcttattaattaagaggttattttgataataatatagttatttggtttacgatatgagcgtttctattttaattttttttttatatgatatctattgtatattttagttataatagtcatgttgtcccttttcaaaatttgttgaagttgaaaataaagttaaaaatagtgtgtatgttgcatgtgtaaaataaaagaagtacgtgtaaaattgaatgtttaaattttatattttctaaaaataggtacaatgtttagtataactatgatttttataattataatatataaaatgattagttcacaattacataaaataacaaaaaaattacaaaaatacaatttcacgaaattttaaacattttcacgatttctttaattttatttacagaaaatacggtctttttatgttgtactcttgttaatttgctatttattttttttgttatctatatgttatttttgttattgttttaattatattttcatgttacttttatgtaattttcttattgtattcgtgttgtttctatggaaaactttaaatgtcaaaaaaataaaaaaattaaacgtaaaaatataatttgtttacaaaaaaatagtgccacatataattatctctaaaaaaaataagttgtaatttatctattcaaaattaaaaaatggccttaattagagcaaaacacatactctcaaaaaaaaaaaaaggtcaaaaacaaacaaaggaactaattaaatttggaacattatgttttcattaataattgtttggtattttaatttttattaattatacatatttaa

SEQ ID NO: 31559 - DNA, 1359 bp, Cannabis sativa
  modified_base (50)..(60): a, c, t, g, unknown or other
tctggatataaccagattaaaatgaatgtccctgatcaagagcatacaannnnnnnnnnnaacatgggactttattgttataaagtcatgccttttggtttgaaaaatgctgaagcaacgtatcagcgactagtaaataaaatgtttgcaagacagataggaagaaatatggaggtctacgtcgatgatatgttggtgaagtcgataaaaagtggagatcacacaaaaacctcgcaaagtgcttcgagatactgaaaaagtacaatatgaaactcaacccgaagaagtgttcctttggagtcgcctcaggaaaaatattgggattcatagtcaacgcgaggggcattgaggcaaatcttgaaaaaattaagactttgatagaaatgccatcaccaacaaagccaaatgaattataggccttaacaggaagaatggcagctcttagcagattcatctcgatatcaactgataattgcctaccattcttcaatgtattgcgaggaaacaaaatgttcgaatggaaaaatgagtgcaaggaagcctttaaaagcataaagaggcacttgtcaacaccttcaattttggctaaaccaataaatggagaaacttttttcctctacttggctgtctcagaaaatgcaattagtgcagaattagtgcgagaagagggaaagtaccagcaacctgtttactatgttagtaaaaggttactgggggcagaatcaagatatccacctcttgaaaaacttaccctatgcctaattcatgcatctcacaaattcaggccctacttctagacacatccgataagggtgttaactgatcaacccctgagacaagttttgtcaaaaccagatggctctagaagattgataaaatggtccatcgagctggggcagttaggcacaacttatcacccaagaacatccatcaggggccacgctttggctgatttcctgatagaaggaataattccaaatgaaaatccaatcaccctgggagatacagacacttggaagttgtatgtggatggagcatctaatgaacatggctcgggtgcaagggtgatattgatctcgccagaaggctttaagtttcactatgccttaagatttcaatttgacacttcaaacaatgaggatgagtatgaagccttgatagcttgtttgagactaacggaagttttaaaagtcaagaatctggtgtgttacagtgactcgcagttaattgtaaatcaagtcctagtcgaataccaggcaaagggcttaaaatggaaaaatacctagagaaggttcggaagaacttggaaaagtttgattattttaaaatcgaacaaattctaagagaacaaaactctaa

SEQ ID NO: 31560 - DNA, 1684 bp, Cannabis sativa
acttatcgttatatcttttctaagtgaatatcattcagctgatcgatcatagatcatttgatctcaatcctaagatggttaaactttagcttaaatgtattgcacaagttctttaacttgttcgttactagcttaccatggaaccagcccaatacttacatcttaggaattttgtattgcaattgagtgggagtgttaattatagatacaaacatctatagcttctatgtctattagaagtaaaatgatggtttccttagagctcggcttaatgcgataaatgataaaggtctcatttcagtaattatattaatttttcgaaatatcatttacaagtagctaagtgttttaattcattgaagggtaaaataattatccttactcaatgtaaacagtctatagaggatcaattattgttgtgattgaaacagtggataattcatattgtatctatattttgtatatagagcgttctatgtaatcaagagtggaattctaaatctatagtggagtctggaagaattgataagataagaaatcttactcgataaattttgattctacttattaggagcttaattacatagtccccaaattgtctgagataatatcatcttgtagaatcaattaattgatttaataagtcaattagaattcaaaaatggactatgtcttatttgataattttcaccaaatttggacaattttaaggaaaaaaaaaaagagaaataggaatttatttgttaactagtacactttatgagtctaattaataaatacatttaaattgtattttatttgattattattataataaaattgtatttaaataattagatggaaaaagtgctaaaattagaagacacttttgttttattagttgaaataaagtggcaaaaatctaactctaaagcccatcatgtgatttcgaccctaagagttgatttcagcccaaagtcttttacatttcatctaacctaaccctatgtgaaagctatataaagaaagtaatgagaagagagaattaacctaacaacctaattctatgaacacaatcgaaggagaagaagatccaagttcagatcttgataatctgctagacgaatcaagggttagagatttgaataaaatgagtcataatattccactgcaactactacaatgatttctatacctttatgtgtttaattcaattttttgaataatttatatttatgatgttagattatagaattataatctaacatacatgttagtaaatctagaccttggtaaaatgattttctacacataccacaatcatttttatgcttacatagttagtcctaagtataccaatgtatttttttcataacatctgagccaccccatcaaaatctgacacacattctatgaatgaatatcattgatagaatttataagaagtttgaaaagattcatggtataagtgggaatggattgaataattgctttgatcaaaacttcctatcctgccatagaaaaaagtttggacttccagttgttgagctttttccagattctatcttgcaccgcattgaagaagacacttttattatgaccaacaaaactagggagtaccaaataattctcatgacagttaatatgcaccactttgagaatagatttataataatatggattggataacttttttttttttttt

SEQ ID NO: 31561 - DNA, 2307 bp, Cannabis sativa
taattatttaggatcacttgtaaaaaaaataaaaattcaaattacaatattgaaaagaagattaaaatattttgttgtactcatattttttttctcttatatgcatagtaatcatgagttgtttaaactttatttttagtactgtagaatattcaagatctttttaaaaatttacgggtagttttaaataagtacaatgttcataattataaaaaaatgaaaaaaaacttattttataattacatttgaataaagaaacactaatatttatcttaattatattttcataaatatactttcatcacatccaaaggtaatagtaagttgctaaatatacatgtgtgtatacatataatctcattttattatacatatccaaatatttatatatatttatcatagttaattaaaatataactatacatatatactataaattcattttcttcaaaatttgaaggggggccagggccatcccacccttcaaagtggctccgcctcagattgcaaggttctagatatgttttttcttcatccatacttccattgagtataccttccacattttcattgttgcattcatccaaatttatatcagaatttttttctaaataaattgcatcctaaataaaccattcaacaagaacgtataattatacaaatcatttatctataaacaaagcattataaattaataatctgccatatatatgctagaaacaaacaaaagaaaataaacaaaaaaactcaaatatagaaactcatgatattctattttaatgtaaattatatataataaacataaaaaaaaaaagacaaagagttctacaaatcaactagcatatatataacataaataaaacttaccttttccattaggatttaggagttgaaatacttttgttactttgtacgatttctttttcttttttttattgagcttgaactgaaaaataataaagagaagttagcattagatattatttaagaggtaatacataaattgaaaaagagatgaaagtagtgattacctattttatatcattgaagaagagttctttgctttttatactagaaaatatttatgaagatgataagattaaaaaacaacttttcgtctgtatataaaattaaattagtggaataataattattgtattaatttgattaagatggcacaattgtaataagatggtatgattatggttaattaacatgtagtaggtacaaataagttaatttaaaaatttgacatttgtcatttagctatagagagagtgtccctagcactcctcttttagaaaatacatggtcaattgtgtcatttaacaaaagttctcattcgtaacttttgcaaatcacaaggtctaaaatggtatctaccgtttttttttaaggtaacatttgtaggttagataaaagaaatgtcatcacccaaaaaatggagagatttttttcatctaataaaatgttgtgattgacttaagagagatgcttctaatgaactaaataataagaatttaatatcaaaaaagatacctccatcgcaatttagtacaatgtggtggactactctaaaatcaacactaagacgaatctaagaagatccctatgataggtaacccaatattttgggctcatctcaatcctactttacttttctgtctcaaaaattgtcaaaaaaacttgtaacatataatcaaccattagaaaacaatcagtaatcttagatcttttcaataaagttaatgatatactaattttaagaaaataaattataataaaaacttatcctatcgaaattttggattcttaaacaaccaagtgaataaagtaaaaaaatacctaaaagataagtaggtaaaaggaattttttctataataagcaactaagggcaccatttgatatttttaggatgcttcttagggacttttgtcaaccgttgcaaattattttcttctaatgaaggcataacgatgtccttggtcattctgctcttgaaatctttcattaacttcccaacaatgaccatgcaattttgtttaaaatcatcttaaactataaaacccgtgtacttttaaggtaaacaaacatgattagagttaacatctgaattaatcaaacacaaatgaaaattctaacaaataactgattacttgtatatctttctaaatttagtttttaagttcagggttgacttgcttctaattttcataggacatcccaattgtcatacgacatctaactcctaaagtcaatactagcttgacatagtttctaccataatactcgtttattggcgatct

SEQ ID NO: 31562 - DNA, 1594 bp, Cannabis sativa
tttatattattttagattattttataacagttttttaatttaaaacccataatttagcaacagtatcactacaaatttaacaaaattaaacaataaacatgaatctatcttctatatgaggtacatatccaccgatttagtccttattaatagttttaacattatttacatatataatttaggaaaatttatagttttgtatacattatataatttttttacattatataatataaaataatttatttacatttaattatacattctatattaaatatataaatataattttaattttctatacaatctatataaggtaattaatttaacctaaattttatataaataaacaataaacatacatattttttcttacaacaaaaaaataaaaataaaataaatatacatattttatttataaaactatacattaaatatattagattaataatttataaacattatcaatataaaatataaacataatatttatacataattttacatttggttatagtatgtttcttaaaacaaaataaacgtaaatttttttatttttaaacttatttataaacttttaatacataaattatattgattctattgaaacattatcattagatcaataatagcattataaatattaataataatcaaatatttaataaacatgcatatacgttgtttataaggcataaataaatttttaaaatatgtttgtatatatataattttgtattaaattttagtaaatatattattttagtaatacatcaaaatataaatattgacttaggtatttttatatttaattttatgcattccttctttttttcaaaaaattaattaaaaataatcaacatattaaaatggtaaatatttatgtttatttttattatataatgtgaaaataaaattattcataaatatttataaaattatgtaaaattgtgtaattatatttttctgcatattttttgtaatataaataatttacttgtatataattgaaagttgtcctataatttactggaagattagaaataacatttctctaactccaacaataatcaacaagagaatgaaactaattatatataaactgaaccgatcaataattctaaaaattaatactcccaaaatttacaaacaattacaaattttctccggatcaaaaatttcaaccactattgcttgatagaaacatgaaaaaggggaaaaaaggaaagcaaacaaaattataaaatccctgatataaacaaaacacaaataagtttaataaaaatcataccttcaattttcacaacgattggagttagctaactacgtctgattaagctttagcgataaggattgatcgacaaacagagaaagcttccttttcttttttttctttttttgtttggagagcttcatcttttttttttttaagaaattttgtccccctcctctctacttcaagtctgtcactttagcgcacatactctaataaaaaactaaagtcgcgtttggttgagagaaataaaaatataggaataaaaatgaaaataacaataagaatagaaatagaatgcaataaaatttaaaatgcata

SEQ ID NO: 31563 - DNA, 1586 bp, Cannabis sativa
  modified_base (155)..(156): a, c, t, g, unknown or other
agatgaaggggtagaaggaccataatatttgctaaaatccctacagcctgtaattttgaatatgtcaaaaggctcgattgggtctaaatcccagctcctatctatgtgacatgcactatcttccatagtaccgtattgctcggctataccataanntgactcgtgacagttaacctggacgtggaatctaggataccagctgtcaaacttatgagcaatgcggtccacgagaagagaattccaaatataaaagttaaggcgggagtcttcaaacgtgactaatgtactacactcagctctaagtacagtaggagaccaaccacattaattatctagggatgctctttcaccggattcccagggggcagtactttgaaggtattatgcttgagccaagcgatcccaggcttgatccttgggcagaatagtaatctgttgccaagaggaatgcttaggaattttataatcataagtatattccttattagcgagaaggcccaccgatcgcaggttaacctcgctcaaaaggaaattgcacgaccaaagcgcctgtgcctactaaccatctcaggggtaggagtaggtctcatcgaaatgcctgattacttcgtttgcaaatctttgaacaaagcaaggacaggatgaagtcggaggaaactcgcaggaaaaaggtcaaggacagggatggcatgcaagtctttggacgaatttaatggtgatctttgacgaagaagtttaagggttttttcagactttctaaaatggagaaaataatgcaaaggtggttgcttttctcttacccatgatagtggctttgttagattagataaagatttgatcctatgggcatgattcaaaacggaagtggaaaagatggtcatttaattttgatgtaccttaaaaccgcacaacagccaaaatgagaggacatgcgtcttttcaaaaaagaggagcatggcggaaatagcctttgtaatcattaaacactactacaagaaaaggccttttatcccgagtttttaaggctttttatccccgttttcgctaaaataaaaatcgggatgtatgctagtgagataaaggtatttaaaaaacggggataaaagggatactttttatcccgcttttttcatgaaaaccgggataaaatgtacccgttttattccacttttcatgacaaaagtgggataaaattgtactttttatcccactttttatgaaaaaactgggataaaatgtacccttttatcccactttttctataaaaactggcataaaaagtcttattttttaatacatagatattctgcctatattatatatatattaatactgcctatataatatatatttcacatatgtacagttttttattggaaagaaaataaaatttattgcaccaacgaaataaaataataaactaacatgagaagatttaatatcaattgttgttttcacttcataatccttataacataaacataaaagaaaaaaagggaaaaatgtcattggtaatttagtttataaaaaacttttgttattacaaaataatctattgaacctaatttcccttctaaaaaccaaaa

SEQ ID NO: 31564 - DNA, 2994 bp, Cannabis sativa
aagctcgcttaactgtggagttctttcgagatgcgctaccggaaaacaaggtcgaggattttatatgaaatgggattcaattggaatggggcaagcccaaggtggtttaggaagtccttaaagtagtctcgtagggggattattgctccagccctgatgtgctctaggctctaagcgcctatcccaatcacgccacttgtactagtctcaccattggccccctcagatgttttgcttgtaagccgcattggaggatagcaactgaactcgctggcacgtaccgatctaacccgacagtctcgcctatatttgaccccacgagcccttaaggtgttacctacatagtctctgatggctcgcacctttgactttattagctttacctcaaaggtgacattagggtcttcgggaatctttgatttacatgtcttggaagacataatttcaaagtccaagtcacctggttcaaaaacaattatgaccatgggtaaaaacataggcttagccaaaggaatagaagacacactaagaggttcaggccaagcagcatctcgcaagaaatggcgtttgccttctgtaatttcttgcaagaagcgtctatggcgactagcaatatcatcttggttggttttcactaagtgttccctaattttcgcatcatttatctccaattcagatttgggtttttgaatttcaggtttttattggatggcaagttcagtaggatactctatttctaaatcttctggatgataaacttctgaactagattgggacattgctgcaaggagaaagcaatcccgattcctagaagaaatttatcaaactagtagttggtaaattggagaatctcgaaaacctacgttctacctaaaccctaacacttacccaaatacaatccagtcctaaaaattgctaagaccaaatgaggtaacaaagatgctgactaaaaaattggtaattaaacccagaaataaaacataacaagcatgtaagaaaataaggagaaaagtcacttactgtttggagttggttttggggacaatgagcgtctctgcaatctacgaaacaacaaacgacgcgaagatcccttcgaatgcttgaagtcgaaaatcaaattcgataaaactcgcaggaaaaatgttgatgacaaagatgacatgcaaggttttgggtaaatctgggaatggtttttctgcaaaaaagctggaaaaatttatatactttctgaaatggcaaaagtagtgcaaaggtggttccttttctcattttatactcttgggttaacctccattagattagggagataattgatccaacgggtagaatttgaaaacaaagtgaaaaagatggtcattaaatgttgatatacctcgaaaccacaaaacccccaaagtcagaggacatgcattttttcaaaagggattatgacaaatttaccctctgtactcatttaaaaagtacttttaagtaaaaagaacttttaaggggcaattgttatacacgaaatttggctggtacttcaaatgaggacatgtgtcaaacagggagaatacgaatcaacaaatataatgataattatattagaagatattaaagtggaataactcattaaatgcggagctgatagagtatgtttacaacttgatgattataaagtcttaagcgagataaggacatacagtctcgcgcgttgacaagaaaccattctacatcagaagtacaaagcgaggcatcaacctcgttacgtatgtagagatgtagacgagacatgttgattgttaaaagacttagcacataatatacattatacaaactaagcataatagttgaatgaacttgaacaacgcgaatagcgaggcatccatctcgctataggaaagcatacctatggtactttcactaatcagctccagacatctttcaatgatacccactgctccgtcgagacagctctcttagaaagaagctgatattcaaatgatgttgactgctgaagttcaccttgtcaccaagaactacaattgtcagatggagcgttatgtcttcaatcccagaaacgatgagatttacattattaaccttggaaagacatgggaaaagctccagctcgctgctaggattattattgctatgttccaagcgagatgtcccagcacgatacactttgcagcgtatttaatccacgtacgcattgacctggtaaaagtggataaaccacaattgtgtgattttcaaattataatcgcatttattttacatgggatgtaatcaaatcccataatttcaagggattattgttgtgaaatatcagtatgattgtaattaactgccctcctatgtaattataaataggagcaggtacactgaaaaaggaacaaaaaatcttttagagaaaaaaccctagttttgtatcaaaaatctaataagatagactcgtggactatgcataattttaactacaaagccatgtaaaaaaagctttgtgttatttcttttccttttacagcaattatttttgtgccaatccatcacgaaataggctttaatttagttaacgaaaatatgcgttaacattaaaataaaaaaaataatttaaaataataaaaacaataaaaaaaatgttattttattttttctttttcattctttttttctttttcgttttcatttctttcatttcttttcttattcttcttctaaaaatacccaaagaaccacccaaaatcatctccaacagctgcctccttcataaaagaaaacaacagcaaccacctccctcctctaatctcttagaagtaaaagtaaacactccttaacctagatgagacttgggttcactccaaggtcaatctacattagtagcgtttcgatttcgtggtccgatgaggatcaaagaaaaagtgaaacatctccgagtgcataaatcgcttgatatcttattgtctctctcactctctctgatttttgcaggtagattatgttttgaatgtc

SEQ ID NO: 31565 - DNA, 2824 bp, Cannabis sativa
ttatgcagagaaattttaacgcttagaataagctactaaacctacctctaagtcgtgcgagcatactttcgcttgacaaagtaaattcagaccctaacatgtcaaggccataagaagatagccaggacgatcatatgtccgtcatatatggctttaagccaaaataatagtagtgtttgaaaacaaagggcctataggccaaagcaagaacatgaaagccttgaggccgaataagatatcagttcacatgcatgaggccaaggccctgggaaaaaccatatagctagaaagaactggatagagctcctataggggccatgtaccgggttacggctaaggaaaaatttcttacaggttgtaagccatgttgagtcttaagttgaacatttgactataatagactcgccactaagtttcatatagagtttccaagggaaccacgtatgagactaaggttgtatatgcctacagagctaggtttttccaaagtcaaaagaggacaaaaaactggataccctcttggaaccaaggcccatgtcggccaaggttctcaagccttgaaagggtcggctagggtcccataactcagccaagaactggacagggtcaccaaacccaagcatgaactagctagctttatagggtaaaatccaaaagctggccaactcccatgattaagccttatggccagtcaggtctcaagtaggacctcctaggccagccaaggtaagttttgaatcccaatgtgtgtttttctttcaaaactcgaacatgtgcctcgcattctctatgattcaaagagtcaagaatcatagtgaaggccagaatcaaatcttttccatcaaaacgtcacacattatacattctaaaactgtcatgaggatcaatataccaaagagattacaaactaacatgagaattaaatagttttcaaaagcttaaaaaaagcttgaaacttgttaatggcaggtataaagaagagatacccaagaagagaagatgagacgtatatagagagagaatatcaaagatctaaaagcatgccatacaaaaagccaacacttggctcgataaggctgctcaacagagattactacagacaagacgagagtaagaaattccctatcttacttgatatttgaacaaagacttgggggaaaatattatcccgaattctatccacctgacggggcatttccacgtaaggtaaaaataaagtacaagtggagtacaactcttctagtagcagaatagggtctctattcaagatatagcaaaaccgttaagcagtaaccgaaaagagtaaagcgagctctcaaagtgtataggccagctaggatgagcctataggtcggccaagatctgtgcacaagctggccagccaaaaagtgacttctagaccaagggagcttccgtttgaccaagggaacccggcctcgacaagaaaatagtgtacaaaactcttcttaacttgcaaaaggttggcctccacatcaaaaggctagcctactcttggtaaaactatagtgacctgcaggatcctggcagacacatgacttgtcaggtcctggcaggagcatggccggccagacctcaacctggaagccttggccgaccagatctcaccctataggccttggccagccagacctcccctgtaggtctatgggcagccaggattaaccttgcaggactctatgtatagcctaaaacatggacaacaagccacctatgagttgggcccttaacaacccaacagaccaatggaaaatatctactttcaagtggcaatttagtcttttgtgttttaagcttcctatatacagaccttaactctaacttagaaaacctaagtcagtaagcctagttcgagcctccaaaccactctaagcctagaaccctaatctcttctctctctctctcttgtacacgcccaaagggcttttctcacttcatctacgcctctaaggctattcctctctctcatcagagatctgccaacttgatccatgttttgtatcattatagagagttatatcagatcccacctattaatatttttccattctatttgtgtaacacgtggtaagcatcagatccatacgaccccgttgtcaattgattacttttttgaggtcaataatatatttttcatgtccggacattttttttttacatgaaaaatactttttttaagttcttgtatagcatgtcaaacaaaaatgagacaaaaaagacttatcatgtctaactgtaatggacattattaaagttttttgtggtaaatatcattttggaccctgtgttttgcaaaagttaccaattggaccctccattttattaaatgacaaaatggaccatgtattttgtaaaatggtaaaaataggagcattgtgtttatgcttcaaggcttgaaactattctcgacaacttcaggtttgcagccaaacaaatccaaatctgcaattttttgtaacatggatgagcatgaggtatgccgagtgctggatgtatcaggtttttcaagacaattcactccttttagatatcttggtatccctatttgtgctaagaaaatatcaaagcaggagtgttcggtcttgataaaaaaaaatgacaactagaattcgatcttggagcactaggaatatttcctttgctggtagagcatttttcataaactctgttctttcaacaatttatacatacaggtgtcagatactcaagttaccaaaacaggttgtgcatgagattgaagctatacgtagagcctttctttggaaaggacaacactgttggaaattattttactaggatcttaaat

SEQ ID NO: 31566 - DNA, 2068 bp, Cannabis sativa
  modified_base (391)..(392): a, c, t, g, unknown or other
agtatgtctcggacccgtcccatattctgagttatgaagcattagaacttcagccagatatgtcttacgaggaacaaccagtgcaagtactagacagaagagaaaaagttttgagaaataagagaattgtactgattaaagtattatagaggaacagtaaagtagaagaggcatcttgagttttcgagacgtatatgcagcagaaaatatccagagttgttcaggtaaatttctagacaaaatttttataaggaggggataattgtaatactctaagattaatgaatcagattagcaaaccctaacaagttaaatgtgtattaatgtggaattataaaattatatagtttaatatatatgaattatattgataaatgacatgttaagaccnngttggtgagctaggggcattttcgtaattttgacctaagaaggataaaactaaaattttaatgatatagcgtgcttatggactatattattatatattatatttgttctatctttctgcgggtgttttctgacaagttggcgcagtgtagtcactaccgtgtattttgggtcgaattgggttcggggcctaaaatatattttcaagattttattttggcattttataaataattgaataatctaaaatttatttaagtttggtgtgtgatgaaatgacaattttgcccttgttgtatgcatatgtggtttattggccctaggggcattttggtcatttgatcatttgactttattttcaacaaaatagatttttaggaaaataaaaaacacatttctggttttatttcccataaccgtaccctctttctctctctctctttttctccatattcatactttcctaatcttattcaaattgaatgttgatgattgttgcttggtgattgaagattgtggtgctagaatttgtgaagaacttgaggtagtttttttcacctctttgctttgagttttgttgctgaatattatgatgattttaggtattttagtatttttggtagttgaatgcttgtttgtaagaattgaggtgatatgggtggtttttatgttgattaagcttgaaagttttgtgatttgcatctggaatttcttgtgattcttaggttgaaaattggggttttaaaatactgaaattgagcttgattcttggagtaatattctaaaattttgagtttgtaattgagattttggtgtgagttttcaagcttgagaagtggaatttgatgcatgatgagttatgtaattgcatatttggatgttgttcaaagctttttttgtgctttaatttttggatattgatggctttaacctgtgaataatgagtttgagtttgagcatatttttttttttgagttttggtatgtttgggcttgaattttggttgctgaaaagtggtattttctgggtttggaacccaagtgtcgcagcccgctctatgagcgccgcggcctgcccacttgaaattcttggtttttcaacctaggtgtcgcggcatgcttggtgagtgtcgcggcccgcctaggggtttctgggcagttttgaatattagatttgattattcataaccttttgatttagaatccgtttaaggtgtttaatatatcattagaaagctcgttccgagctctatatgttaatctgtatttggatgccaattgtatgattatgtgaaagtactggatttagggattaaccctatttgtgaatcccgagaactgtgactaggattactgtgacttgttcaggagcaccctgggatttggaatctccacacacttgggacatcaggtaagacagttgttagcatgtagagttaagcgcactggtgctcatgctcaatattataattgtgattaattgagaatcgggattaggattattaccctaaagtgagcggttatatggcctagggttattaccctagtgattaaatgattttaaacgatatgacatgctatatatgttgaagtaaagaattatgcgttcaaggcataatttggttagacttgataattagaaccgagataaactgttctaaggctttaatgtaattaga

SEQ ID NO: 31567 - DNA, 2376 bp, Cannabis sativa
tttaatgtatatattattggttaagtttgcagtacaacctcttttagtaaactctctatctattttggctggaaaataaaatttcatatatttttttttttttgaaagaaagtatgttattaaatcaaatcaaatcagctgttataggagcactaataaatttagaacacgcatctgtccacaaatgaatccctatagaactagtaacagacttagctagtgcgtggactacaccattagcatcacgcgaaatggcataacaagaaccaccaacaacaactaaaagagaaataatctcctcaacaattggtttaaacataagaatattatccagacaattaatccacgaactcacaacagaatagtccgtctcctaagaaaaaattagcagaaatcaaaaaaaaaaatgaatcaaaagcttaaaaaccaaggtacacgaatttttatccaaatttggccaaaaacaaatacctacttcttgctattcgcttaagtgatactccaagaacccaacttgggtcattctctcaaacctatttcaatccaatctcacagttttttcaagtgtaaatgagaacctaaatgccttcacatacacaagctacatgaaaatgaaaaatatataaaataacagtctaactaccaaagctcaggagtgtgagatcttaattaaaaaaactaattgtccaagacagttggaacaaactctaacaactataacaaaactggttgttaactaactttgtttctctgtttggattattgactacaaaatatttaattagttaaaaataatatcatgtttttttttgtttacttattttgaataatcatgaatccttttagaacttcaaaaggaaagaatgtctttataatatatagtttaattttctactatgaaatctcatatttattaaactaaatttatatttaagacaaaaataacatgaataatttaaaaatatatatataaaaataacaaaaaaaaaaaaaataggtctgtacatagtttctaatattttaacagttttttttttagattttatttacataaaatacgattttcggtgtatttttatgttgtactcttgttattttgttatattattttttatgttgttttcttgttatttttatgtgattttcttgtaaaatatttaaaaataaactttaaatgtacaaatataataattttacaaaaattagtattttatacaattattcaaaaataaaatataaatttttttataattaatgcaacattttttcaaaaaatttgggaaccacaaactaaaaaatatgaaataaagtcttttaaaaaaatatgaaataaagtgtgtttagtaacaattattatttaaagagattttcatttttttatttttatttttaaagttttgaacataaaaataaattactcttaaattttatttaatttttatgtttgaaaaatttaaaaataaaatgttttccaaacgtacccataaatatgtctatcagtaagattatctattagattagatgtccaatctaacaactaatctaattcaattagatttttagattttttgtatatgtttcgatccaattatgattggatatctgattctatttgattggttgtgattgaatcggtcggttgtaattgtatttaatgacttttttcacacccctagctatagtagcttaaattagtgttgtaagttggcgcgtatcgtgctggcctgacccgtatttatccatgtttttcaaaaaataggtcgtgttgtgccgagccattgaaaaatatgagtcgtgtgtcgtgccaatatttttaaagggtaggcttgatattttcgtgtcgtgttttgctcgtactgaccgtatttcttaaacaggccacctcattttcatatccagatttaaattcgtgctttactttttcttatatattttttttcaattactaaattatatatttcaaagctttagttatatttatataacttttgaataatattttactagataattatataaaaaattagcaacatcattgaaatttaaatatttacttataaatacttaaatttttatatcacactctataaataaattaatatataattttaatttttcatgttttaatagtattaattataaaattataatattcagtattatatttaaattttatcattgttttaacttatttataattgataaattcatatcttattattattaataataaataagaaattataaaatcttctaatatgacgtgttgtacttgagaaatgtaagtaaatggccttatttctaactctatagatagttaatgtcccttttttaaaataataaagcaaatgtcattttttactttttaatacctaa

SEQ ID NO: 31568 - DNA, 1428 bp, Cannabis sativa
ggttggcgagggtttttttcgtgagtttgggctgttatggctgttgtgtcctttgtgttcaataagttgtgaaatgaggaagacgaaattagagttctgatacatgaccctatggcgtcggttatttgctgcacctatggcgtcggttaataccaaataaccgatgccataggattactctaaaaccactcattttaccctaatccccaactgatggcatagatacatatataaattctatatctacagtttttatcaaaaaattgcctctaaatgtcaatacgggtattttcacactctttaacttctctttttataaaatgggttgaaaaagtaaaagctacaagtccatagttaaaagaatccgtgagtaaagatgagagtgtacacaatttaaattacactattacaattaagctccaaacttttttaaacaactttcagcagtatctaatttattaaaatgaagctaattgattgaaatttatattatattaagaaaagtttgtaaaattttataataattcatgtaagttacttcgtttttgattactttaataaaggtttttttttttcagataaaaaaatctgttccacacaaatctttttttttttttctaattaaattttcaaatatcttttaacattatagcatgtggacctacaacattattgaagaaaatatcataaaattggcattgatgttaatttgtatgtgtccacacgtattatgtcatgcttctgtttttctttttcttttttactttttattgttgcttccaattaataatgcatttagcctctttcacgtgtgtaggtcaactaccatgcagaaaaaagtacgtgtttcatcatatcaaatcaaattcagagaaataattttacctttaaatattgtaaataaggaaaaagttataatacactgtagggattttttctataacaggtattttaattttttttttctataataagaaaaacccctttcggtaaaatttaatttaaaatttgtaactgtttcaacccacaaaaaactttctattttttttttccttttttattgttcatttagcctctcacatcacatgtgtgggtcaactaacatgcagaaaagtacgtatttcatcatatcaaattcaagagaaatattaaaaagcatgctagtgttaatattgttatttctatattataataaattttagaaaatatggctaattaatcataagttactattccaacttcaaaagaatagtattagtattacctttaaatattataagaaactcctttaaaatgaatatattaatgcaccctcatcttttttagcgtccgaaataattatttagtcaaattttttcttatggtcatgtacattatagttatttaagacatcttggaaaattttaagaaatttaaaaaagtttaaca

SEQ ID NO: 31569 - DNA, 2364 bp, Cannabis sativa
  modified_base (1089)..(1089): a, c, t, g, unknown or other
  modified_base (1164)..(1166): a, c, t, g, unknown or other
acattaaaagctaaagggacatcaattatcaggaattgtgccaccatagttatgctcctcggagcttgtccaacagtgaggggcaggcgaatttgtcccagtggtgccacactttggccagaaaacccgtatacaagctgggtgcaggggatctgatctttaacttgaagtcccatcttccataagttgtttcaaacagaatgtttgaggaagctccattgtctatcatagtccgtgccactgtcttatttgcgatttgtacttccacgaccagggggtcatttgttggaagtggacgtggctagcatctgcttcagtgaatgttattgtaggctcccctacccatggtatttttggttttctctcttccacaaccaagactgcttcattctgttcatactccaaggctcaggcatacttttcttgagctttgcccaagtctccagcaagatgtggacccccaataatgacctataaattcccgtccactaatggaggcatcaattggtctagattattgtctacttgggcggcccttttgtaatgccctaacctatagggacgccacatgtgtgattttataaactagtttaatactaatagattaattaattattaaaaatcgtgataatattaaaaacttgactaaatcaaaacactaaaaacggacattataatagcataaaaagcatgttccgagaattcctgttataaaacgttttacttaagaaatatatacaaaaactatttaaacataaaatcaaaatacacagcagatatagccagcccaaaacaactcctgacaactcagcacgcaggccggtgaagtcaatatgtacattgttggagaagactgtcacctcatggttgatctaggttttattttcctttacctgtaccacatagcacccgtgagtcacaaggactcaacaagaaaagtaagaataataataatcatataattttttattcgaatattttcatttacacacaataagaatcaacccatcacacattgttcataagatgaaatccaaattacaactggcatctgccacgaatatacatcagtatacagatatttggtantacaaaaccattataccaataataaaattcagtttcatttaatcatataaaatatatatatgttacctcataaannnaccatcttcataacatcacgttgcctaatcatgcaagtcggtactttaatctgataatcttgcattgtattgcctaatcaggcaagcccgtgccatagcctgacacccatatatcacataactacatcacctaaataggcgagcctgtgcaaaaaacctctatcatatgattgcatcacctaatcaggtgagcccgtgccacaacttggcgccaatatatcgcattgcctaatcagatgagctcatacctacgcccggtacttatcatatgtcactaacgcttgtatctacacgtcgccaagaggaaaccctacaacagtttcattctatgccataacttggtaattttcatatcactgatgccatatctacatgtcgccaggagtaatcgcctaattagatgaactcgtacctacgcctggtacttatcatatgccactgacgcttgtatctacacattgctaggaggaaaccctacaacagtttatttctatgccataacctgaaaattttcatatcactgatgctgtatctacacgtcgccaggaggaaaccctaaaatggtttaattctatgccataacttgaaaattttcacatcactgatgctgtatctacacgtcgccaagaggaaaccctacagcagtttcattctatgccataacctgacaattttcatattactgacgtcgtatctacacgtcgccaggagtatcgcatcacctaatcaggtgagtctgtacctacgctcggtactcatgtgtcactgacacccgtacctacgcccgatacgtcgccaagaaaattgcatcacctaaccagttgagcccatatttagatccatagtatcatcacattatcattgcttaaccaatctatcttttcattatataacaatatctattacattaccatacaacgtactatgtagtacaatatacttttcttacttttaatctaggttcatacatattccaaacccaagtggagaactatcccctataatcttgaccctatgtcacaacaacggtaaccaataagtgtttatcccaaaatactgcttaatattcacataagaaaatctagagttttctaccaaatcccgcagtataaatacactaaaataaaatttaaattttggctctaaaacatacactatattgtagagctcgtcacaagcttcaaaacagtatatagaa

SEQ ID NO: 31570 - DNA, 1781 bp, Cannabis sativa
taactaacctatgttaaaactaccaaaaaggtttcagttttcattttcaatttaatttcttattagcggtttaatagtatttaatccaaattaacctcattacataaacccaaaatttgatttttcgcttccaaattatgacatatatattattgtatttttgaaattttcccgtcgttaaaaataattcataaactattcacaaaattttaaaataatcattctgtcaagtttattgcaagtgacaaacaaaatggacaaaattgtttaagttattgtcatatcagtactatgcgtataattaattttattaaaaataatttaaaaggtttaatttcgttttacttaatttttttaattattaattgatttttttctcaataaatcatgatattttattaatgacaattaagtaaaataataacatacaatccaatcagagatctctcctgttagaaacacgatcaggattagaattagaaaaacgagtcaaataatcaaccgcttaatttccagatcgtttgacaaaaaaactaaaataaaatcaaatgaaaaatattgtagcagcacaattaaccttaagaacacctatattgttcatccaccaatcagaagatacaacagtagaaactgttgcagtaatttcattcaacctcgtagcttaatcactcaattattggttaaggtatattactgcactgctaacaaccttctcagtcgtagaaaacttgttattcccagccactaacaatgatttgatggcgagtcattgaagaacaaagaagaaccaacaacgaaattaaataaaataaaatcatgtcacacagacaagactaaaacactcaaaattgtatcacatatacaaaattaatcacaataacaaaatcaaaattgtagtagcaaaatacaatcccgaccaagccgtatctaagccttaaaaaagctagctggtcaaaaaaagaaaaaaagacaacatttaaaagctataaattgatataaaatttaaaagggatcattaattgattttttaatttattgattttttagaaagtacttatttttattttaagttacacacatagcattgatataataatattataaatatccacattattattttgtttatcacgtgtgacaaacttgacaaaagaattaatttataacaatgtgaatagtttagagactatatataacacacatgggcataataataaataggtgatgagggcgaaaattctaaatatcattcatataaacatggtttttgtcggggataattgatttacacatacccaatcccaaaccgacaaactcttatttaaaagaaaaaatggttaacatataaataaaggtaatttacagctaaactttctcgacttgtaagtttggtacgatctaatcttcatattggaaaaattatagctagctaaagtccccaacttctacaatcgttttggtcagcactcattccattagtttttgactgttaagtgccaaataaacttgtacacacaagtgtacgcatggggaaattttattgggcacctgatattgataattaaaaaaaataaaaaaataatttaaaaatatgaaatataaataaaaattaaaaataaattaaaatgttaaaaagaaaataaataatttttttctattttttttcatctttcttccttcctgttctcagtagggctgtacaaaaaaatttgtaaaccgcctaaaccgaataacccgcccaaaccgaaccgaaaaaatcgataaaaattacaaaccgaaat

SEQ ID NO: 31571 - DNA, 2379 bp, Cannabis sativa
aatgacattttaacactttaatatgtaaccaaacaacgaatggaatgaagattgttttctttcctttctattttatttcattacttccaatcaaatgctacctaacaattaagaatgttattctcggtcgactcattacggataatgttcttgtctcttttgaaatcctccactacttgagacataaacaacaaggaaaataaggttgtatggctcttaagttggatatgatcaaggcttatgatagaatggagtggtctttcttgcatgcaatcttacttcgaatgggtttctctgttgactggattatgatgataatggaatgtctgagaacaatctcttataacattgtccatggaggagaagttcttgggccgattgtcccaactatagggattcgtcagggagatcctatttctccatatctctttattatctgtgcggaaggtctctcggctcttattcggctttatgaagagaagaaatggatccatggttgtcgtgtggctcgtagagccccttatgtcacacatatactttttgcggatgatagcttcctttattgctcgactactatggaagaggcttaacgtgttctggaattgcttaataagtttgaggaggcttcaggccagaaggtaaatctaaataagtcttccgtattttttagctcaaacacgattgataatgttcgaattggtattttgtcaacccttcatatgtttgctgctgatgagaatagcttttatttgggattgccgagtgtggttggtagaaacaagaatgtggcatttggtttcttaaaggagaaggttaggaaggcgcattcaaaattgggatagtaattttttattgagagctggtaaggaggttttattaaagtctgtgatctaatctttaccttcttacaccatgagtgtctttttgataccccttgaaatttgtaaggacattgatcacctaatgggaagattctggtggcattctaaggcctctcaaggtggtggaatccattggaaaagatggggtaagttgtgtctgcataagcataaaggtggtttgggttttcataacttgagggattttaacttatctatgttgggcaagcaaggttggcgtctattaaccaatccgacttcgcttgtggctcgtgtttttcaagctagatattatccccaaggttattttcttgatactgagttgggagctaacccgagttatgcttagaggagcataattgaagctcaggatgtggttaaattgggtgctagatggtgtgtgggttctggttcttcgatccctgttcttaaccagccgtggctcccttccatggacaatccctatgtggtttcttctcatgaggctcttaaggaatgtaatgtctccaatcttcttcagaatgatcgaatgtgttgggatgaggagcttttagaggatttatttgatcccagagatgtggaactcatttgtaaaataccgctgcttgtgttgccgaaattggatacatggtattggacttttgaagcttttggtggttattcagtaaagagtgcctatcgtgctttacaaatgcgtaatggaagatagaatatgtaggataattttggtttttggagaaaattttggtatttgaaacttcctccaaaagttaagaatttgctttggagggctctcactaactgtcttccaactctagtctctcttcagactaagcgggttcatgtttacagtgtttgttctttgtgtaatggagaacccgaaaccacctttcatatcatggctgattgctcttttactaaagcatgtttggagcgtggtttgggtctgcatattaatgatgggaacgaggattttggtgtctagtttgaggatttctgtaataatcatctggccgagaaaatagataagttggcaatgattctttggggtgtttggggggctcgcaatgatttactttggattaataaggctacttctgtggaaaaagttgtttcatatgcaattacgtaccttgaactttggaagtttgctcagattacaaatggaggggtttcatcttcttctagtcagcctacggctggtgttgagcattggattaaaccgtctttgggagagttgaaggttaattatgatgctgctttttttttttcaagagagaagagtcatggattggggtggattgctagagatcatgctggcttgtgctttgctgctgctgccgtcaagcttcggggagatgttgaccctgttgttgctgaggctttgtcaatgaaggaggcattgagttgggttaaatcaaactgggaagaaggaggtgatgttgaagagtttcgtcctacagcagtggtaatggagtcggactgtctcttgttggttaat

SEQ ID NO: 31572 - DNA, 1291 bp, Cannabis sativa
gaagaggtatacattatgacatattgtagtagtttgattttttttgagtatagctattttacaatcaatttatagcttgtagtttaaaggtttcgagttcgaacctatgaccttttttttttcatccttctctcatcactaaactagccttagtggcttaatgtttggctctttgcctctttaattaagatttctcattaaaaaaaaaaatccttttgagttttcattacatgctctttatacttgattttcctttccgtgtataatttttgttggatcttttttttttcttttctcttttgtataaactaaataattttttgtttcactttcacagtcactatttcttacacaaaaagctcaaagaaaattctgtccaatgcgtttggaagttggaagttttgactgaggtgttttactattttgattggcctttctaaaaaaaataacatgtacactcagatgcgtatatatgacgtggcatattctgattggatgtttctacttgcacacagtaaaaacaaattagcaaagaaacaaaaatcccttggtggtggcgggaagtatagagtggcaaaaaagaggtgactgaaaactgaaacgagtggaagctatcactgtgaaatgggatcggaggcggctctgcccaagtgggcttcggagccttgcattatgggcatcgatgaagcgggacgaggcccagttctcggtcttcctcttcttcttcttccttcgtttctatcaagatctttcctttgatttctgatttttgtcttttggaatcttttttgctatattacaggacccatggtgtacggatgcttgtactgtgctcgttcctaccagaagacgctctccactttggagtttgcaggtttggattccaacttctaagtttatcttaaaattaatatgagggttatgttttgtggtgcttacttttggaatttgatgggtctttaatgcctgttttcctagattatgctaatgaacttgaacaataaattttatattttaacatttctgaaatactagtctgagatgaaagttgttagctttctcagtatatagctatttggagtatgtttcaaagtaatgaaagagaaacatgtgtgaatttgagattattaatgctttctcaaactggttcctttgcaaaatagaccccttcgaatgtgacttcctacatttttaaacaatttacaaaatagttgctattgtcaaccaaactcaacgatacaaaaagattatattttgcaacaaattttgaaaatattgttggggggggggg

SEQ ID NO: 31573 - DNA, 3685 bp, Cannabis sativa
gctgggtcccaaatccaaacaccgacatgggttcggtcgaagccctaggtcctgatctggatctcgatctcgggtccttgtctggttccatttcgggtgccgggtcacgagctgggtcctaggttaatgtcctggtctggggtcgggtcttgggtcccaatcctagtttcgttgcctaggtccttgtcctgattctgggtctaggtcccggtttttgtctaggtttgggtcccaatgaggttcgggtttgggtcctagtcggggtttgggtttgggtctcgatttgggtttttatttgggttttggttcgggtctgggtcttggtcctaatcttagtcatagtcctagttcggttccagttccaattgcaattccgagttcgagttttggttcgatgttttgggttcgagtccaagtctgagtttgggtttgggtccggatctcggtctaggttcagatcaggatttgggtgtgggttagggtcctgggtctgggtctaggttcaggtctgattcctaggtttcgatctcaatctgagttctagtttagtttcgagtctaagtcctgggtttcgatcccgatctgggttcgagttcgggtccgggcgcaggcctaggtttgggtctaattctggatatgggtctgagttcgggtctcgggtttgggtctgattttgggttcgagtctgggttaaggtttagtcctggtatgggttcgtgtccaagttcctgccttgtttgggtctagggcaggtttcggggccgggtctaggtctgactttggattcccaggtctaggacaagtcctggattaggttcgagtcctagattttaatttgggtttgggttccagggcctggtccctggtctaggtcctccatcaaagtcttgttcctaggtcctagtttgggtcgaggttcaggtttaggtcctaagtcttggtatgagtccaggtcccgctctaggtttgggtccaggtctcagtcccagtcttggtccgagttcaggtttgggtccttgttagggtttggatcttggtctagctcgcgggtcttaggtccgagcgagggtttaggatcaggtcccagttcgggtctcgatcaaggttcaggtcccaggtctcagttcgggtccgagttttggttatggtttgggttcggttctggtctcaagtccaggtcctagtcacagttccagttctgattctagatccaggttttgttctgggtgtatgggtccaggttggggtcagggtccgagtcttagtccgagtctgggtatgggttttttggatccttgtctgggtctaagtttgagtctgagtccaggttcgggtcctgggttttggtcccaagtttgcatctgggtctatgtttgggtttgggtcaactcccgtgtttcgatcctagtctaagtctgggtcggtatataggtccaggtctgggttcatgtccatgtccacgtcagaatcccagtttaggtcaggtgcttggtctaggtttaagatcgagtcccgagtttgggttcaagttcaggttcgagtctcagtcctagtttgggtccaggactgggtcgaggaacaggtttgagccctagttctgaggcttggttctgctctagttctgggtctctatgtaggtccaggtcctagtcacgatcccggtcctattccaaggtcctggtcacgttctggttcatgtttcagtttcgagtcccaaggtctgacaccgactatgtgtcttctccaagcccaagttcccagatccagggacaagatctggatcccaatcgcaggtcccagtcttgtttcatttcatgtcacaattcccggtatgggtctcgatctagcttcgagatcgagacttgggtgcagttctaggtctcaatcccaattctcggtcccgagtcctgttccatgtttgggtctgagtttaggtctgggttcgggtcctgagtctcagtttgggattggattcaggtttgggtttccggttaaagttttaggattaggtccaagtcctggtccttgtcctgggtcttgatctgcttctggtttcggttctagtatcaagtcacggggtacaggttcgtgttgattttggggccgagtttgggttcaggtccttattttggtctgggtcgaggttcaggtccgcgtttcggtctcagttagagtttgaggttgggtccaaatctgggttcatgtccgatgctaggtcctggtcgcgttccttggtcatgatcgggttctagttaaagttttaattttggttcccgagtgtgggtgtctgtgtccaggtcatggtttgagttcgagtttgggttcgggttctcgtctaagtcctagatctagacaccgactacgcgtcgggtccaagcatcgagtcccggatcctaggtcccgaggtgggtccttggtcgaggtttgggtctggggtagggtcccggatcctgattcaagtttcgatgcccaagttctggtcccagtttgggggcccaattcttgtgtccgggtcccccatctatgttcaggtccaaggtcccggtcccggtctgggtccaagtttgtgtttctattcgggttcggttctagagtcccggtcttagcccaggtcccaatttgggttcgggtatgacttcaggtcccagtcctagtatgggtttgagttttgggtcccaagtccgagtctggttcataggtcctggttccgggcctagtttttgggtatgggtttgggtttgggttcgggtcccagtttgggtccaagtccatgtcttggtttaggtcccaagtcacaggtcccggtctgggtccaagtctcggtatgggttatggtttgagtttgggtttaggtttgtgtccgggtatgagtctgggtacagatccgggtccgggtccgggtcctggattcaaacactgactacaggtcaggtcgaagccttaggtctatattcggatatcagtctcggatctcggccttgttctagtttgggtcccgggtcttgggccgcgtcctaagttttggtttgggtctgggtttgaggttgtgtctcagaagtcaggtcctgggttttggatcctgggtcaggtcccgtgtctcgagtttggggtcgagttttgggttcggtcccaaatctggggctgagttttgtgtcgatgtcccccatctgggtcaggatccttggtccaggtctaggtccaagtttgggtttagggcctagttcccccatctaggtctggattctaggtccaagtctaggtccaagttcagattcgggttgggatcctaagtttgggtctgagtctaggtcccagtacgtgtttaggtttgagtcagggtctgggtcctgttctgagtccaagtccctattttggtccagggcgggatcccaatctgggtccgagacaacgtctaggtcccgaacaaggtttgggtttgggtttgggtgcgggttcaggtcctgagtttgggtctaggttcgcgtctagatccgggtctgggtcttggtcctgggttccgatctcagtatgggtatgggcctgggcccgtgtccaggttagggtttagggtttagggtattgggtagagtgtttagggatttagggtttagggtttagggcttagggtttaggggtaagtgtaaagagtttaggatttagagattaaggtttagggtttagggtt

SEQ ID NO: 31574 - DNA, 2250 bp, Cannabis sativa
aatgtagctttatgataataagctccacaaagtaaaaatcttgggtccgtcactaatttatggtaaacactttatttttgtccttatgtaggcatatttttaaattcatagatatttaatctaagaatcataaatttatgagtgcatataaatagttaaaaccatacatataactatatgataagccaagtgagactattgttaaatatttaattagctaattttttttgccaaaatttatgtatatggctttcacaattgttggagtacactttgcttattaaatgtgtctttagtttagaaaaaaggtaactgaatttgttaaagtaaatcatcaataatatatcaatatatatataaaagaaagcagcacaaaggaggagttttttaggtggtggcaacttatttttttttcttccaattttttctattttatgacacattctcttattttatttgagaaatacactatacatataaacaaaaagtccgacatcatttaaaaatcgtttagatgttatccatgtaggttataagtagtaattttatcattttactttcttttatctaaaaaatattattttttatgagtgattgaataatttattacttaataatttctttatatgcatatttatataagtaattatttattttttataattaactttgtagtaataatttttaattttatatatatttatgaaataaattttagtttaaaaattttattttactaaatttttatatgtaggagttaaaaataattttttataactaaaatcaatttaccaataatcaatatatcaatataaaggaaactaaaagaagagtttaggtggtaacttatttttttttcttcctattttttctattttataatacattctctcgttttctttgaaaaaatactacacatgcaaacaaaaagtcccacatcatttaaaaatggtttagatgttatccatgtaggttataagtagtagttttattattttactttttttatctaaaaaaatattattttttatgggtgattggtgattgattaatgtctggcaacttggcaacttattaacttatttttttttcttcctattttttctattttataatacattctcttattttctttgaaaaaatactacacatacaaacaaaaaatctcatatcatttaaaagtggtttagatgttatccatgtaggttataagtagtagttttattatcactcaaataattaacttgttgatgattaacaactactggtagtagttgttcggatgatgatgagtggaaactgttctgctcatcaataggttcttctttcatcgatttattagtctcatgatcagtttcaattgagatcgcatctaggtttatatcattatcttgaataattatcttatcagccttattggattggtggaagtcatcgtctaattcatcccaattaacttcatcccaattaatatttgggtcaatgaagatgtcattaggtatccaatcatccattcttaatgtatactatatattaattaatttgattattatagaatattactaatatatatactcttatatatacgtatgtagttatataaatactcaattatatgttcgtctttacatgtatcatatatttataaatgtatagataaataaatcctatttctattcatattacaattgttcttttagatatttctttaattctaattctattcatattacaattactctttattagttaatatatctttttaaccctaattctattcttatattacaattactttatattaactaaccaaaacttattatatacgtgtacgactaaaaccttgtctttgagtatttagatgatctgacggctcaggtttcacagctaagaaaagcgaatcaccagatcatgacaagtgtcaacatcacaacgttgagtctgagaattctatcctcagagcccaaatgagtcgttggataagattattaacttcctaattaaacgcaagtaataatgctgtcattttgggtagaggaataattggatccaacggtggagatcatttcatggctgctgctggtgggagtttgtttcggtacggtcgtgcctatggaaagctttctgaaccaacctattatggcttctgcagatgtttttgatcagtactaaacttaataatttaattaatccatgatgggtttaattttctgggatttccatggttaagaacttaaggataaaaaaaaa

SEQ ID NO: 31575 - DNA, 4278 bp, Cannabis sativa
  modified_base (2386)..(2386): a, c, t, g, unknown or other
tgagcctcatatatattatgcttctcactattttttatcgtttttttttcttcaaatctaaaaaataacacaataattaaaacaaatcaaatatctccaactaaaataaatttatcattaaaactataaatattcaatttgcattaatcatatgtgcataattaaagacatgaaatgtataaatttgagccttaatcagccggtcactttgtcttaaaagaaagcctattggccgtacagacatataaaaaagatagtaaaaagaaggcaattaaacagcgggagtcccaggctctttatacgggtcaactagatctaaaggagctggagaatcagctacgtctgaagaggccggaggatcatcagtctgggcagatgcagcctcaacattatgctcggttgaagaggtggaagtggtcgccttaggattctcattggccgcctaagccgtgcagtagtcaagaaacatgtctttggaagccccaaggtattcaaaatttaccttgggattagccttccaaaagtcataaaaaatctcgagaccagctgtctctaaggcatccactttcttctcgagcttctccacctcaaatttctggctcttaatctcagcgtcaagttcctcctccctagtcttcttgcccttggcctcatcgtccaacctgcaaaggagagtttgaagaccctctctctcgtctttaagactggcaatttcctgagacaaaaaagcattgtctgcctcgagttgcttggttgacggcatctcctgtagttccctggtcagctcggcaactttggtttcagtaccaagaagttccttattgacctctccaagttccgtccacacagtctcaagctgggcccgtgcatcttcggtgtcctttttggtcaagtccacttcccttcgcattgtgttggaagtggcaaggttcttgacaacaaccgatttagcttgggaatatgcataggccatcttcaaaccagtctgtgcgaaagaaaaaatcattaaaatctaaactagccaaagagaaataaaagaaaaagtgttagaaaggacgtactcgtgaaagctcattcaagactcctcccaaggctagctccaaagaaaaatcattatccgccccagccaactgtttgttcacctctgggagtgactgggtcacatagtggttaagcatgtgtttccctctcttggtctctgtgcacaataccaaaggtggggcaggggccctaacttgttcagatccgcctttcgaccagctcggatccattcttggcctcctcaggtccatctgaactccctcctcaggaacctttggacttggcgaccttcaaggtggaagggtccacaacaggttgctcctcagagagatcaatgacctcttcaattggtgccttctccttggacggagtctcaccgcctttagacttcttggccggaggggacaagcccgagctccccctactctcttcttcagagcctcgatcatcttttgagacatttatgcatagaaaaaacaatacagtcagaagaaggcataaaatatataaaggaaaaagaatcaagaaaaataagtgcaagttgaagtactctgcacgctggcaggagcgtctgcccgaacaagcacagattgagcgtcatcatttgaagagtcttcctgctcctccatgacggcttttccctttccctctacaggggtggatggtcaagcaggcaaaccaggctccctgatccagatagtatgttctatcggcctctgctcggtcgggagggttttcttcttcttgagcggcctctcctgctcagaatattcttgagcctccttctcctgctcagaatattcctgagcatactgcttggctccagcatcaccctttaacttagcctcacgcttaagttgaataagctccatctcttgcttatctccctcagcacggccagacctggacttcttcttcctccccttcataggctggggtataaagtctgccggataaagcttgtacttcacaaagttgtcctctgaggtcaaaaaagtgatatttcgagcagcatccggcacttggagaattttctaggagctttccctaagtcccaatgtcaagggtggatggcaatacacagggatttgttgaaactgagtataggtagcttccatgccctccacgaagtagtactcgtcaacaaaaaaccccaatcttcctaacctccgtgtccatggtacccgtcagccacttgtaatccaactgagagaaatagaagtacccagacttgctctgcttaggggtagacttcaaatcaaaaagccagttgctgtcgtgcagggacgacacaccccatccttgagtggcgtagaggacgaacagggcagataagtacttgatncccttgggtgtgaactgggtcggacagcggcagaaataatccgcaactctcttgaagtacgagtgtaaaggtagccttgccccttgcttactatgggcacccgactaggcacagtgccctttctttgggttagttgcacgatgattcggagaagggagataacacttaagtccgcctaggtacccaaccttattcaaatccctcattcggccctcagttatgttggacagaggacacacccatctggcccctaaggcacttttcctcttgtgggggactgcctcggtaaactcctcggtgacatagtcttccccctcaaccaagacgtcaccttgctcggataccgattccccggcctcattatatcctccaaagtgtggaggcccgactactccttcctcctcagctttggaagggctatcaggacggacatcgtcctgctcctctatctcttggacctcaatgtccccctcgtcatcctcctccacaatgggtagatcctgttggcacttggcaacgtggcaagctgggccatgtgagggtcagatgcattaactctccgcatcatctactttgggcaggccatcatccttctctttgacggacactggtgtgtatgccgcgcaacagtaacggcagggacaactattggaataccaaagttaccagaacttggacggcctacgggaagggtatcagcaacaccaggtcgaacaatatacgtcaagttggatggaagataacgtctccaacccttctttagttccaaaagaaagtgacaacaaccttctcctacgatctgctcggaataagagtggtgttgcactttaggttttagagtagaagaacattcgctactcacttcccaatcctcgaaactcgagttagaaagtctgtcactcgaggaggacagactggcatgaagacgaggttggtcctcgtatagaagttgaagcagatcctggtcaatacagtgttcacctccacaaaactcaccagggttcatctacaaaagacaatacacgagatgagtatttggctgggatatcgaacaaaaaacaagcaaatatgccgaccaggcctactcaacagattaaaaagacgaagaacgtgtaaagattaagtcatagcccaggagtttgaaagtttcgggttaaaggataaatttcgctaagctttgaatgagcaaggtgagaatcgaacattgcaagattaaagccaaaatgtcgcaaataacgaagctgtacgaactattacagagaaaattacaaaatttcaagcctagattttctacatatctcctacaacgagtcaagaacagtcgtattttctacaatggaaatctagaaaattgaagacacaaagttaaaggagaaaaagatcaaaaacttactcactgtttgaagcctaagctttgttcagatgaagctgtttggatacctctgctagaaatcccacgatagacttgaaagaaaacttctttttttgctttgagattgcttcgtgaagaaaatagtgaaagtaatttctgaaaagtttcagccctatttattggctaacttgtgaaaaggggtaatcaattcaaaatcctcagatgcttcgatttccccccaaaagtaaatattgggaaattaaaagcaatcaagtaccttaggagaataaccgtcaaaggcatgcaaaggaaaatgtgtcttaaggtactaattaattagagcattaattagcctaaaactgaagggacgcctggtcagactcacatcgaatcacgaacagatgcactcgacaagtgtcacccattcaaatgtaaaatcaactcggatgaagtctacacgcaacttcggaagtcccgtaaagacttggggggcaaatgttatcccactttttgcactctg

SEQ ID NO: 31576 - DNA, 1157 bp, Cannabis sativa
ttgaatttaaatttatgtcggttaatttgaaaataggtgagtggcgcctataaatatagattaataaaccctttttttaaccctaaaccattaattaacagagaaagaaagagattgtatttgtattaaacattaatatgaattctgagagtgagaacaccattattcatcaaattagtagctttactaattcagtaagagttgaccaaattatcaacctaaataaccctaacattaacgttaattataaggacattaccactgttcaattccacttcagcttcacctaccgcaccaaactcaccaccggctacggccatgtctcacaagaagaagacggccactactacacctacgatcaaaccataacagccgttgattacagcccaacattgcaagtcttgtctccacccttagctcttcaccaagttcgttgtttggagggctcttacaaggctctttcacccattttgtcaagcattggagtcgaatctcagagtgccttaaccgacgtggcagagaaggttaccgagttctgcaacaggtttattaatgtgagtccgatgattgtttgtgcagttgtggagatggagaaagaggtagagcaatgggagtgtgagtcgtgtagtaggatgggtggtaaagatgaatttttttggctggataatatggggattgtggatttgcatcttgatgcttacagagttggagaggatgatgagaaattgggagagaactgttctgtttgtttggatgaatttgaagctggaacaaagggggcacgaatgcctgactgtttacatctgtttcatgtggattgcattgccaactggcttcgaaagaatccctcttgtccagtttgtcgatctcaattgtatcccacctctcccttctaatcaattataattcatgtttatgttcttcaacgatacaattggaagtatttttcctgtattgcaaatgtaattactttcatatataattttagttcaaattaccttattagtactaaatgaaaaatttactttcaaaccattatacacaatatataatttactgtaaaaagagtatactaaagggaagctgagtttgggatttcttagtgtggtgcaatgcaatgtcttggtctgtaatatttttgttttctaattttttaa

SEQ ID NO: 31577 - DNA, 1537 bp, Cannabis sativa
ttttgtcggacacctcgcacttcgaggtcaatgttcaatcaatgacacatgacttgcggtgatattccgaccatgtctgagtgtttccacgtgaaaacatctaaattttgtttgagaaaagtgacaagcttttctcgctgttgaaaggttagtttataaccaatttttaaaactttattatgatcagaaggatcgattgctgcctcaattgtatcctctgtagcttgtgcggtattagtgtaatcgaggatcctcgaatcgagatcgggcttttctacatgcggtatctcctcaattttgaaaacttcttgtcgaggaggcgatgcttccagtaaatatatcagatttactgactttttcttttctgcgagttttaatgctgtgttatagcactctcttgaattcgattggactcctcgcacagatcccacacccacgggggtagggaatttcatcgtgagatgatcattagaggttactatcttcatctccttcaaaatggggcaacctatcactgcgttatacgccgaatattggtcaattactgcaaagtcggccattgatttggcagtgacaagagtggttcctagagtgattggtagcttaatcattcctttaagtgcaatcgtatctccagtgaacccatagatacttgagactacaggtcgtaaatccttctcttgcaaccaccatttgcttaaaagcttggaagttgagaaggttaactgaactcccattgtccactaggattcggtgaacattatctcctccaatattcgcaacgatcacgagtgcgtctgtgtgtgggtgattgatgagtccatatttatcttacaaatatgattgatttgcatattaatattcttatattaattctttaagttattgattagtgtgattttaattttttatgctattttaaagactattcatgcatttagagtctttcggagggattttaacatattttggtggaaaatagtagaagccggtgagctcgatttacaaggtgaaacttaattacaaattcggacgaccttagaggcagaattggacttggagttcaacatgaaagttttagatgtcattcttagctttccataacatctctaatcgtctaattccgagtaatatcgagagagttatggccaaaatactatcagtcgtcgcagcaagaaatttctgaaaaaaaaaaagatagcaaaaaaaaaagataaattttcaagaagagttgcaattttttatcttttgtttaaaagatgagttatattttcttttagtgggatattttctaataccattataaatagaatcctaattttaaggggatttatctatccattataaatagaatcctaattctaataggattcatatatattttcaagcactataaatatgaactcttaggctacaaatgggaggacgtctaaaaaaaagctacaaattagagagagcaaggaagagacggagagcaacttcgaagtgttcttcattctagttcttttcttctccttctactcttactaaatattat

SEQ ID NO: 31578 - DNA, 2113 bp, Cannabis sativa
gtgatgatgtggaaccaaaaattcggttatggtctggtcggtttgatggtcggtttcagtttatcggtttttatgaacacccctagtatgcgaggtatacgtgaaaacctctgacacttatcacactttttgaaaaactcatgggtgtccttattgatcattggccagtaatatccctgtctagtgatctttttacattggctctgccaacctgcatgatccccgcagaagccttcatgaatttctctgataatctcgtttgcttttgtaaggaggacacaccgaagtagaggcatcgaataacctcttctgtatagtttgccttcaattattgtgtatcaaggcactgaatacaagagtttccgcgcctcgtttttgtcagttggaagttgcccgtcaagcagatagttgatgataggggtcatccatgtaggtgaactttctatcatctccacgtcttccctttcacacatacttggctcgctaagcatctccactggaaccaagttcaattcatccaagtcgttctgcgaggccatttttgccaaagcatcagcgttagagttttgttctcttggaatttgctcaattttaaagtagtcgaatatttccaagttcttcagaaccttctctaaatacttaaccatttttcaggcccttggcctggtattccctgagaacctggtttacaatcagttgtgagtcactatggcaaatgagatttttaactttcaatgcctcgtctatctttaagccagcgatcaaggcttcatattcagcctcattgtttgatgcatcaaattgaaatctgaaggcataatgaaacttaaagccttctggtgaaattaatattacccctgcacctgagccctgctcgttggaagcaccatccacgtataacttccatgtgtccacgtctcggtgaacaggaaggatttcttctaaagttataccttttattaagaagtctgccaaggcttggcccttgatggatgttcgagggtggtatgtcatgtcaaacttccccagttcgattgaccattttatcaatcttccagaagcatctggttttgataagacttgtctcaagggctgatcggttaacacttttatggggtgtgcctagaagtaaggtcgtagtttgcgagatgcatggacaaggcacaaagcaagtttcttgagaggggatatctagactctacccctagtaaccttttacttacatagtaaatgggttgctcgtgtttaccctcttctcgcactatagctacactaatcgcatcttctgagatagccagatagaggagtaacgtttctccagttattggttgcgccaaattttctactcttgtgataaacttaaacacataggaggccttaagcataaatatcttaaatgctacataaaccatataggtactctcgtcctatatcgaaacttatgtctatttcactatagtatattcaacactcacttctcagattttgtattgaaatcataaaaaatttaattggtgatcaggcaattaaaagtaattaagtacgaataaaatagatgcatagaaaattggggaagatctaaagcatattcaaactagaataaaatatcaaacaatctccattaacaccctaataaaaagtctagctatttataatcattgtaaacatctgataacaactaaataagaacataagaaaatagtagaagaaaagaactcttctaaaaatattgataaaagtctctagagccgctttttgcctctaatttttgtctcccaaagttgtctgcttgtagtgacgtagcccttaaagcacaatttttggcagtgagctttctagtacaacgaataataatattttgttcataaatctttcaatattgcttggcattgggcgattcaagatgttttagaaagataaaagagagatctataacttttattcatgatatttttcctcaaagtgaacacatcatagtcaaaaattcacttgaatctttagacttgatttttgatcataaactaagcgtgttgagcatccaaaacttagaatttttcaccacttatatcttagaactataaattccataataattcatcgtattcatctcatt

SEQ ID NO: 31579 - DNA, 1494 bp, Cannabis sativa
aaaaaataattattcaaaaaaaaaattaaaattacttaaaaacaacataaaaataataaaataaatacacatatatattaaaaaaaaattaaaacatacgattaaaaaaatacaaatataactgtgaaatataaaataaaaaatagttataaatcaacaaaaaaataacaatatattaatcccattaaaatatagaaatacaaaaaatataattttattaataatcatgtaagagagaagaaaatataaataaattcttttttttaagcgaaaaaaagagttgaaaaaatataaaaaaaaaaaaaaagtacaagaattttattttagtaaaaattagaaaaaattaattaagattcttttataaaattgtgagtaattaaagaaaattagtatgaaatagtttgagtgttaatagtaagaaaatataaaagagaaatatatataaaataaatgtacgtacttttttttaaaaaaaaataataataaaaatatgagaaaaaaaaaagtgctaaaaaaaactcttattatacataatatttatatctataaaaaaaaaaaaaaaataatgtgataaaaaaaatagaaaagaagaacaggaaaaaaagtgaaaaaggaaaaaaaatggactcaaaagaaaaaaaaagtaaacattataaaaaattcaatacacaaaaatattaaaaaataatatagcataaatgtaaaaaatttcttaccactatttggaaaaaaattaatatttactgtaaattactcataaatttgctatatttttttcatacctttgataaaaatatatacttaattgtaatcactattcaccgacaaacattcaattaaatactaaaatgaaccaaaaaatctaacaactcattaaacacgcaaaccttttcttttaaacaaaaagaatcggatattaaacaaaaaaataaataaataaatatttgatattattacattaaaatatgaaaatatatttctatcaaaatttatcacatattagtaattattatattatgaaatgtccccatataaatttccttttttaaaaaaaatttaaaacaatgaacaaattataaaaaaaaaattattcattgaaaatataataagatttagttcagaataccttacttatcaaaccaaatataaaatacatgactttttcaaaataatactaacatcctacaaaaaaatataacaaattgtttatccatccaaaaaaacatacatagctaattcatgaacaacacaaattaaaaactcttaaaaatctagataacaaacttattttattttacatttttttttttttgaaggaattttttttttattttacatatttaaattgcaagacaaatgcaatgttctatattttcaacttaaaaaaaatctaatcaacagttttcaaaataagccatcgtattgttttgaaaatagtgataatattcaaacgaaaacaatatcagttgataaacttttgttaaaagaccttac

SEQ ID NO: 31580 - DNA, 1581 bp, Cannabis sativa
gggtcttgggtcccggtccttgtttcgttgccctggtccctatctcgattatgggtctaggtcctagttttggtctaggtttgggtcctggtctaggttcaagttttggtcctagtcgcgatttgggtttgggttcgtgtctcagtccttgtccttgtcctggtcctggtcgtagtcctagtttgcttccagttccacttgcgattctgagctcaagtttgggttcgagtttgggtcggggttcgtgttcatgtcggcgtttgagtcctggtttgagtttgggtttgggttcagttcttgttctaggtctggattgggttccaagtgtgggttaaggtcctgggtcgagaccaaggacctaaccccggacccagatccttaacccagactaggaccaagacttaggacaagaagtggaactagactgggacctgagaccgggatcctgatttagactcggggcttaaacctaacacatagtcgatgtttggatcaaggacccatacccggactaaaacctagacccagactcggacctaaacccggacccagatccagactcagacctaaacctcaacccagagccagactcggacctaaacccgtaccctgtgagccgaagctggatgcgaaactgtaagcgtaccgggacccgggaacaagaccgagggacttggacccagtctcattcgtagaactagaatgtgacgaggaccaagaccaagacccggaccgggacacgaagccgaattaaaactcagatcgggacccaggacacgaacccgaacccagacacggacttggacccaatcctggaccaggatcggagaatcagacttcgacccaagtcccagacctagattgggaaaccaaacttgaaattagaaccaaaatcgagaccctggaatgggattgggacccaagccctgaccccggtttcagtcctcgacccggacccaaacccggacacggaaacagacacggactaggacccagtatccgaatcggaacgagaccgagacccaagattgggatccgaatcttgacccacgacccagggcttggacccaacctgtagtcagtttctttatcttggaattgtacaaagacccaaacctggaacaacttctagaccaggacccaaatcgagactcgaactcgggacccaaaatcaaacaagaatcggaatgaggaccttagaattggacctgggcccaaaatcagatctagatgcagaaccgaacatgaacccggacccaaactaggatcgataccaagacccaaacccaaacccgaatcgacacttgcgccaggacctgcgaccctgaacatggaaccctggacccgtgacccaagacctggactagaacccaaacccgtaccagaacctagacctaaacccagacccacacccagagcaagacccggacccaaactcagaccgaaaaccggacctagacccagacccaaacccagaccaacacccggactcataaaagaactcagactcgaacccaagactcagatccgaaccgagatcaggactgggacccagacacagactaggaccgagccctgaac

SEQ ID NO: 31581 - DNA, 2425 bp, Cannabis sativa
ttctaactagaattaatgctaataggcattaccgcacatgaatatacatatttaataattttatatcaaaatgtatcatgcttctctaacagcttacacatttcaaataagcaaataattcaaacaatcaacaaatagtctattaatcaactaacaattagcatcttctaagccatgagtcgaacgagtcttcgtagctaatgtacatatcaagccaatcttcaggatctttaaaccttggtcgctctgataccatgttgtaacgtccaaaccctcagggacgccatatgtatgcttttacaaacttatttctgactaacctactagtttagaaaaaagtgtggtttagaataaaactttcatataaaatactactataatacagggatcccttatttataaaattcttttataacaagttacaaaacagatattacaaaagtaaggttacatttccaaacataaaaaaagggttgatcctgcttcccggaagccaagatgccatggctaatatgtacatcggtgggagacctctgactcatggccgaacacaattcttatcctccttacctgcaccacgaagtacccgtgagtcacaaggacttagcaagaaaagcttctaaatcaaaagcattgaaaacacaagtattcacaccacaacataatatacatactcgtgatccattacatattcaacatgcatatataatttaacgtctatacaaacacatatgttacacattataagaaaatgataacaacacatagtcaacaactttattaacattattatcaggtattcactcattatgtaatcccataaccaaataattgccttataagacaatcctattttaatgcttcataaagcatccttaccacttgttatccatgagctatatatgtcactattgctgcccgataaagcaactgataagtaagaaacatatatgtggttttaaggattaattactcatttcattaacgataatgactgtatctttattcattcattaacgttaatgaccgtgtctttccctcgatcataatcgagtcacaaacgataataattgttacctcgatcataatcaagtcacaaacaataataatcattccacattattacctcaatcataatcgagtcacaaacaataataatcattcctcatcattaccttgatcataaccgagtcaaaaacgataataattgttcctcatcattacctcgatcataaccgagtcataaatgataataatcatttcttaccaacacgcttagcagtgcataaagcttctgttacctcaattcaatgtcaggcgtgcgggctgacctgagtggaaacaaagcttgacaatcccgagtcctatgtcacgacaataaaattcaataaataccttaaattaaaaactctgggagtaaccctaactcctgcaaccaaacaaaccttaacttccactagctcaaaaataggttttacaactcccaaataccctaaaccaggtctcaaaaacacccatagtgaaaattagatttgaggagaaaaccctaaaatttccactgcaaaccaaccaaccggtcgaccgaatctggcaggcaggaagttctaagttttcatcctcaaaatcgagccaaaccattccaaacctatccaactactccagatcaaataatattataaatacaacatattcaaagcaccaaaacacaacaattcaatcacccattcatttcaccatgttagaaccaaaactaagttcttaaatcataattccacttctaaaccaaacaaccatgaaattcaaccaattagaacctaaacaatccttaaattaaacctaaaataagctctgaacttaagttaatcacacagccccgaaatcacaagattccccatccaaaactcaatctaaaccttgaagaatttgctaaaaactagaagaaaacttacctcaagattttagacagcaacaagtatagatttcttgcaagaactaagctgaattgagatgaaaacttgatttcccctggtgttcttctatggtcgaaaagagaagagagagaaggcttgagaggtttcctaatttttaggtttttcttcttatcttacaatttactaacttaagaaaataaaataaaaataaatatcaatcctaagtttcagctctaatcacccaaataagacaaaataatatttaacttatgaaatgactattctaccccttcaccacacattatgttaaaacataacttaaggacattatggtcattttctaactaatctcgccaaaccgacaacttaaaattctaaactagtccagaataaattctaatttcaattcaattcatcttatattgtcatgacatctttgaccactccgtcaaatttccacggtcgtcgggtccgaaaacattttatttcaaaaa

SEQ ID NO: 31582 - DNA, 1360 bp, Cannabis sativa
ttttctgcatttgaaaaaaaaaatctgagtttttttactacaaaaatggtgaatgttacctacccaaacagtaagtgttctacgtgtgaaaaaaaattggtttttgttaggtaagggaaaaactaaatctaaaaatctgagatttatttgttggtagcgaaggttttttatttgatttcggattttggatgaactttcagagttcatatttatttgttcttcatagtgctgggtttgcgtttataggtttatggtttttatgtgtaagtttgtatttttttcttggttttaggttttgattttgtgtgagtttgttagatttatatgtatgaagaatgattttgtatattagtttctgtttaatttgggatttggaatcaggttaatgaatttgattttgaattaatttgattttgattttgttgtgatggaagtttgaattttttgggtttgtgatttttacattttcattacttttaatttaattttaatcattgtatgtttttatttatcaatttaaaatacgaattttaatatatattattatttttatttgattttaaaatatttttttatttaattcttaaattcttaaatgaatttttaattaaagtattaattaatgatgtggaccaataagagcatgacagctggactcttacctgtcatttaacggtcaggtacctacggaagttccaataccttaacagaaggtatttttaccgccaaaaatttttgttaagtatttatctgcaactccgagttaaactcgggtattttcaccgcaaattactcttacttgatttcttataaatttatgcaaatcacctaatgatcagtttttccttcactgatcaattatttatttactgttgccttattctccaatattcaatttcacttgaaatatataatatatttttatcaaagcacaataatcatcatttaatttcttaataaataacttgtaaattaagtaatatgattttcaaattaatgagttcatataataacatgaaattttgacgttataagattattttaagttatatataagattgattctcatgataattatttcctcatgaatttttttaaaaaaataatcaatgtttttggaataggtttatacttgtaatcatagtttcaaaaaggaaaaatgacttgttaggtgggaagcctcattttgaataagagtttttcataaatatagaaaaatttggtagaatttacttttatatggtataaataaataatattaaaaggtataaaattaaaaaataattaaaatttaaaaaataggaaaaaaataataaataaatttaataaaatttataataataagttttgtcaaaaaagt

SEQ ID NO: 31583 - DNA, 2221 bp, Cannabis sativa
aaacatgattaatcaaaattaattactatataagtgtgactggagtggatatcattcaatccaatatttgattgaatccatccaatatggacaggaattagattagatgttaaaaattggattctaattggattggatcagttatttaattaaaaattgattcaatccaattacatttatatatgttaaaaaattatttatataataaaaatataggaaaatataatatatattttaattataattttattagatttgtgtgtgttgaatttgtaatacttgattgttttgtataattattttcatgatgttttattttatttttttatttaaaatattattcttttaattatttaaaatttttgcctatgaagtataaactaaaataaaatgtcatacttagtttttacgtattcttgttttttatatttttaagttaatattaaaatttaggtgtgtaattagatatcaaattcgtaattggattagattatataaaattttgaggtctaattagattagattggaggatgattttctaattggatcccgttgtgagtaataagtttaggtgtgatttgtgtctacacatattaatattctaaaataacacatatgggtttgaatctttcgattttagtacagtaaaaacctatatttaattggtccgaaagttgcatgatgtattaaatgtctaatattaattatggtacttaattctgtataccaatgcttaaatttccatcctagaactttccaaaaagagagacatatcgatcaattaataagcatcatattatttaattgcaagtattataagatcgatcgagatgaatatacaaaccttaagacggcgccataaagaaccaggccagtgattcgggtcaacatcttcaacagactcaatagaacccttgtaccagcccactggttccactccagtcgaatttaaagtctcgaaagccatcttgatccttgtcccagccccaaactcattcatcatcttcctcttcgttgcattaaccaccgaatcctccacaacacaaaaaaactctgttgtgctactactcgggtaatacctaacttcaaaacctctcccaatggcagcaagtcttgcagcttctagaacactttcagccctaattcttccttgccaccttgccctcctaacacgccttattccaacatagacatctccattgtcatccctcccgaacacgatcgtgtctccagaaaccacttgcttggctgtaacgaatttactccatccagttgtcaacaagtgccgcagaggattccccctataaacatgcctgaatttccaaatattgcctctgtaatccctcgccaaaatatcctgagacggaagattttcaataccaggtttagtaattttgtaatttaatggtgggaatattgtctccgctagttttttcggtacagagaaacccccgccattgttcgcgtccgattgagtaaggactttggtaagaaattgggatctcccaaataaattcaaactctcgctcaaagcgtagtctttatcatcatcagtagaattattattattggtcactattgggttgagatgaatcttggtgtaaacctcttcagttcttgaatccatctttaactccacggacgtgactcggcattgaatcctccatggaattctactcgccgtggctatggcgtcatcggtgttttccattccggcgtgttcgaagtgaccttgagggaagtaagataccgtagagttgaccggaggaacatgaactagtcttccggcacaggcatgccaaagagaggaatctatgatcatgtcgttcccgattatctgaactctttcttcgttcatctttgactttgccgaaagcacataataatcaagtgttagagagtgtttatgttcttttcctttgacctagatgtctatttatactttttttttgtctacttttaaaacaaatagatatttgtatgatttaaattcaaatgtagtttactaatatttttaaagattattcagtaatttatacggtattatttaatttttattttaaaaaaaatgaaaatatctttgtactccaaattattttaagtaattgtacatgttcaaaagagtataattttatttaaattattggtaaatatcagcacagtaagtatatgtttgtatacttaatttgcggagaaaaagtttgtatgtttgtgtttagtt

SEQ ID NO: 31584 - DNA, 2093 bp, Cannabis sativa
aaatacctggctaagtagccaaatcgaccaccacgtgctactcccgtcagagttttaggaagtatctatatgagtcaaatgttgtagaagatgttggttttctcatcagtaactcttttacaccaaaacaatatctcatcacttttttgtactttttgaaaaataataataataaataataaaaaaaaagtattcatctttgagctctttttttttaacaaacaaaattcattgaaataatttgagtttaatatattcaaattaggttatcacacactttcaaaatatgaactgctaattcatatatacaataaatataaattagaaatgtcttaaaaaattagataattaattaataatatcatttaagaaagatctaaataacaaaaaaaatctcttagagaatataataggcagtctacttgcgagttacattacaactataaaatttattttctactacttttctctagtagaaaatgctctaatattattaatatgtccacataatttatgtaaataacagtaagaattcttacaaaaatgtttaaaaaaaataataataacccttttaaatcaataaactaataaatcttaaaaactaattacattaaaagaaaagtatgaaaaacttatcttattcaagaacttcaagtcctcattaaaatatatgtgaaagtcaataatcttccaataaaaaaaatcaaacaaaaacataacaataacaaaaataaaaacaaaaatattagaattacaaaatactcacaaaaatactgaacaacataccaaaaataaaactaaacaactgactatatttatatcattagatcatattatgaattgtccaagtattgatatgatatccctaccaacttttatacgagtattgctaatttaggttttttcctatattttttatcaaaaaaacttaaataaacaaataacaatctttgatgttagatttttttttttttgtcaaagtatttatttattttttaaaagaatagccttagaagaatcacctaaaaagtagaaaactaaatttggtaagaatgaataaaaaaaggagatagaaattttttgaagaaaagtaaaaaaagttaattccttctatgatgtttggtaaataaggagaaaaaattttcttatatgaaattactattttgttatatgattttaattctaataattattagtgatgataatttagtaatttacacatatttttgttcacattctttttctcttcatttttgggtgaataaatttaagagtgttcatctgatctaatttgcattattttacttatagtgcatccaattcacactaagtacggattttatattttagatctaatacaatctacatagtaactcaaattcaatccaatccaatatataaaagtgcagattagatcaactattttaaattgattattttttaataataaattatttaatatgtattaaatatattttttttttcacatagataacaataaaataaagaaaattattattgttttatgtatcctacacaacaatttaaaataaataaaataaaaaattcaaagcaagaagaaaaaaatttgtatatataaaaaaatatttaattttattttagattatttttttataagtaagaatggaatatagtatatacatttgactactatgttttgaaatatatttgtatcatatatgtattagatttttaaactactattttttacattaaaatatttattgtatatatataaatatgtgtagcttggatttaatgggttaattttacatgtcaatcaacatccaatatgcacaagtgcagattttagattttccaatccaattcaatctgccaagtgcgaatattcacactttgcgaattggattggattggatcgtgcagattaaattggattgggtattttatgaatacccctaaataaattttaatggtgcatgcctatatttttctcccataccaaacatactcatttttatagtatctttacttttctctcttaagttttctttccttccatttttcaccatacggtaaatgaaccgagaactaagaataatttacttatt

SEQ ID NO: 31585 - DNA, 3844 bp, Cannabis sativa
ttgtttttctttgcttattactagtggggttctctggagcttgtttgatgtaggaacgtagagagcttatttttgtttactgacttggaaataacttttgatgcttgaagtagattagaatttaaagaaaagaaatactgttaaaaaccaagatatacacagaaatagaactgaattttgagttcagatcgtgggtactgatgaatatacatcgccaaaacggctatttcagcatggaatgttttgagtgcaaaattttcatggcttatgcagggagtcaaggagggatctcatttacctcctccgaacctaggtgatctgtttagagaagggtctttggatccatacgcagatgatccatatgcctttgattagaggtatttaattcacccacactttctagagataattctatcaaatcataaagtttgttactttctcaataaagaagtagcaaataaacattggatatttaaaaatataattatataaaatccaacaatttcatgatgaagagccttgtttactaacttatttttagtttttacggcaatttcctaatacaggcttttcaggaggattctcttcttttcttaattgtgctactgtgaccagagcatagaggtttcttggattgctgtttttttttctcccttccctttcgtatgcacataagatttgcgataactgcttgatgtggaagacggattagaataattcaaacataatttttttttactagtaaatgaactaaacgtggattgagaatttttttggtctcaatatgagatttttgtctattgtgctctgtagtcacttcagcactttctttttttacacaccaaaatgttagtacgtaggtatgattattcttattcttttaacaactaaaccaaaagtcaatcggatggtggaaagcactcctcactcgaacatataaaacaattaaattcaagagcaaagttattctaatatcggtaaacatcaatgtgacgtttggttgggagaaatgaaaacataagaataagaatgagaatggaaatagaaataggaatgaaatggaataaaatttaaaatacataaaaaaaattgataaaaaaattattaaatattttctcatgttacattggtcattctaccaaaatggtgaaactggcattctattggatagtggaaagcactcctcactcgaacatataaaacaaattctattggaatattttctcatgttggaatgatctttcttctcatttcaaaatagaatagtcattccaccaaaatagtggaaaggacattttattggaatgatattccaatattttaaaatgcaactaaacaagggaataaaatgaaaattattttattttcattccatttcattacctccaaccaaacgccacccaacataaagggcataagaaggtaaaccgatcatgcccatgcgaacacatccaacaacaatgaatcagatcaccttttgaaaaaccttacaatgtgctctaaataaaccaaggatactctgaaattaaaattggccatgtacattaatgagattagataaatcaaggatagtttgaaatttttattttggttgcattcaacccccaaaactcaaatttgggcggtaaaactcccaaaactatgaaactgttagcaatttaacatttccgtccattttagatgttaagtgccatgttggactagacacagtgtacaagtgacacaatttgattggtccacgtaaaaaaaattaaaaaattaaaaaaaaaactaatttgaaattaaaaaaattataaataaaaaataatttttcttttttttttctttttctttcttttttttttcttcttttctttctttttctttcgtctgaaacatctcatctctctcgctctatcacacactctctctctctctctctgtctgtctctcttgggttttcaatctagggttttcaaaacccttgggcagccaccccgacagttctccaccctcacgagcctcgcctaacacgagccaccaaggaggagatcgacagagtccgaatccatggagttcgccggaatccatggagttcgagatattcgactccgatctagtcgcttttgaacctcgtgttcagtaagctctctctctctctctctcacctttgcgattttctttctctttaatctgaagtttttttcttgtggatttaatttgtgtttgtttgtttttatggaatcgggacccaaatttcggtaggtgtttaggtctctttgatgtgtttggatctgagatgtggggttttgtttggatctgaaaaagaggtttcagtgatggttgtggtgcatagatgtgggtttggtggtggtggggagttcggttgtggtgggcagatgtggttttggtggtgctgggcagatgtggttttggtggtggtgggcactgggcagttcggttgttgtggtggatgatggtgatggtggtgatattttttgagaagaaatagagtgaggaagaaagagaaagggaattttcaattagggtttccaatttttttttttaaagaaaaaaattgtttttttattttaattttaattttttaatttttgaaataattttttaagtagaccaataaaattgtgccatgtgtacactgtgtccacgtagatgtgcacatggacaatccagcatgacacttaacacctaaagtggatggaaactgtaaattgctaacaatttcctagtttggggggttttaccgcccaaatttgagttttgggggttaaatgcaatgcggtccatgagaatggaattccaagtataaaaattaagacatgagtcttggaaggtaactaatgtattacgctcagccctaagtacagtaggagaccagccacattgattacctcgggatgctccttcaccggattcccgaggggcagtgctttgaaggtattgtgcttgggccaagcgatcctaggcctggtcctcaggtggaacaattatctgctgccaagaagaatacttgggaaccttgtaatcacaagtatattctttatcagcgagaaggctcaccgatcgcaagttaacttcgctcaaaaggaagttgcatgatcggagaccgtaagggagagttatcaggcccctgtgcttactaaccatctcgggggtaggagtaggtctcatcagaagagctgtcagaacaaaaaaagcattagtcaaaaacttgaaaaaggaagactgatgtaaataagtaagaagaaaacaatcacttacaaagtttgcgaaacgtggttgtgccaatgggggaaaggccagacgtccagaagaagttttccttgaaagacactttatttggcaagtctacaataatttttggctcgctagcgtgagtaccaagatagaaaaagcccattgcggcgttcttcctcgatggaacgaccttaactgagtaaagatactcgatctctacgggtgtgggatacccccaattcataattttgtacaagactttcaaactagcgagaatcatgtaggagatgggagtcagctggaatggggcaaccccaatgtgatttatatagtctttaaagtagtctcgaagagtgaggatggcccctgcattaatatgctcaaggctccaggcgcccatgctagtctcaccactagtactagtctcaccacttgttcctgggttactgctggcaaagcgtgcagggggtagcaactgaattcaccctctcgtactgacctaacttgacatgattatccaagttcaattccacaggtctttagcatctcgcccgtatagcctgagatagatcgcaccttcgactctatcaactcagcctcgaaggtg

SEQ ID NO: 31586 - DNA, 1462 bp, Cannabis sativa
aaaaacaactatgtgcagttacagaagctcgagaccaattaagagaaccatatggttcctgctagggtatttgctttgacccaagcagatgcggaggctggtccttcaactgttacaagtgagatatctaatagtggtattatgtttactattctgattgattctggtgccacacgttcatatatttatagtaaaaacaactgagaaattgagtaggccatgtgatatcatgtctagtggattaggtaccttgttacctactggggaagtggtaatctctaggaggtgggtaaggtctctcccagtgttagtaaaagggagaatattgtcagtggatctgattgaattagatttagaagattttaatgcaatcttgggaatggattggttgactaagtacaatactaccatagattgtaagaggaagatggtgacttttgaatcagagggtgaagctccatttgtttttacgagaaagattcaaggatctcgaattccaatgatataggcactgaggaccagggaattattgagagaaggatgtatgggatacctggctagtgtattagataccacaaaaaaatacacttgagggatcagagaaggtttgaatagtatgtgaatttccaaaagtatttccggaagagttaccaggagtaccaccaaagagagagttttggcttcaagatggaattagtatcggggatgggccagtttctaaggcctcgtataggatggcaccgacataattgaaggaattgaaagtccaattacagaacctgcttgatctgcggttcatgaggctgagtacctcttcttcgggtgcaccatatttatttgtcaagaagaaggatgggtcattatgtatgtgcattgattatcgagaatttaacaagttgacaataaagaacaaatatcatctgccaaggatagataatttgtttgatcagttacagtgaaagaccaacttttctaaaattgacctacgatctggttatcaccagttgaggattcaggaagagaatattctcgaaacggctcttcataattgatatgagcactacgagtttctagtaatgtcctttggcttgactaatgcactagcaacattcaaggacttaatgaatcgagtgtttaaggactttcttgataactttgtagttctagtttattctgaatccgaagaagctcatgagcaacacctccgtatggtattacagcgtctccgagaacacaagctttatgcaaaatttaagaagtgtgagttctagctatcccaagtgagtttcttatgacacgtggtaaccaaggatgggatactagtagattcgacaaagattgaagctgttcaggattggccacgacctaagacagtaactgaagttagaagtatcttagatttggctgggtactataagagatttgtggaaggtttttctaatattgctactactttgactga

SEQ ID NO: 31587 - DNA, 1653 bp, Cannabis sativa
ctatccatccattcctgaaagagccccttttgttgcgcgaatgttacgttcatgactacccgggtgtctgcctgatcgtgatgaagcgtatttgtatgattttgaatttgagatactactcctctcaaattgtgcaatttagtatcatcatcaataattgccacccgaggctcaccgatcggtggctccctcgatgcccagaccaatctctctagtgtactgggtactggtagttccagtattttaagtgcctaaagtggcgccagttcttggggtggtattggtgggaatgacttctgcaagattccttggatttgcaagagtttggacattaggatctgtaaccatcaaatcagttgtatcatttggattacctctccatgtttgtacaaccatctttgtgtgtcttgaaaaaattcaagacaacagtaatgttcttctactctcaataaaagcaccaaaatattgacctcacttttggtcaacgacactgagtttttaaagcaattgagaataattagattcgtatagaatatgagtaatatagtgtaaaataagaacacgaaattgttataaaggtttggccccgcgattgtggtaatacctactccctttatacttgtattgacttgtgagataagaagcaaaaaaaaacttgatctttctcgaaagtttttacagagaattcaacagtgcaagtgctattcagaaagtgagatttcatatctttaaatagtgaaatggctccactatttatagagaattatcacattaattaggtttcctaaaattaataatgcataaatcaagaaatttactactttccttttgtacatcacttacacatgaaaatagagatttgatttatatttaaaagaggaaagtaactttgctaatttgattttcacatttaccctggacggaacacgcgagacttgactcgctgatgttgatcggaatattctgctcatcttgcatggtgtgataaccttattctccagacggcgagacgttgataagccgttccccctggacgacacatttaccttagttatcaaacagcagttacttcataggtcatttctcctgggcgacattacaaagatggtactgttatccgcattctcggatgcccggtacgtggcaatcacagaaggatgtcacgtcagatcatgcacagttggtatgcaccttccgcctttcagcatcacggaagatgttatgttccaggagttacccgaaggctctccctaatagcgagggtagaagggattccgagaattccattattaatcccttattctgaaggatcaaaagctacgagtattccagaagggtagtgggttagtctgatccgagaaggctatgatcagatgttcccggaacctattcagctgtattcggagatcagagcaacggttacatatcttctgacatcaaatcaaatcgtcccctgcatcagaccttggtagtgagcgtacgtgcctctgtagcccctatttgtccaacggcttgtctaaacacaacttcgcaacgtaaaacctttgggcgacacgtgttcttagtcccatgaattgccttgcagaaaccgtacaccacacgatgagaaggtctcctaccaaacaacggtcagatcgccatgttgtaataaca

SEQ ID NO: 31588 - DNA, 1797 bp, Cannabis sativa
ttttatgtttttaattgaatatttattgttttagaatgccatctagtagctaattttcttttaaggattattatgtgaaccacttgaatttattttatggattaatgtgattttccaattttaccttcttctaatttaattcaatttcatacaatcttttttaattttgtaattatttactggtcatctacaattgtcatctatgaatttgaatcaaaattttggaaggtaagatttgaatatactctgattgttatggatatttattgtaaattgatttaggataaaagtacctaggctatttgtataattttatttgttgctatacttattgctatctttatgattaaacttaccatagaaatataggaagttttcacatagattggatttataagtcttaactatattataaatttctttattcaacttataattgaataggaaaaaaaagaaattaggtaatttcattatgaagtaaaataaaggatggttagggaccataataatccttattttatcattgttgtttctttaaattttaattattgtttgatttacttaattttctcgaaaattattattgatcaagtaagactatagatttaatttaacagtacttgataatcaattctcgtaggaacgatactttatttatcattaaattatttgattcgattgcatatacttgtgtactaattttatcaaacaattcttgtcatggaatacttgtctagaattataaaagaggttggctcttggaaaggcttcaaattccataaccaatgtgcaaatttgaaggtaaatcacatgtgttttgcagattatttgctactatttttccatggtgattttgtttttgttatgctaatgctaattagggcttaaaactggctgctaccaaatgaatataaaactgatgtatattgtagtggtatgaaggaagctgaagttgcaagagttcttgaaatgtcaggatactccagaactaacctcccttttaagtatcttggcgtatctgtttgctcaaaaaatatatctatagcagaatataatagtatttaaagaagatgactgccaacaacaaggtgtggaattcaatgaacttgttatatatggggagagttactctcataaagtttgttatgattgttagaattttattggggtcacaattgtatatataaattgtgtgttgggtcatcaaataaataagtcaaatttatgtggtctattttggaataaagtttatgacttaagggcatgattgtcatgattttaatatgtggataccaattagaaaatttctaatttgatgaggggccaaattggaaatagtcaaaaaggattaatttaaacaggtattggtccccatttttgcatcgtttcacatatagtattcttgaatccccatcatcaagaaaactcaagttccagagaaaaaactttgatgcaaaaatttgaagatcatactattcaaaatctcgattattctactatggactccagtagtacgcttccgccaatctatacttctattgtttaattctcatgaattaattagggctatacactcttatattcttttaccaagaaactcttgaaagatgtggaagctatttgtagggccttttttttggaaaggcttagcagatgatagtggtccaagtttggtggcttggcaaaatgtgtgtttgccgaagaaagcaggtggttgggctttcgaagagtgcttgattggaatatggcagccatgggaaattatgtttggataattaaaaccaagaagaataatct

SEQ ID NO: 31589 - DNA, 1918 bp, Cannabis sativa
  modified_base (95)..(97): a, c, t, g, unknown or other
atattaaaccatacacatgaaaactacatgtaaacataaatgacttttaatcttctattgataacaaatcatattatattgaaatgagttttatnnngggcataaaatcccaacaataataccacaaattatctattagtttgaaaaatataagaggtggtagaccttctagtatcctgacttgatgcataattagcatccacatatcctttcaaagttattttctctaaaactctcttgtaagtcaattcaatatctgatgtccctctcaaatatctcaggagccatttgagtgcccccaatggtttattccaggatttgacatgaacctactcaatatacttaaagcatgagcaatatcaggtcttgtgctaaccatgacatacatgagacatcccaaagccattgcatatggaatttcttccatctcttctttctcttctgttgtcatagggctttcctccttgattaatatgaattgttctccaagaggtactgaagtgctcttagaatcttgcatttgaactttgttaggatcttcacaatgtagttcttttgctttagatgtattacaaaatcactcttggatctataaacttctaaatcaagaatcttgtttacttgtcccaattccttcatgtcaaattttgccttcagtttatctttaatttctttgattaccgccttgtcttttcccattattaatatatcatctacacagagtagaagatacacaattgttgactcttctaggtgcttaaaatacaaacagtgattgaacttggaccttgtgaaaccaatctcatgaacattgctgtcaaatctcttgttccatgttcttggagattgcttaaggccatatagggattatttcaaacaaactcttttccatcttgttccacttgaaatccaggtgattgctccatgtagatctcttaccatttagaaacatagttttgacatcaagctgcacatctaaaccttgttgagttgccattgacaacataagtctaatggtcttatactttactacaggtgagaacacctctgtgtagtctatcccttccaactaagtgaaacttttagaaactaatcttgccttaaagcttactagctcatcctttgtcacaccttatttaacctttagaatctatttgcataatatcaccttctgatcctcaggtcttggaaccaagtattggaaagagaggtagtgtttttcaagggagagaattccccttgtggttcccgatcttttcgtctgcttaatcaattggtagttctttgaaaaaaaaagttactctttgttatattataacaaaatcattaaagaaacgaaataaggaaaataaacctgaaatggctcacactcttgccaagtttgcattaggcctagatcaggaagtttattagaaagaccatacatttaattgtaacctgtgatttgcacctccaacttcctattttgaatgaatttcaggtttcttttccaaaaaaaaaaaaaaaaaatctattttcattctaaaataaaataatttaaaaaagtgtgtcaaaaaaaaaattaaaaaatgggtgggatccaccacacttgccccacttccctctgccagttagatcataacctattgaaaatttgaaatagaattgcgtgtatacaaacaaaaaaaggcttttgggtggttactttgtgacactaatcatggaatattatgcaaatattttaattattttgtgaaaattaaatattatttagtgaaatggccatcattttcgttcttgaattattttaaataataacatgggcattgtcattgaaacacttacacaagaatattatcatgctcttttggtgtttgctgcacaagatggagaaactccaatgtcatgcttgtcttaattaagtgaaatatataactat

SEQ ID NO: 31590 - DNA, 2283 bp, Cannabis sativa
  modified_base (825)..(829): a, c, t, g, unknown or other
gaaccttctacattaattactaccatctactttgtaaggttatacttaataaaaaaacaagtaatccatgtgcctaacaattatacatcctaaacttattggatcacactatgtctaaaattaaataaccacaaaaatataaaccctcatttttctataattttctcttccatttatctaaattgtcacctaatattttggtacatattttggatgtgcatatatatcattctatactctttctatatatctccctcaaattcaagccatctaagcataatcaatatatcagttgtaataaaaatctcaatgttaacattattctcaagaaatcctatcatatatgtgatgtctatatatatgagaagtaataatctagtaataaaaccaatggaaaatgattatcggatgcaattaaggctcattaatgtgtttttgggacattgaaatcgatttcagattgatgtctttatgttgtctttgaatcaatacactattacaaaactttacattcccgtacgttagtcatcaaaacatattttttttgggacagttgctaataaaattaaagggtaaatactattttggaccatgtatttttgtaaaagttacgcattagattctctgttttactaaataataaaaatggacactatattttctaaaatggtacaaataggaccctcaattgatttttttatcaaaaatataaaatttaattataatctgatctaaaagtgttataacaaaactgtttatattttctgtatttattcgtattaggaattatcttcaagttagttatattaaaaaaaattgtcaaannnnnagctcagggtcctatttttatcattttagaaaatacaaggtttattttatcatttaacaaaacagagggtcaaatcagtaacttttgcaaaacacagggtccaaaataatattttaaactgttgagaaaaattaggtattcctgacgggtttagaacatttgtgaggctatcgtgacgatttttaagagtttaatgtggattttttaattggggaatacccgatcgtttaattaaaaccgtcaggtattccccgactattaataacctctaattttgacctagctctctaattttgacagtttaaaatcgtcgggaataccttattttttctaaaaattttaaacacttgcttaattttttaacgacatttctccaaaaagtatttttagaactgtcgcgaatacccctttttgtagtagtgggatgtcatcttacacagagccctctagacataaggccccacaatgttagagttttacccctacgtcagacctagggaatacgtgcaccaccaaaagaagactacttttttgtccaacgccatattctctaatattctcggtacaaatatggctacgcatgactacttaaaaaactaggtctctaacgaggacatgtcatcgttattgctatttcgcaccagcgggaaaaatttgcaattttttttttgtgttaagtttctgtaccgtggacatgtccacggtattagttctaccgaggacatttttatttccttttatttttcagttgctttgtattctccaaactctcatatataacatgaaattcccatttcagaccagaaaaccctcgccaaaaaacccaaaattggagatcgtcctcgtcattttcttcgttccgcggcgtctctctcacctccggcggaccacctacatttacccaacctcctccacctcagactggtgcatatgttggagctgatgtcatagttgatatgcaagagcggattaaacagctgaaggaattggttaggacaaattgtgtcactcagagatcgcagaatccacctcaacaatctgatcattctgatggtggaggactgagttagtagttgtgtttatatgtagtgtctatttctttcacgaactattttattagcatgttaggtaattatacttataactttaaaatataaaaaagtaaatttatggtatttttattaataaattttatttttattattatttgagcaatattaatgtgaaaaaaaaaattatgatatatttattatgaaaattaataatgaataaaaaataagatttttataaaaagaaaaaaaaattattctccgtaaaagagtctgtaccgtggacaatgtcctcggtatagataggttcattaggccaaaatgaaagcttttatcggcaacatatccaagcttttaccgacaacatttttcttggtagattctttaacgagaacaccactgttg

SEQ ID NO: 31591 - DNA, 1128 bp, Cannabis sativa
agacatggtactaacgtctcgggtctaacccacaatatcccaacagacgcgagcatgatcttgtaacatgaatgcagcacaattaagtcgttccgtccctgacacctccatgttatctaggatgcgggtaatagtgctcatccactgctcatccttgacaatatcagtacctcccagaaacattagaggttgtagcttaatgaaacgttcgaacacagaatctcaatgtggcagaataaatcccgggtcacccaccactgaaataggagctggtggtaacacttgttctactggtactattggtgccgattacctaaaccaactcaattcatcttcttgacgaagtatgatacttcgcatttcgaggaacatttgttgccaatcggcaattggattaccattattaacccccgcattatccctcagattctgcggaggcgcaggcggtgccggtggattggctttgtcattactaggctctacatgctaaccctgtggtctagatgattgtcgagggtccattttcataaatagccctaaaatcaacaatctcagcgagtcaaacaccaataccacatttacgcacttattgtcttaaaccctaactcatcaattctatttctcttattaaataaacattaattaaatgaaacactaatcatgctttccatatagcattcattctagatgctcatatactgcctaaaatagaaagcggtaaacaaataatcacataagcaattaagcatttactctcaacacttactgcaccatgaattgagcttgtctctgacgatgattgtacatgttcagccgatttacaggaagtttaaaaaaccttggcgctctgataccaaattacagcgccctaacaattaggcacactacgatttttcgataaacataacctaatcctgctaaactgggattactagaaacaagagcagaatttaaactttaaactatttaagaaataaaaaatataacttgtaactatttaaatttacaaccatttcaaaatattacatgtgttttgggatcccgtaaaaattttcacaaaatattacaagtcatttttacatgtcgacctaagcgaaaaaactgagaatacagatagatcaactgata

SEQ ID NO: 31592 - DNA, 2200 bp, Cannabis sativa
taaagatagatgcttctgtgaggggtggctgagccttgagtgccaaacatcagcaggaatagtaagaatatgagcaacattaggtgtcagatccaacatgcatagagcccatttgccattcactttcttgttgtgaatttcctggatacaaaacttgttagaagtgaagtttacagtgatggaatcattaaaagacaacttattgaaataatgttaaatttaaaattagccacatatagtacatctttgaggattggattatttatggcaatagagccactatgatagacaacaaaataattattattaggaagaatgagtttagttgcagtaacaggacacgtgaattgaaaaaatttagcatcattacatatatgcctagtttctctagagtcaagaatctaagatttattacaggatgtaacattatgacatgttaaaacgatacctgagttacctgatgaagaacataaatcaatgacagtcgcacccgattgctggttggaaagaaggttaagaagttgatggtattaagtagcatttaactgaggaagtagagtttgattttctttagggctggtattgatctctgtgctagtttaaacttgattggcaacaactttttttggtttattcttgttaaaatcaggaggatatccatgtattttaaaatatctttcaatggtgtggccaagaatgttacaatgggtgaaaaaaggcttatttcttttaggttgattagtcttggtcccttgctgatctggtttattggtaccacctttgttaccatgaaaagcaaaggccatgttggcattgggattaggtattgcactagagtttctcttttgattttcttcttctgtaacaaggtggagcacacgattgacttctggaagaggatccattaacaagatactaccatgtacttgggagaacagatttgacaatcccatgagaataaaaatgatgtactccatatggtggtgttcttggaacttctttacaccttcacaggtacaacaattacaagtacaagaaggctcgaaagttcttcccaaatgattttaagtctagtaaagtacatgctaacattttggttgtcctatttcgaattcatgagatttgcctaagattgtatatatgtggcccgtttctttgatgaaaatgaacctttaaatcagtccagatagcagtagttgattcatcataaagtatactaaaaaaattcctttaaaacagaattaagaatctaagaaatgacaatgttgttacttttaacccaagcattatagaggatatagtcaaaaggagagggttttggaatataactatcaagaaagcccaacttatttttgacagaaatggaaagctgcatccagttaataattaagagacaataacattacctggattatctctatggtgaaaataatacgaattcgtgggatcttcaagtgggctcttcacatttgccatctgaagactcggatttccttgtgtaatttgaatctgagtagttgagagagtagattctcttattcttgccagagacgagacttgatcattacttgacatggtagaagatcaactggaatgaatcgcagaacaataagatagatgatgttgagataaaaaacttgggaagaagaaaaagaatagagaagaaggaagcaacaatgtcttcactagagcaaggagcatgatgagaaagcatggaagaagaaattagattgattaaggaaagcatctctttcccgctgtgataccatattgcacaaagaaaaaaaataagaaatctatgtattgaattgaatgaataaattatagaaagagtacgactatatatataggtaaagtaaactagttaattctaactaaacttccaagaatagaactaacctaccagattaatacagttaggagttggttaattgaatgaagttaattaactcaatataatagacataacaaactgatcactaactaatactattacattagaaattttgttatgtatattaaaattattcattttaaatctttaatgttgtatacacaaaatatatacgtattttttttttttgaaagaacttcttgttcattgattagttaaaatagatgggaatcacagggggattaccctccccttgatacaaaactgccaattcactattggttctaacatttttggctgcaccat

SEQ ID NO: 31593 - DNA, 2402 bp, Cannabis sativa
tgcaaaccatcgagcacaacatcgaaacaatatcgacacccatcgggtccatcacaaaattatgccaatgccacaatcgggccacatcatcggacaaaaattgggctcatatcgggcccattaaaaacctaagtccccaaccaaatatcggacacccatcgagaccaatcgggccgatatcagccctatcaaaaataaagtccgcaataccatattgggaaaccattgggcccatatcgagctcatcaaaatctaaatcccaagccacctattggacaccccatcgggcccatatctagcccattaaaatctaaatcccgagccacctatcggacaccccatcgggcccgtattgggcccatcaaaatctaagtccaaaataacctatctgacacctatcgggccttcattgggcccttatggctttcatccctgtccttacgcaaagtggagtatcaaaccaccatcggggccacatcaaaccctataggaccagacaaaaaaaattacagaaccaggaaaagtgcagtattcacacacagcaacaatttcaacacacaaaacagtaaaataacagcaacaacccacagatcaagcatcaaaacaatattctaaactaaatataacaacaaccaacaaaattacacaaaaaaaagataatttacccatgagcttcgtgtatgatgctccgtccaaaaatgagagaaaatatgtagtgtagcttgtagtgtagtaaagtgaagagaagagaaaattgtgttgctttgtggtgatagaggagctctggcagtaagagggaaagagagaagaagagagaggatggtgatgtaaatggagagggtattttggcataatacaaatgttggcatatgctacaaatattgggtattatgagtttaagggaaaaattttaagcacatgtaagcataattaattaaatttcccttctttaatgctcatgttcattgatgatttttgtcctcttcattttaagtttttatttaattttaaattaaatgatgttttctcatgacttgattaaaatggaatttagtttttttattattttaaaataatttgttatatacattgtagtgttttaaaaccaattaatattaaattaaaaataaatatttatgattggtataagtctaatttttgtgaaaaaataaagatttttgccacaattcaaatattatagttaagaaaattttatggtaaaagattaaattagagacttaaattaataaatataaatatatatatgatatagtatatatataatgcatgtaatactatataatagactagagaatagaacaaaaaaagaatagaataacaaacacccaaagttgagatggggatcaccaaaagcttgaacaaaatttctattcatccaagtagattattttccctctatgaaacacttaaggctttctggaaatacttatgggaattatcaagccttagaattttctaactttgtgtttgaaagataaaagagaagagcatgtttgaaatgatgaaccaatgtctctatttatagtgttttggatcacacactttaaaattcaaataccctacacccaatgattgttaccatctcttaactgggtgtaaattagattaaataagtataggagctgttagaaagtatccccattgtcaaaaatattcaaatcataaagttgaaagaaagtaactagttactagttactaaatttttcagtttttgtaaataattcttcaaagcattttaaattattcccactttattttttgatttatacatattataaatgacaaaattaaatctgaatatttacatttgcattataactttgatttttaaaagattaaattgtgtgaccactctttacacacttaattagtaatgacgtggaagttacaaaatacaagtaactccacttattatgttacaattatatgaatattatatgtatataacttccaataacattatatattacactaataatatatattatatcataactttaatcttaatcattatattatttaataaataatataacaatttatgcgggctcaaccaataattgtttggcctaatccagattcctctacaaggttccactatcaaaagtatcagttacaaccttgatcaattaaacttgacctgtctcaacttcataccgatgaatctcactaacaaaaacgtaatttacacgactggaagtgactcataaaataatctttttttttttgatagaagacataaaataatctcatttcatacatgtaaaaagagcttttctctccctggagtcttctagtaggtatgcgaaaccgttcctcttctgctagtttggtcccgagcatggtgattctcgtccaccctaatcagttaagtggtggtt

SEQ ID NO: 31594 - DNA, 1713 bp, Cannabis sativa
gttttacaggttttgttatggtttcacttgttttgttatggtttcataggtttgttatgatttttgataggttaaaaactggtttcacatgttttaagagtattgtaatagaattgtgctctatttaaaatgatgttttatatgtttttttttttatattttattattttatttctatgttcgaaattagtttttacacttatattttatttttgaattattgttgtgcattgtgtattgttttaataatatttaatatttgtgaattttttttagtaattttttgtttgtttcttttctatttagttgactaataaaaccggtttcagttatcttcattgtttatcatttcagttttgctatggattttcatagggtcaaaactgatttcacatgttcaaaactggtttcacatattttgagagttctgtaatgggattgatctattttatgatattattgtatatttttttttattttaagtttctttatattattttgtttctaggtttgaaactggtttttatgtgttagatttttaattttgttgtttaatattagctactttttatgatttgtttttaaatagatttgttaagaattcttttgtggtatgtcttattattttattgattttcataactggttttttaagtaactagttttcataactaatttttttattatttttcataattgagttttaagtttcatgatttttttcatttgattatttcaaattacttgtttttgctttactaactggttttcctaagttagaatttaaactagttgataaataaaactgatttttgtgtatcagatttcaatgttcaacctcaattcttaacatataaataaatttatcttttgattgttttaggttgtttttgtaactggttccgtatttagttattatatttgttgttttacgtaactgactctaatattttaatttttaatttgattgatttaaatttatttctcagttatagttttaactagctgattattgtaactggtttcagtgtgtcaaattctaacgtctaataccagtgacaactctaatgtctaatttcagtgacttttcggtaatgaagacaactccgacgacttttttgatgatttttcgacaacgataacaactttgacgaatattctcattctattttctgtttttttatttgcgactaatattttattttagtagataatgactattttagatagtgttgggttgatagttaagtcttgaagcttttaaaaagtttgtaactagttttattttggcattgtatttgatttgttcaatattccatacaatatctagaatacaagcatgtaaaatttatttataatttttagtatttgtaactggtttttattcattaagagaacaactctagcgaatgtactctcattctatttttctacttcttttgtagctaatattatgctttagtggatagtaaaaattttagtagtgggttgatatggtctagtattggaatttctgagaagttggtaactggttttaatattaatattatgttggtatcattttggtaatgagttaatgatcaagtttttgagcttataagaaatatttaaaatttatataagtttattaattgtatagttggattttttattaagaaaattattttaattatatggaagaaattgttttcttaatttattgccttaacaaaa

SEQ ID NO: 31595 - DNA, 3181 bp, Cannabis sativa
gcatgtggaagtaaagaagaataacttgaagaggttaatcttgttagcaagatgtttagacacaacatatttaaactgaaacattgttatgaattcattaattggtctttattgctgtgcaacttacataaattgaatctacaagcttacataataaaagtctgcttctagaaatcaaatggctacccctgcctaacatgccaagtagaggccatcaatgaagaacaatgggcagtcatgcgaaaaggctgtgggcactagctcttttattctacctcttattaacgagttggtaggtcgacaagtagaaaaccttgcataattgtggcgaataggggtgtttcacccatggtcaatgcgagcctgattataccttgattggcgatactgttgcaagtgaattcgcatagatttaccatgcaaggccttaatttagccttttcgagccccatcttcttcagagtttccttgtaaaggatgttgactgaactctcgttatctatcaacacccttttcatcctttttttggcgagctggatagtaatcaccaacggatcgacgtgagagtacctcacattcttctcatcctcctccgaaaatatgattggaggttcttcagtttttaccttcttggaaggttctagagcaaataatgactgctcattttttattttcttcacatacctcttttgggcattgttactctctcccgcaatatgcggccctctcgagataaccaagatgtcctctccctcaataggaggaggttgtaatccctggtttcttgggttgttgggcagattgggctggttatgtccattgccacgtctcttgacatactgcttgaagtggcctcgcgcgataagactttctatctcatttttcaactgagggcactcgcctgttgtgtgcctaatgcctttatgatacttgcagtacctggtcggatctcttatatgcctcgcgtgtctcatgcgcttgggtttactgaaggcaaccttgtgctcatgtgcaaggtaaatattttcccgagtttcattaagccctgtataaatagtataaactggtagatacttgtcgtgcttcttttgtttcttcttgtctttggaagaccccttagagtggtctttcctctttgagccagaggcctctgagttatcaattctagttgagacagtggtttttgaaacattgctgggtttacttcccgagctagtttttaacaagttcatctcttttcgagcttcctcctttcgaacaaacacctgagccctctcgttgaactcattgatattcttcattggacgatcctataagtcatcccataattcactcctagttgtggatagatcggtagtgatccctgcctgaagggcagtaagttgtgtactatcatccagatttcttactcttgcaatagccatgctaaaacgactcaaatatgccttaagtgttttgccaggttgttgctttatgttggttagcaaggaagcctcaggtcgcttatcccttgcgacctgcaactactttttaaagtccttggacagctgttcccaagaagtaatggaatgatgagtaaatttgttgaaccaactgcttgttgctccaagtagtgaggtaggaaacaaaatacaacgtaagttgtttgtaacattacttgctcacattatagtgctgaaattattcaaatgcaagaccagatcgatagttccatcatgcgacgagacgtgagggtttttaaatccatgggaaaaaggagtattcatgatatttggatggtatggcttgagttcctcatctaaatcatatccagattgtttttcgaactcccccacttgatatcttctgaacttatcctccaacttgtctattcacaattagatagaatcctcttgctttggactgagttgttggcgaagatcaggttttttttttggttcaagtgctctcgtacatccgattggttatagttactagcaaaccttgctctactcacaaactgcgtcctacttatggaccttgtctttcacatagatcttgtcctactcatggacctcatccttgagtgacttatagtcttactggttctcgtactttcttgatcattatagcgacaagtacattctcctcctcgagttgatcgactgtgggtccttgagcgccctgaggtcacactcacttattcacaccccgttctaccccctgggcgtggttcgttgtgttttccccactaggatttgtacgagcccttccctacaggtctgagaagaatgctggtggttccttcattccttaggttgtgtcccaggattttcctcgtttccacgatgaatttcctgttccttggtttctggttgcctcccattctcagttctatgaggtggttctggctcatcatttggatttttagggggaacctcattttccccaggttgttcttcctgagaagtttgagggtcctcttgagcagtttcttgtctcctggttcgtgatccacgaggcatgtggctcgtggtcttctcactccagggtcaagttgatttggagtattgttccccggtgctgccctggctgcggctgccccacgctccaattccacattccgccagtttgcctcctccaggcggcgcctgatatggtaattttccaatttgacgataggtatgtatctcgtaaggtcataagcaccctcatccatgggccaagcgccctcaagattgggtccttcatccctcactccaagattttggcaatttccatgctgagtcctccacgaacatgttgttcgtgtgctggggccaccctcaggttgggtcctcctagaacgagtagttcgagtgttggggccaccctcaggttggatcctcctagaacgagtggtccgtttagactatgagttggaaggcctcctgaagcctactggctcttttcaaggacgatgaggagtttcttcatgtggtgtgtcaacgttctttgtgttgtcagccatgaagaaaattatttttcgtatgtaaggagggtttttttgagcttttttttttcacgaaggctctcaatggaagcaccaaactgttaatgcagatttttgttaaccaaatatgagcctaaatggtgataatcttgcaaaaaaaaaaaaaaaaagtaaagaagtaagaacatgaaggttttttacgtggttttg

SEQ ID NO: 31596 - DNA, 2209 bp, Cannabis sativa
  modified_base (118)..(120): a, c, t, g, unknown or other
ttacgtttaaaaatttttttttttatatttttatgtttttttatagaaacaataagaaaactgcataaaagtaacattaaataacatttaaatattatcaaaacaacaacaaaaaatnnnatacaaataacaaaaaatcaacgataaatttataagagtacaacataaaaaaatcgtattttctataaataaaataaaaaaaaatcgtaaaaatatttcaaattccgtaagaccgtatttttataattttttttttattatttttgtatatttatgaaataatcctatttgtcctatttgtcatacataacaaatttttttcagttaaattaaaaaaaaaaaaaaaaattacatttaagtacaacacatgtatatatgaatttaagtatttatgtagctgtgtgaattcatatattcatcatataaatatgtatatatatttttttacatgtgtatatatatatatatatatatatatatatatgcaaaaacaatgtacagtagaagagtattattgatgattaatttaagtatttatgctgctgttaatatttatatatatagccacatgaaatgtattgatgaatgaatgatgtagtccaacatgacatgactaaattatttcatagataagtattgtaagagaattggcattattaataatccaaaatttagaagagtagtgaatatttaatcagtatatatatatgaagccgaccagaaatgaatttcatatcattattattattattattataaaccataggtacgtgaccaatcttaatcactaaaccaaataaaacaaacaaacacttgtacaatcttacaaacaaagacctcaaaattaaacatacatcaatacatatacccatatatatatatatatatatatatataggtggtggtgagaaactgcatttcaccatcaatatatatattatcatccaatttcaaatcattcatacatacctatacatatatataaatattatacaaactatgatgacgccagcaatgatgtaactatcaagtactaaccttatatttagaagttagattttggtgaaaataaaaaataatgaaatataagagatcttaggattagtattaattaagatgggattagatccaaaaataaaatgttaaaatatttgtctatttataaattgatttggcatgaaaaaatagctgatatatatatcattaatttggtggttagtgtaaaatcattgtcattatttatttttgtccacatgccaaatatataatatgctgtccataatctcgtgacttattatagtacataaaaactattcagaatgtgaatatgcataagttatagattaattagtatttttgtctttaaaattttacatatagtaaattatgcctcttaaatttttaaggttgttaaaaattttacttaaattattaaaattgttggatttaataattttttttctaattatttagtaagaaaagtctaacgtggatgaaagttcagtgatataagatttggtacatgtcaaaatttaagaggtatgatttagtatatattaaagtctagaaatataatttagtacataaataatcactgaattggtcaaattaaatgaaattaaacaaaagtcttaaatccaataatctcaatagtttaagaaaaattttaatgattaaaaaaatttaaattgtataatttattacatgtgaaagtataagaaataaaaatctataatagcataaattatatgcaacaatattcatatgtacaaataagatattttgttttgtaaattgattccaaaagatatatattatatatactatcaattcaattatgatcaaaattatataaattttcgttgttgatctctttgatggactgagctgatgagaatataatatcattttttattactaatgtacaaaataaatattctgtttgtataattattatatttaagccgaaagtgaccaaatatttataaactcttattttaaattataatgattactactagcttagcttagttagttcaaatatatcggcaaataattaatttagttaagtcgatttaaaattaaataataatgaaatggtttccaaaatggatgaaaatgatgattagaaataagagataattaaaaaaaattacaaaaatatagtttgtagagagtttttaactgcatgtttgacatcataactaaa

SEQ ID NO: 31597 - DNA, 1308 bp, Cannabis sativa
agtatatataagttgcagaagctaactcaattgagccttagagagaacaagctttcagggctaattagccaaaggattagtaacctcaccaaccttgttcagtttgacatatcttctaatgcattttcaggaaccattccagatgcttttcacagcattggtaagttagagaaatttgttgccttttcaaacaattttactggttttattcctctgtccatgtcaaattctccaactctcacaacactaaatcttaggaacaattccttggagggttttcttaatcttaactgttcagcaatggtaaaattggctactcttggcttagctagcaatgggtttagtgggcctattccagataatctcccttcatgtcaagctctgagtactttagatctttctcgcaataaattcacaggtcaaataccagaaagcttcaagaattttcatagtctttcttacttctttctttcaaataccagcaattctaatctttcttttgccttgagaatctttcagcattgtgaaaaccttagtactttgatcttcaccttaaactttcatggtgagcagttgccagctgatcctactcttcatttcaaaaagttgaatgttctcattattgctaattgcagactcagaggctcaataccacaatggttgagtagaagcaaccaattgaagctattggatttgtcatggaaccacttggatggaacaattccatcatggtttggtaatttcaagttcctcttttacttggacttatcaaacaactcattcagtggcgaaatcccaagaagaataactgagttaagaagccttattgatgtggatgtttccatggaaaaaactccaatggactttcccttttcattgaagagaaatgtaagtttaagtgggttgcaatacaatcaactaatgagtcttccaccaactctagacttgagttataacaaggttagtggatcaatcttgcccgagttttgtaatcttaaaaagcttcgatatttagatttgaaatttaacaacctatcaggaccaatcccaagtaacttggcagggttgagaaacttagaggcattggatttttcacacaacaaactttctgggacgattccctcatcattggaaagtctaagctttttatcaaagtttaatgttgcttacaaccaattgcatggaaagatcccttcaaggggtcagttttcaagctttccaagttcaagttttgttggaaatattgatctatgtggtgattacacaaatattatttgtacaaagtccaatattccaagggaggcaacc

SEQ ID NO: 31598 - DNA, 1754 bp, Cannabis sativa
agattgatttcagttttctgggcaaaggggccgaagaaatgtttgcatactgcgagaagaccaagaaagaggagactgaagatgcagacgagattgaaaaagatcaagaagagccaactaaaccccctattatgtaggcttggtctttttatcttttttttttttacttatttaggaaagtggccctttggccgagacaatggttgcccctagtggcattatttttgtaagaaattttacattgttggatggccaatttttctttttatgcatttattttttacttttaatgcctcgtaccttatgttggaattgaatatgtctgttcattgcattttatttcacaatttaaacatttatattttgatccaacttattgatactctaggaagtattcccattgtttctattttttcctttgacatgtttaagcagttattaatctacttatatatatgtcgagcaattttaatctgcatgtagttttatccgcgactagtttgtttttgccctgttatatgcgagcagtttacaatttgccatatttaaacatttatcttttagagcaaacttaaagaatattttaaataattcacctctgtaacttttgtatatctttttgattgctcatatgaatagttagctcatttattcatgttttagcttaagtattatttttcaaggcatttttgtgcctcatttataatacatgccagaataatgcgagacgtttaatattcaacttcgcatgtggctttatcttgtttttttatgagttgatctcatttacagctgctattttttgactttttcctttctagagaaaatgtttttcaattccttgacttttatattgtccatagacaattttatacacatatatatgcccctcaagtaattttaaagaagataaactttttaattacttgaacaaactttaatctttattaatagtaagaatttacatattacagagataaatacaacatttacattttgactttactggtaataaggtcgcaaatgttcactattctagtagttctttattaacgagctgttaagccgagttaatttataaaccccggttcctactactgcttcaataacatagggacctttccaggtttgggcaaaaaccactccagcagatggatctcgtgtgtttgcaaatactcgtcttaacaccaaatctgcaccattaaagagtcttttcttaacacttttgttaaagtatctcgtgattgctgcattagttatttctgactcattacgtctttcttcaagtaagtccaagtatacgttcagaagctcttggttttctacttgattataaaattcacgcctatgggttggaatattaacttctactggtagcattgcctccaagccaaatgctaacgagaatggagtgtgtcccaatcgttgttttctctgttgttctgtgagcccaaagtacttgtggtagttcatctacccatcttccttttccagcatccaacttcttcttaatagtatcttttaaggtttgttaatagcttctacttgtccgtttgcttgtggtcttgataatgatgagaagcttttgataattttattcctttcacagaattcagtaaacagttcgccatcaaactgcattagttacttctgacaagaagcttgtggtcttaactaagtgtttttctaaaattacttttaaaataatccaatgaaaaataaatttcatatattttaaaattaattatgttgct

SEQ ID NO: 31599 - DNA, 2333 bp, Cannabis sativa
catcatcttcgaatggtattacagcgactcagggatcataagttgtatacaaaattcaaaaagtgtgaatttaggttgttagaggtatctttgttagggcatattgtcagaaaagatagaattatggttgacccgggaaagattgaatcagtgaaaaattggccgaggccaaaatctgtgatggaagtggaaagttttctcagtttagcaaggtattatcgacgtttcgtcgaagcgttctctaaaatctctatgccactaaccgaattaactaagaagaatcaacagttcatatggtcagacaagtgtgaaacaagttttcaaaagttgaaacggcgactgataacaacactagtgtttgatttgccattggatctaaaaaaattgttgtttactgtgatgcatctagacaaggcctaggatgtgttctgatgcaagttggccaagttatagcctatgcctcccatcaactaaaggaatatgagtagcgttatccaatgcatgatttagagcttgatgttgtagtatttgctctaaaaatatggcgacactacctttatggtgaaaaatgcaagatttacactgatcataagagtctcaagtactttttcacccaaaaagatttaaacatgaggcagagacggtggctggaatcggtcaaagattaagacggtaaaattttgtatcaccccgggaaagccaatgttggggcagatgcactaagtagaagagttcccgggcaagtttttaccactgtaatgatagctcctcaactagcctcagaaatggtaaaagctaaaattgaatttgtagtttgaaagttgcataacttgaaacttcgatctgatttgttagaaagaattagaaaggcgcatttggaagatcctgagctaatcaagatttgagatgaggtgatggccgatcagcctaaagacttttcaatctcgaataatgaaatggtactgcataaagcttgggtttgtgttcctaatattggagagcttaagaaggaaatcctcgatgaagcccacaccacaccgtattcgttgcatccaggaaccaccaagatgtaccaggatctaaaaccctatttttggtggtatgggatgaaaatagatgtggtagagtatgtatccaagtgtttaacctgccagcaaatcaaagctgaacatcaaaggccagcagggttattgcaaccattaacccttcctgagtggaagtgggagaatattgcaatagattttgtggttggtttgcctagaaccatgggatcgaatgtatgattcaatatgggtcatagtggactgattcataaaatcagctcattttctaccagtaaagattacctatacagtagattcgtacgctgagcttatgtaaaggagatagttcgtctccctggagctcgtaaatccattattttagatagagatccaaagtttatatcgaaattttaggtaagtcttcaaagagctataagtacaaagctgaaattcagcacaacttttcaccctcagactgatgagtagtcagaaagaacaattaaggtattagaagatttacttcgagcctgtgtcatggacttcgagggttcatggagtaagtacttgcctttgattgagctctcttacaacaacagctaccaaagtacaatagggattgctccatatgagatgttgtatggtaggaaatgtcgttccacaattcattgggacgaaactagagaaatgaagtacttgggtctgaaattagttcaaaagaccaatgaagctatggacaagatcaaagctctgatgcttgctttgcaaagcactcagaaaagttatgctgatccgaagcataaagatgttacatttcaggtaggggaacatgttttcctgcgagtttcttcgatgaagggtattagacgcttcaggaagaggggtaagttaagctctaagttcattgggccctttcagatactcgagaaggtcaagcacgtagcgtatcggctagccttaccaccatcattatcgcctatccataatgtatttcatatttcaatgttgagaaaatatgtttcagacctgactcatatcttgagtgacgaagcccttgaactacagtcaaacttatccaacaaagaatagccagttcacatccttgatagaaatgaaaaggttcttcgaaacaagatcatagctttggtcaaagtgctctagaggaacaacaaggtggaggaagccacctggtaattggagtgtgacatgaagactcaatatccaaagctattcaggttagattttgaggacgaaatctttttaacggggggataatgttggaaatattttacc

SEQ ID NO: 31600 - DNA, 1664 bp, Cannabis sativa
  modified_base (725)..(734): a, c, t, g, unknown or other
gtgatagcctcatttacaacaagttgatttctgccatattagtttatattagttaccaacaaaaaagcaagactctttacttttctagttttgattaaaaaatttaagagaaaaactcaacaattcttaagtgatttgagacaaggaagggtataattctacataaaatttatcaagcaacaataagctctacagattaattataagggaaataaccctacacaaaaactaaccttagagaatgctacatgtcctgaaacattgaaaactttaaacttagaggagattaaacggtgaccaatgaataatgagataatttcacaaaaggtaagacatcttgttttgaagtagcccacaccatattcctcaactgcatcaccaaaacaacaataatagatgtgttgctcttctttacttcagtatgaatttataatggggacattcatattacaatagacattcatattaacgacgaccaatacaagccaaccaaacagcattatgaaatcattaatcatcatcatcatcatgatcaccatcatcaaaaatcacaaacaaaaaaaaacacattattttcaataaataaaccctttattagaaggatcatcgaaaacccaattcaaataaaggatcattcatacatacatatacatacatacataatccattctcaatcgtataaatgactatttctatcttaaatcgtatttttgggatttattttnnnnnnnnnntattatatataaataaaaagtcacccaagtatttttggaatttattttattatatataaataaacagtcacctaataatttttcataaactaaaaattgtgttatatatagccacattttatataatagaaataaagttgtttaatttatttatttattatacatattttaggaagaagtgaaatttttaacccatccaagcattcattaagattatatgaagtttatttatattattattattattttattaagtaggtttgttttgttgaagtaaaaattattaattttttatcattactatttaagattattttgaaatttataattctttacactattttttcattgatctctttatgcagttttttttccaattaaattgaatttgcaaacagactaaaaaacaaagaaaacgatttcaatttcagaccaaattgtatcagtcaagtttctgatgatattatccttaattcgcatcaaggcctccttctttattttcaattaaattttactaatatggttctcttatctgattgcacatatactcaatcaatgatatcattagtttgaaaattatttgtcgtttactcaattagtatgattatatatataatttagaatttttaaataaaaatatatggtaaacacgatttatttatttacatataaaaaaaagtgtgttatatacaggggtggtggggccgtttagttggatggaaagaaatgaaatgtaaatgaatgaaacaacttttattctattattttgtttggttgcattttaaggtattcaaatattatttaaatataatttttttttcattattttagtagtatgactattctattttaagatgaaaggaatgacagaaaaaatttaaataattttttttatgaattttttattattttaattttattttattatta

SEQ ID NO: 31601 - DNA, 1396 bp, Cannabis sativa
gctaaacatgattgccaagtaagtggacattaccttcttatctgaattttatagatattatatggaataaattctgttaagattttgttctatgttggactcttttcttatagaacaccttagtgtatcatcaaaaaattgaaatacagaacagaatacataattgtgcagaaactcaacaaaagtttgttttgtgttagaacgaataccaggttgtggagtcatgcaagagcactgatacgggtaaggacaaatgcattgacaacaaaagcacaagggtcagcataccaaaagatggatatgttgtgtatggtgtggctcaccagcatactggtggagctggttcaacattatatggagaggtaaaatattaacgagtggagtaattcatgttcttataaatataataatgtgaaaactctttaacaatccaaaaccgttgtttttaggatggaagagtgatatgttcgtcgaatccaatctatggagaaggtaaggaagcagggaacgaggccggttaccttgtgggaatgtccacttgttatcctgaaccaggctcagtcaagatacttgctggtgagacattggttcttgagtctaaatacagtggtagccaagaacacactggagttatggggctatttcacatttttgttgcagaccaattgccaaagtcactaaagatctttgatcactctcctctctgagtgaatctccttattacttttgtaatgttgtccatctagaataatcatatattccaataaattcgcaaaatatgatagttgtaatacatatgctggaattcataattacttttagaataatttgagttgtacttcttatgtgttattatgcttacaatatatattataatcagtgtaagagaataagtttgttgtgtaatgaaatatacatctataacgatatagggtgttgggcaccgttttttaacatttctcttacttcaatcatactttgggtgccaaaatattgaggaatggcttccattgttattagaaatagtaaaatgggtgttgattattggactgattctatcttgcctcttaaagatttatacttttaattatcttctagtgttctgtattattattattattatttgttcatttccatgattaataataatgccttatctgaaactagctatctgagcaggacatgtgacaataaacatagaaaccagtggattcttttctcgtgccagcagaattgattggatatatattaatgttatgaaagttgttggggagtggtggggctgtacttagtttacatacctgtcaagttttgagattcttacattgaaaaagattaattaattcatctgagtttcgaattaaagacctcacattacacatgctataatttgaat

SEQ ID NO: 31602 - DNA, 1473 bp, Cannabis sativa
  modified_base (501)..(507): a, c, t, g, unknown or other
gaaatttggattgtgggggtttagtgaaaccaaaacgaaagtattaggggttttgccgccatttaccctttttttatttgaactcttgaaattatcgtgcaacatcagaaaatttatggtaaaaccctatgaaaattatactgtttgttaatacttttatttttaaattgttaatcacaaaatgaaagtaaattttttgtttttaaaaattttatttttgaaaaacaaaaatgctttctataaccacttttgtttttcaatttttttaaaacataaaataaaagtatattttgtaaagttcattttcatttttagtttttgattttatttaagtcagggccgtggggaggggatttgggtccgaatctagtcggagtccaaaatattgattaagaaaaaaaaaatatgtttaacaaaatattgaaagtgattcttttttgtttttaaaattttgattttttattaaacaattgaaaagtgaaaacagttttatagaacatnnnnnnnaaaaatatttttacttttttatttttaaaaacaaaaaattaactaaaaaagtgttacctaacgccatcataattcagttagatttttcttttcttaagagaaagagtgagagtactttgaaataaataatgactaaggaataattaaactataaaagacttggaatttctgataagattatttcaaaatcgttttccaaatagatgtggagaaggtaaaaccaaaaaaaaaaaacaaatattctaagtcattattaattataataaaaaaagtcattcactcaaaaataaaatatattcttttagaaaaaaaaaaaaaaaaaagaaaaaaaacacatatttacaagatcaagctggatggagcttaaaaaaataaaaaaaaaatacctttatgtccttttctccatgtctaaagctgtccacgtacgtgcttacaagttcacaaaaaagaaagagatctccaaattcgtttaatgtatggtctttctctaatggaactttaattaatattacttataaaaatttcataatgcaccccatcaaataaaaatatggatgcatttctatttactctagcatttagaataatttttttttatagttatctatgttgtaattattttggacattttataaaattttaaaaaaattaaaataatttaatacaccaaaaaaaatcaaacattatatttcacacgtatataaaataaaagaatttgtaacagattgtttaaatttgttttaaatttttttaaatcttttaaaattttacagaatgtcttaaataaatacaatattaatgactataaaaatttgaatttaaaacttttctaagatgtttggaaagtaatgcatgggtaaagtattttaaagagcgaattgtagaagtggcctaatacttattatcttaatcccaaagacattctatttcattaatttttcttttttggtgatgctcattgttctc

SEQ ID NO: 31603 - DNA, 1438 bp, Cannabis sativa
  modified_base (676)..(680): a, c, t, g, unknown or other
ttggaaggtaatttcgtactgacccagttccactgcccacttgagtaaccgtctagaggcgtctggcttttgcaatatttggcgtaagggttggtaagtgtatacccgtacaggatgagcttgaaaatagggccttaactttcttgttgctagaatcaggcagtaagcgagtttctctatcaacgggtactggccttcggcctcaatgagtcttttactaatgtaatagacctgggtgttgtatgctgttttcttcccctgatcatcacgacactcacaacatgctccgtgatgaccaagtatatcccaagctcttctcctattcctttgagaagtacgagaggctttgcaagttgcgtttttagctcctgaaaaggtttttcacatccctctgtccactcgaattgcttatttcctagcaagatgttaaagaacggaacacacttgtctgttgattttgaaacaaatctgctgagtgtggctatccgaccagtcaaactttgtacttccatggttcgtattggctacttcatatccaggagggcttgaatcttctctgattggcttcgattccttgagtgttgacaataaagcccagaaactttcccaagctgactccaaaggagcactttaagggatttagtttcatgctgtatttcctgaggactttgaagcnnnnntccaggtcatctatgtgcccccaatccttcctggatttgatgagcatgtcatccacatatacttccatgtttcgtccaatctggtctttaaatattttgtttaccaatctttggtatgtggctacaacgtttttgagaccaaatggcatgactttgtagcattatagacccatatcttttcggaaacttgtatgttcttggtctggtggatgcatttttatttgattgtacctcgaataagcatccatgaagcttaatatttcatgcccgactgttgcgtcaacgagctgatcgattcatggaagtagaaaatagtctttggggcatgctttgttgaggtctgtgaaatcaatacacactcgccatttcttgtttggcttgggtaccagtacgggatttgcaacccaagctgggtagaaagcttcaaatatgaaattattattgcgtagtttctctacctcttcctttagggctactgctcgctctttgtccaatagccttcgcttttgttgaactggtcaaaagttgggatcattatttaggacgtgcaaaattacagaaggatcaattccgaccatatcctcatgtgaccaagcaaaaacgtccatgtttgctctaaaaaaatttatcaatgccgattttacttcgagcaacaaacctttccaatttttagcttcttagccgagatatacggatcgatcttgatctcttctaattcttccataggtccaacattgctgctgttgggttttatgccc

SEQ ID NO: 31604 - DNA, 1364 bp, Cannabis sativa
acccctaaatctgttgaaactgggtatgaataaaagacttaagaaatgagatgtcttcattatcatttctagtaataacgatgtcattaacatacaccactaacaaaatgatacccgcacatgatcttttatagaacacagaatgatctgacttacttttcaacagatcaaatttctcaatagtctaactaaatttaccaaaccaagtacgaggactttgtttcagtccatataaggatttgttaggatgaaaaactcgccctaaatccctcttgagcaacaaacccaagaggttgctccatatacacttcttcctcacgatcaccataaagaaagatatttttaatatcaaactaatgcaaagaccaatgatgagtagctacgatgtaaataaataatcgaacaaatgtgagtttagcattaggagaaaaagtatcacaatagtccacgccataggtttgagcataacccttggcaacaagacgggtcttcaagcgagcaattgttccatcttaattgaatttaaccattgttatcctatattttatactatgatgtgacatctagctggatgactcatgtcttgcatttttaaatctggacagatggttttactctgagcagcccacaaggattgatatgaaagtccaagttgtacttatatagcaggatgtttggacagagtcatcaacaaacatccgaccagctcgatcgtgtgatcaactcgtgtgcaccaacctggagatgtgagttggcaatttcagcagtgatcgatgatatctttaaacttgcatgacacgaagtaattcatacttttgtgggattgattcgtaccttcagattataaagaaatttagtttagatttgcccaattccttcattgtaattatttattccatatagattaaggaaaaccattctatgtaatcaacccctataaaatagtgatctcatctcactattaaggaacacgaatttaatcagagagaacactcaagagagaaatagtgatctaagagagaattactcagagatcttttgtgagagccaaagaatacttcattctttatctcacaagttaatacaacaaaaaaggcagtaggctattaccactatcatggggctaaacctcttgaaatcctggtattttctttacttgttgttctttgctttctattgttcatttaatctaatcactttaattaagactccctatcattggttagaagcaaggtcaacattttagtactttcattgagagtaaaaataccaaagtttttgtcttaagttttgatagggtacaggatggttgtaactcgtgagggagttcaaactaatctagtcaatctaatggtggcagatac

SEQ ID NO: 31605 - DNA, 1888 bp, Cannabis sativa
taactaataaataaatatatatcttaaacaactaatctacacaatctacacataacttttataacttttttaacttttttttttttttcagagaaagacatagttaatattaactaatataatttatcaaaagaaagtattaactaacatatcaaaaatatcaaaatcttaaacttgattaaatttatcaccatctttcccctcacataataaaagtaaatatttatcgatcattgtttaatttattttatgtacagagtaaaattattaaaaaagatattaataataattataagtgagatacggtgatgacatcaactttaaatacagtggtaactataaatgagatacgatgatgatagttgttttgaaattatatgatgacttttctatagatttgttatattctttctattttagatctatattttgtgtaagaattgttcaatttcaattttttttactataatgtatatattaaaaaaatgcatgattttttatttatataagatattgtatgatagttttttttctttttaaattctttagagttttctatataaatttattttttaataaatatatattatttataaaaaaatatgcataaaataaatttaaaattatttgacactgattttattatttaattaatatttatataataatttaaccgtcgcacgcgaagcgcgacctgtttactagtttttaaataaagcgaacaatacaggcagactttagttattaccggcggaatgttccgctggtattgggtggtgtggatttgtgcggaaaaattcctgcctttttttttttattttgaaaacaattaacagcggatcacattgctaataaaaaaagcaatttgaccatgtaccctattaccggcggaacccactaataccggtgggtgtccgccgataatagttttatatacataaaaaaattgctgaaatcatttcgagcctcttccttttttctcttcttcatcaaatctttcttcttctctcaatctctttctcttactccagcccaaggtatatatcaccgccatcccaactctagcccaagctccaccactatcccaactcaacaaacattttggtaagtgaatatggttttttttttccagctgaagtcatatctttccatctctcacactcttatttattgagttttaaaggaatttttcaattttttttagatctgaactttctccggtgaagaagctccgcccaagatgctgcccccaccgaagctccgtccaagttccctgtaatccatccaaagctccagcaaagtttttactcaggtagtataaatatatatatagttatatataaagattacatttgcgaatacaacaaagtattttctgaaactatatatgaactgcaagatatatatatttttttttgaatgaataagatatattttcttgaggtctctattttgtgaattttttctccaaaaacctgaaatctccaaaatcttactgctcccttctcgtctctttctatttggtctactctaactctcaggtatgtctaaaatatgctttcacttattcattaaaatggcagttttgttgggattctatggtgtaaatggggctgccttgtattaatatacaagattattctttaaggaaatgctttttggcaaaaaaaaatttgggtttcagaaaatattttgttgtatttacaccatatatatttatatatatatttttttaatttttctaaactattgtttaaagtttgcttctatttgtgagattgaaaaaattttatgaactctgtttctgtttgtgtcaaaattttagttttttaatagttgtgattaattaaaaatggattgcacgttttttttattattttgtaaatga

SEQ ID NO: 31606 - DNA, 1333 bp, Cannabis sativa
  modified_base (866)..(874): a, c, t, g, unknown or other
  modified_base (1243)..(1257): a, c, t, g, unknown or other
atccagtggtggtcagggagtttaaatcccccttaatatttgtggtcgaggtagaggtcctagaggcaaggcacgtagccggggtgatgttaacccgccacaagctgcccaagctgcccaagattgggaaaacaggtttgcagaaatgcaagccaggattaatgaacaagttgaagagatccggagcttgagacagcaaggtgctcctacaattcctgctccagaagtaccattagctcctgcccctgttgtgtaggcaggacttgtagctgcagtgaactgaatggattccctgtatgaaaggttccgtaagcaggcacctccagttttttgggaggtcccgatgtcatgaaagcggagcagtggctaactgtgattagcagaattctaaactttatgggcgtcaccggcaatgatagagtggcttgtgccacattctaatttcaagaagacgctctggtttggtgggacatggtttccctgagtcacaatgttacaacaatgacctgggaaaagttccaggaactatttaatgcaaaatactataatgagacagtcagaagcgcgaaaaggaaagaattcactcagctgattcagaaagaaattatgagtgttactgaatacacaacaaagtttgaccgtttggcaagattggcctcggggatcgtgccaactgattttagtaagaaagagaaatacctggacaagttgaatgcgacgataagacatgacttaatgattactaccgatgacaacaccacatatgctgatatgatgggtaaggcactgcgagctgagggcgcagtggagtgcaccttagagtctcgagggacttcggttattggtggggctcctactcctcctannnnnnnnnttagtaggggaggtagtggctcgatcactgatcaggatagaaaggcacctactgcatccagtggtccaggtcagaacaagaggttctaagggaaccagggccgaggcaattgtcaggatggctccaaaacccaatacacttacccagaatgccccagttgcaaaaagcatcacttgggagagtgtagagggcaggggtgctttcagtgtggtatgctagggcattacaagagggattgtccccaactcaagactgaagcacaaaaaactacagcgaaacccgctccagcaagggtgttcgcaataactcaggctgatgtagaagctgttgggaatattttacccggttctagatttactaacaagtatnnnnnnnnnnnnnnnaaatatgaatttcctaaaacaatgaaaataaacacataagggtttaagaaaaccatacattgattgcagcagaata

SEQ ID NO: 31607 - DNA, 2697 bp, Cannabis sativa
ctcctctggatagactgcttccaccccttctgattcttcagcttgctcagtgggcttcgagcctttgttgggatttccatcttcttgccacagctccttgatgttacttatgatgtcttcatatttttcttcctcttcttctgtgcaataaccaccttctttttctgaattatcatcgtctgaactgaggtcatggatgtcttccaagtgaggttcctcaatctgttccatctcctcccaaaggacgtccccatctaagctctcaagtgccccgccattacccttggggctgtcttttctcttcctaagatatactttcaacttctttttactaacaacttcttcctcaattatcgtttgttccgattctcttattactgaatttgacttaaggctgccacgagatttgcattcctcccagtaattgataattgcactattaaattcctctcttctcttaggctgtactgacttaagaatgccttcaaacactttgtttgtaacattatttttaaaacaaagcccctgttccagtatcaaagtgtaaggccccaagtgtttataaattaaatggcccaatgtccttctcaccttctccacatccacggcctgagtgctccttttgaccggcccatttaaacagtggcccacgaggcaatttggccctataaaagtcagctcattatttttcccattctccccactgtatgtttggcccaatattgaagagggtccatctctgtttttagcccacttatcttggcccattacccatcctttatcatacagctgccacatattttttaaagtaataaaagtacttggcattaaatgaccttgcacacgtggctccttcaggtctctccacaatctattgaatatcttgtgaatagtaaccgaccccattgaatatcgtatttttacgttggaattcccaatcgccgccgaaccaagaattgtgggaagaggatcgttctcaattgtcgcacgctgactcttgccgcaggatatcttgcttggatatacctcgattgccgagtcatcagaaaaggctgcagtcggcggcactgtttccaccgaccgagtgagagcagtcgttgtggtttcgtcgcatctcctctgttcgtgcctgatcccattgtcttccttatgtcgcaccagaccatcccgttcgcctctgctcccattcaccctttcccttccgaccgcctcggctacccccctgccttctacaccataaccctcatcggccccagtgtctacctcatcgccagccaccttgttgtggtcgaagtcttggtaccaacaggtgttaaagtacccatggaacctataactcaagtcattcagcttgaacaacctcagttcaaccttgctgtcttcgtattccaggatcaatgactctggtatgaatccgttttcgtctcccaccaactgaagtctcacgtgagaaagtaaggaagcttcagcagactccttgtccacatccagaagtccaccacaacactcacctattttcctgaaggtcttcatgttccataggttcaaaggcagtccgtatataccaatccaagagtctctacattcgactttaatgctttccttttgagcttcccatctccattgagagagagagacaaccgtctgtgcacctggaactctcaatcgttgaataaggattaaagcatctctttccttctcatctttgcaccatacaatgcatctgtcatcaaatagctggctgaccaccaatttcctgcctaactccctggataaattataaaagatgacactccatgatacgtagctgttatctcgggtgagaatgatggccaactcccaattcctcttttgtgcttttgatctcatgtattcatagagctttggttgctggaatctcttttctgggtatggattctttggtttaaagctaggattgatggctggatataggtccagccaatcaatatcactctttcttcggcctggcagtttcgaagtagcattcctcaataagtcgggttgtttgaccatcggcttccttgtttccttgacaacattaacccacgatcgttggttcagaggtcctttgctttgcatctctcctatcttctggacagatttcccatggacacttgcttgttctcttttcatagttctgtttaggcaatgtatgagttcagaccatccttcctcgttctcttcttctggtatgataactgatttcagtttgttgttccttagtgctgaaagtttcaaaaagcttccttttctgtttgagaaacactccagtaaccaactgccagaactatttcgaaatgatctcttgaagctaactctttgtctttcctccttctgatggacttccttcacggtctcgattaaccaatccacagcatcaattgttatagtgatttcatacccaaagtgtctggttctctcacatattcgaactgatccaccatcataagtcaaagtaatcatgaacaccttgtattagtgtgaaaactccaatattttcggagtttttgatcaattagaggatcacactgattttgccagtcaaaaccagtggggtaatgaccttttttcttcccaaaaccagtggggttttggtgttttccatagccagaagggccatggacagccctagtgtgcatgacaatgttcctcagaaagaggagagagaagagagaa

SEQ ID NO: 31608 - DNA, 2560 bp, Cannabis sativa
  modified_base (1171)..(1173): a, c, t, g, unknown or other
ggtatttttgacaagtgttgctcaagctttgttgtatatgtgatagtttgattatttggtaattttccaaaccgcagaaaccgcaccgcaccacaccattttttgcggtgcggttttttagtttcgcggtgcgggtgcagtttgggaaattggaaaaaccgtatgtgtgggttggtttgaataaatagtcaaaaaccgcaccacccgcaccgcaaacacccctagttttgacgtatgagaagagttgaattctgtttttaatattgcaaatgcccattaatatcagcccaacatatttaatatgatcaccaacccatacaactctataatctcaggcctttaaactcataaaatctaatttcacttccctcagcactatctttcccttattcttcatgtcaaattcttagatatcaataacaagctaacactgttctcaagtagattaacatcaaaggtacaattgtttacttatgactaagtctttttttattcatctttctcgaaaaaccatttctaagctcttatttttcaatttttttgtaatgcattattaatatcatgatcactatctttcccttatttgtgttatttaaattgttaatttttataacagatacaatatggatgcggcgtctccatcacagaacatgatgaagaacaaacttacgaatggaaaagcaaaacagcagagctaaacatcacaaaaccaatgcatgagattaaaatatctaatgtgctaggcaagagtctcgacaaactggaaaaatgggaagcattctaccaaatgtacgcaaaatagataggtttcgacacaagaaaagacgatgtacgacgtgctcatggggtcattgtaatgcgcatgtgggtttgttgttccgagggtttgaaaaaaaatcacatcatcagatagagaaagaaaaaaaagacctcatgatctcactagaaccggatgtcaggtagcattgcgtattttactctcaagaccgtgtaacacttagaaatgcgaagagttcaacacaatactcaatcacgagctggcttcaccaagtgaggtacaatttttgagatcataccgagttgtgtctgatggcttgcttgcccaagttaggtccatgaactcagtagaaattaaaactgctaacataatgtctcatgttgctttgcaaannngaggttacgagagaatgccatgtcaactttgagatgtgtacaacagggttgctggtgctaagcgagaagaaaagatagagatggactcagaaggggcgttgagatttcttgattgtctcgtagagaaggatccaaatttctttgttgtctatcaggctaacgaggagaatcgattggctaacttactttagggagatggaaactcacgtgtagactatgtggctttcgaggatgtactggggtttgatacaacctacataacgaatgagtacagtaagcctctcactgttctcattggcgtcaaccaccatttcaacacatgcatctttgggtttgccctcttcctccacgagaagcttccatcatattcttggctacttcaaaaatttcttgaatgccatggacataagaagccaaatgttgtagttactgaccaagatgtggccatgaaacaggccatcatggaacacatgctatatgttacacaccatctatgctcttggcatctcaatacaaatgcttccaaaaaggttaaagatctgatcttcttaaaaactcttaaagatatgtgtacagctactacgcgaaggaaaaatttgaagcaaaatggttagatgtcatcgaaagggtacaactaacagataatgaatggtgccaaataacatttgacacaagaaaatagtggacaaaaacttatttaaggggttcattcgttacaggaataagaactacacaatgttgcgaattgattaactccgctttaaaaatttttttagagaagaattattgcttgcgtgaatttgtaacaaccatagatatgacagtctcaaagctcagacacaatgagactgtaaatgacttcaaaagcaaatgcactcgacctcacccacctaatgtgctaaattttacacaagaaatatgtaccacaaggttactgagcagctttaattagagaataattattttatcctaggtaaggaggaagaaggagactggcagatattcaccattggaaagtttcagcatccagaagtccattaccaagttcattactgtgaaagccaacgagcactacactgtacctgcatgttatatgaaagttagggttacccttgtagacatttatgggctacaatgaaaagattatacatgagaagaatacctgatactcttctcatgaagagatggagcaaaaccgcgaagacaaatctccacctacattttaaccaccctgcacaacaacaacacatttatgagatggctaggtttgaatcccttagttcactaacttataactggattttctatgcatcaaaattagaggactcgtataaccgtgcaaaggaagagattgaacggctaacactaatgttcaaggaagaatttg

SEQ ID NO: 31609 - DNA, 3449 bp, Cannabis sativa
  modified_base (3028)..(3028): a, c, t, g, unknown or other
cgggcactgaacatacaaaattatgaaatttctatatatgacatataaaatgcattctgaattctaataaatcatcataaattaataacttagaattaatagctaattctcataattaaaccctaattatctgctaatttccaaatttaggctaagcggtctttacaagagccaaagaacaacttgagctaatacacattgatgtgggcggacctattaatgttcaagctcaaggaggttatgaatacttttgtcacttttatcgagataataaaatatttgtgtcaacaaatactacttttcttgaacatgactatatgaaaagtcataagccacatagtcaagtggttatcaaggaaatcataaacaagatttttgaactaatgatttcagcaccattagtttaacgaccaacagaagttaccacagttcctgtaaaggaaactcaagtacatcgacgtagtgggaggattgtgagacaacctatctgctatgaacatgaagcacatgttcttgtctctaacatagacaaggaaaatccattgacttacaaagaagcaatggatgaccctgactcagacaagtggaataatgccatggattcagaattggattctatgtgcaccaacaaagtctgggtatatgaaactctaactgaggatattacacccatagggtgtaagtatattttcaagaagaagaaaaatgctaaagggaaggtagaaacctttaaagttaggcttgtggccaaagactacacacaacgagaaggcgttgactatgacgaaactttctaacctgtggttatgcttaaatacatttgcattcttctttccataactgttacatataaatatgagatatggaaaatggacgtcaagaccacttttccaaatgggatcttgatgaagtcattcatatggaacaaccagaagggtatgtgttaccaaggaaagatcaaaaggtgtgcaagttgcttaaatctatttatggattgaagcaactctagatcttggaatatcaactttaataaggctattaaagagtatggcttcaaacaaaatgaagaagaagcctgtgtatacatatacattaagggtaatgtagtggtattcctagttctttatggtgatgacattctacttattggaaataatatagaaaggttattagatgtaaagaagtggttagctgaaaaattccaaatgaaagatttgagagaagcaagctatgttctggggatcaaaatctatagagatagaaagcggagaacattagcactttctcaaagcaacttatattgatatgatgtcagaaagattctcaatggagaatcccaagaaaggacaactaccgtatagacatgggattactctatgtaaggatcaatgtctaaagactccttaagaggaagaggacatgagaaagtacccttatgcatcagaagttggaagcttgatgtatccaatgttgtgtacaaggcttgacatatgctatgttgtagggattgttagttatcaatcttatacatatttggaacactagatagttgtaaagcacattctcaagtatctttggagaacaagatatctcatgcttatatatatatatttcgatagagagttaagtcctacttgatatactgcttctgattttcaattagacaaagatagtcgaaagtcaacatttaggttagtatttactcttggtagaggagttgtagtctagagaagaattaaggaaaccagtattgcagattcaaccatggaagctgaatatatagcagcttgtgaagcaactaaggaagcagtttggttgaagaaattctacacagttctggaagtaattccaaaagtagaaaaaccactggtgctctactgtgacaacagtggagcggtggccaactcagaggaaccaaagagccacaagagaggcaagcacattaagagaaagtaccatctactaaggaatatagtagagagaggtgatgtggcagtcttgaagatcgcttcagaacataacctggcagatccattcacaaagacgctaccagcaaaatcttttatgggtcatattgctaacatgggactaaaggagatgcccaatatactttttgagcgagtgggagattgttagggtttatgccctaaaaagcatgtgaagacattttctgactattaaataaagaattaaacatttgatatatgtgtgaatgttaagctattaatatttattatttaataatttatattaaatatcgaaaaattccttattcatatatgaggttgtggcttgtagctatacagagagctaagaccacctagctgtgaataaaacattcaacaacatattaaagttataaaatctttaatcaatggttcctagtacggttcaataatatccattctacggtgtaggtataatcttggtttggattacgaatgtagttgacatcaaagtgaagatactgtatataatagagattatatatgacaagtaccgatatgaataagctgcctttaataacatgttgtttatcataaagacctaatgcatattataataatgttcaatagtagatcgacctaaatcccgagttatcataaactcctattcatgtaattagtttctttgattcactcattaaagcttttcagagaagatgattcttacaacttttgttttaggaatctaataatatggatagttgacaacatgatgtacaattatggaattttgaatttcctaatagatcgaataatggtttcctttaaatgttaattatggaacttaaatgttgtgcataaattcagatgggatcttgaattatacttttactagtgaattaatggtactaaaggatataaaagtaaatagaaaggtaaaatgataatttgaccaaaactaattatgaaccaacacatggcgggctaatcattagaattgattatatcaatggacattgcagttaaactcagtaatataattctataattactaagagttcaatttcatatttatagtggantaatcatggaattaataaataagagattatttggttaatgagactcaataaataatttagtttattagagcacagaattataggtccatgatcctcaaatcgccaccttgaaacactgtcaagggtagggataaagtgttgtataaagatattcgaaaaaatctattttgaattagaaaaatagtaatcatttatttttgtaataaataaataatttttttcaaattaattaactagggaaaagacaaaagttatcaggacaaaagacaccaaccttgtcttaaagacaaaggtagacacctatagcttgttcctatccccatggagtttttcttttggatgaattaattatttaattagttcaattagataagaatctaatttaaaaagtcattataaatatttcaaggttgttgagata

SEQ ID NO: 31610 - DNA, 2048 bp, Cannabis sativa
  modified_base (239)..(240): a, c, t, g, unknown or other
  modified_base (812)..(814): a, c, t, g, unknown or other
  modified_base (2004)..(2008): a, c, t, g, unknown or other
atatcttccaaaactataggtccctattaacaacctttgatgctcctatccctacctcacgttgacccacagtttcctccactatcatcggactcgaccccaacacaccacgattcccctcaaccattgccatcgtcgaccgagagacctcaccacaaaccgtggtttttaccgcagcagcatcatcgtccaaagcagcatgaaactgcttaagccatttagctccgatcatgtggttnntatgtataggtctcactcgcatccattccccatacggtttgatcatttgaccctctccaacctcgaacctccgtgggcaaaaactttcggaatgccccataattccacaaataaagcagaaagtggggagatgttcatacttaaagttagtccagaactcaatcccgacagtattgcgaagcttcatacgtctcttcaatggcttcgtaacatttaaagtcacacgaacatgaagataatcccgccataaacccatgaaattcctttcatccgactgaacaaacttcctaatatagttggcgacatccttaacaaccgtagcagttttaaacctcgatctaagatcatgcaattgcacccacatatcaacttcatccaagacaaccaaccttggatcctccccccgctgcaaccttttgaaaactaacaagaacctactaaaagtccaaggacttcgattcatcatactttggatgtcaatctcatgataaaattgaaagagatagcaattagtacccaattccttgacaaacatccccttccccgactgccacaatgaagccatcatatgnnncatagcctcaaaatcaatttgtctatcagtcaagaaccttccaacaatacaccacctatcatcatagtcattaccatccgtaacactagtattataagacaaaatagcctcctcctcctcctcaagaaaaacatgcactcctgtaccgtcttccataattgtatctcaaccagcagaatcccaaaaacaccaaagaaaaacaagaaccaacaaacgaaccaaaaaaaaaaagaaaaactaaaaaactatgtcaaaagacaagactaatgggaaaacaaaagtttgaacacataaactaagaatctaaccccataaaaacctaattagaattaactaataacagttaaaagcaacaaaattaaacacaaaaattaaaccaaactcaaaacaagatccctttgtcgctgcctacgtcgctgcgaaatcccatcatcgaaatcatggtgcgtgatcatcaaacaaccaaggacttcaataacagagaccaatgtgatcacatggaagcggcaacttcaatacccgagttcttcaataacagagaccaacgtcatcactacaactttgtcgctgccgtcgtcgctaccgtcgtcgctgctgtcgtcactgctgtcgtcactggaagtggctggaatcacatggaagcgagatctcgtcactgccttcaactgcgagatggaaggaactgtccagcatcgtcactgccttcgactgtgactaggagaatcgaccgccgacgcactgtccagcaccgtcgactgtgaaggggaaggtgtcgctgtctgccaatcgaccaggccaaacgatgaaaccctagcctttgctctctctcctcgtgtcttttctctcgaatcggtacggttttcaaattcattataggctataaatatatttattcttccttctatatgactgtttttgtgttttttttattctgattctcctataaatacatttgacaagctcattggcaaaaaaattttgaggggtgtggttttttttatatttgtttttaagtggttacatctgcttcattgttttgcatttatttttgtgttgttaaagtagttttttttttattatttttcaggacagggctggtaaatatagccgctattatatctagtattgaggctgtacagaagtgttgagttttatgccctaaataaaaatcatttcaatataatcagatnnnnntattaataaagatcaaaaataatattttatgttgcatggt

SEQ ID NO: 31611 - DNA, 1569 bp, Cannabis sativa
ttaaataaaattataaaaaataaataaaaaatattatcaattttaaaataatttttatatttttaaaataataatattaggtgtaccaatataaatttgacacgtgaacaaaagtgtccacataagaagtctatattgctagttaactgtaaaaaatagatgaaaccttaaatttgcaagcagttcagtagtttggagggttttaccattcaaattagagcttagagggctaagtgcaagaggagtaatagttgagagggtttagtcgcaaataactcattaagtaattgttatcaattgaataagtgcaatactaattggacgtaaataaaaactatcaaagcaatatttttattttagcaacctagtctatttcaattatcaaaatcaaatggctccctatatgcatctaggtccaaaagcaaacatataggctcaagcattacaaaatttacctgttacaaattatttatttgatcttgttattccaatttttgtcctcatgatggtgcatgctaacgtagacagaaccagtgccacatggcactacaactcactaaaaggaaggccaagtcagcacccgagcaaacgaagaccccggcactcaaacagggatcaagtgatagaccagctccctctcaagagcttgctggccctatggctggccaacccagggacagcatcatgctggctagcctagccaccacaggggcctgggcaggcaagaagtgctctgcaggcctcactagacacttctacatgtggccaggagtcatgggcagcaaattgggccccaaaagcccaacaaaattgctgaataatatctagaatcaagggcatttttgtcttttgtaaatatctaactaattatatgattgctaagggatttgaattgtgaacctaaggtttaaggcttcctatataaaggccttaacctctaattgaaaacctaagttacctctacgctagaaacctgatctcaaactctaagtgtctgataaactctctctcttcctcattctctctcacacacctaccctaggttgtccaacaccctaggctgtccaacacttcagtttttctaggcattgattcatatattttaatcctaagggtactatagtagatcccacctatagcaatctagatagtaactctttcggtataatacaattaaagggggaggacgtcattacccgctatcacaagagggtagaatctctataaaaaatcctattgcctatttattttcattcttatatgtgcacacacatgacaagcatcggatttgcacgacctcgctgtcggttgataactccagttgcaccaactacatctttgggtctccctcaagacccacagatcgcatatccaggcactcgggttctagtcacaactggaatccccatgaatactacagatgtggttaatctcgtcaccacaacaggcgcaaaaagtttggccaccatagttggccaacctgacacgagcatcccgatggatccaagtggcaggcccatgcctccaagtgtagacccaccattcgcgcctcccactaaaggaaggacc

SEQ ID NO: 31612 - DNA, 2104 bp, Cannabis sativa
  modified_base (197)..(200): a, c, t, g, unknown or other
  modified_base (1490)..(1497): a, c, t, g, unknown or other
tttgtatatattatatatatatttagtttttcgaaattatatttggatcaactaaaattaataatattattaaaatataatgattaaagtaagtgattaatttttctcaaaaaaaaagtgattaattaaaaatatattaattttaaaaaatgagctttaatcaaagagatattcaatctccattgttggttctacannnntcttgttttagtgagattcatccctaatagatggacgttcttagcaatttaacgtcgtagaatctcgaaagataagtattattataagtcttttattcttaataatgtccatctgaatagtggctgctaagggttgggcttacaaagtatgaaacaatggtagaagctcatgaaataggaatgaccttgactctcgcataaaacgaagcaacgtcagattctctttttgatcgaataaaaggtttctagaatggttttcattttagatgagctgactactctattcaatggatgatatctttgactctcgcctaatatgggatactgtatcagtttgttggaaatcttggaaaataattgaatatgtgttatttttggtatttttccaaacatgtttccttacttgttattttctaaatctgtatatgaatttatttgaactaagtaatttatttctatttattgatatttgtggtgtcaaaatgaacaacccacaccccaatcctcatcttttacatgcttttgcaaataaactctatagtgtgaagatgtctcctggtaagagcatcagttcacacttactcatgttgaacttgaagttttagaaagcaaatctgctggaaattgatttatcaaaagagcaatgggttcaattcattctcaacagccttccacctgagtataatggatttgttctatcatacatgatcaacaattttaactcatctgacacagacaagctggacgcagaattgcatgcttatgaacggactttgccatctgtaaggagggctccctccagttttgcaaacaagggcaaaaggaaagttgaagaaattgaggatgatgcttctcacaatgctgcttctttgagttcaattttgaatgctagaatcgaaattgaactagcaattgaaacaattaaagaacaactgagcaaacatactcttctgtgttctcactatggagagaagggacatttggaatccagatgtcccagacttctgaaccattggaacgaaggtaacgcttgtgtttttgaatcatgcattttagagaatgataaatccatttggattgttgattctggatctgctaaccatgtttgttcttcattgcagctgcttgaaacttgggattacttaaatccagaggagctgaagctcaaagttgggaatggcgaattagtatcggtccaggctaggggaaaagcttgtctcaagtttcagaataaatttttgcttttagacaatgttttgtttatttcaaattttagtagaaacttgattnnnnnnnnatgtttacaaacacaattttatcaattaaatttttgagttctatttgtactatttatcgtaatggcatttaattatgtgttgctcacatggaacaagagatttatgttttaagaccggatataccaattgcacttaataacaaacttttcaacataactaaacctagaaaccataaacaaaaaaagattaaaataacccggttgaagtgtaatgatcatacgtttataatgcattgtatgtgataataataatgaaacatatctctattcaaaaaaaaaaataatgaaacatatctatggcatttacgactaggtcatataggctatgatagacttcataagttaatcaaagatggtcatttgaaaaatgtcaccttaggtgaattaccagtttgtgaatcttgcctagaaggtaaagtgactaagcgttctttctctgtaaagggagagcatgccaaagagcctctaaatgtaaaagccagaggaatttatgagtattttgtcactttcattgactatttctttacctaatgcaaaagaaatcttaaacttctgaaaagtttcaggattttcatgctttgctcaaaaccaattaggtaaaacatta

SEQ ID NO: 31613 - DNA, 4720 bp, Cannabis sativa
  modified_base (3703)..(3703): a, c, t, g, unknown or other
gagatcaaaattcagcttctttatgggccaaaaaggcttgtgttctagctctaccaacaagtgacaagccttcccatacaccaatccatatggggacacacccaagggtgttttgtatgttgtccggtaggcccaaagagagtcatctagcctttgagaccaatctttacgattaggattaacaactttttcaagcacacccttgatctctcggttagaaagttcagcttgcccgttggttccaggatgataagtagtagcaatcttatgtttgacattgtatttagctaacaataagaattttattcacaaaatgagtaccttcatcgcttattaatgcccgtggtgttccaaagcgagtgaaaacgtgcttttggagaaacttcatcaccacttttgaatcattagtgggacatgctaatgattcaacccatttagagacataatccactgccaacaagatgtataaattgccataagatggtggaaatggccccatgaaatcaattccccaaacatcaaaaagttccacttcaagaatgcaattcaatggcatttcatttcttgttgaaatattaccaactctttgacaacgatcataacttcttgcaaaattgtgcgcatccttgaaaatggaaggccaatagtaccccaattggaaaacatttgcagccgttctttgtccaccaaagtgtccaccatagggagatgaatgaaaatgtgctaggatgcttgtgacttcctcttccggcacacaatgtcgcattattcggtctgcacactgcctatacaagaaaggctcatcccaacagtagaatctgacatcatgaaagaatttttttagttgctgcctattcaaatcaggaggctgcaatccactcactaagtaatttacaaaattagcataccaaggagtgtttgcttgggctacaacaagcagctgctcatccagaagtttcttgaattttcattttcgcttccttctcaccacttgtttccaaccgagataagtggtcagccacttggttctccgtcccttatctatcttgaatttctagatcaaactcttgaagaagtaaaacccagtgaatgagtcttggcttcgcatctttcttggcatttagatatttgatggctgaatggtcggtgtagacaatcaccttcgttcccacaagataagatcggaacttgtcaaaagcaaatactacagccagcaactcctttttggtggttgagtaatgaatttgagcatcgatgagagtcttgcttgcatagtaaatagaataaaaaatcttacctcttcgctgcccaagtaccacaccaatagaaaaatcactagcatcacacatcaactcaaaaggcaaccaccaatttggagctataataattgggttcatcaacaatgcctttttcaaagtcacaaaagcatcatgacattccttggtgaactcaaatggtcgattttattccaacaacgaacaaagaggctttgaaatcttcgaaaaatccttgatgaaccttctatagaacctcgcatgtgcaagaaagcttctaatacccttgattgtggtaggaggcaatagcttttcaatgacttccaacttagccttgtccacctcaatacccttgtgagaaaccttatgaccaaaactatgccttcttttaccataaaatggcatttctcccaatttagtaccaagtttgtttcttcacacctcttcaacaccttctccaagttagccaaacaagtgtcaaaagatttcccgaatactgaaaaaatcatccataaagatctcaagaatgctttctgccatatctgaaaaaattgccatcatgcacctttggaaagtggcgggatcatttcatagtccaaatagcatcctcctaaaggcaaaggtaccatatggacaagtgaaggttgttttctcttggtcctccggcgctatagaaatttgattgtagcccgaataaccatcaagaaagtaatagaactctttacccgccaaacgatccaacatttggtcaataaatgacagcgggaaatgatcctttcgagtcgcattattcagcttctgatagtccatgcacaccctccaaccggtcacgattctagtaggaatcagttcattgttcttattagccaccaccgtgactcctcctttcttaggcacacattgaacatggctaacccatgaactatctgaaatcgggtatacaataccataatcctgccactttatcacttcttttctcaccacttccttcataacaagattcaacctttgttgatgctcaatgaagttactatagccagcttctaagagtatcttgtgcgtgcaaattgttggactaatgccttttatgtctgccatagtccacccaattgctcctttatgttttttaacacttctagcaataaacctttagattcggcttctaaacatgctgatataattattggtagcatttcattctcccccaaataagcgtattttaggtgacttggcaaaggtttaacctctagctttggtggttcttggatggaagattttggaggcttgaaattgctttccttcaactctaaagactcaaaaggtctcttgaatttggggaaaggctgcactggctctacccaagcaacttgggtttcttcatcgttactcatagcttcaagctcttcaagagaacttattaacctttcatctttccacacttccttgtgaaatttttcagccacaatagaatcaattacactcaaacgggagcattcttcaatctcatccagaaatctcatagcattgaacacattaaaagtgactttttgatcattcactctcatagtgagttgcccatttcgaacatcaatcaaggttctcctggtcgcaaggaatggccgccccaaaataataggaacatctttatcgacttcataatcaagaataatgataatcggccggaaaaataaacttatcaacttgtacaaacacatcttcaatttttccctccggatgagccatggaacgatccgctaattgcaaagtgacggtggttggtcttgcttctccaattcccaacttcctaaaaatagacatagacatgagattaatactagctcccaaatctcaaagagctcttccaacatctcgacccccaatagaaattggcattgtaaagttgcccaaatctttcaatttaggtggaatttcacttttcaacatagcactacaaccctctgtcaaagcaactgtttcaaactcgccaagcctcattttctttatcaaaatatccttcacaaactttacataagttagcattttctccaaagcttccactaatggtatgttgatgtggagctgctgcagaacatcaagaaatctccaaaattgaccatcatcttgctgcttcttgaatcattgagaaaatgatggaggtggctgttgcaaagacttttctacagtagaatgctgacctgatgctgtaacttctgggggaatttcagcagctgaaattgctgggtttttttattcgtttccccctctttttggattgaagagcgctccttgctgccttttgttgcagcctcatttgactcaaaaaaatttccacttcttaaagctaccgctaatgctcttttccatctcttcttgggttttcggtgtcactaggcaaagtgccttatggtctattcttcaaatcattggcnaattgccccaattgaacttcaagattccgaagagaggttgcctggctttgaattatagcgtcattcttggccatataatctctcattaaactctccaaggaacttgtttgagagctttgaggttggtgtggttgttaaggtcttggttgttgagaaaatctcggtggaaatagttgttttccttgtgattgtgctccacttccacttgctccttgacctccccatgaaaaatttggatgattcttccatgctcaattgtaggagtttgagtatggattgttgttgcggttaaaattttggttacccacatagcaaaccaaagctggatttgaagggcaattctcaaaagtatgcccatcaccacaatacacacaagaaatttctaccctttgaatggcagcagctggttgtacacttcctcccatattcatgttcttcaaaatgttggtcattgaggccatttgagcggtttgagtagtcaacgcatctacttcaagaacacccgctacttttcggcttgtaggagctctattagttgaccattgatagttgtcactagctatcctttccaaaatctcaaaggcttcattgtaagacttggaaagaatggctccattagctgaagcgtccaacaccatcctagaggctgcatgagaccattataaaatgtctctggttggatagaatgaggaataccatggtgtgggcacttcctcaacaactccttcaacctttcccatgcttcactagtggtctcatcttccaattgttgaaaggacatgatctcactttgaaactttcatttcttgttggaggaaaatactttttcaagaatattttagccaaatcattccacgttgtcactcaatcaggaggaagagtattaagccatgctctagcccgatccctcaaggaaaatgggaacaatttcaacctttaagcctcttcacttactccttgtagcttgaaagaatcactcacctccaaaaatgagcgaatatggagatgaggatcttc

SEQ ID NO: 31614 - DNA, 1234 bp, Cannabis sativa
actcatagcatacgtagggattgactgaaccatagcttttaagagaatttcttttcccccaatagaaaaaagtttgtcattccaagcatgtaataatttccatatcctttctttaatttctgcaaacaaaagcttcttatcttgctccgaataagctggaagacccaagtatttttcatgacaatcactaactggcattcccaaaatttgactgaaagaattcctcattgtaactggagtatttggtgaaaaagacaaaactgacttgtcttcattgagaagttgacctgaggctcgatggtaaacatcaagagctcttttaatagcacctgaggaacgatcattagcttggcaaaagagcagactatcatcagcgaacagcaaatgtgtaattggaggggaccttcgagagatagctaatccttgtagcctaccaatagattcctcgtattgcagcaacctagaaaggccttccgaacatatcaagaataaataaggagataaaggatcaccttgtcgtaggccacgttctggagtaaccgatcctttaacttcaccattgatgaggaaagaaaaggatgtagtgtgaaggcaagtcataataagagtaatccagcgaatattgaaccccattttacccatcacagctgcaatgtaagaccattcaactcgatcaaaagctttactcatatcgagttttaaagcagcataacctttattccctcttgttctatgcttcaaactatgcaccatttcaaaagccactaaaacattatcagtaatttgtctattgggcaagaaagcactctgagattcggagataacatttggtagaacatgctttagccaaagtgcaatcattttagaaaccaacttgtaaataacattacacagactaattggccgacagtccttcattgtcttctgtttcttcattttgggaatgagagtgataagagttttattaatagctgatgggttacctccatgatttagaacatgtaaaacaacttgtgaaaccaaagagcccacgacttcccagttatgttgataaaacatggcagacataccatccaaactgggactcttatctgcgcccatagtttgtaaagcagaaaaaacatcctccttagtgaactcttggagtagaaaatcattatgagcatcagtaacagtagttggaatggtagatagaacatgattaagtgctcaatgatcctcatcagaagcttta

SEQ ID NO: 31615 - DNA, 1164 bp, Cannabis sativa
ataactgtttctttgttgatctgattgataccattgtgaatgagaaaaagttgatagaagatcctctggaactgagtttaattgaagatgatttgacggagcaagagggaaaggaggtaatggagtacgttaaatggcttgattcctatgggccattgaacagaaagtattacgaagagctgggagtagtaccaaaagagcttgtgccatctactgagaaacctccagagcttgagttgaaggtgctccctaatcatctacgatatagtgtcagcttcactttctgatgtggagactgatagattgcttagagtactttgggcgcacaaaaaggccattgcatggacactgggtgatgtaaagggaatcagtctttcaactgtgatgcatcgaattttgatggaagaaaacgccaaaccaacaattgatgcacaacgtagactcagtccacgtatgaaagaagttgtcagaaaggaagtggtcaagtggttagatgctggagtggcctaccccatctcagatagtaaatgggttagtccggtgcaagtagtcccaaagaaaggggggatgaaagtaataaaaaattcgaagaacgaattaattcccacaagaacagttactggttggaggatttgtattgattatagaaaactcaacaaagcaacccgaaaagatcattttcctttgcccttcattgatcagatgctagaccggttggcggggcaagaatattactgtttcttagatggctactctagatatcatctaatagccatagcacctgaggatcaggaaaagactactttcacatgtccttatggtacttttgcttttagaagaatgccattcggattatgtaacgctcctgctacatttcaaaggtgtatgatggctatcttttcggacttaattgaatcatgcattgagatctttatggatgatttctcggtctttggttcttcatttgatcattgcctagagaatttggagaaggtgttaatcagatgcgaaaagtcaaacttggtcctaaactgggagaagtgtcaatttatggtaacagaagggatagtcttgggacacaagatctcaaaagcatggattgaggtggacaaagctaaggtgtcaacaatagagaatttgctacctccagtttctgtaaaagga

SEQ ID NO: 31616 - DNA, 3645 bp, Cannabis sativa
  modified_base (117)..(119): a, c, t, g, unknown or other
catgggccttggttcttggtagccaattttctatcctcttgttacttcggtaagagtttggctctatagagatataaaaactttgtatgaagctgaatggtgagtctattatagtcnnntgttcaacttaagactcaacatggtttggttcctacaaggaactctgccttagccgtagactggtacgcaacccctataggagctctatctagttcttttttggctatgcgattctagtaggggcttggactcatgcatgcgaaaaagatctcatatccggactcaaggctttcatgttccatctttggctataggccctctgttttcaaacactactattatttagccttaaagccatctatgacaagcatatgatcgtcctggctatcttcttatggccttgccttgacacatatgggttcgaatttactttgtcaagttgaagtatggctgcaagacttagaggcaagtttagtagcttattttaagccttaaaatttctctacataagttcattatgccagttcaatgcgttgaatggtataggcgcccctcaagcgaccatgccggcaagactcttggtcacttgttatctaccaagtttcattgactttgcctgggttcttccttggggtggtgtccatagtatgcatgtggagctgaaagagtaactttaagaagttaatcttgtgagtaagtggtttagacacggtcgatctaacgtgtaacaaaagcttatagcctagtgttcgcttctgaaatcacgtagtggctacccttacgtaacttagcaaagtagaggccaacgttgaagaatactgggagaccacgtcaagaaggccgtgggtactagcacttttatgggttcctgcatgatgaaacattagagtaacttaattgagaagttggccagtgagagtacttatcgagatgttccctattttagtgtttggatagaagttctatatttacgttctcatcgtactcgctagacttgtatgcacctttattgttatcttgtaacatggtgtggaccttctatgtttggtttgaatatgctttttgtagaggatttgctgtccatgaatattcttcagggagtaattctcttgcaaagaatttctttcctcgacctatttgttgatgggcttggtaactccttgtgtgcagtcatgctactttgagttgtcttggtctctttttctttcccttttgtaaggagatccttttagcaagatgttgtgtacttcttggtcactgtagaccagaagtataagagcaggttgttggtgaatcgggttggctagggcaagacgatgtggccaaccatattgaggaagcattgcttgggtgattagatgaggccatggcaagccagcatgtggaggtggtggtcggccagaatgtggattctatggctggctagcttactgaggacatggtcagccagccttctaaagcctggttgatgctgtagtttgatcccgcctgcattcgattgactttgcccgtggcataattgctatagagcctttgtgcactcctgttaatagctatacatcttcttttgatgaaatgccccttggtggtgttggaataccacttttgtgtgttatgctatcaggatacgacaccttgtagttgtcctcctagtccctactttatggcaaggtctttgtttggacgtatgttgctgtaggtgtatccatgttagttgtctagcttgtctgttacttttgaaacaataagggcttagttctttgaagaactgagaaggtaccaagtttgccttggttgtcaaggtcaagctggctagttgagcgagtatgtcagctattgtgccgtcattgggggcttgccttctagtatagcctttgaacaatccttacagctccagtaggctatcatcttcttatattgagctgcatattcacctaggacaccacctacaactatctgagagtcgtggtacatgtcaaggtggttagcccacgcttcgtgagctagcttggggccagaatttggaccttcatgttcaaccttgttattagaagctttgtatctaaccttgttacctcgtgccttagttgcccccaggtgccttgggggtcatgcttgctttagggaagtggtcaatgcacctctcggattcttgctctcgcttcttctctggctcctacttttctcttatactctaagagatttggggagatacgattagccatgaagctgataagagttgtgcctttggtggccatacctggttgtgagttgcttttatgttggctgagtctcaatggttcacttaagtagttggtatgatgatccacgtttttgtaaaacctactgtaactgccaatcggtgtacacctttttgaaaggtgtatctggaagtatggccttagctttctagaagccaagagtaagttgtgggtcaacttctccataagtgggaaccgactttaagtgtcaatcagtctcttgctggtgtagtatatagggtgtggtacacgtcttcttctcttgtaagggcagcactcatagcatgttctatgactgctaggtgcacgcctaactgttctttgtcttgggaatttggcaacacaggtggctaagccaatctgtttcttcagcttctagaatgttgtttcacattcctttgtccactcaaatgtgttgtctcttctacttcatggtgaagaagggtacacatttgtctgtatacttggacacacgtcttcttagtgagtagtccgccctatttggctttgtacttccttgattgttgtgggcaacttcatgttcaaaagggcttggatcttgtctgggtttgagcttcttcatgttgtagctggggatgattttgaaattttatgtataggtcctccatatgcccccaacccttttggacttgacaagcacatcggccacgcacgcctccatattgcgcctgataagatcattgaacatcatgaatcttttctgatcctgatctgatctgattgatgcatcttctattttctggctttggacaaggccaagttgtaatagggacgggcagattattggtcttctttcaacatgctacccctgccttgctgcaaatttcagggaaggtggtagatgttttacgccttcaacatgtatagggctagcaagcttatcatggtgttgaaagctgagggaatgtcgattacgacaacctgtaccatcaaagttctagtggttggattttctccaacaatgaggggtaatgtgatatacctaacgggtgtgatgcgttggccaaagaggccatacatcacttgattgcagagcaccaagtcagcgagttggagcctcatcttttcatgtgttgattttgttgcatttatattcttgatttgtgacaagggagtcgttttgtaggaaactgccttgggcaggatctcctttccgagagagagagagagagagtatgggctctccaagcttttgttgcttaaagcctcgttctttgcctgccaggaagtcccttttatgctcgtgatggagtgtctgagcatagcgctctcagggctttgttggtgtcactaataatatggggtccgttaatgatgacccctaagtgtcctgccatctgaggtttgggcagagttggtggta

SEQ ID NO: 31617 - DNA, 4359 bp, Cannabis sativa
  modified_base (1873)..(1876): a, c, t, g, unknown or other
cagcaggcaataggtctataatcaacgacttgtttttatactgtgtctttctttctttttttttttttaattttatcaatcatcttttttatttatttatttatgaatgattttaatttatgttatataaatgatcttttcatttttttttatataaatgatcttttcattttttttttataaatcatcttttttgtattattttttttcttttttttttatgaataattttttaatatttttataaatgatttttttgtattatgttattttgtaattataaaattgctttgtgatgtatttacgttaatttttagtattatactttaatgcacaattgttaaatgtaatgtattttcttttggtatgaatgacttgacatttcttttttacaatttttttacaaattctttttttttgtatttttttttttacaatttttgtacaacaatttctgtaagtttttttagggttattttcatttatatacaagtaaatgtagattattataaaaaatatacaaaaaaataataattatatacttctatacaattttataaatatttagaaataaacagatatatttataattttaacttgttcattactttgaattgagtttttttttttttttttaaaaaaaaataaatgtataaaaactaaatatgtaaatataaaaattaatatttatattttaatatattactataagaaaatatgtttattaaaacttaataaaaaatttaaaaaagaatatacaaaaacattaacaaattttgcttatactttacaaacagtgtatatatatatatatattttattaaatatttgattagtattattaatatttataatgctattattaatcgagtatatttattatgataataaatataatttgtttattaaaaagtcataataattttaaaactgaaacatttaagtttatttatttatttgaataaaaactttttttttgtttattaaaaggtcataaataattgtaaaatgtaacacttatgctcataattagttattgaaaaatgtgtttaaaaaataaacgaaattataattaaatgtgaccttatgtattaacactatatttatattattattaataatgttaattaattattaatctaatctatttgttatgataatctttgtaatgatatattttttggaccaaatttgtgatcatatgtacatattaggtgtttattaaaatgtaaatacaaatttataaataaaacatgtatgtttattattattttttatataagttcatatgtttgttatttatttttatcatatatagtttgtatttaaaatttagattatgtttctcatagttaatgttaacgcagattttcattaaccaataatgagccttttttttcgtaataaatttaatacagattaataagtataataattataatgtataaatataagaataacaccaggaattttacgtgcttttgcagttaaatctacatactccacaaatctatcttattcaagatatttttgagtatttaatacaatatacaattaattgtctgttccaaaggattttcctcccattctctgagggattctgcccctatttataggaatataggttgacagatatttacatttaaaatttaaaatacataaccatctaatgaaacgtgagaatgatcacgtttcattttaacacgtgtggataacaattgataactgcataactgattatcattcttatctttaaagacggttgatgatgatttggacgaaagcatctcgctttgcctgtagattgttggacacttgcatgccttccagcaatagcatgagcatcactgtactgagcaaacttaagaactgnnnnttgaccataaggcctcacagactggacaatcatgcctacatgtttccaagttgttacacttagttattataattttagaaaatacgctatgtgttcaacaactgattcgtctcgtcaatacatccttatgtgtagcgaggtggatgtctcgctatatattgcccatagttgattcgaataattttacttaaaaatgaatcttgttcttgggactgcgtatttcgaggcaagttagtgtcttgtcaatacagatattaatagtctgtgtattcttgtctcgcctaagactatgcagtcagcgagtttatgaatatactctattaattctatatttaatgcgttatttatttttgcattaaatgatataatcattattatatatggtggttcgtattccacttgattgatacgtgtcactctctgaagtgcagccgaattttgggtataacaattgccccttaaaaagttcttatttttttaaaaaagtactttttaaataattacaaagggtatgtttttcttaacccaatttgaataattgcatgcttttgaatttggcgattcataatttcgaggcacattagcattgaatgacccatcttttccaattctcccgtgttcctgtctgttagatctctatttttttaatctaacagtgatcaatctcaaggtataaaaactgaaaagaaaccattattccaccatttctgctatcataaaaccttcgagcttttctataaacaaccctatttctgattcctcaaaatcatgcatgccctctatgtcattgacctatttcctacgaatctcttcagacttaatcttcaatctcagaatacatcacacaactcatttcaactcctgtcacagagctcttcatcgtgtgaaaactcatttttgaatagtaagtgatttattcctttctttctggtcttttctttttcctatgttatgatccctatttgtaattaactgcatctttgttcactttctttcattttagtgatttcgatttaatttctcgggtaattcttagggttttaatcagagggaaaacttaggtttattccaatcgtaagcttctagttttaaacaaatttctttcagaaattaggattgttctttttacagaaatatcccaatctggtttcgaaatttcaactccagaattcttagaaatagaatgctctaaggacgtaactctaccatttaaacaaaaaatcccaaaacctcaatcctttcttgaataaatgatgcaaagattagggaccatttaataaaaaccaaccaggacaaagttgctagtcactataggaaattttcacaagagataactgagggtaaatgtcgtttcttgcgagatgcagcctagccaaaacctcaatttttatcttctattcccctcgcgacaccaatatttttacccaaagtcactgttgttttttcatcaggtgaccttgactttgacattatgtctactaggcctcgtaagtcaaagaccccacaagatcccatgtcacattcgaagctgaacttatcaagtccaaggtcagatccattggagcatatgtcggtggcatattaaatcttgtggtattgaacaaaggcacgaatgtcgtattagatctatcgcccctggggaattcagctgtttccctcctgaaagggtacttcgcaaggagtgtggtggtactaacactagttgctcgtcaggaataggcgcttagagactcaaacaaagcgaggctggagcagttctcctcttgagagattattttaaagaattctgtaattaccttggaggtgctctctttcagctgaatccaatttcttacagaatttatgcaagtctaaaggttttatatcatattttaggacgggagtgccccactcctcctaatattgtatatttttattctgttaaggtagtccccacgaggaagcattgtgcaggaggcttttattacctcagcacccatacaaacgaccgcaagatcattgtgaggttaccaaataagatttagtttaaagaagatttcttctagacaactgttctttctccaatcgacatgactgcatttcgcatcatatgtgagttatttaagtctcaaaaacttgcttttgagttttcttttgatttatgttttttgaagtcgcttacttattatgcttgatgtgtttacagcagtttccaagagactagctccaactctagaaatggcctagcatcgtaaaatcatgctaagccttccatttgagttgcgataggcaaacttcttatgtaacaaggagaacttgaggacggtcggccatcttggctcggaagagcttacttgtgactataaagttcccaagtattctttgtgggaaaaaggtccctgctgttgggttttgtgtcctaaataaaacccatttcagtataataagatttactaattaataaagataaaaaattattttatgttgcatagttcaaatgattt

SEQ ID NO: 31618 - DNA, 1281 bp, Cannabis sativa
cggtcactcacctcaacaattttaacacgataatgcgagtgaacaatgtaacgaataacttacggtgtattttattccctacctcgctagttgaggcagcgagcagctggttcaacaaatttatccatcattcaatcacctcttgggaacagttgtctaaagacttcaagaaacagttccaggccgcaagagacaggcgacctgaagcgtcttctcttactaacataaagcagcagccaggcgagacacttaaggcctacttaagtcattttagtacagctgttgcaagggttagaaacttgaacgatagtatccagcttattgcccttcaaccagggatcacgactgatctctcaactgctggaggcaagttgtgggatgacttgcaggatcacccagtgaaaaacatcagcgagttcaatgagagggctcaggtgtttgttcgaaaagaggaaggaaggaaagagatgaagttgttaaagactggctcgagaagtaaacccagcactacctcgacaagtaccgtctcaacaaaggctaacaatccaggaggctctaagaggaaagatgactctaaggaatcagccaaagacaagaatagaagaagcacgacaagtacctgccaattacactatttatatcgagcttaatgaaactcgggaaaatatctatctcgcacatgagcacagggttgcatttcgtaaacctgagcccatgaggcatgtgagacataaaagagatgcaacaaaattttgtaaaattcacaaggacattgggcatacgacagaagaatgtcttcagttgaaagacgagatagaaagccttatctcgcgaggttacttcttgcaatatgtgaaacaacaaggcgatggatagaaccatccaaatctgcctaataacccaagcaaccagggattacaacctcctcctcttgaaggagatgacattttggttatctcaggagggccacatcttgctagagaaagtaacatggtccaaaagagatatgtaaaggaagttaagaacaaacagtcagtttttgctccaaaatcttcaaagaaagctaagactgaggaacctccaattgtgttctcgaaggaggatgcaaagcatgtgagataccctcatgtcgacccactagtgattacaatccagctcgccaacgaaaggataaaaagggtgctggtggataacgggagttcagtaaatatcctttataaggatacattgaagaaaatggcactggaaaaagcaaaattaaaactttaattgagctccctt

SEQ ID NO: 31619 - DNA, 2278 bp, Cannabis sativa
  modified_base (304)..(305): a, c, t, g, unknown or other
  modified_base (662)..(666): a, c, t, g, unknown or other
  modified_base (692)..(696): a, c, t, g, unknown or other
tatatatatatattttattgtatggtatatgatttttgttatgtatagtatatcatttatttaagatgttatttagtttccgttttattatatatttattgtatataaatcttttcctatgtatacatattttaatagtggtatatttttttagtattaatttaatattgttataatttctttgtggtatataattttattactacgacatattaattttcagcgataccatatattaaatattattatatgttagaaaaattgataatggatcgaagattaatttgtatataatatagaacannataataatatataataattatgtatgcgtacttgattgatccatagcaattaccacgactcatgggttgaacagtaagaaaatctttgtggctactttaaaaatgacagtgctttgatatatagcatctcaacatactgatctaatttaacatttgataatgaactatgacaatcatattgtttttcaatcaacctaaattctaataaaactaataaaagttaatgtaaacccaaataaaagtctattatatatttaatgatctaatatatttattcgtttttttacaatatattaatatgcaataataaaaatattatatagcttaggtgacatttggtaacacttttgtttttannnnnttgtttttaaattttttaatcacaannnnnaaaataaaatttttgtttttaaaattatatttttgagaaacaaactacttttatttttaaattttaaaaataaaaaataaaagtgtgttctgtaaattttatttttatttttatttgttaattttatttaagtcgggttcagggctgggtctgaagtcgagaccgggggcgagtccaagttcgaggtctggtttgggttcggtttctaaggtctaagttggggtcggagtttaaaatattgattaaaaaaatgtttaaaaaatttgaaagtaatttttttttttgtttttgaaatttaaattcttaattaattattgaaaagtaaaaataattttatagaacatgattttagaaaatattttaacttttctaattttaaaaacaaaataattgattgcgtgcaccatttgattaaagaacactcactatccgtgtgctcaacccaattcacccgattgagagaggaagggacgaaccgaaggttcaatattggctgggaattgtgtagaaaaaaagtagcagaattaagggggcattttggcagacgcgcttgtgtagtcgtattgcagggatctgtggtttgttttactaacttgcttggtaatggggttctcactttgatgttcatctttaggaatacgttattcgataaacaaagttctctttgttcttccgatctttagagaagtattaagggtggcttgggatactttcgttcatcatttttgtagcgatcatcatgtctcgagtcctttcccctgtggtgggcctgtttgttgtcggtgaagcaaccaaatgtctcatctcgttcattcgaggttaggaatgggagcctatgaatccatggagtaactagactccatgaattggatatgtagtttaggtaatgccaaggttgattcgccaaacagaaggaagagggtgctaaaagccccaacccctagtttaattattatatatatttttttagaaaaataataggtcgtaaatatatttatataatttttattagttaatttatcatatttggttattttgttaatttttctaaaaataggacacttttattaatttttaaatttaaggtcattttacatcaagtcctatagagatttgagtatctatatgtatctattgaatcaaggtcctctattaaaaattggtgtcccatactatattaaaccaattaagcttttccacatcaactaatctaatttatttatattaaatatgttaactaattttgttgactcaactataggttaatttttttataaataaaaatttagttgacatgtcaaatttgattagtttaacacattatagaatactactttttaacaggagtgtatttgcatgtgtattgtattatttgtagatatatctattctatataaaatgtggttatataaccgaattttaggtttatgagaaattactgggtgactttctttttaaataaaaaaaaataacaaattattagatgttgtggtcggcatctacgtagttagttaaacctaaatataattaatacaattaataataaatttattcatattgtttattttttttattaaaaatt

SEQ ID NO: 31620 - DNA, 2101 bp, Cannabis sativa
accctgtaaggagcccctggctgttgtcctgtgtttatggtcctccgtacttccatgaaaagaagaaattttggtctagcttgatggttaatggtgaaaagtttggtggcccttggttaatcttgggtgatgtaaattttgtgctgagcaactcagagcgggttgggtccaaggggagggatcaatttatccccttcattttggaattagttaaccgtcatgcgctggttgatttgcctattaaaggggatatcatgacttgggacaatcatagagacggtgctaatcacattaagtcagccctggacaaagctcttgttaataatggatggttgcaactctttcctaagacggtcgttcggtcgctcacaacctgtaattctgaccatcgacccctctttattaataccgatttttctgtccccaacgctagaaggcctttccgatttgaagcttggtggacaagggaccctcgtagctccttggtggtggatcaagcgtgggggtctgtttcccatgtttgggccccagctagagtgtttaagaaagttggtgcgacccgcttggccctaagtcactggaaccgggtgcaatttggcaagttggattcttgcatctctaagttggagggtcaattacaagctatccaaaatcttcctgctggtgacagaagttgggctacggaggttgaggtgaggaatgagcttaatgaggctttaaggcggaaagcaacttactggcaacagagatccaggatttcttggattagagatggtgataagtgtactaattttttcttcatttccgccacgattcgtaatagaagaaactcggttgatagtatcctgaacaaggatggtgtgtggataactgatagggaagagattggtaacgagtttactgggtttctgggtgacattttcaaaaacccgcctcagggccctctggaaaacttagattacttaatccatgatcatctctcccctttggagcaatctgagcttgaggtgatcccaagtcacgaggaaattagacaaacgctgttctctatgggaagcttgaaggctccgggtccggatggtatgtcagttctcttcttcaaacactattggaactctgtgggacaagacttttgtgatgcagttgttgactttttccagtcagggagtatgcatagaggctttaatgctacaaatattactctcattcctaaggtcaccaaccctaaaaaagtatctcaattcagacctatctctttgtgcaatgtgatttataaggtgatctcgaaaatcattgcaaatagaatcagagggttcctgcccagattgatttgtcctactcaagcagcttttgtcccgggccggaacatccaagataataatgttttaatccaggagatcatacattccttcaagaggaaaaaagggaaagaggggttttttgcaatcaaaattgacctggtcaaggcgtacgataaactaagttggcaatttattgaccacgttttgcgtagtttcaaggcccctgacaagttctgccactgggtacgccaatgtatcacaacaacttccttcaacctttttctcaatggaaggaaatttaacagtttgaccccagagtgtggcatcaggcaaggagaccccctatctccgtacatctttatctgggctgctgaaatcctctcgcgcatccttgagcacgcccttgataacggtaccataagtggtataaagctaagtagagagggccccaaactctcccatctcttctttgccgatgatctgatcttggttggcagggcaaaccttgaagaagcaaggggtatgtggcattgcctggaaaagttttgtgactggtctggccagagaattaataagctcaaaacctccattttctttagcagtaacactagtgatggtatgaaacgaggcatcaggcaggctctgggattgaactgtgaaatgggtaacataaactatttgggcctcccactctttagatcccgccaaaaggatgcggattttaacttcatccttgataacctggtgtcaaaactccatgggtggaaattaaaatcgttatcgaaggctggtcgtgccac

SEQ ID NO: 31621 - DNA, 1326 bp, Cannabis sativa
  modified_base (1277)..(1282): a, c, t, g, unknown or other
acggaaaaactgttttcagtacaaattttattattccgcattgaattaataacttaattagataattaaactgggaatattaaaatacggaatttcaaaaattataataaattcaacaaataatctaggttttttcaatttctaacaataaatatcaactttcaaaattgttttatttcttaatatattttattaatttatattataggattagataaatgactatatatttactttattaaaatacattttgtttaaataacataaattttgatagttagttaatttgttttcaatagtaatttagggttgtgacaaccctaaatttttgaaattagggtgtattattttatatttttattaaatataaattgaataaaatcttttaaccattttttcttatttgttgcatgttcgtctgtttgtttatttaaattttattttttaaaagcagacctattatttatttaatttaaatgactatgagtaacttattgatggatccaatgatccaaatcaaccatagttaattatcaataaatcaaataaatagtttttgcaggtaattttataattttctttcatttgtgttaaacctagtaacatggtagggcacatcctgatcaatgcttatgtgagcctatatgtttgttattgttcttagatacatataggaaaccatttatttttggatgtataatttgactaagttcctaaaaataaaatgatcactttgatagtttcatttaggcttagttagtattaggcttatttaactaataaattatttacttaaaggttaaattcttcttttttggaccttgtgtgagagttagggggccatactagtaatgggtaccacatactgaacctaattcttcctcacattaaccaccccatttgtaaagacccatttaccttatataaataattatataagacttattatattagtttaacaaattaaaaattgattagtaacataattaatttttaaaataaatgaaattaatttttcattagattattttaatattaatttagagaaacacacttagcttaatgaaataaatgatgtatgttatttctagtaaattaatttttattttttaagtatttaattaaacagaaaaaatatatttaagtaaaaattaattcttaattaactttagatgaacttaaattagaatattttattaatttagaattaataattaagttaatttatttcaatattcttaattatataattctattttaatacatttaattaaatnnnnnnttatatttaagttggaaatttattaatttcagatcaacttaaat

SEQ ID NO: 31622 - DNA, 2613 bp, Cannabis sativa
caaccactatcaaaatatcacattggagaagcaacacttttatcaaaaaatctagcaagatattttcctttgtgtaggagcattatgtttcttttgaaaatttttcaaaatactaaaatattttgatttgaacatattttgcatggtgaaatatttaggtcaaatatgccccttaatgccacaaaagtgacaaattggaatgatccatcttacctgagaacttacccttttcgattttaccagagcttttgcttctgcagatgacacatttgcagcagcgaaccttgtatttgcagcaacaggaaaattcggtggaacactggatgtcatgaattttatttttccaaaactttcactaccattagaacctaggccagcagagcctttttaacctgtattctaaatcaaaaaaatagaagatccgttaaagcatttaaacatttttcttgagattttcaagttcgttctttcccaaattaatttcttcatttattaaacaaactacagtctcatattaattatcaattcaatagatacaatttaatgagacaatttttaatttattttagatattgatctattttcagaagtaacctgtatccacttttcacacataaccttgtaagactcagccaaggattcttcacagaattgagattcatctgagtaagaatcttctttttcaattgtattattcaatcataccaatctttcttttacatgtgaatcgtaaacaatcctagaagaaattgaagttagtacaacattattagaattatcttccactgttagttttatcatcactccatgtgaattagaaacttttcttattcctttttagagtatttgcacattcagtctgaatatgacaaaaaccttcacatttcttgcactaaattccctttttattagtcacagaaggtttttaaaaagtatttccttttgaaaatttcgatgaaatctttttattacccatcttttttatatatttctgaaagttcctagttaataaagtaatttcatcatcacattcatcatcagatttttctttttagcaaattttaaagcaatacttttacctctatcagttgtggatttgtgtttgtctttctactttatttgatgatttaattcaaaagtacgcaaggaacccattaactcttccaccttcatcttgccaaaatcttttgcttctttcatagccaagagtttagtgtcaaacctttttagaagaactctaacaatttttctgacagcatagattcatcaagcttttcaccaagaggaaaatattcattagctatatcagacaatctttcataaaactcagacaaagtttcattttcagacattttaagatcatgaaatttggtttgaaacacaatagaactagaacgcctaacatcagaagtttcttcaaattgaatttgaaggatttgcaaagcatccttagcagattcacaagatgatataagcttaataaaacattcaactactccatcaaatatagcatgtaaagctttattattgtaagcagataacttatcgtctttaataggccatttaagtacaggttttaactttgaattacctttgaaatctaccataacaggaggagaccatcctgaaagaattattctccatgctttctcatcttcagacttgataaaagtactcattctaactgtaatgaccgcattttagattatggattagtaaaggcaattagcgttaattattgatatttttataattatgcatgaatttattagattgtgggtcccattaatagaagtgggcactagagttataatttataatttgtattatataagatttttgtaatttttgctcggcgacgatggaaaatacgatggatggctgtttgcgtcaaatgggtaagtctagaagttttttcttagtgggataaatatttgagataaatagaatatcaggtttatgcggggttgtggttttggaccatcctacccctaggcttaaaataacttaaatttaatgaacaagagaattttggtcattttattattgagttttggtggccattttgtggattgatacctagccatttagtgatatcctgaagtaagtgaattgttgggcataattcgtttagagttaattaagaaaaatcaagaaaatgaagagaaaagttatctctctctttgttcagctcccacaagactggaaggaaccagcaaccttctcttttaatttgaggatcatcaagaatcaagggtgattcaagttgaggtataccttagaaactcttattttgtgaattccttaagttttagttgtgtagttttgagttgaagtggttgttatggttaaatttatttatagtttgatttctaagttttatttgagttggatttaagttctagctgctggttttgttgacttttgtggagaatgattaagtttgagttcgaaaactcaaacttgagtcattaatggcatatttgtgctctttgtgtatttttggattttattgcttggattatgttgtttaaggtcattataggtgttctggaaggttttgtaaggtttgggcatgttttgagcgagattcaaattgtttgggaaaagcta

SEQ ID NO: 31623 - DNA, 2770 bp, Cannabis sativa
  modified_base (27)..(43): a, c, t, g, unknown or other
ttttaatttgataaataatataaaaannnnnnnnnnnnnnnnntttttttttttttttgtgttgaaagctttagagtttctccaactatgtgtgagaataatgatgtagattaattttctaaggtcgtgttgtatcctatcttaaatttggctcatgttaaaaaaatgttaaatttaatataaaatataataatttaatctttataaaaaataaaataaaaaatataatgctatgctaaatttaacacatcaatatatttattttttattggtgatttaattttatatatatatataaaaggaaacttatgcgcgtgtgtaatctgtactattcatatatcagtaatttgtggtgtttatattacacttaataacgactaaaccttaaccttatggtagtatgaggacaagagtattaaaagcagatcccttgatttcttagaaactttttaaaaactctgtactcaccccaccatcaacttgaaccttttttataggtaaattaaactgtttctctaccaagcttttaaactgaatgaacaacttaaatgactgagatttgattgtcatgagaaacatccgcgaaaatcttctaaagtcatcaacaaatacggtatcgtatttgtaattatctttggaagctatatgtgatggcccccatacatcagtatggatgagttctaagggttggctggctcaagcattggacaaagaaaagggaagcctgtgatttttcccttgttgacaagcattataaaactataatgttttaagagaatgaggaatgttagtccgagttagagtttttgtaagtatggcaagtgaaggatgaccaagtttgcaatgacacaaaataatgtcaataaaaagattaaaattatacacagtagcattgaatttgagaaaatgagaagagattgttgttttattcatagcaatggaattacatgattcctaagaacatgactgattacaagaatgataggtacaatgttgtgacattaaaggacagttggactcaactaaatgacattgaattaaagttcttaagaagctcgagccatcatccccaagaagatatagaccatccttaagtgtccatttgacaagaattgctcccatttgtttgtccttgacaaaacaacaagttttatgaaattcaagaaaaacattgttatcattagtaagtttgaaaacagtaataagatttttagtgatgaaagggacttgtaaaacagagtttaaatgcaaggaaaatggacttttagaaggaataaaaactttaccaatataaaaaataacaagcttcttaccatcacccacatctattgtttcttgactagagtaagggattgtgttatcgagagaagcttagatatggtgagtagcaccagtatcaacataccagtcttgatcatcagcaaaattaagaataatttgagcaacaaaagcagcaggctcataattaagaaactgctcagtaagatgagcttgaggttgagtattgctagcaacagatttaggtgtgatccaatatatttttatcaaacctgtaatgacaagtgggagtaacgtgaccataacgcatacagacctgacataatgacttgttaggattttgagatcgatgatattgagatggattattatttcgagtgggaaatcttgatgaagattcagatgttgttcctctgccagcattgttgtaaggcctagacccacaatttcttgatccaaaggtgagattcgctgctatctttgtagagagatccatcatagttgtgtgacgttcaagtcttgtttcataagacatcaacaaggcttgaacctcctcaagagagaaattatcacttcgagatgtgataccgaaaaccacataatcgaactcaagtccaagaccatttaacagatgaagaaccagatcaatatcaaaaatttgatgaccagcaatagcaaaataaggacttaaatcttgtcaacatagtcagagatcgattgattacctttatgcaaataggataattgactcttgagctgcaaaaattaagccttcaattgacttgagaacttttgttccaacgctttccagacaacatttgagctggtatatcatgccacagtaccaagaataccttctattgaagatttgagctaagaaaagagctgatctttcttgcttgataagcaggatttggagcaccgttgactagaagtcatggtgaagacagatcagtaagaagaatttcattaagatcgtggctaatcaccgttggaagcacttgaaatttccaagctaggaagtttgtgcgatcaagcttgatcgtaagagaagaagtcagagagtgagagaatgtattccaagattacattgctgtagcatgcggaggagcaccaagatcagatataccagatgaggacgaattgttgccagaagaagccattggcagaggtctgtggctctgataccatgaagattgagaaataagagagaacatagcggaagaacacacaaggaatacttgaaactcttacctcaataatgaggtccaatcctttatttataccgcaaaagaatgaacaggatacaaggcaagaattatgttatggaaaacagaaatcgttagtgcagtagctaaactaagcaactaactaaaacaaactaactaatttggtccaaaatatgaatcaatgctatattttaggggtgtacatcaaaccgctcaaactgtccgcaccgtacgcaccgcaaaaaaaaatgcggtttgaaatt

SEQ ID NO: 31624 - DNA, 1581 bp, Cannabis sativa
aacaaacgtttatatttgacctagagtggaggcaaaatatagtctttcacatgctattatttgatatatcaattgtaaatgattattatatcatttgctttaattattgttacttttttttaaatgctcaattttatgaattaaagttaaaacaaaagattaaatatttcatgaaaaggaaaaaaaaaaaataattaaataacattccataatgaaacaccaccactcacagtttaattacaatgtatatgatgcaatttaatttaattttatcaaattactaatactataattaatgatcttgtattatcaaacaataataatatataataaaattacaatattatttatataatataaaaggcttattattatatattaattaaatggctaatctatttttatcgttaattaagaatttctataacaactttctattatgcagacctttcatattccttatcctaatagtattaattaaaaaaaatggaataaataaagttgtcatgtatacaaaagagacactccatggtaaattatattctttataataacttttgaaattccataacatatctaaataaatttaaatacttaatccataatatttaaataaatcaagagacataattgtattacacacactaaataacaaacatgtcttttgaattttctatgagaactaaaaatattggtgcaattaataatgatgataaaaataacaaaaatattaaataaataagagaatggagaaaaaattaaaaaaataaataaataataattcataatcttattattaaagaaaaagaatactattaatattaacaaagaatactattaatttaccgaggacatttcaacttctaacgaggacttttgtcctcgttagagaccctgttttttgtagtgaacaaaatgaattaaaaacatgtaccacaaataataatagaataagttaaaaaaaaataatgtaatgaataaacaaaatagagaaaatattaatcttatgatggagtactattactgaatgataaaaaaaaactgaaaaaaaataatattaattaaatatcttatataaattattatatcttcttattttgcccactcaattttaagtgaataattattattactgataattaataattaaaataaaagcataagtaaaataacttagttttaaaaaatcacaaaaaaaaaaaagaaaaataacaattctcaaaatataaaatgtcttctcacctcttaattgtatctataaatataattatatcacatatttaaaataaatgagtcaacctaatttattaaaaatatacatatatacatataatattatggatatttaaagtatcatgaaatagagaatatataatcaaacaaaaatagaaattagaaaataaataatttagagatataattgtataagaaaaaaaaacattatagagggatagttttttaatataaattcaaaaataactatatatattattttattattaatatatttattatattttgttttgtgatattttattgacaaataaaaaaattggtctacacaacaaaattaaattataa

SEQ ID NO: 31625 - DNA, 1388 bp, Cannabis sativa
aaatataattgggtatatataagtcataacaaaataatatttattacttacttataaaaaattaagagcaacaaggtataagttttctaaaatttaaagcaaacattatgtaaaaaaaaattaaagaacatgtgctatcttaaaataaaagaaaaaataattaaaaaaagtcttaatatatgaaatattattagaaaaactaaaaagagtattgtgaaacttcttcctaattcttcattggttcaactgtttgaatggtgaattgattctacctaaaaagagtctctttctaaaaactcgcgagttgagctttcaattatctgagaaaaaaccacatcataatattgtgatgtaagaaaaagtagttatcaagtggtggtgagatatgaactttgaggtgataacatgcagtcataccagtcgaataacctaatgcgacttgagctagcttcattaagtgatgtctcacctatttgtctttgagctgtaaaaacaagtaatgtagatgttaaaactttaacaacgccccctctcagttatacattgggaagaagagtatatacatccttaccttcacaaacagagagaagttctttgaaatggttccagtccctcagtgtttcctctgtcagcctttcaacgatggtccctctctatcataaatggtaaagtcagtacaaaattaacacatagaaagttaaacatcacatgacaaaatgattttcacctccggatcatcgagaagtctaagagtgttatttgcacttagtaggtctctcacagattcattgtagatctccatggcagaaagcttcataacataatctctttcattatgctacattaaaaattattgttgtgtaagaaaacaaaagtccaaatccgagaaaaggcgaagaccatttatattgtatacaacttaccttctctacgtaatcatatatatatctgctactgtatactcagtgataccactcatggtgtatgtctttctactgcttgtttgtccttatgcgaaaatgctcactgcaaagcgagtttcataaaataagcttatctattttcaataactatgttcaagaaaagttcatgacacaatagcaaacggaaaaaaatcaaaaggaaaaaggtgctatgtgcttgtcctgtactcaccattaaccaccgacaactgaaagagcaacattcttggctccttcttgatacacctgccttgtggaagaatcaaagctaaatactctgtctattaccagaagaagaaaagtcagataagaaattcccattgttgaaaaattgtcaaacaaaaaacatcttataattgagtttatatccaatctaaccagcaatgtggtgtactttcagtagaccaattgagaaaaagagagaga

SEQ ID NO: 31626 - DNA, 2885 bp, Cannabis sativa
tgcattcaataatagtattgaatattcgtgcgtgtcgtgctggcctgacttatatttagccgtgcttttttaaaaaaaataggttttgtcatgtggtgcacaaatatgattcattgagtgccgtgccaacatttttaaaggataggcccgacacagcccgtaggtcatgtattttcaacgttaaacaaattggctctattttgttggatgcgcctaagcctcgcatccttatgttatgttgccaaatcattttcaaaaagtgttgctaaagaggttgtacatttgtctgccttttgaaggcgttgaatgaaccaagtttgcagtgtgaacttgatgaattcagcaaaagtagttagtggatatttattgaatgtttttgtcacactgttgaagcttttgacagcattgctgctcattatgttttatcgatcgcctggacaataaggaccagcacagttttcaaatcctatacccttaacatatgcagaaatggcaggatccatctctctaagctttttaaattgtctatcacaatccatctacgaccatgagtatggtacttgatatattttggagggacatgcatcaatctttaacttggcgttcacattcataagaatgttgtgatagcacgtccagtggcatgcgtcaagaaaaacaagtggtacaacatgttcaatgctttgatgcatattcaacacaaacattaagttttcaaccacctcaatcgcttccctcaacttatgcatgaaatatgtccaagagtcattattctcactctcaactattcccaaagcaattagaaacaattgattggttgaattgtatacacaataactaacattatgccaccacacttcgtcttcaagaatataccgtcaataactatcacgtgacgataaaaagtaaattccccctacatgcacaaagtgagacaaaacaacacttgaatcggtcctcctctacaacaatgtcagtaatggtactcaaattctcttgttgtagcatgtacacgtatctagctagcttcctataggaaactgcctgcgtacctgtaatatatgtaaatatcttcttcttgcatatccacgccttcacatagctcattaggatcccatagctatcaaacatatccctcattatgtctatatccttatacttagttccatcttgggtgtactttccttaataaggtaggcaaccacccacggtgctacttgacaataatcagaatatttagtatctagaatacaagtatgttcgttgtgatatacgataacctcaaagttgtcacaacgcatcttcttcttccccctcaatattcatttacaatttagatccttgcatgtaatgtacaacacattggtgttggaattcttcactgtccactaaaaattgttattcagtgcaaacatacccactacttgtcttaattctttcttatctttgtacaaattgtcaagttgtatcgcccatgattgcttactttgtaaagaagtagtcaggacatgattttcctgtatatcttcctctgtccacataagagctttgaacttggtacaaacttcaaatgaaaagaacagtgcactacgaggagcatattcttctgatcttccttatcgaggtgtattgtgattttcattacgggatcttcattgtctctctccacaatggttgcttggtgcacaatccaacctcacagaagatacctctacggcttcatcaactactaactcatcttcgtcatccctattcaaatctataataggaccattgttgtagtagggagtatcgaactcatcaaactaaccaaatcctgactcttcttggtgttcacctatattgataggaacctcctcattcacaccaacaacaatatcttttttagggataaaagtcacaaccatgctacgagggggcagtagattcgcaaccctttttaccttcatcataaataatggcataaattatatgtttgacattatttctgtcttctttaagacactcttagttgacgtgatttcttaataacctcgggcgaaaccaattggcctttcatgtacaacatacaaatctctaatttcaaatcatacgtcaatgattcaacctccaactcttcgtataaaatatcgcacattttctgtaaggttgtgtcaattttaaccgtcaacatcatacttcctacgctttcataaacctaattaaaaccctcaatgctcccaacaacatcatacaatacaactaaaaacacacccaatcttataattcaatacaaaccaaaagaaaatgaattagaataacacaaataacaaaaccactgaggcaaaactatcgagaacacattgaggacccatcgataaaccatcgtgaagtatagtctagatcaaattatatacatttattgagatagtatcgacatgtcatcgataacatggtaaaaaaaattaaaatatagaattatgtagaagctcaagaaaccatcaaaaacctagtgtaaaactgtagataaagctcttccctgatcttgctttgttaaaattgagaacccttcgattacatatcgttaaacaatcaaaaacaatatgaaaacccataaaacacaccaaaaaatgaaatctcgcgatttcaaagaaaacaaaaatatcaaaatcaaaccaatacaaacgacaatcacatagataacacaaaatgaactatacttttacaattgtttaacaaaatattttaaaaaatacttacccattattccacatggtcccgccttcgatcgacagtggaggagctacaacaacaggcgtcaagtggtcctctggagttcgtggtggttggaatagtgagtttggaggctattattaaggtggtgaattttgagagagagagagaga

SEQ ID NO: 31627 - DNA, 1210 bp, Cannabis sativa
ctatgccggacaaggggatgaccatcctatggagattgatccccatattggtgttctttcggagatgcctcctaacactgctactagtcaaagtttctccagttattggtttggccaaaactgaaggtgtcacaagatgtttttttatgcctttaaaagcttccttgcattcttccgtccattcaaacttcttattgccttgcaaaacattaaagaatggaagacatttatctgttgactttgaaatgaatctgtttgatgctgccattcttcctatcaaggcctggacttcttttggcttcgttggtaaaggcatctcgattagggccttgatcttttctaaattggcttcaattcctctcgcattaactatgaaaccaagaaattttatagaggagactccaaaagagcaattcttcgggttaagcttcatattgtatttttaaagtatcccaaagcactcttcaaggtccctcgtatgatcttcactctttatcgactttaccaacatatcattgacaaagacttccatatttcgtccaatctgtttttcgaacatcccattcaccagtcgttgatacgtcgccccagcattttttaaaccaaatggcataactttataacaatagtctaaaatttattacaaagcttgtgttttcttgatcagggacatgcattttgatctggttatatccatagtacacgcctataaatgacataagctcgtgtcctgtggttgcattcactaactggtcaatccttggtagtggaaaacaatcttttggacatgccttattctaatttgaaaaatcaatacaagttctctaggtgctgtttagtttcgggagaagaatagaatttgaaatccacaagggataaaaggcctcacgtataaagtcatttgtcaataatttgtcaacctcttctttaagtaccccttgtctctcggagtctaagggtctctgtttttgtctttttgttgggtaattagggtcgacatttaaatgatgacaaataaccttacggtcaatccctatcatatctgaatggcttcaggtgaattgatcatgggttgccttcagaaagttaattaactactattttagattttcatccaaattcttcccaataaatacacatttagtgggattgtttggatctaaaacaacctcttccagctcttcagttggttttagctggttattctcgt

SEQ ID NO: 31628 - DNA, 3096 bp, Cannabis sativa
gaaccgctcttccgatctacttgtgagtagatctaagatcctggtaaataatttccaacaatactcaacaacaaggtgttgactatttcgaaacttatgctcccgtagcaaaattcaacacactcaaattacttctctctctctcgctgccattaaccaatggcaccttcaccatatggacataaacaacgcatttcttcatggtgacctccatgaagaaatctatatgaaattaccccaaggttacaaaccgaaaggccctctccctccaaatgttttctgcaaattgcagaagagcatatatgggctcaaacaatcatctagacaatggtatgccaagctcagtacagccttaatcaaacaaggttttactcaatcacagaatgacaactccctgttcataaaacgctcccatgacacatttcttggcttacttatatacgttgacgacatcatagtcgccaccaacaacactacaacccttaattccttcatatcaactctcgacagtcacttcaaattgaaagatcttggccctcttcgatttttcttaggccttgaaatagctcgttgcaaaaatagaatctctgtaagtcaaagatcctttaccttacaattattacaagacagtggcaagcttggtaccaaaccggttttaactctaatggaacccaatacaaaactcaacaataaaaccggcaacctactcaccaaccctacacaatacagaagtctcatagggaagctaatatatctcacaattacaagacctgacatttcttttacagtcaataaacttagccaatatcttcaagcaccacgggaccctcatttacaagcagccaaccgcatcctccaatacttaaaaggcactccaggtcaaggacttttcttccatacaacatcaccttcaccactcagacttcaagcctttgcagatgcggattggggagcatgtttagatacaagaagatccatctctggctactgcattttcctaggaaattctctcatatcctggaaatcgaaaaagcaataaacggtgtcaaggtcatctgctgaagccgagtacagagccatggccaacactgcatgtgaactcacctggcttcattccatcatcaatgaactcggcatcaacatccaacttccctccaccctgttctgtgacaaccaagcagcacttcacatatcagaaaatccagtctaccacgagcgcaccaaacacgtcgagatagactgccaccttatccgtgaaaagatcaacattggtacaatcaaaacaaatcatgttccacccaaatccaacatcgcagacatcatgatgaagcatctgcttccagcacacttctctgctcttatttccaagatgagtgtgaaaaatttttacacttcattttgaagggggctcttagaccgttattctgttattttccgttattttttgttacttgatgtactgcattatataaactcagcaaaacacaattgtaccaattcaatgaaaacttttcactcattcaataaaaatctctctgtttcctctctgtctttcttctaataagtcaatagcaaccattttcactactatgaacaaaaacaacagctgtgttttagaacaaaatagaaaacaagaaaacccaagttaattgctatcaattgatactcagtaatttgtatcagccccataaaaacacatgaacggttaattcttttccaaaaaaaaaaacaaatagaaatggaaaaagtaaaatattcgataaattttgagaacttatgaactatttctctcaaatctaatgcaattgaaacgtcggagtctttaaaaaaaaatcatgaatgccttgagttgttttcaatgaaatacatttatgtctttaaaaaaaatcatgaatgccttgagttgtttccaatgaaatacatttatgtatctaaagtttggaatagagagaaagagattttgaagcttacaacaacaagtttttaaatttttaaataaagtttgaaatacatttatgtatctaaagtttggaatacgttcagtaatattttatttttaaattttttcatcagaaaaataaaaaaaattaattttaattttaaaaataaaaatacgttttatgattttttttttttttttgttttttaattttaaaaatagaaaacataagtatattctgtaaattttatttttatttttatttattgattttatttaaatttggttaggggcctgggtctaggtctgaggtctgtctagattttaaggtctaggttatattgattaagaaaaaaaattgtcaataaatttagaaagtaattttttaaaaaaaaaaataattcttaattaaaaaattaaaaagtaaaaataattttaaatatttttctaatttaaaaaataaaaaactgattaaaaaaatattacaaacgtatccttatttaatcaagtatgatatatggaatagaaataacaatgtcttaattatatgatcttctctctttttttttttttttttttttgaataataatgagaattcattttatcaaatcttccaaaactatggaagcaattacactaggtaaatcaacactactaaaagtacggtcatcctctataagagaagatcgtgtcaatgcatgcgcaaccttattagcagaccgctttacaaaattaaaagagacattatcaacattggccaacaaagccttacaatctgaaattatacggccataaggagagaccatacttttattcctctgtaaatctaaaacaactctaagaccatcagactccacaatcacacttgaccattcattatctttaattcaactcaaagcctcttttattccaatagcttcaacttcgtgaggttgtaatgcaccaaccttcttcaatgtcttggcttgaatgaccgtaccagtcgcattccgagccgccaagccaacaccaaagtttctctcattagtaaaaagtgctccatcaacattaactttgattataaaaaaaattggggggtccaatgctcaattcgaacccgattgggttcattaggagatcctaactcttgattttgagcattataccaatcaacaaa

SEQ ID NO: 31629 - DNA, 1917 bp, Cannabis sativa
gatgaggtctcgaattctaccaaagaacccaaaaggaccaagactaaggccttcatgaggaaatcctcgaaccaccttattattgatgctggtaaatctcccgaggtagggaatcaggtctctactgcaggagttgtcgaggagcaacctacctggttggcacaccaggtcaagttttctggttgtcgtccagagatggttctccttgagccctcctgcccctaccccttgaagttgggactaaggggtcataactgagctcgcaacatgccaccaacagttggcgcaacctcttaacactctggtctcgcgattgggatcctactattcgtagaaataccgaggatctgaccaaaagaagtcatgagcttcttcatcaggtcaatcttcgtacttctttgttctttctcttccctactttgcctttcttactaacttcagtttgtccttttcctcaggcttcttttctcgcttacactacacatcaccggtcgtctcaaagggtcaagatgctagagactgagcttcgccaaattaaggaacatagggacattgtagccaagaagtggagcgatgctgaagctgaggtttctcacactaaggatgaagtagaaaagcaacatcgagatgaccaacaaaaaatcaaagaactcgagaattcagttaaatttctccaagctgatctaaaaaacaagttgatcatgatcaaaagcataagaattggaggctggaaccaaatagagggtcaacaatactggtaggaggaccatctatcagatttggtcagccaaccccgagttggactttagttttttgggtgataaggtcgaaaccatgcttgcttattgcaagaagactcataaggaagaattttgtgaggaagaagaggttgacacagaacaagaaaatccctccaagtcccctataataatgtagacttggtcttgtaattatgtttatttattttttttgtttaggaaaatggcctaatggtttgccccttgtggcacttttgtgaagacaagtttgtgaagttagttggccaacttagcttttatttatcttaaatacctcgtacatttacattcgaacttaatatatttatgtttgcttacatttttattcacaatgtaaacaattatattttgaacaaatgaagagtactcttggtctttccattgctcgtatttttcctatttatgtagttagtaatctactatgtgcgcaagcagtttattatctcccaggcttttgatttgcgagcagttatcaattctacctcgcgataacaattataatctgttttaagcaaacttgaatatactatttaatgatttatcaccttgaatgatttgtcactttgtatattcttgattgcttatatgaatagttagatcatctattcatacaatagatttaagtacttttatcaagacaccttgatgtctcattaataatttagtatattgtgtgtgccgctaatattcagcctcgcacgcgagttatgggatattatttataacttttgattttcctttctcgtcagaaaggttttaaacacaaaaaagtaatgatggtttgatccctttctcgtcagaaaggtttgatctaaaactttaaaaaaaattcaaaaaaatttgaaagttgtgggtttgcacaatatcgtgtatttgcagataaatttcagttaatcatacacatatgccccttaagtaattttaaagagtaacactttgtaattactttaaaaaggaaatgattaactttattcttaactgaagtttaaaatattacatcagcaatggaagttactgttgggctttgtgccctaaataaaactctattttaatgtaatatttcctattcaattatcaataaagaaacaaatttattttcattacttatttagtatgttat

SEQ ID NO: 31630 - DNA, 6051 bp, Cannabis sativa
atagataggggacccagacctaggaaatgggaccccgaactaggatcagaacttggatcaggattcgggacctaacctcaaacccaaacctggacctaggacagccctcgggacctgggatccgggactcgatgcttgcacctgactcgtagtcggtgtcaggatctaggacttagactagaacccaaacccaaactcgatctcaaaccaggtctcgggcacattccaagacccagacccacacttgggaaccaaaatcgaaacttgaattggaaccggactaggatcttggaacgggaccgggacctggacccagacccgaacccagaaccggacccagcctcgaaccctaaccgagatcgaaccccagatctaaacctcatcccaaacccaaatcaggacccgaacccagactcggacccaaactcgacccgaacccgtacgctgtgacatgaaactggaaccgagactagtagccgattgggaccctggaacaggaccaggaccaggacctggagcaagacccaaaactttcaccggactaggacccagactcggacaaagatccaccctgggattgtggtccaaagcctgaatccaaacccaaaccgagactcaggacccaaacccagacttgaatttaaagctgaacattgaacattactcgagacctagaattgggatcgagacccagaactggaccctagtctcggtcccggacctagacccagacccagaccaagacctgggacataagctgaaactagactaggacccgtgattgggatccaaatcttgtcccgggatctaagaatcgggcgttggacaacacccatagtcgatttctttatttgggactcagacaagaacccaaagctggaccacgacctccagacccagacttgggacccgaaacacaaacttgaacaagaacatgaccaggacgttggaatagggccacgaccgtgaccaagacctggacctggaccgggacccggaacgagaccggaacccagcctctgaactcagtctcgaaccttgtcccgaacccagactaggattgagactggaacgtgaacccgaaaccgaactcgggactcgatcccgaaccaagacctagcgcctgacctaaactaggatttagacctggacatggacacgaagccagacctggacccgaaaacttacccagacccaaaccgggatcgaaacacgagacctagacccggacccgaatgcagacccatacccgaacttgggacacagacctatacccgaacttagacccagactcagagcgggatcccaaaaacccattacggaaatgagaattggaactatgactaggacccagacctgagaccagaactgaacccaaaccataactgacttagaccagaacctgaaccgtgaccttgactaggactgagatctgagacctgggaccccaaccttgaccgggactcggactgggacctggacctggacctgacctggtcttaaaccctcgccgagttctgagacccacgacccagaccaggatctagaccctaacaaggacccgaacctaaacccagaccaagacgtggacagagacctggacccgaacctagaccgggacctgaactaaaaccaagactcatgacccgaacctgaacctgaacctggacccagaccaggacctaggaaccggacatggatgggggacctagaccagggacttaggccccaaaacccagacctagatctaaatcaaggatttgaaccccaaccaggaccttacttggacccgggaatctgaagtcggacctagacccagacccaaaacctgccccggacaaaaaccaggttaggaatctagacacgaactcataccatgattaaagcttaacctggacccgaaccaaaaatcaaacttgaatccgggacccgaactcagacccagacccagaataagacccaaacttagatctgcacccggacccgcacttgctcccagagtgggatcgaaacccaagacttagacccggaacaaaacccagactcaaatcaagatcgaaacttgggactcggaccaaaacttggacccagaccaaggaccctaacccacacccgaagctcgattagaacctagaccgagatttggacccgaaccaaaactcggaccaagactcgaaccccaatccaaactcgaagaccgactcaaactcgaacccaaactcgaactcggaatcgcaattggagctggaactggactaggactaggaccaggacccagacccaaaacccaaacccaaataaaaacataaaccgagattcaaacccgaactgcgactaggacccaaacccgaacctagacagcgacccaaacccaaactagaactgggaactaggcccataaacgggatagggaccttggcaacggaggtaggaccaggacccaagacctaacaccagacctggacttaaacataggacccagctcgtgacccaacacccgaaaaggaaccagaacgcgacccgagatcgggatcaggatctggactcggggcttggatcgaacccgtagtcagtgtctagattagggacccaaccccggaccagaaacaaaaccagggcccgaaccagaatccagacccaaacccaaacccagtcccagactaaaacctggacccgaacccgtaccctgtgacccgaaattggaaacgaactggaagtagaccgggaagcgggaactggaccggaaccaggacttggacctggacctagaaccgtaactggactttgacctatacccaaaaacataaccagaccaggacctggactcccacctagacatagacctgaactgggacctggacccgaatcccaacccaaaccaggactcggtgctgaacctggagcccaactcaaaccaaaacatggaacagacttgggacagaaaattggggccaggacttagaaccgcaccctagtctcgatcccgaaccaaaactcggaccttggaccaaagacctgaaccagaaccagaccgagacacgtgatagggatccagatctaggacttaaaccagggcccgaacaggaccgcgagaataggacccttaaacaagagtacgatcgtgaccaggacccggacacagacctagaacaaaactcaaacctagatccaaacccaaagcaagaccggaactagggcccaaacatggtcgtgtacccagactgggatctagacccggacccgaacccagaccggacctagacttgggacttgatccctgacatagactcagacttagatagggatccagatatgaacctgggctcgaacctagagcaagacccagactaggatcaaaagtcgggccctagatctagaccgagaccctgaccaagacccaaacctggactcgtaccagaaacctgtacatagacttggacccaaacccagacccagaccgggatcgagaccatgaccctgacccagacccaaactcggacctggactaagaccttgacccagacccagacccataccggaacccaaacactaaatcgaaattaaaactgggactaggacccaaacccagacctagacctaggcctcgaaacctagacccagatcaaaactcgggacatggacccgaaccaggaccaagactagaacccagatctagacccagaccgagatcaaaacccgaacctagacttggaccaggacttgaaccccgacacggtcctagactcatacctggaatggggacctacacccgggacactggcatcagaactgggactgagacccaagaccttaccccagacccggaccttgacctaggacccggactgagactttggacccaaagtggaactagactgggacccgagaccgtagtcagtgtttcgacccggggcttagacctgatccgtagtcagtgtttcgacctgggacccatacctagactcaaatctagacccagactcaaacccagacccagtcctagacccaaacctgtacctgagacctgggtttgagtgcaagtctgggtttgagtctgggaactagaatctgactaggacccaaacctaaacacagactcgaatcaaaactcagatcgagactagggacagaactcgaacccagacacggacttggatccaggccgagacctaggacccggacagggattggggactcagacctggacccaggacccaaacctagattggggacctaaacacaaaattaggaacagaatcgggacgtaggacttggataaggaccccagacccgtccccggtctaggtcctagacccgcacccagacacggacacagactaagacccagtatccgaatcaaaacaagaccaggaccaaagattgggatttggatcttgacccacgactcgaggattggacccaacccgtagtcgatgtctagatctcggaatcgtatcaagacccaaacctggaaccatttcaagactaggataaaaacccaaactcgaacccgagacttgaaatcagaacaagaaccggaattaggaccctagaacaggaattagaccaggacccaaaacacgatctagacgtggaaccgaacatggactgggacccagacccgaacttagacctagaccctgacctagacccagacccgtaccccaaacttgggtctgagttcgagtttgggtttgagtttgggaacttaaatctgactaagacctagacccagaccctgaccgggatgcggacccaaatcaaaactcaaattgggactcgagacataaacccgaacccaaacatggacttggacctagacccggacccaacacccggatcgggattggagactcagacctagaccaaggatccaaacctaaattggggactcaaactcaaaataccagaatcgggacctaagaatggaactgggacccatgacccgaccctagtctcggtcccacacccagacccggacacagaccaggacccaagatccgaattggaactagagtgggacccaagattaggatcctgatatttaccctcgactcggggcttggacccaacccgtagtcggcatctagatcttggaatcataccaacactcgaacttggaacaatttccaagccaagacccaaacccgaacttggaatcaagaccctgaaccaaacacggacccggacccagactgggatcgatactcagtcccagacccgaacctcgacccaaacttgcgacaggacttgcgacctagaacccggaccccaagacccacgatccgggacctggaccagaacctagacccgtgctagaacccagacccagacccagacccagacccaaacacggactgaaacccagatgcagacccggacccagaacaagactcgtaccataactcttactcgaactcgtgacttggacctggaccgagatcaggagtgggacccaaacctagactaggaacgagacctaaacctggacttggactagcacctagactaggatcgggacccgggacccgatacttggacttgggacttgagaatcgaactttgactagacctagacaaggccaagacccgagacaaggaccagtactgaagacggaccgggacctgcactcggactgggaccctaacctagactgggacctaggaccctaacctgaatcggagacccagacccatgactaaggacccaagaccaaaacctagacctgagacccaaaccaggacccaatgtaagagttagaacttgaacaggatctggatttggacccgggacccaggacccaagacccgaggcttggacccaacccatagtcagtgtctaaatcaaggaattaaacctcgacccggacccaaacttggaccagaacccaaacccgtgcctaaactcgaactagactcgacatgttgttgatgtttggatttgggacaacgactcgaacctgaacccaaacacggacctagacccaaaccaggacttagacacagagccacactcaaaccttaaatcataccctgtgactcaaaattgga

SEQ ID NO: 31631 - DNA, 1246 bp, Cannabis sativa
aaatcaattcttatttttatcattatttttttttattttaaaggaaaattaaattacttaattaaacaaatatttaaaagtaatataagaattaaaaactttaataaaaattatatattttattttctcattcattaaaggactaagccatcttcctaatattagtcacaattaagttatattgggtaaacccacaatatcacctatcgagttttatgacattttaaaatttgtgagctaaatttcgtggcatatcagtaatgtttggtgagtttaaaaaaattgaattcaagaagcttcttaaaatagtttaatgtgactcattcattaagttggtaattttaatacacatgtaaatttttatcatagttttagaataccactcagtgtatcgtagttttattgtaattttagaacagctaatattaggatttttaatcttaaaatttaaaatgctatcattatgatattatgtagtattgaatatattttggaatgtaaatcacaacaatgatattgatttatacctatttgaaagttgcagaaaaaatataatattttatatagactaaataagttaaaattttagtgagaactagagtaattttggcatccctaaatatttatttctcgctccgccactgaataagacggagtctatttatgtataagtcaattactttgtatttttgagatctatttaatgaatcttatccctgggcttggtcccgtgaactagtaacaatctgaaaggattgttgaaactacgtacaaaaatcttatgtattttttacttttctgcactgtttgtttttctgatttattctggagttacagaattgtcttctgtaactacagaaaaattatttcagtactaattttattattccgcatttaattgagtatttaatcaaataataaactagaaatattaaaataccaaatttgagagttatttgttacaatttttaatattgttaaaatgttcgaatgctctaacattcaaaactccaagaatggtgacacgctaaccataatgtccaagaaacctcaagaagaagaagacataatgtctcacaataggtaatacaatgtatgttatattgtgtagctgatatttgctcgtcgtaattaattcaatcctggattaaatcattggatagtaggaaagaatattctcaaatatctcagaaaatattagagattatatatttgtgtatttaggtagtgattttaacttcaattt

SEQ ID NO: 31632 - DNA, 1444 bp, Cannabis sativa
gtgattgaatactgtccacatattttcttaccaactctatatctcatagagcttcatcaagggaaaactacccttgtctcatgtgattgtattgcttgagatgttgcatgaattgagttaaaagacaacaagaaagatggcctcagaaaatcgcaacaaagaatttcaaattatcatttagtaacaaaaaaaataaaaatcttataactaaacaataaaaataatatacaggtataacttaatgataaaatttattgtgactgaaattatattgtaattatttttactcatactttatattttttaggaagaattttagtgtctttgagaagttgaaaacattctccactattatacatagctatggatttttaacagagatgaatcaagcatagccaaaaggttgccttattaacttcatgaagataacacattgactataaactacacattctcttggaaagagttacagtcaaacaaatgacgaggattgaatgttacatctctatcaacaaacaatatgcccttttcaactcccaaactttcacaaaacacacaagaccgattccccttatcaacttgaatctattccttaatctagaaagaaccttttatctttccttaaagaaaatgttgcccattcatttcatgcatatatatacatcagcagccagcacataatcccatcttaataataaaaaaaataataataacaaatcgaatacaatgttcttgttatcgagctctgggcaaggtccagaaccggtggtgatcaaggtcgagcttaatatcctcgttgtctttgttttctattttcaatgatattgctcgctcattcacatttaaattgagaaaaaagaaatacatataaacaaaaaatatagcaagagatgagaaagaacctgatggccagctctcaatgttttatagagacatttctggctaatgtctatgatctgcaacatgtatttgaatgagcacagaatcagaatagaagaaacacaaccaaaatgtctggctacaatttcagctttttttgctgatgagaatgtctaaaatttattgtttaatgaacactaacagaaaattatctatgaaatagatggtaagaaccttgccaccatcatctgcagctgtaagcaaagaagacttgaagttgcaagcaatctgcaagaacaggattatgattccatgtgtaagaattagcggaatcggatcacttaaaaataaaaattcacaaatctagctcatttttttcctctaaaattaattgtgtaagagaatgaacttaatgtctaccttatttatctcatccttattatattcataagtctccaacggcttccaagagaaggcctgcaaaataaattacctacaaacttaatagaaacaaaacatactttgttaaaataaaagaaaaaatactattatatatcacaaattc

SEQ ID NO: 31633 - DNA, 1478 bp, Cannabis sativa
aaaatcgaattgttacctaaaaaataacagcaaacaactatacctaataatattcccaaaacacatcacacataaacagattaaactattaaaaaaactaggataaaactaaaacccactgattagagacactaaacgagacatatgtttcaaaatatctaaaaaaaactagtaacacaaacaaaacataaaacacaacaaaaattaaacgaaagaaataagaaacaaactaaaatgcgaaacccacaaaaagaacaatataaaattgatcaaacaaaattaaagccctaaaaatccaaagagaaccaaacgaaattttaaaatgataaccctaaaattttagaaaccagaagaaaccaaaacgatgaaatggaaatacaagtaaatgttcaaaatggaggaaacgaaaatgaaaccgaacctcggttcgaacatcagcaccaacattaacttttttcttggaaacatcttcagccattgtttcttgcacaccgagctttgttttcttcttaggatgagctctcccacgcttcgttaatggaggagcaaaattagagtcttcctcctcaataataggacgttttcccttagctttattagctagtgatttcaaacccattttggaattttttttatgaacaagggaacgagatgaggatgaacgggtcacagtcattttaaataaagattgggaaacaaaaagaaagtgggaaaacggttatgggattggtttagtgggagttaaaaaaattttgaagaacaaaaatgagagggaaaaatggtggaggaatcgtggggagttaaggttcaacaatggaggttacttgttattttagaaaaaaaagcagaaaagaaataaaaatcaaaggaaaacaaaagaaaaaaagagagggaagtgattgagagttgattgatggttgatagggaagtcgcgcgtgtctggtgcatggatttgatgtgcatgtggtatatgtgtaataaaatatagagaaaaggtaaaaaagttgttttaaccgtgtgtaggtttattagtaataaagtgtgtaaattgtattttgggtgtaaaaatttcattatattatgtatacttatgtttttgtttgtcttgttcctctttttatatgtgtcaaaaaaaatatcattttgtcttaatatttcttttcacaatttcctatcatcttttaatatatatatttacaaatcttttaaagattataaaaaattaattagtgattctcttctaggtattgaagcctacaggttgttttttatttttttttattttttttttctttttgctaattactttttttattattattttaatgtgactcaaataaagttattttttttaataatgatggtaaatttgttaaatattctcttttttattattattattaaatattttaattttttatgtatatttttttttataaataaataaacaacatttaaattttaataaaatttaatgt

SEQ ID NO: 31634 - DNA, 1378 bp, Cannabis sativa
  modified_base (1215)..(1239): a, c, t, g, unknown or other
ttgcaatattaaatacccttaccaaacaaaaaaagatttaattaaaaattaaataaaaaaaccctaatttcttatgtcttcttcttcttcttctccgcctgtcctggaatatagatgtatttgggagttggttattatttggagggagagaaattattaaggatgattgaaatatgtgttatatttataaatagatttacttacagatacaaataatttaatatataaattattattaggtagtttcaagagttaccatcgaaaatattaatatatttcttttaaaagttcaaatattaatatttgaatgaatataagcttcatttatatttattgatgatgaaatctctaccattgttttcctgggctcgtttggctgcaaaatggattaacgaaccaaaccaactagttttttatttatttatttattatagaaaacaaagaaagactaaagagttaaagagaatttagactcttacgagttatgaagacacttttagcattttaactctattttatgtacctggtctccctcctcaaagagtaatttttggcaaacttgtttcaaaatgaaagaaaaaaatccaggaaacttatcgtaaaaggaggtatcgatctctaaacaatcattcttcgagtacccctcttctttctcaacgtagaaacccttttctcccctattcacaggtcttgcacccaaatttctcaaacagttgtcctaaatctatgcgtgtttttcttttttctttttcttttttatatcttaataaatctatgggtgtttgttatattcttactgaattcaaatataaaattcttcaatatttggtttttattcaataaagtgaattttattttaatttgtttcttttttgttatttcaaaaataaataaataattagaaaaaaaaaagaaaagaaaaggagtgtgttatttttccatccaagctattgtcaattacaattttaaccttcactcttatgccatatcaacaaataagcgagtgtctgttaaaaaacctaacagaagggggacattaatatagtggtaatatattagggagattttttgacaacccgtatattttaagggccacaagtcggtagtgacataagttcagggagtaaatttgctaattattctttttcttatattccttgggtatatatagaagatttttgcatattagttcagttattattattattattattnnnnnnnnnnnnnnnnnnnnnnnnnttattattattattttattaaaatatataatagttttaaagtaataataataataattcggttaattcaaattttagtttaaaatttattaaaggtatataatattttaattaaattaattgaaacaaaatatcaccaa

SEQ ID NO: 31635 - DNA, 1719 bp, Cannabis sativa
tagagaagtttttcttctttgggatcaacaccaggttagtgtcattaattccatgaggtaatgctttagctgcaaaaaaaactcagagaatagatgcataatatcgagacctaccgtgtcccaatgctactggtaaaacccatggcccattccattgggacctgaagctttatcgggatgcatttaaaaaagagcttgcttaatttcttcaagtgaaatcggttgtagtaaagcttcattttggtcagcagtaacagagaaattaataccattagccacagaagcacaatttgtgtcgttcgtagcataaagggataaaaaattctcagcgataatctaattcaaacctgaagtccaatctttccactcgccattgggatttttaattgaacaatctgattactgcacttacaagaacttgcggtggcatgaaaatatttgctatttttatcacccgcgtgaagctaaaactgcttcgatcgttgttttcagtagatttcttgctgagccagaatctcaaagtaaatacattgttcaccaaaaaaattcatgaagagaagtagacgtggaagccgattttagcttggccattctcctcttacttttggccaatcgctgcttgaaattccctgtgacctcatatccccattctgttaatgtggaactacataacaaaattttttcaacaaggggaagatgactatttacctcccaccagttctttacaatttgagctcacaaaggctcacgagaccaagcattctcttatcaaaaaagtcgaacagagctacactttgaaacagggtcagattcaagaagaattgtagtatgatcgaaggacgaaaaattaaagtttgttagcttagcttaaaaaaaaaatcaaaaacgagttatgagttgcaaaagctttgtctaaacttattttaatatgagtagaactccctcttccacgctcccatgtgaactggtatccacaaagttcaagctcacacaattgacagttgtggagggccaaattaaagctgtttataagagagtcaggggacgaacaacctcctttcttgccatcatatgtggtgatattgttaaaatctcctatgatgcactaggggagatttgaatcctcaactaaagttcgttgaagattccaggttgtctgacgaagagaacgatttggttcaccataaaaatcggtgagcctccatcgattcatagcagggatagaaatttcgagatcaatttggtgggccgtgaaacttaacaagtgcgcttcatcagatgacttccatttaaaagcaaggccacctttttttccttgggcttccacagtaaaataactttcaaagcccaagcgaactttaacacgatccacaacatcctttttacacattatctcacaaagaaataaaaatttggatttcttttgaacactaatgtcttcaaggaattggatggctcgtggatcccaagcccacgacaattccaacttatagtactcatggtgattggtgggcctagataccatgacccaccaaattttcattttttgaaaagccaacaacatcttgattaaaaagattattgggctcagaattatggtccacctctttgaaggttgaaatattaatctctttatgagagttattttctaccgttttctttttatggataattacaccacatactgaaattttcaattttttttatttttatattgtg

SEQ ID NO: 31636 - DNA, 1879 bp, Cannabis sativa
ttaatttgacaaagaagttaacaggaaagaagtttttgattgtttaagacgatgtttgggaagatgattatgttcagtgggtagaagtgaggaagcctttcaatggtggtgtcgaaggcagcaaaataatagtaacaacaagaaatgaaaaagtcgcagatattattcgaactgttagcacacaccatctcatagaattatcagaagactgagtgttggaaactatttgcagagcatgcatcttgtggaaatcatagaatgtttatcacaaacccaaaattagaaagtattggcagagaaatatctaaaaaatgtaacggcttgcctttagctgccaaagttcttgaaggcctcttgagatcgacgttggatattgagagatgggaacaaatagctaagaataatatttgggagctataaaaggagcaaggttcttcctgctgctttagaagtgatctattattatcttcctccacacttgaaaaggtgttttgcttattgttcaatattccctaaaggctatgaatttcaaagactggagttggtgttaatatggatggccgaaaatcttgtgcagtattcccagagcaattcgagaatggaagaagttggatgtgagtattttaatgattaagtatctatgtcacttttcattaaaacagagaccttgagaggcacgttttttgtcatgcatgatcttattgttgatttagctagaactatttgtggaaaatatagttgtttgttagagcaaaatgacgatattgataggctttagaagaagacacgtcaccttggatgtgtcatggaactttctactgataacaaggtgtctagctatgattttaaagctacacgtttgcgaacctttttaacattattgggttcaagatatccagaaataagtatttctgaggaagtactgcagaatctgctattgatgttgaaatgtttgtgagttctatcttttcgtgatcttgatatgattgagttatctaactcaattggtgaactaaaacatcttcgttatttagatctttctaacaccaagatggcgtcgctgcccgaatctgtaactattttgtacaatttacagacattgaagttagaaaactgtcatcatcttcaaatgctgcttaaagatatgcatcgtctcattaatttgagacatcttattattagtgggattatgctagaagagatgccaagtcaattaagtaaactgaaaaatctccaaatgttgacaacttttgttgcggggaaggatagtggtgctaaaatagaagagttgtcagaacttcaaactctacacggagagctttccattgagaagttagaaaatgtggccaatattacaaaagcatcagatcaagtcaatgtactagaaaagcatcaacttgaggaattgaatttcatatggaatattaattatgttggttttgaaccaaaacgtggagagggtgttcttgaaatgctttcacctaacacaatgttgaagcaactcaaaattcttaattacccagactcaaaatttccaaattgggttgggaatgattcctttagcaacattgctagcataagtctagttgggtgtaagcattgctcctatttgccaccctttgggcaacttcctgtactaaaatatctttacattttcaggattccattcggtagtgatagtaggtgctgagttttatgggaataattctacgagaaaaccattttaatcattagaaacattaagcttcagcaggatattattgtgggagcaatggcattcaatgcaaaccgaagaggcaacaacatatgggaagctcaaaacacttactatcaatgattgtcctaacttcgtcgaagattcgccttgctcccttccttc

SEQ ID NO: 31637 - DNA, 1873 bp, Cannabis sativa
caatccagtgaccaataaggacaaaaattcggttaccatgcacacacaataacataacattaataaaatgaaaaaatcccaaaaaaattacaaaaaacaaaaatcaagcaatgtacattaataaaatgaacagaaatcatatttatatcttaatggacgttgagattcaactttttctccactaaaattggtgggcggagttatagcaccaaattttttgaacagggtcggttacggtaaaataggtggaaaaacctaacttttttagtgtataggtttagatattgaaaatataaaattttaaaagaaaaatggagtgaaatggtgtagaaatgaggaagatacactactacaaaaaggggtattttcgtcggttttcaagtgactaataaagattttgcgtcggtttaaaaaattgacgtataagccgtagacgcaaattgtaatttatttgcgtcggttataaaatgacacaaaaaactattttcgtcattttataaccgtcgcaaaatatacatattttataaccgtcgcaaaatatacattcttcttttttatcttctgcgtcaatttagaaatgacgtaaaatcgttagtggcatttcgaaactatcactaaaaacatatatgtttaaaatgacacataaattgctgaaataattttttttcacctattaagtcagttataaaatggcgcatacatgtaagtaagaaaaaattgcaaatttcaatacaattttccccacctacattatcaaattttaaaagaattttatataattataaatacataataagaaaaaaactaaaaaataacatttacaaaataaaaaaacaagagtacaaaacttgtgaaataaataaaacaataactaattactcttttaccatagctatcaaaagttatgagagacaattgcaatgaaaaattattattatttttaattaaagaaaaaataagtttattgacaaaggacatttttctaggaagagtttacataaaatgattacaaataccgtgcaacacaactgaatagtttgcaatttgcatatttatatacacatgaataatgaatcattaataatgatcattgcctaacaagcttttcaattcttatcaaaacattgtttattgtactatactctcttgaatatatcataattgatagaatactgtaagtcgttggggagggatttcgtgtgggttgtgggttctgctgtggtgttcttgctgaagctagaagaaggcgaagtggggaagacgaagctcaggacttttttatataaccctatgttgtcggttattaggaaataaccgacaccataagtgcacacgtgtcagtaaaggagtacccctatggcgtcagttattccctaataactgacggcatagggttaataaatatccttcatagacgttccaacccccaactgactctaaagggtataattaatttctctacttacgatttttaccaaaaaattacctctgaatgataatttcgaactagatgggtattatcacaccctttagcttctctttttataaaatggactgaaaaacagcatctaaagacccatattgtagtagtggtattatgtgtcgtgttgtttaaattgaagctcatgtgattttctcgatcgttatctactaataaaacatcacaaaaagattaacatcatatgtaaggtcatttttaatttgatatagtagagattaataaaatcaaaattgtcattataattttttatttacttttaaaagtgatataatgggattacaatgtaatgatgattactgttgggtcccgttctttcaccttgttgggccgctacctcacgttgactcccattagtatgatattatctgcttt

SEQ ID NO: 31638 - DNA, 2107 bp, Cannabis sativa
  modified_base (663)..(669): a, c, t, g, unknown or other
cattctccacgtttcatttttatgggataatatctaataactatccaactactcttttgtatttatccttgaacggttatgttgactaagaaggttatttctctctaaatgtgagtcatcctgtctttatagaaaaaaatgctatatgcttcttcttcccgtgttcttcatcatatcgtaaagttattcgcgaggtgacaactccgtttcagatagagcgagatggatgaatgtagttatcttccacgcgtagagatatgtgggccaatgagttgtaaactccttgatatctcatcttgtacgtttttattatatactatgtttatcccgaggtggacaaatcgtctcgtaaattatatctgttaatagttattattaattcttatctcgcatatgcttacgtagtcagcgagtttgaatatttctatcaactttatttaattggaacaagttaattaaaccgcatttaataatagaactcaattattatattctttgagctgattcgtattctttttgtaggacaccactataaaaaactattacttttagtgacaactttttagtcacaatgtaatttttttgtgactaaatgtgactttagtcacgacaaattatattacttgtgactaaaatagtaaaatataatatttagttacaagnnnnnnntaatttagttttagtcacaataaacattgtgactaaaaatattgtaatttttgtgactaatatttttagtcacgaaccttttagtcacaacataggaaccataatttataattagtgctgcacatgtcagcttctaatgaatagccgaatttcgaatataatacctaccttttaaaaatgttagcacgacacggcacgattcatattttttcgtagcacagcacgcacagcccattttgcacaaacttacaacactaatatgaggtgtgaatgcatgaatcacgtggtcttgtgagtgcatgggttaattagtggtattatatattattgtacgtatttttgttgcttttttcaaaaaggaaaaaatcttatgacatttttgaagattttttacagtattatatgttgatgggatttttgaagattagttacaacatttaaaaatgtctaataatagaaaatttaatggatgcttacctatgtatgaatctaaaataaatcaagtggccatattaaattattaatataactaatcatttaaatatctatactgcaaaacatttttatttatcatttatttatctgaaaagctgcaaaaaaaaaaatgaaaattgataactcagaaaattatattgcatccaaacatcattactacctaattgagcttttttttttttttttgtcactattaaaaatcttacttaatcacaataaaatgtatgattgaatataaaaaaaattgtgactaattataaatcattattcttatattgtaactaataataatttatatctaaatattatattttaatcataaacagtttttatttgtgactaaaaatcacatttaatcataaaaaatttatgtttaatgtaactgtttttatagtgcgtaaaaactgcaaaactctatttagacacgacatacataacacaacaattttattaaaataattgtttagcatgaattcaattgttaaaataattgtatattgcttccatcaaaaataaaaataaaagctaaaaaataaaagtatcgttataaagcaccaataatacttagcatcatctagagatggcgtcttgcaatttgtataacaatatttcataataattattatatcaaattatatgaactctatatttaattgtactaataacgatataacatattaaataatattaagtatcactaatattttttagcatttatcttaaaataatggatggacaattttggtacactctttatccaaaaacaggtaataaatgtaacaaaataactcttaggttaattataaactagaatattgtcctatttatatatatatgggtgcactcgtaatcgtaatggatattactcatgaatgggtaaaattagaaaattttaagtttttatgcttaatttttctatttaattaaaaaaatctctcatttt

SEQ ID NO: 31639 - DNA, 1192 bp, Cannabis sativa
cccaacatgtacaatcttcacctgctcgctctcacggctccttagctttggccttgccctttcctacacaagaaaatagcactatgaatcgacagactcagtaagaaaaataacatataacatactaatataccgggttgtaacctggcgccactactataaattagacttttagtgacactaattagtgacccacataaaaagtgtgtgtccctaaagagttggagtatttttagtgacaaacacaaatagactctaaatgttcaatgttagtctcttgtaatgtgtgttactaaaagttatggagtgtcactaaaaggtaaaacccaaaattttctaatttttattaatttgaaaattactggcttacagtgacgcgccaggcgtgagtgggtagatgtctcctcacacacctagcgcgtcactatatcataaccctaaattaaaaataaaaaaaattaaaaactttaattacacttttaataaataaaaaaatattataaaataaaataattaaaggtggcagattttttgttcaaaaaaaaaggtggcagattttttgttcaaataaaaaaccctatcacttagcaaaaaaacccagccgttcttcttctccctttcttcgtttcaccacatgcgatccacctccaagacgacaaagcaagcctccaaaactctgaggaagacgaaccacatccaagacatcaacgaaccacctccgaaggcctattgacacagtggacaatggatggactgaaaccttctctgccatcatcgaccgaagggcctccctctccgacccccttattgatggtttaaggggtattttcttatttggctattttattctctctattctctctgatctgtgtaggtggacgacattttgaaagtcgccatggagatctcgtcgttttgcaattgctcgtggtttcgggtgggcagtcgacgatggttcttggttcgtcaagaatcatggtttcgagtgggcgatcgaagaccgtttgagtttgtggttgatggcgcatcagggttcattgtcgaagtgggaaaaaaaattgtaatctgatttttggatttttttttttttttttttttaggttctaatatttagatgtgttcatgcccatttttgggtttttattttcattttagtgttcatatcttatgttttaggtatttatgttcaaat

SEQ ID NO: 31640 - DNA, 2371 bp, Cannabis sativa
atcccacttattacctgattaactcatatataaatataaatcctaattatttaccattagacttatcgggatattacaaatgtgtgacttcgtttgattattaagtccattgtagaaaagttggacttgaaatcaatcttctatgtcatgttgatgaaactatctaagcatctccttgaatttatcccacacttcataaagttgctccatctctaattgtctgaattaagtaatttttacccttaatttaaaagtcttaaaaggtggaaaaaatttggtgaagaacttttgagcaatctcctcccttgtaagtacattaggagaaaaagattgatatcatgaacgagctcagtctctcaaagagaatgaaaagagcttgactgcttgagttcgatcatgtctggtgggactccattcatctttatcgtgtcacaattttttgagaaagtaaacaagtgggtgtttgggtcttcaaggggcaaactagagtattgattttgttgcaccatgttgagtaatataggtttcagtacaaagttgttcgcattcacttgctgtcttctcacacccaagaaatcatcattgacaaccgacctaaaatagtctctgaatttttagtttgttatagaattggcactgttagtagtgtttttgctgctgctgttgttgctgttgttgtcaaccatctttcttgatctagctcgtagttctttgatgattgactgtaatgttctttcaatttcaagatctaaaggtaatagaggtgaactacgagctttacgcatgcaccttcacaacaacaattaaaaaaaatcagtaataaaataagataaaacttagattaaaatctgatattttcttcattatattaattgaataactaaaagttcttgatcctcgacaataatgtgaaaaacttgttgtgaattatatatgtatatgcttgcaagggcacacatcgataagtaagaatagtgatcaagagatcgatatcgtctcacaaagattaaaagtaaataaagcaaataattatagagaatattacaacctaattttatctaagaaattaattttgaatgatattagaaaattaaaagaaaatagaaagaacgagaatagcaaattaaagttgaaaagaataagataaaataattgtcaaggtttcgattttatataactatgattttaatcatcaaggtgcctaatttgttcacatattttcaagaacctagagcaatattgtatctttatacttctctagagtgcggcataaaaatatgtaaatgaataatatcttataactctataccaccattatacacgaccttcattaagtctaactctagaaataattctatgttagaaatttatttatttgggaccacaattgtatatataaaatatgtgttgagtcatcatataaatgagtcaaatttatgtgatctattttggaataaaatttatgaattaagggcatgattgtcttgatttttaatgtgtggatactataaggacaatttctaattttatgagaggccaaatagaaatagtcaataaatattactaactattttattagttagtaatataacatgtaatagtctccaatttacagtatcatatattttcattctcttgaaaccccatgatcaaaagacaaaagttctaaagaaagatttcactgcaaaattagaaaatcaaacctttctaaaattaattctatggactctggtacgctttagctaattttttattctattgttaatttctcatgaattaattagggctaaatttataatatattttttcaacaacctaaatattctacctctcgatgttacaattttaaattattttggttacctaagtgaatacttatcttacactacataagttgatctaatcgatgtttgattgtttaaaaattttcttctcgagtaatatatctcacaatctagataatagccttgattaaaatcacataaagtagaaccatatataaatcataatcatggaagcaattaaaatgtagaatcacatgaagcatattggattaaactaaattttctattaaatcataaaattaaagttataattagagatctatctaaccctattaataactaagaaaactagccacacatagtgtggtttatcatctcaaaatattacttataatctgaataatattgagaaataaagaagaaagaagaagaagaatgcatgaaaactcttaaatgcttcaaattgctttcttgatttttcaaacttgtttacctctttaaagttgtattttctttctctctggttgtctctcccctctagctagttttaggctttttataggtccaaaaatgactcatagttgaat

SEQ ID NO: 31641 - DNA, 1496 bp, Cannabis sativa
aaatattctgacaattaatgtggtacagatactgatggagtatctcacctataaatatagagtctcggtccccggactttccttcgcagatctaagcttgtgtgggattgaagctcaaaaatcaatagctggaggtatttcgatccttaaattatatcgtgtatatattcgtttattctgcatttttatatacacacatacatatatttcattttatacatttaaatatctaacagttggtatcagagcagattatatatgtgtgccttgatttattttgagttttgtttattcatatatatatatatacatacgaatttgtcatttacaatataaattatatatatattttatattatataatcccgattatatatgtacattcatactcaatttattttttatatgtacatatatatatatatatattcatgtgttcatgtttattttcatatatatatataatatatatttatatacgctatatatatttcttttatatatgtttatatatttttcaataaatctataattttattaattgttattgattagaatactttattctatcagtttcatatatttttaaataataaaatcatagtatatgattttatatatacatgaatttgtatgttttccatctgtgattaagaaaatttttcattttttttttattttggtgtttattttgaatcgtttatgcattaccatattcatatcattatttatagtgatttcgttcatgaatatgatttgaataaacattaaaatctggaaattttcttgagaacccattttttggacccgaattttttttgtgaaattaaagtataagtttacatgttttcgatgcttgaaatcaatatggatcttttaatttttttcatggagatcattttagaattagtttcatgaattttggacatcggaaaataattttgtggtcgggttttgggtcgggtcgaacagacccgcatgcagaaaaatgggtcaaaacgacccgattggagaagacgaccccatatgacgtgtcatttttcatttttggcagccattgaagaaactctaaacgacgtgtcgttttttattttaagacaacagacgtttattgaaaacggcgtgttgttttttgtcgtattgggcagccttcagtcaataaaatgacgtgtcgtttttccccttgtgtcgttttcctgtgtgtgcaacccttcaagttttcaaacgacgtgtaattttgccttcagcaaaaatgacatgtcttttatttatggtagtgtatttttcaaaaaaaaaaaaaaaggaggaaacattttgaatttttatatttttatttatttatttggaatattaattattttcttaatttatgttaaatttagtcaatgaattacatttatttaattttccatttttatttaatacatatatatagtataaattgaaagtgaaaatttgttttaatttagtaatttattacatgatttatttaggca

SEQ ID NO: 31642 - DNA, 2696 bp, Cannabis sativa
  modified_base (882)..(885): a, c, t, g, unknown or other
tccaccgtggcacttaactgtgattttttgacggaggtgtgtagaccaaaacggaacgagagtttaggtagtttagccgccaaaaattcagtttttgtagttaagtgttataaaccgtaaagttcaggtggtttagccgccaatatcccaaaatatattaaggagttgatattattttgtatattccaattaggttcaagttttattttgttgttttgtaattatctttttttgttttatagttgttttcctattgtttgttaagttgttctaaagttattttttaaatgtcttagttgtttttaagttatttttttattttgttaaaataaagtatttttgtaattttaaaactttaatacagtatttttaaaaacatggtaagtaaaaatgtaagaaaaaaaaaagtgagacaataaaaatgtaaaaatgaccaaaaaaaaaaaagttttgtaagataacaaaataaaaagaagaatataacgatcatcttatagaagtgggcttggtccatgacagccactaagacatagttaacttattgggcctgaagctccagcccaaaaaaggtgatatgctcgacacattttaagtgcaaacttttttttggtcaggattttttaggtacaactacaaatcgacaaattgtacatacaatgatggattagtttttttatctgataattttctaaagtatataatacatgcacaactatctgctccaaattattactgatattatataatgtatatgtatattttaatattaatgggaaatttacatggtatattaatttttgccattttttaaaaaaaaatactatcaggcggaattttttacttttttacttttttactgtattttttttataagtttcatannnnagtatactgtgttagttttcactgatgttctactggtattttttagttgttctactgttgtttagaattgttctgttttgtattttactggtattttataaaaacacaatatttttgaaaaattttccgtgtgacagtatttttgtaaaagttaaattctataactttccctaattaattaagttgtaatatgatgttacctcaatagggctggtattatacataagcatacgctgaaattgaggctttatgatgacactggttggaggttggtctgccccaagaccgtatatgagctcactaacatctccgtattcagatagatcaggctccccctgctcaaatcaattactcacaatattaattaataataatatatagcactgatttatcaagatataaattatgatgcacttatattattttcaccaaacttagtcaaatttaatacatatttatatacaataaagtgcatttgcagtacaagacggttaataatttgaaaggtgcattaagttattataagtatttcattttcggacgaaacttaataattaatagttttttttttaagggaaaattcatattttataccgatttggtacgacaaaaaacaataaatatagtatgttagtagattgcattgataaatagttagtattagtaaggaccactttttattaaatttaacagattacttgctgacttttttttttttttggaacaaactacttactgacttcttaaaaacgaataaattttattaaaactgattttttttttataaatcacatcaaccataaaccatagtatttatctaattatcaagacatatttgatctctatcaaaaataaatatatttgatcaaactacttactattttgacgtcaataaattattagtaaattcaatgcaaccatcaattcatttctctatacatatatttatttattatactttaaagtgtcaaacattacaaaaaaaaataataataatgttaataaataatatgaagaacaattataattaattataatgtatcacatccctatataatgttaaattatcttaagatgtgaaataataatcctctttgtggacaaatatttatacagtgaaatctaaacaatttataattgagtgatataataaactttatataattttaacatcgaacaaatattatattatacggtgtagcaacaatacacgtactattatataagttatataactaacacttttgaccaatgtattagtctacacacatttatgtgtgcattgatgtgtggtgcgttattttctttagttattaacaatggttattacccactactactcatgggcaccactacattcatcgagattataattaactaataattaatgtaacatgtaagttcccttctttatatgtattttactctatcaacataaacaacagttaattgaacaataatcagcacttagttgagactttttcaaaatgtttagccggtcaataaaaaatattaaacttatgaaatacgatattaataatatgttatttctttccatctcttgattctaactaagaactaggggaaccccacatcattttctttttggcatgaattaatctcatttctctttttctttttctttttagttgcaaatgctatctcaaataataaatctaaaataaaatttagaacgaaaagaaaatgaaaaaacagatattaattagcctcatataattttagaaaattttataatgcaccctcttaaaatggatatattgatgcacccctatctgttttagcatccgaaa

SEQ ID NO: 31643 - DNA, 1231 bp, Cannabis sativa
aaagcctataccttgttagacatagaaaccaacctcatttaccattctagggatgtcacattccatgaaaacatattcccctttttttcacataaacccaacactgatgttgatttatattttccacaagcagtgattccctcacattacaacatacagcccactgtcaatattccatctgctccagttgagcatatacaaaagaaagtaccccttgtcaaaaaaacacttgctccaacagacaaaatccactgtcaatacaacacctgctacaacagagcctttaccaaatacaaaggctctaatgaccataccacttgctccaactgagcctacaaaacagaccaaacatggtcgactcataaagaaaccatctcacttggatgcttatgtttgtcacacagcctccactgcgcatcctattatactctttctttcttacgtcaagcttcatcctaaatttagagctgctgtgttagcagcctattctgaaatcgagcctcaaagttatgttaaggcatcccaattcattcattggcttaaggccatggacaccgagactcaagccctgaaaaaaaaaaaaaaaaacttggataataaccaagttaccaccaggacaaaggctatcagatgcaaatgggtatacaaagttaaatataccaaagaagaagttgttgatagattcaaagcgaggttagtagccaaaggctacaaccaacgacaaggtattgactattcccaaacctttgtacccatagcaaagtttaacaccttaaaaatcttgttagctcttgctgccatgtataattggaacattcaccaattagacatcaacaatgcatttcttcatggtgatctccatgaagaagtgtacatgaaactcctaccaggttacaaagctcccccaaattatgtttgcctcttagaaaagagcatttacggtttgaaacaagcctctcgacagtggtactctaagcttagttccacactcctcgaagatggcttccaccaatctttatctaataattccctcttcattaagagaactagcactatgcttctgttgtcctcatctacgttgacgacattattgttgcaagcaacaatgacaatgctattgcccacttcaaagtttttttggacaataaatttaaacaaagacataggctcccttcgattcttccttggacttgaagttgctagaacgaaaaaaggcatgtcagtttcttaa

SEQ ID NO: 31644 - DNA, 1530 bp, Cannabis sativa
aacaaaaagttaattggaaagatgacttgtttctctttaccttgccacatgcattgaggaaccctaatttatttcccaaactcccttcttcattaaggtattacatctttaattagtttatgtgattaattaatttcttgaaaaataattttttatttatatttatatttatcttttagaattgtatccttttgcacataacatttcaaacacataaatagtgcaaaataatattgaaaataatctcttttgaaaccattaaccatatatattacttttattaccacttaatgataaatgttttaatatgattttttttttttttgaaattatttaggagatgaatataactatcataaagattgcaataataataaataaataaataaatgaatgaataaataaactatagttgcatttttgtttatagctagagcatatttaaggagatggcctataaaatcaaatttgataacaataaatactatatattaatttcaattttatcattaattaatcattaataatatatttaatatataattttttaattaatattttttataatatttaatttaataattattattaataatattttattttttaatacaaatttgtaccttaaaatggttttgttgtgctagatatccaacttattattattattataacacacacaaatgtgcagggaaattttggaaatttattcattagaattggcaaagctagccaaaagtataatctccaaaatggaaaaggttcttggattagaaaacaaagaaatttccaaattagttgaagatggaatgcagtcaataaatatgatcaattaccctccatgcccacaaccagagaaagttataggtgtgaaacctcattctgacactgcaatccttaccattctccttcaagccaaccaagtggaaggcctccaagtcaagtaagatgacaagtgggtccttgtaaagcctctcccaaatgctttcattgtcaatgtaggagatataatagaggtaataataatctcttaactaactactatacttattgttgaaaataattggttaaatattatgtttggtgtgattaaaattttaaaaaaaattataaattttatgggtttttataacttctgtgcaaaaatatgattctttttcaaaaaaaattattttatgagaaaaattaaaaaatacgaaaaaaattaaacaagaataaccattaattactttatactgtttttcttatattgataatttttttttttttaaaaaaaaaaaaaagaatccataaactaactttttatttaaaaaaaaattcatacttttacaaactcataccttaaaacccgtaaaaatgaaaatatatgtatgagaagggtcgagccggagaaatttttggcttaagaacattttaataaaataaagaaaaatggttccattgtcatttatcaaaattggttaatacaatgtgaggaaattacactctatacccttcttatattgtcctcttttatttttaccctctttt

SEQ ID NO: 31645 - DNA, 2398 bp, Cannabis sativa
tgcgtatacttgcgtagtgtttataaaatatagcaacaaataacaaaaaaaaggcaaaaattaaagaaagtcataagtgaaggataaaataaaatatttgtaatttctttttgttgttgattttgtgtatttgtgagataactcctaccttatttatcctagagtaaattgcggcgaaaatacctaagtttaacttgtagttggagataaatacttaacaaaaagttttggcggtaaaaataccttctgttaaggttttggaacttccgtaggtacctgaccgttaagtgtcaggtaagtgtccagctgtcattctttattggtccacatcattaatttgtatttttaataaaaaattcatttaagaatttaagaattaaataaaaaaagatattttaaaatcaaataaaaatgataatatatatatattaaaaatcgtattttaattaaataaaaaaaaacataaaaatcaaaaacccaacgtaaacccacattatttcacaaacacgatgaaatcaaattcattaacctgatcccaaatcccaaaataaacagaaactaatatacaaactcattcttcatactataataaatctaacaaaaactcggacaaaatcaaaacctaaaactaagaaaaaaatacaaacttagacataaaaaccataaacccataaacacaaacccagcactatgaagaacaaatatatatgaactctgaaaattcatccgaaatccaaaatcaaataaaaaagctttactaccaacaaacaaatctcaaatttttaggtttagttttttccttacctaacaaaatttatatcaatgcccttaaaaaactagcctcaccaaacatgaaaattcacaccaattttttttttcacaggtagaacactcatagttaacattcaccatttttgtagtaaaaaaacccagattcattattttttcaaatgcaaaaaactccgaaccgtacgtcgacagcctttcaccatggtgagctttcagatctgggtcatgtttagtaggatctttaccggtggggtttcttctcaggtgaaggtttgtctgctgcggtggagattggggatttctagggctccaagatttggtttcctccagttcttaggcgtctctcccctgcattggaatcgatcgattcgtctctcctgcatttgggtcgactggttcgtctgttgtagcgtttgagttgatctaaaactcaaaagaaaagaaaagagaagaagaacgaagaagaacaagagatgcgtttgaggttcagaattcagatcttacttttttttaattataatttaattaagtcaagtttactgagatgtcatgtgcgacgtggcattagtttagagatttaattaatgattattaatttaatttaattaaaatacaaattttaatatatattattatatttgtttgatttttaaatactttttatttaattcttaaatttttaaatgaatttttaattaaaaaatacaaattaatgacgtggaccaataagggaatgacaattggacttttacatgtcacttaatggccaggtacctacggaagttccaaaaccttaacagaaggtatctttaccgccaaaaatttttgttaggtatttatctgcaactacaagttaaacttaagtatttttgccgcaaattactctttatgctattttgttcaacttctaccttcttcttcattcctttcctcgcctactaagtaatgttgggcttattattgggcccaaagcagttcttaaatttgagccagcggcccaatgttcatttggcagactaccaagtcagcagccagctatgaccgaccgcacatggtaagtgaaaacagagtcaaaactgaagggtaaaatggacattttcattacactccattgttctcgtcttcttcctctcttcacttctccaatctccgccattgttccctgaaacccaagtttcagtggttggattttgatcgactatggccaatcaaggtgccaagaagcgcaaggaggagaactctcgccacatcaccaatctccgccgcctcatcatcgcctgcaacgtacgctttttggcttcttcttcttttttcctccctcaatcgaagaaaaaaataatgaatcttatgaatacctgtgtaacccatgaattctctgaattttgagttaaacatacaattatgactatcatacatctctctctctgtatatatatgtcgaatttaggttatttatgcaactaaaacattggggtttgattaacatgttaataggacattgtcagtgaattggaaaactcgatttcatcactaaattctggctggtgtattaggagatttgagttttcactaatggaaatgatgatctttatataattcattgtatgtg

SEQ ID NO: 31646 - DNA, 1468 bp, Cannabis sativa
ccttgatttagagaaactaaatccagaaggatgttcttgagcctagaacatattagttttgtagcgattttatacagcacattacaacatgatataggtctaaattcactcaccaaattagggcttttgatctttgggatgagcgtgatcactgtagagtttatctccttcagaagctttcctgaatgcggaaacgatctaatggcttcacacacctccttcccaatcacttcccaattgtcttggaagaagaaactcccaaacccatctggtcccggacttttgtttccagggatgctaaaaacagcttgcttgatgtcttcattggaatactcagctaatatggcttcagcttgagctctagaaacagtaggcccctctgctataacagacatttgcactttcctcctgttttgcattttggtcctgagaagctgcttgtagtattgcagaaacgcctcagtgacttcttccaaattatccactctatccccacttgcattcacaacagatgtgattttttttactctcctttctcttaggctagagtgatagaatttcgtattctcatccccttccttaatccaattcactttggatttttgctgaaggaaagaaatatatgctttatatgaactgcctggtattcctcacgagcttccatttccttttgctgagcaccccgatcccttgggttcctctgaatctcttcttgacattcttccaagtgagccttggactgcaattcttgattatgtatatccgagaagccttgatggtttaaatgtttcaacatacccttcaaagccttcattttggacaccaccttgaacatacttgacccctgaacatcaatctttcaagtatcttccatcttttgctgaaagagggatgacttgaccgcatccgaaaatatttaaagggtttcctaccatttagaatagtaggtaacatagtcaatatcgtcggagtgtgatcaaataacccttcattgaggaacaaagcttcagcattctcatatgtatccaaccacctctgattagccattattcggtctatcttggaaacgactcgctcttctccttgttgcttattattccaagtgaagaaactaccactttgcttaacatcctccaattggcattccccaacacaatctttaaacttagaatgactataatgttctctcttcccaatcctctctcctttttctaggatgtcattaaaatcccctagaacaatccatggttcctatctctttaactctattagatccttccataattaatacattcctccctcccccccctccttcctcactcatgattaaaaccatagacaaaagaaacatagaaaaaattcctcttgtctattgaagtaacccgaagatgaaccagttggctagagcaaaaaaaaaatatctacattgtaactcccaggattccatgagtattaaatgttgacttta

SEQ ID NO: 31647 - DNA, 1882 bp, Cannabis sativa
  modified_base (1037)..(1044): a, c, t, g, unknown or other
tggttaatgttagtggatgagatttaaggcagtggtgtctagcaacttctcgacatgttgcgttgcgattggttagcgatactccctaaaagctataggactcggtacttagttaaactaatagcgatattgacacgtagaaatgtactaagcatcactgatgccctttagcatttctcttcagaaaatgtaacatattttgtaaagagcattgttattgagtattagtggtggctaccacttttagacatgttgtcttacgatatgggacttgttacttaatttgactaacaataataataacacataagaaggtgctaaacactgctaatatcctttaacatttctcttttgtaaaagagctcgttaggttttaatcattttgtttgataggtgtagtttttttttcaatattattgttggtttggattaaacatgttgggatttgatctcaggatcccgcacacaagtaccctctaataattttttgttgtctcaaataattagtatttatcatccttatttattgttgtgacaaatacttgggctatttttctctcaatttctctcttactaacaacattttctcataggctaatttgcattgtaaatgttcttgaatctatatcaagatcagattgttatgaggtgtgtggtatgagatttagactggaatatgaatgtcaaacttagcccatatttaataaatttaattttcataaccaatgagtgtgttttctaaataagtcttatttttgaaattaaaatagtagtaatcttaccctcctccaatatttttatattctctataagtctactatttccaactcaaacccacacaataaagactttccacaattatgaatctattatttctttttctgttttgaataaatactattttggacctgtattttataaaagttacagttggatcttctgttttgttaaatgataaaatagaccctgtattttttaaattgatacaaataggaccctaagctcaatttttgaatttttttttaatataaccaacnnnnnnnnaattcctaatacgaacagatgcaaaaaaatttaactagttttgtcataatacttctaggtcaaattattattaagctttattttgacaaaaaatcagtttagggtcctatttgtactattttagaaaatacagtattcattttgtcatttaataaaacagaaagttcaatctataacttttacaaaatacaaagtccaaaataatatttacaaaaatattttttttgtttggtaaagctttgtagttcattattgcttctttgactattattcatgataatcctttttcttttcctcaatggattataattctatgttttcattattggtgtatgaccaatgagtttgagatatttttgatgaaatgtcaaagaggggtattttatttacttctttcgttccacgcctctaagttatggtctaagaacaattgatatacaagttgtttagttgctccaataggtatttttatttttattgcattttttttaattatagtcttttgtcttagagaatatttagaggattatctaattgagaccaactaaaaggttcaacttaataaattagacaaatttatgcttaagtaataagtaatcttttacaacacttgtcgactgagtagagattccaatgttttaggaggatagttattaagttacgaagaagattaactttgggtagttgtttaggcttcatatgacagttattttttaacatgtaacaagtttggtatgactatttgctcgaaatctttaagggctcgtttggaacgccgtattagatcgtattgtattgtattgtattatattgaattgtattttataaaatattttta

SEQ ID NO: 31648 - DNA, 1591 bp, Cannabis sativa
atggttgattgaagagggatgggggagatgcacgtgtcatatgcatggggggagtgtgcatgtggtatatatgtaataaaataaagaaaaaacgtaaaaaaatgtttaggtaaccgtgtgtaagtatatatgtaataaaaattccattttgtatttttggtttaaaaatttcacaaaaaaataagattgataaaaagataattttaagttatttataattatgtttagcgtattttgttttaatatatatagctagcaaaaatttataaattaaaaaatagttatatatacacacattcatgccaaatatcttagctatatttttttaatgttaattaattttttaattaataaaatattaaaaaaaataaataaaaataaagtcaaaaagctaagaacgtgtgataatagatttataaaattaataaaaaaaattaaaaaataagataattaaggagagaacaaataagattgaatagagagattttagagtgtcacgtcaccgcctcatgtctctcctttatatatatactaggaaacagaccgcgctttgcgtacggctatttataaatattttaaattatacatataaatattaattgaataataaaatcatatcaaataattttaaatatattattatatatttatgtataattttaaaattttatttattaaaaacataataaaactctatcaccgtaactcacttggtcactattacatttaaagttgatgttatcaaagtatctcacttgtagtcattattaatatcattcctagtaggtttgctctgtacataatattaattaaacaacaatcggtaagtactcacctttatacataaatgaatcattttgttacaaattaattaagtgaattattaccatatttcacttatagtcatcaataatatcatttcagtaagagtttgctctctacataaaataaatcaaataataatcgttacttttataaataagttaattattatgttataaattagttaagtgaatcattagttatcatacattattatatagtttatttatttttaattaattaatgatctctaatttttttttttgacaaaattaatgatctctaaaaaatttagtagaaaaaaaaatagaaaaataaaaaatattaaagagataataaatagaaatattttagacgtagtcactatatacctcaactttatatatttaaatatatagataataaatgatttaaatattatttattctaaaactaattaccttatatttaatttttactaagaaattaattaatatcaaactatatataattattttgaattaattaattaatagccaattaattttttttaatttattttactttaattaattgacataataatattatattaaaatatttattcaatatatttataactataaattatattttgaattctaatttattcaagcattatgatattttggttgatatatataaactaagcaatatagctgctcttcgcgtgactattttaatttttatttagtataataattataaaagaattacctataaaataattaaataataacttaaaaattaa

SEQ ID NO: 31649 - DNA, 1201 bp, Cannabis sativa
atgatgtgcctcgaaatcctgaaccgccaaaacctatagcatgcaattttttaaaattgggttaagacaaaaatacccttataatcgtttaaaaagctctttctaatcaaaaatgtactttttaatgggaaattgttatacccaaaatttagctacacttcagaagttgacacgtgtctaacagaaagaatatgaatcaactttcatgatataataatgttatatcattaaatgcagattaaaataactcgttattattacataaaggtttaatggataatattcaaaactcgttgactgtatagtctaaagcgagacaaggataaaaactattgaactgatattgacgagacatacatctgcctcagaatacatagacaaaaagaggatattcatccacttgagcagaataaatataatcgcatgcaacaacctcaagttacatatagcaagacagtcacctcgcaatactgactcaaatgaagggatacaacgaggtgaacgacttaccaacacttagcatttttccttattaagatggacaaggaggataactcatattaagcgagataaaaccttccaagttagcaataaccgtctaaaggataaaaataaagagtagtgatgaaatgaaacgtggggattgtccacgttttataaacaattatatttgaattgatcccaaaagaataactgccaacctatactcctataaatagggacagattccacagaaaaagggacagtaaaattgagagagaatatattattattcaaattctattgtattctgtactcaataaatatccctaataagaaagactcatggagtaagcagatctttaaactacaaaactacgtaaaaatatctagagttattaatcttttattatttattagtttctgtaaagtatttattactgaaaggctaattaattttggttaacaaaaatctgcgttaacacccttatatagggaaggggttggtgcacctctcttcaggaggcctaacctagggttcggttgaaccccaactctatcttaatcgttcccttaattcttagagttagttgaaacttgattcttttggtaatatcccactatttttgtgggtcttacccagttttgagcttcacgtgggataggacgtcgagtgttttgcttgtcatgtctaacattactttgttgggttttatgccct

SEQ ID NO: 31650 - DNA, 875 bp, Cannabis sativa
agtaattgtcgagcttgattatataaagactcatcatctcaagaaactcattggaggaggcgtatattgaatgtaaattaattctcgtagactgacttgattcagatcacaaaccttctgagacgactattaggaacatgcttaagcaaggtaagtctctcaactttaacaatgtcagcaccagaaatgttcctgaatgctttaacaagcttagcaccttcagagtacatctaataaactgtatttttgcatatgtcaataagtttctttaatgatagtaaaaaaaatgtgattgtaccgatctgcagtagcagattagaaacctgtcacaacagaacacagatttgcagaatcaaaccagaaacaaaaataaattgtgcaaaatttaaaaacttgaaacaagagagttataagtggtgttagtacccagagaatgaaatcaattagtaaagtatcaaagattacaaaatcatttgacttaaataaatttagactccaaatgacgtagtagtatacgtatgataataaaacaatagtaatgttttgtcgatggaatcgttggaatgggctcccgcacaatggagacgatgagggtgaggattaaaatgggtgaagcggccataatttgagggaagttttgggagtactgtttctgtttggatggagagcaagaagcagttgtttgatttttttggatactggggttgttgtgtggcttcgctttgcttgtgtcgtcgtcgattttcccacccggtacggatcccaacgtggtggcttgcttccaagcggctgatcaggacggaagcggcttaatcgaagataaggatttgcggagagctctctcttcgtataattagagctttagtctcagaacg

SEQ ID NO: 31651 - DNA, 1371 bp, Cannabis sativa
atattttttaaaataatatcttatagtcaatttatattattattttttaaaatatccaatctaaaataagtttttactccaaacaaattaaaaaaaatgtaataattttggtatatatatatatatatatatatttggttatttttattttgaggaatttggctcaggcttattttattttatttttattttgcagaaagtgtaatcaataatttttacaagtgtcagaaaaatataatggatctgattgtagttatgaaaaatattaggcaagctttttctaaaagaaaattttaattatatagaatgttaaaattaaggttcaaaacattttaattatataggatgtgaaattttgattaataaaattccttttttcttgttaaaaaataaaattaatgttcaagtaatttattatgtaaaaaaaaataattaaacacgtgtgctgtttattatacgtaaaataattgttttttttttttgaaagttaatagttgagtatctttgaaaacttgtagaatgtactaaataattgtaataaatattattagataaataaaattaaataaagttattacttttagttatagctattctctttactatataaatttataattaattaatatataacttatcttcgcaatgccacttttttttttaaataattttaataattagttatctttcaacttaattaattttctaacaacattcaacattatcttctctttttatattaatataatatttatttagatatatttagatataaataactttatattcttttttctctttacaaaatcagtataatattttaggtattttctttgagcattatatgttgagaatcttgagatatttgcttagtagcaaccaatattattatgtggtcatgtcttaaagtaaacaactccttataattattattgaattaaaatatgagactcaattttaaattatattgataatagtatgctttctcaatacttagtctagtcaataactttttaatgattattttgttctatattggtgtttttttttaaaaaatgtacttaccagaatcatcaatatattttaaattaattagtatggtttatatatgtcataaactaattagtatggtttattttgctgcacgtattaatctaggtagaagaacaaaatccttaaaaaaaataggggtttaaaaatataggtatttgaattctaaataataacatttatatataaagttgtaatagattagagactagattattcaaatatctctgtctcgttattaattattgcttaaatgttttcctccttagttttaaaagacctcaggctgaactctaatgaataattgtaaattgtaattaa

SEQ ID NO: 31652 - DNA, 1036 bp, Cannabis sativa
atatttgacgtcgttcggagtaaactgggtcgggcagaggtggtagtagtctgtaatctttttgaagtacggaagcaaaggcaacattgcaccctgcttggtatgagtgggcaactaggcccagtaccactgccttgaactaggtgcccagtgatttggagagggaaagaagcattcgacattccccaagtagtcgtgcttctccaaattcttcatcatgacttgggtactataatgaggagaaacccactgagctcctacgacaccttgtcttctcttaggaacagcctcagtgtatccgtcagtaacatagtcttcacccaccactaagacttcaccagcctcagacatttattatagtactttatatatatatttatataaaacatgtggagatgagtagaataaatattcattagtgtaatacccatagattaagaatggtattagcaaaccctaactagttaaatgtgtatttattatggaattatattattatataatttattatatgtgaattaaattgggaaatgacatgataagaccccgttggtgagccaaggttattttcgttggagatttttttaaaatctaggggtattatgtgattcatatgtgaaatatgctatttttgttatttttgcttggcgacaacagaaaatgcgatggatggctagtttgatcacatggataagtttagaaccttatttcttagggggacatattttagagaaaataaaatatcgggattaagcgcggttatggaatttgaccattttacccctagcttttgaaaaaccttagttttgggttaaagggcagttttgtcttttgttttttagagtgctacgtggctgcccaattttgtgacaccttgcaagtatttttctcagccaaaggtttgatgaattaacccctaattagttagaaagaaggaggaaattaaaggaaaataccaaattcaagagaaagctctcttttctctctctctctctcttcgaaaccagcagcatcaaggggatttgctgctgaactt

SEQ ID NO: 31653 - DNA, 6128 bp, Cannabis sativa
  modified_base (4531)..(4534): a, c, t, g, unknown or other
cgaggaaatgaactcagtcaaaagctactcaaagagttgaagactatgttgctatcggctaatgtgctgctcaacgatgctgaggagaaacaacttcgagacaacaacgtaaggaattggcttgatgcacttaaagaagtaatgtatgaagcagatcatgtgatggacaagatcaatactgaaactctgagattcagggtggagaaagatgacctcaaacgcacactgagtaacctcttccacaatcaagtgaaatctaacatagaagatatccttaaaactctagaagatcttttaaaacagtcagaacatcttggtttgaaaaaagttgaccacaaaacaactttacatagaccacatgcccctttgttagatgattatcaagtttatggaagagaggatgataaacaggctattcttaagctattgttgtgtgatcatgatgatgtcatcgaaaggatttcggttattcccatagtagggatgggtggaatcggtaaaagtactcttgctcagaatgtgtattacgatgccaatgttcaaaaacactttgacttgaaagtatgggtaactatatctgatgattttgatgttcttaaaataacaaaacttattttggagaggatcgttggaaaaaaatgtgaaatgaacgagctacatcaaattcagaaagacttgaaggatgctttggccgggaagaaatttcttttcgttcacgataatgtgtggaatgagaattacgagttgtgggatcttttgaaaagctcttttcaatctggtgtagaaggaagcaagattattgtcaccacacgtaacgaagatgtcgcactgaagatgaagacgagagatgttcaaacttattacaagcttaagaacatgactgatgatgaatgttggaagatttttgcagagcatgcctttgatcatgtagacactgatgctgttgtatttttggagttgcaagaaattggaagacaaattgttaagaagtgtaagggccttcccttagctgttaaatcaatggctggacttctacgatctatgtcaactcctgacgagtggagacatgtactgcatagtgatgtgtgggagttgcctaattctcacaacatcgaaattattccatctttatggttgagttatcgatttttgcctccttatttaaaaccatgcttttcctatctttcaatatttcccaaagactacaattttggtgatgatgatagagaaaaactaatcttaatatggatggcagaaggtcttttgcaacctcaaaaaggaaaaagaattgaagatgttggagaagactatttgaatgctttaatagcaagatcattttttcaaagaaacacaagggatctttctctttcaatgcacgatctgatgcatgatctagctatgtatgtgtcaagtcaatgttgtttcatttatgatagttgtaaggtcttgcacaagcctagtagcaagactcgccatctatcatacatgaaagacttgggaaaatacaacagaatttgacgatgaaaacgacttttattcaaacttgcgtagctatttggctttaccattgtcaaagatattctctccaacaaagacaagattaacagatgaaatcatgttgttgaaggatggaggatgcttaagggcactttctttgtcagaatctcatactacagagttgcctgataagattggaaatttgaaacatctcaggtatttggatgtaagcaacacaccaatcaaagaattgcctgcttcaatttgtgtgttgtacaatttggaaacgctattgttgaacatgtgctacgaacttacacaattacctaccaacatttcaaagttaattaatttgcgccatttaatgatgagaggcacttgtttgaaagagatgccaccaaggatttgtgatatgatgaatcttgagacattgagtgattttgttttgtgtgaaaatgacggatctaggatcaaagagctgggtaagttggagaatttacgtggaagcttgcagatttcaggccttgtacatgttaaggaagtgagtgatgttttggaaggaaacttgaagaacaaaaagaatttgactgagcttattttaagatggaatggtgaagcagatgattcggtaaaggaaagagaagtacttattgcactccagccacatgaaaatctgaaaaaactcaaaatcgaaggttatagaagcacaaacttaccagattgggtaacacatccatcctactctaatttggaagaagttgatctagactgtaaaaattgttgcttgtcattgtcatcatttcagcaactagtttcgctaagatatcttcatatcttttgtatggaatttcgtggggtttatctaaataagccattttcattcttgacaagcttggagcttcttggaataactacgttggattggtcggttgccaatacagatgatcaaatgtgtgtgattttccctgctttgaaggaatttcatttaataaagtgtgggaagataaatgtggcactacctgagggtaattttccttctttggaagagattgagattgacggttgttatgaattggtgactatttttccatcaagtagtactcaaatggacattgcatatccctcccttgaagtattggaaatatctttttgtccaaggttggagtcattttcagaaatggaattattgccctttactttaaaacgtctacgtatctcaagttgcgatatgcttatggagaatcgcgtgaaatggaatctacaaagactcccattgttgattgagttatcactttgtggatatgaaggagaggtggattcatttccagaagaatggttgctcccaccgactttaactcatttggtaatcagtgattttgataagcttacagctctaaacagcaagggttttcaccatctcacctcacttcaacgattgcatctttattacttgagcaagctcgagtgcttaccagaaggaggactgccccaaactcttactactttgaggatagaacattgtcctctgttaagccacaggtgcaaggaaagaataggggaggattggcctaatattcaatacatacctatcatatatatacattagtaacaatgtctcttttactcaacaggtaacttttcttttgtattttaatttaaatgttttgtaattgctaagtgtgatatgttattcttataatttcttttatgtcattagatcaatgagctacaataaatgaggagcttcttcaacttctatctcttgatgctgctgatcttgccttcttgaagtttttagagggttgtcctgctttcttgaagttttatgttagttggacagttggaagcagattgatttcattttttattggcaaaatcttctactcgatgtctgtcatttgtcataaagagtctttacaaacattgataggctaatgttcgagtgatttgtttcgtcttgagtttgtgtgaagcctatatatagtgtgcttagaataataatcttgttcatgaagtgtaatagttgtgtactatttgtattttgtgtctttggtttgtgtgtgtttttcctttgcttttggttgtgttgtgtgggagttgtttttttttttgtttgtgtgtggtttatctttatttcaattatgttgtgtgagatttgtatttcgttattttccttttgtattgtttgttgttaccacggtattcctccgccataagtgaggattttcaataaactcgggaagagatcactcatggacatgtgatcttcttctcttccaataagaaaaaaaaaggtgtttattaactaaataaggaatatcgatattcgtacaattaagtatgtagtcccttatactttaataatattttttttttctaaaatatcgctaactaataacaaggtatcacttttaggtggtgctaataccaatataacttaggaatatggatgacactcctactgggttcaaggtattgatgaccaatataacttaggaatattgttaggactgggtctcgggttcgggtcggagattggggttaactccgctttgtaaatattataatacaagctaatacgaactatttgttatgtattaaataatacaacttacattgtattagaaattttggtcgtaataattaatttaatacattgttttatccaaatatagttttatttattattatttaatataatacaacatttataaggcttaccaaacaaagttaggtaatgattccccaagttggactatacataaatataatgtagaataattcggttgaccataattatttatgttcttataaatatattatatacacaccctaaaattgtataaaaaatacataattaattaatgtactatgaacaacaaaagatgctactaacatataaatataaaaatatatgataatagaaaattactttgttcaattcattgttttgcaatttagcctttccttttaatcatacatatatatatatatatcatatatgtgtacatatatataatgaataaaaataaannnnacgaagtaactcaaaccggttataactaaaatagaaccgattatataacataatgcatgcgtatttttgaggtagatatagtatgagtgtaattatttggtgggttggagcatgttgaatgggtattttatttgagctattttatttaactagtttttgtgtgtgagtttttatcttagttgctttacgaaaccagttaaaaactcaatcgattgctgctcaaaaagttgaaaactgtgttgctttcggctaatgcactgttgaatgatgccgaggagaaacaacttggagacaacaacgtgaggaattggcttgacgagttaaaataagtactttatgaagcggatcatgtgatggacaagatcagcactgaagctctgcgattgaaggtggagaaggatgaactcgaaagcacaacaacaagtaagccacccttgagctttgtctttaataatctatttgacataaatgctgtaaaatctgaaatagaagagattcttgaaactctgaaacatcttttagaataaacagaataccttgggttgaaaagggttgacccaaaaacatctttacatagatcagatgcccctttgttagatgattcacaagtttatggaagagatggtgataaagaggctattcttaagttattgttgtgtgataatgatgctagctcaaggatctcagttattcctatagttggaatgggcagaattggaaaaactacgcttgttcaaaacatatattacgatgttactgtccaagaacactttgctttgaaagtatgggtaactgtgtcagatgactttaatgttcttaagataaccaaacttattttggagaagatcactggagaaagacgtgaaacaaaagagctacatcaaattcaaaaagacttgaaggaggctttggccgggaagaaatttctttttgttcatgatgatgtgtggaatgagaattacgagttgtgggatcttttgaagagctcctttcaatctggcatccaaggaagcaagattattgtcaccacacgtaatgaagatgttgcattgaagatgaagacaagagatgttcaaacttataagcttaaaaacatgtctgatgatgaatgttggatgttgtttagagagcatgcttttgataatgtaggctctaaggaggtagcattgtctgagttgcaagaaattggaagacacattgttaagaagtgcatggggcttcctttagctgtaaaatcaatggctggactgttacgatctatgtcaactcctaaccagtggagacatgtgcatcagagtgatatgtgggagttgcccaattctcacaacatcgaaattattccagctttgtggttgagctaccgatttctacctccttatctaaaaccatgtttctcttatctttcgatatttcccaaagtctacaaatttggtgaatttgatagagaaaaactattcttaatatggatggcagaagatcttatacaacctcaaaaaggaaaaagaattgaagatgttggaaaagattacttgaatgctttaataacaagatcattttttcaaagaaacacaaggaatctttctctttttatgca

SEQ ID NO: 31654 - DNA, 1245 bp, Cannabis sativa
atttaattcttctttttcaacaaccaacaaacaacatttaattaaataaacacaactaaaaataacaattcttacaagacttaaaagctagcttactaattagaaagtgaagctgaaacctatttaaaagttaaaaaacaaacacactttcattactcttttcatgataatttcagtttaaaggcactaaaaataactctataccatagagttattaccctactccccttttacttgtattacttcaaagaattatcaagatcacaaggagctggccaagtgagtttctcaataatcctaaggaaaactttacaattatttagagagtgtaatggctttctagagaatcaaaaatcaaatcccaccatagtcaaatgacttcactatttatagaggaagaaagacattaaattggtttcttaaaataaattagaataaaagggaaaactaagttagtttcctattaactttacaatgtgtgttaaccccataaaaatagggatttaaatgggagatatttattggagatattaatgagaaatatctctaagaattgtgcttcagccgcatttaccccgtgtgaagcactcgacttcactatcacgatggaagctgctcagatggtaacatttaacctgccagttgttccacatcggtcttcagactatcattctcaggcatgaattaccccgaacgatacattaagggaaatatcttccgtccaagttttagaaggctctccacatgtcaccttactggatgccacatcaccgtgtgcaaaatttgggataacaggaggattatctagtacttcctatagtgggaggaattaatatgttcaaacaattttttactagcttcttgtatcactccaagagaaagacccttctcttgcatatttgctgaacaagttgctttactgttcatatacaacaaaataatagtgcatagtttcaacaacctactcctaaaaccacaaagtgaatagtcatttattgttaacctgattaaaatgttgaacactagtagcttacaattttaaggaaatcaagaataagaaatctaggtatttcatttccccctttagtcttctataaacaactttcatcatcttcactttaatgttctaattgcctaattgatagcctaggttattaattattcacaaggtcttttttaaatcacaagtaaatctagctaatatattaattcccacattcctatcaagatttaaatctatcaata

SEQ ID NO: 31655 - DNA, 1230 bp, Cannabis sativa
gagccctatgtcataacaatgataaaccaataagtgtttaccccaaaacactacttaacagttgcaaaggacaacctagggttttctaccaaacatcgtagttcaaatacactaaattaaaacttatattttggccctaaaacatacaccatattgtagagcttgttgcaagcttcgaaactgtatatagaacgtctaaaacgaacacctgagtgaaaaattatggccaaaatacgaaattcagcttttccgaaaattgaccaaacggaattccggttggtatcatccggaattccagttctgaacaaccagaacacgatttttccttaactttaaaccctccaaactagctccaaacttaaccaaatcattccaaacttcacaaaacacatatatattacacatataactatcccaatgtaacagaaatcaaaaccatgtccttaaatgaaaagtgtcattaaagctcaagctttgagcttaaaactcaagcttggtgcttttccacctcacagccatcaaaactaccaaataagcatcacaaacagtcctaaaacatcataaaaacaaaacccaaggtccagttaaaccccatcaatcatagaacaaaatttcaacccttaaaactataactcaagcttgaaacttaaggaaaagtaaaaccttacctcaagttttttattcccttgaacttgtctatgctcacagctgctactagagcatgttttaggctaaaaatttgaagaaaaatggtgatggtggtggtggtttttatggcacgaagagggaaaaagaaatatgttaggttatgtttttctttttttcaaaatgttaacatatacagatactttaaatttaataataataataataataataaaattttattaataaaaattatttagtatttcttaatcattaagaaatctctaatcttaaggaattaggccaaatcttaaatacttctaataactctaatacttataccatcaacttatcataatattctcgtcaaatctaataattaaacttgttatccgatcgagtctccaaggtcgcaaaacttaaaaatatttttattccacaaatagctcatattatattcatacatactatataaatctccgtaatttacaaattacacgtatttacccacttatagcaaatttaaaatttatgttgaactagattagcagaatcataaatccacttattacttaattgacccat

SEQ ID NO: 31656 - DNA, 1179 bp, Cannabis sativa
gggaggagacatatatattccgctgcaatcactgtgagtagatctaagaccctcgtaaaataacttccaacacccacattatgctgatatcaatggaatgtatattaccttgtaggtagcacttggccgaattaccaatatgacggtcaggagagagaagatcaacataccttacgagattatattgtatgtaatctcatcaaaaaggaaaatctcaaagagagccttgtcgagccatcaatacgccgaccaggacaaaagaacctagaatggccggacaggactaaacaggttgtgatttgatcctcaacaaactgtgtgaatatctccaacattatccttaaagtacggattcgactcttcaacccaaaaatgtaggagtttcaaagagattgtaactcacatagaaaagagggatttttatatttcaaatgttttaaatatacttccctatttccgataaattgtgaacatattcacaaaggaaagggacctaaaattattatctagactctaagagtaattctctgcacattattctctttaagaatccttatagttgtagccaaaatttactttcttctttagtgatatgcacaacattatctcaatatcaataaaagtaaaatgggagtaggtcattactttaccaaatgggccgaacctctataactcttggagttctttttatttgcttattatttcaaattttttcttggtgattgattagtgttactaagactccgagttagttagcaaatttcgtagtcgatacacctgtttaagccctgcatgggctcagtctgggcctaacctttgaaatataggctaggcctagcacgacccatattctgaaacaggcctcatccagtacacgaaaaaaaaatagactttcataaaaattgggcaaactgcaagcttttagtttagatataatgacttcaaaaattttgttatatgtcatgatatataattccagagaacaagggtttaaaaaaagggaaatagtagtatccctttttactgaagcttaatgtccctttctaaaaataatatagcaaatgagctttattatttttaagtacctaaaatacccttagttatataagggtattattaacattatattcattctccaaatagaaacagaagctctgctctaaaatctaaatgacaaag

SEQ ID NO: 31657 - DNA, 2767 bp, Cannabis sativa
tctcttcctcagcattgcctaaacattgcctaaagggcacacattaaaattagattcagatggagagtgctgcatttttagaggacaatgttaatagtattagagaaattgatagaggaaagtagtattacaaaacttagtgctatccccctattgtatatatagctacaaataattagtttaaatcaatacaataaaatcaaacccatgattattaagcattaatgacccatttactccaaaatccttcccaaaaaagaaaaaacaaactttctaaaacaattaatatttcctttcctaaaatattaacaaattcctttcttgtactaattcctaattaagcaatattattatacatatggattatattcaacctatattgaattgaaaaattacttaaaaactaaattcggtattaagacaaattgttccttatttattatatagagaaacaattgtaactttaaaaaatcaaccatatcctttttattaccataaaaacctttaggataatactttcctattcaaattagataacaaacattgcataataatttgactttccaaaataaatgattcagtaatcttcttcagaccattagtattccaccaccttttattacaagatcctcgtgatttcaattcttcaatttactaaaataattataataatatagtctaaatacttaattccaaccactttccttctatgctaaatattcttaaaaaataaaccaatacatagctaatagacattatcgtttaaattaccgtctttgaccttatttcagtttaacatattcttaaaaaaaataccataaccaaataatgcttatattccgactaatagaatttgtacaagcataacttataactttaaaatattattgtaccaaagtttgtttatacctccagtacttgaaaatgtgacaatttaaacaaaaactaccctaaataaataggggcccaaccctataataggtgctaaagccttttaaggcgccaaagccataaaaatggcgcaaatagaacaaaatcaatataaacaaaactatagcaactctacattataacccattatattggcttacccaaaacaaatatataacaaacaacaagatgagaacaactcaccacctttctagtattcaaccctataccacataagccgagactcctgggctcaaaactaatgtaacaatttacttaaaaaaattcatcacactatacataacttttaagcagaagtttcaataacaggggcctaactcaaaaagaaagagtataaattcaaaataaaatattaatgaataccaaataaaatctttaatgattcaaacaaagtgaccggtagtatctataatcacacaccatacatatatacaatctatggcacaagcaataagaaaactaggggaaaattattctatgttaaatctatccaccgcctatggataaatggggccttacaatccataaagttatcaaagtttaaagttttggattcagaaacatttctaaaaatcctatctcatatgaatatctaactaaaagaagatttaattcaaaaaacaaaactcaccacataatcgggttttctgtaaaaacgaaaaggatctgacatatcattcttttttacccaaactggattaccaccaccttcttcattctccagaactagaattcttggtcctcttattatgaaacagcttcaaaatcacaatgcataattaaccatacaaacaaagaaataaggaaaagatatcaataaatgacaaggaacaaaatcaaattaaaataaaccgaacactatatcaaaatttaaaaacaacgcaaatgcaaattgggagacatccacagccgatgttttgccagcgataaagattacgataccggcgcttcttacggcaagcaaccgccatcctggatctggtattctccctcctggaactggtcttccccatcatggatctggtcttctccgtgctggatctggtcttcttcttcctggatctgctctttttgaaactaaacaactgaaggagcttcacaaaagttgagaagggaagaagttctggaaatcgcatcagtggagggatgaagcccggagattaatgttaacgcgactgggacgattgaatctgggcttcttgctgggacaaggacggttgaaactcacaactcgggttgatcgacggtggttaagaatatagagccaccaagatctacgggatttgaggcttggaatcttctccgccgcgagtgaagtagatctgcatccttgctgttagtaacagtcagtcacagtggagccgtcgatgttgggtcttctagggtgagtggagccgtcaacgtcgtcaggtcttcgccgagagtgacccaatatatacatactttattgtatagatattattatttaaaattactgatatttatatttaattatactaatatcaatatatatgtatgacactaaaaatgatactaaattacagctttttagcatttttctatgataatacataccgtacacggcctaattgccacctttttagacaatcaagcctcattttaaataccatttatttcagccgatatataattaatagttaggatacttttaagacaaataataatgtatatacaaatatggttattttaagcccaaaagataggtaccactacttactactagtaatagccattagccaataccattataaaagaaagggatattggcggctaaaccacccgaactttacggttt

SEQ ID NO: 31658 - DNA, 1507 bp, Cannabis sativa
tgtttgatttactgaaatgtaattgtaatgataataggaatagtaatgagattactattactatgtttgatttattttgtaatatattggtaattgtaatctcatttatgagtcatgcctatgtaatgagaattcatgcaagtggtgtaatactcattacaatataaagggattacaaaagttaaaaggctcaaccaaatattataattgtaatctccgttccatttcaatcttgattacaccaaagcaaacatgctcttacagaatggatcagcactggggtgaataagaatttaacaaaatgttaataatggctggtcacatttgcaagtttacaaacaatcatttgctgagtgaggtgttttcaatgattgtatgtatctctggtgaaaatcttgtaatatatacattgagattgcataattgaaatagaggtctcaaatggtgtgtatctatattctatcaccattcttagtttgtgtcttgtaatttgtctataactcttggttaattaataggataaattcctcttgcatattttgtttgttgctcaacttggtgatatgtttttgtgattttatatatctcagcagacttccactcactactctctcttcaattgccttatctaaaggaatggtgtagtgttgatcattccacttttgctgcaaatgcaaatgaaaacaatcacatcttctctttctaaatgaagctgacttccatgccactttatccacatttggaagaagatttgattttggaggagactagcttgaagccattcaaaaagacattaagaagatttgttttcttctttctctcctccctccaaattgaaaagcttgtctttaaaagacattaatgaggatttggaatgtcttgtacactggttggagaacctcacttctctcaataaattgcatatttataattgtcctaaattcaagggtgtgtgtataggtactctctctctctctctctctctctctttgctagggtaaacaagttcattaaacaataacaaagttgggaaccacaggagggggcctctccctcaaaacattgccagcatcaactctagctattttagcattcctaagagtatccaacatctcacaagtctgtaacaacttaaaattagaaagtgtgatggtatggcaagattagtggacctcattttcaacttctaaaaaattatgaactaaccaataaaaaaaagagcacgagtgcagttagagcaacaatgcttcttagtgagatctctacgtcaacataagtcaaactgctttaagataaattgtaagttttcgagaccacggtctgatatgcacactgaagggacttcacggataaaaaaagcatcagctgaagtcaattatccgggactcccttccaaaagggaacaattagccatccagaatatttttttttcggaggaaagttggctttccctaaagactcctcccagatagacaagatagatatctaggaacgcccttccaaatga

SEQ ID NO: 31659 - DNA, 1644 bp, Cannabis sativa
ggataggtgcatgtgcatatcccaacaatcttttacaatctgtgcacaaatgggctctcgagaccacgcgttctcataacgaaaatgaggagaagtgatagtactttgatgggcatcaggttgtaaaaagatgggagtatgatcgaaactagaaatactaatattggtgagagtagcgtcagtaaaagtgtctaaccaactaagagagacatttgctttatcgagccgaatttttctacacaatggtctgctgtacctcctcgtccacgatcccaggtgaaaggatagccacaaaggtccagatcaataaggttgcaatcatcaagaaccgactggaaaccatcaataagagatgttgggtacggacacccgcctctcttgtcagattgggttgaaatattgttaaaatccccgatgacacaccatgggagagacgacttgctgtgcaatgaacgaagaagagtccatgttcgatcccgttgtcttctgtttggttcaccgtagaagccagttaggcgtcatgtcgacatgccccttatacaaacttcaacatcaatatgatttggtgaaaatccgagtagattagcttcttctgaaattttccaaaatagagccaagcctcgtttccttcctgaagcatcgatcgaaaaccaccttcaaacccaagtttgaccctcaaacgctctaccaaatcttttttagagagtgtctcacataagaacaagaatttgggcttcttttgattacgcatgtcttataggaactgaacggcccatgggttcccaagcccgcagtagttccaactaattgtactcatggtgattggtgggcctgagcaccagaacccaccaatttgccgttttttgaaagcccatcagaacacacagtatcattactgtcttggtccatcaccttagttatatcatcaggcccaccatttaaggttaggcccacccgtcgccttttcaattctgaaatagataattctatatcaaaggaaaacttgttattatttttctttaaaaagacaactggctcatttatgtcaagggttgactgcatggcaacattttattgattatgttggtcacataaatcgtgcctagattcatggtaaatatcttccatgattttctcaccaattataggttggaaattagagtttgcattaactgtatcggaaacaacatgattcgtcactggtatgctagggacgtcagtcggaccttgtgggagccatggagatgttgtaagaaaatttcttccttttggtggtgctttcatgaacaatccataaggttttataatagcttctggaggcgtatcatagagtttatcacaaaaagtctcagagtggcccataatgccgcagataaagcaaaaagtcgggacttttcatacttgaaatttgcccaaaaagcaactctgtcgcgttttcaaaacttcattcttctcttcagaggattatttaggggaacggacaccctaactctgagataatcacgccaaactccattaaagttattgggatccgatttaagaaacatgccgatgtaataaccagctttttgaaccacttgctttgtcttgaaccctgcttgtaaagttataacatacacctttttaattattcatttatataat

SEQ ID NO: 31660 - DNA, 1997 bp, Cannabis sativa
  modified_base (1767)..(1767): a, c, t, g, unknown or other
atatccctaaaatacccctatttacattaccccatttcccctctcttcttctctctttcttaatcaatgctgagctccccactaaaagggccaattttttttattcactcattctccactcattctcttcacttcaccactataatctatacactacaagctttactacctattttctttcaattttggacggagcaacatatgcaagcaatgggtaatttttttttgtgtaatcttgtttattgttgttatatttagtttagaatgttgttttaatgcttgatctgtggattgttgctgttattttgctattttgtgtgttaaaatgcttgttgcctgtgaatactgcaattttcttggtttctgcaatttttttcgtctagctcaatggggtccgatgcaggttcgatggtggcccgatgccttgtcgaaaatggctgatagggttgaaggcccaatggggtccaatgggccccaaaaaaattcttttttttttaatttttggttcctgtccgattagtgtctaatggatccgatggaggtccgattatagttcaaaatatagttttcaggatttttcaggcctaattggatgggtgtccgattggtgtctgattggggtccgattgggtctcgaaaattggctttttgtttaatttgtgggatcggatccgatgttgtctgatgggtccgattggggtcccaaaaattggttttttgttgaatttgtgggatcaggcccgatgttgtctgatgggtccgattggtgtccgattattttcatatttattgcattgaaagattttggataacttttcggtgagatttttgttctaaattgtaattgtattttttaaaaaatatatgtgacaagttcaactattaatgtgtttgttatgtataatgatgtttgggagcttgatggtagagattgggtttataaacggggcaaaaatttgacatttgacattaatccgaacgtaagctactcaggtttggttgatcttttgtttgaagaactagatattgacaaagtggagtatgacttgacattggaagtaaattacaagtacatgaaaggctacacatatcgccctggagttattagaaatgataagcgtgcaaggtactttttgtctacacttgcgaagaagccagatgaatttactcccttgtttgtgactttgttaaagaagaatgtttgtgtcgatcctagtcccacaccgagttctattaaggacaatcgtagcgaggttgggagttttgttccagattcaaattcagaggtgttgattgtcgatgtattacctgaattaaatattatgatgttgagtgccaatattgtagcacaaattactttcattgatgtttttttgatggtccagaccttgaatcttatgttgagggcaatgatgacgtaagagacaaccaaggtacagaggtccctgctgctgtacctttgaacttgactccactatcgtaacaaataccactgaggctaccgacacagaaaagaatgccccatagagaaaatagccaaacacctggtactagtagtagtcatccaggcgaaaccagtaatgctagaggaaccactgacagtataggtcctaataatgctagagagaccaatgatgctagtggtcctatgatgctcgagggaccaatgtgactggatttagcaatccattttctttttcgacaagttacaataaattcaaggagaaaatgtatacaagagaagacatcgaggatcatagtcattanatatctatggctggcacaccaggcagggagttacatgtattaaagttttttagagacaaacagcatttaaagatggttgttggcttgtatgcaatgaagaaagggtttgattactccgttaggaagtgcggtactgatatttggtacgtcacatgtaaggatacagattgtgggtggagattaagagcgaagaagaacgtactttctaacatgtttgaggtgagtacatt

SEQ ID NO: 31661 - DNA, 1394 bp, Cannabis sativa
  modified_base (70)..(72): a, c, t, g, unknown or other
  modified_base (144)..(154): a, c, t, g, unknown or other
  modified_base (214)..(218): a, c, t, g, unknown or other
taatcatatatacgaaatctatagcttcaactagacatagaagtgaattgatgatttccttcgagcttgnnntaatagagataaatggaagaggtcctatttcaacaattttattagcttactaaaatatcatttataggaagnnnnnnnnnnnaaggataaaacacattgaagggtagaactataaattttttcctactcgatgtaaatcatnnnnngaggatctttgattatttggattggaacgatggataattaatagcgtatctatatcttggaacatataaagcgttttatataattaagagtgtattctgaatctatagggtttagggttgaaggagatctgagtggaaggagacatattattccatcatcaccaatgtaaggtttgcttaactttatatgtgtttattttcattgttttaggaattcatgtttcgggtattagattatagaatataataaacatacatgttagtaaacctagatcttggtaacaaaatttccaagaactagccttagagccatggtaatgatttactttcatgaaatatggattcaaaataatgattgtgatgatttggatgtgttcacgtaggtttatgtgcgtatctgatgaatgcttttgaattaaaaatttttgacgaaatatatttttagtttcgtactagaagtatgtttcttgaaagtagatgaaaaaataatgaattcaggctattacaaacttaatttttatttttattgatttagttatgattttttgaattttaaaaataaaatatctaagggaagcaacacctacgcgcataggtgaaggtaccgctcggtcatgaccgagcttcagacaaggttcttattcaaggttccttggacacgagctgtctgaagccctaacacgccgagtttcctcgatcacataggctgcatgggacccttttttttacgcccagcagctcccttgaacccgatggagtatgcattgcatactcccctatgccatctttttttcttttgtgatatttcaacttttaaaaatcgttattcaatgaaaaaaattcaaattttggtaaaattttgtgtagaatcttatttttccaatataatcatattatcaaaataaaattaatttttattaattttttaattaatttaaatgagttttagatattagtgggctttgaatttgaaaaatagatttttccacaaacttgcctttatggttatttttgtaatttgattatttttaaatttttattaattttaattataagataagatatttacttatttcattaataaaatttgaaatgatcttattttgacattataatattaataaaacttaaagataatctaattagaattccaaatttgctaaccacatcagattt

SEQ ID NO: 31662 - DNA, 2335 bp, Cannabis sativa
cctcctcaaaataaatggccactacggcgcatctcacagtatgtaaactaatttatccttatttataaattattttatatttttattgaatttttaattatttttctttatttcttacgatatgagtttataaactaaataagtttgatttttcttcaaaaaatcttaatttatttaaattatttattagattctcaataattttggtttgatcttttaagatacctaattataaataaaataaagtttgaaaatagttttcttaggaataatgtaagtttttttaaataaaattaatattttttaattaatttaatatttttatcaaatttttaatcatttttattcatttttttttagaattaatagaatattataactactttaaaaaaaataaaatattataattttcaaaattattttttaaaaaaactggcaaaaattttgtattagttaaagttcaagggataaaaatactaatttttaatggtaaaataaacggaacctaacgaaatgagcataaatatgtaactgttatattttagggggtaaaatcaggtagtgccgaaagttcaaatggcaaaaatgctaattattcttttttattattattattattattgaatcaaattaggctgtcgttttgtttatgaagtaaggatttttgtgtcgtttgttgtaaatagataatagagaggacattgttgcttacatcccggggatcaaggctattgaaccaaatgacatgccttgttacattggagaacttgatgtctccaccaatatgcatcgtgtcttaaacaacgcattcgaaagtgtgaaaagggcagatatcattctttgcaacactgttcatgagcttgagtttgagcctatttcggccattcaagagaagcagcccatgtttgcaatcggcccactatttccatcaggtttcaccaattctcttgtgccaaccagcatcaagcccgagttagattgcactgagtggctcaactccaagctccctaaatcggtcttgtacatctcattcggtagctttgttccatgtggaaaggaagaaattgacgaaattgctcacgggcttgtgcttagcaaggtgaatttcatatgggttcttcgtcctgatgcaactagttatgaagagccatatgttttaccaaatttgaaaatgaggtgaaaggtcgaggtttaatagtgacatggaccaaccaaattcaagtgatctcgcactttgcaataggaggatttttaacacattgtggttggaattcagtgttggaaagtgtgtggcatggtgtcccaatgttatgttttccgttgaagactgatcaattgactaataggaagttgttagttgatgattggaggattggggtcaatctttgtgacaagaaaccattggataagtttgaagttgcagagaaaatcaacaatctgatgtgtggaaaatcatctgatgaattgagggtgaaaataacaggtgaaggagataataaagaatagcttagctcaagatggatcatcagagaaaaatttgtgtcaattcattagggatgtgaagaccaaaattagtggtcggccaagaatgtaataacagcacgtttggttgggtatagtaggctttgaaatggaatttatgttttccattgaacttttgtaatagttttccaatgtcatgagtattatttcaattacaaatatctgggtgaattgattagggtggctgccaagtggttgactgaaaagtaattctagtgtattcatccctcaatggagggagagccaaatgagagattgataattacattaggctatgatatcgtggcgtttgttcgtaactgttatgagtatctccattatacctatgaacttattttgtaatgaatatgaggtttaatttgttttcaagtttcaatgaatatgctaattttttttttaaaaaaaaagtataaatagactaatctactttaaaaaaaaaaaaaatcaaacatatatttatcattttattatggactatttacgaaacatatgttatagtttacatatatatataacaaaaaaaatttaatgccactaaatatggcattcaaaacaaaaaaataaacaaatatcataaatgacatttctaataccataaaaaatactaaaaatcaaattagatttttttcctttaaatttaaaaactaaccataaatagaatagctaaaagcactctctacacttttttttctctctacaatttcacgatagcttctctctctcacactctcaattcttctctcttcgatcgcacatgcaatcaaaatcacaatcaaattctcttcgatcgaac

SEQ ID NO: 31663 - DNA, 1613 bp, Cannabis sativa
  modified_base (46)..(55): a, c, t, g, unknown or other
ttatttctgatctttattaatatttaaatctgattatattgaaatnnnnnnnnnntagggcacaaaacccaacagttctttggctctattgccttttgtagaaaagggtctttgtgccatcttgcctcctagaaaagattctcatatcggaagagttccaacttttagttctctcaaaggactatcctttattaatcgatttattctttctaggataatatggcctaaacgtagatgccatagatacccttcatcatcatcagaaactttttgcctcttatttttgttgaggcaatgttactttaaacaatttatttatcaaaattaattgatcacttggtctgagcacataaagtctgttactttattttgcataataaattggcattccatacttagaattaataatctcattattaataaaacttaaacgaactttaccaacacacttggcagacacttgtgttccattgcccactcttatggtcacctttctattagccagtgtctttgataaatcaagtatttacattaaagaataaatattattatttgctcctgaatcaataatctatgaagattgttcatcttccactaatttagcttcaagaataaataaattgaatttacttttcttaagctcggagagatacttaagacagtttctcgtccactatttcatcacgatataatagaaacacttgcctttcacctttcttgtccttggacttaagtttgactttgttcttcttggctttaggtgcctttgcctttcagcttgggtttgccactgctgttgtcattaccatcctatttcattttcttatccaaataagaaggagagttggactttgtttcaacattgtttgactaatctttcttggaattatccttcagagacaaggttgataaattacatttttcagtaaaaatttcatgattctgtaccacacttatactactatatatagtaacaaaaataaatgaccaaattatttaaaagatcaaagttatattagtattgaaaaaaataaaagtgcaatcacaaatacattgtttgttggtaagactatgcaattctttacataattgacaagattgttaaaagaaaaaaattagtgtttatcaccacaagacacaatcattcatgttagctacttctattggtggaagggatcctcatctattctatttcttctaccatcagtagaggtgactactactttttggattgagtaattagttttatggtttattcctattaaatctcagctttaatttttaacttctctaacaagatcaaacatatatagactttttaaaagaagtaataacatatatatactcattacttatatatatattacttgtagatgaatcctatctatacaagtgtatatgtatagaaaggaccatatatacaaggagtcattaattaatcaaaataataacaatttcaataataattaacctgtgtatgcctaggttaatatcatactgataattgaaatattataaagttcctaaaagatttctcatcaaataatggtaagaatcacgtaaagttaatcacacacaacttacacataacacataacacacaacttaattat

SEQ ID NO: 31664 - DNA, 3494 bp, Cannabis sativa
ctaagcctcaacccgggcatacaactgaggaagtagtaggtaatgttatatttaagtatttgaagagcttttgtaatgagtgaccacataaaaatttaccagagctaaaaattaaagtaactaaaagcatcttcaactgggtttgctcattggagcggtctggccacatatacaatgtggttcaacttttaagacaagttttgagaatatatgtaacattagtgctctaacattagtgtcttcaggtaatacagtgtgggaaaagcttgaagaattctgtacaagcaacgagctcaagagaagagctctcagggtaattcttcaatacttttaaatgttcttcttttcaattttaatgagtcacttagtgatgacatttatttgattttttttacctctttttaattttgaatttacaggaaattgctagttatgtggaagaaaatgatgctagtataatgaaattctttaatcgtatggatgttaccggtagaggaaaggttaacatgaatgaactaattgctggattcaaagtttcagcaagtccatcgattgaactcataatgaatgctgttagtactacaacaatctacgtattattatggtattaagttttcacatattattaatacgagactctaactaactagaattgtatttatagggtgatgtaaatgaggatggatatttggactttaaagaatttgtgggcatatttgttaggctaagaattattggcaaggatgagaaacacattcacatagcctttgattttttcgacaaaaacgaaagtggatacatagaaatcgacgagctacgacattgtttcattgataaatttgaagaaaacgttgaagaagttgttgaagccattatggaagatgtagacattgataaggtatgatataagctagacaccttccttgtttatattccaaatagtttagtgctcttatttactcaattactttccatgaacttgtaggatggaatgataagttacgatgagtttgctgcatttatgaaatatggtacaagaaaagcagaaaggcagtgtaattccgagagtggttcaacacactcagtttgaaatgttaaacaattatgagaataggtagaagtggaagaaccatatagagtagtttacttttgttattgttaagttgcacaatgtgttgtttgtttctgaatgtttgatatgtcgtttgtaaacgatttgttggtaattatgaagttgtttctaccaactaaatagtgttattatgtctaatattattaatcattaacaaaaaaaaaccaattttaatttttgatctatggttgctcagttttgagctatggttttaattccaagactaaatcctgttagtccataactttttatttggaggaactatatcatgaaatagaacaaacatataatttggtttgatattagtccaatccaaactttgtgatgtttaaactttaaagtggattgcaaagaaatttataaaaaaaaaatatgatttgaaagtcagaattggaaactcagaagaacataacaccagtgagtcagtgaccacttactattataccaatttgatttgataatcaaaattaaccccacttcaatgcacttgttccccaacataattactttatctccacaacttgaaattgctcctattccacaaatacaacaacaattaaaggactcacttcctttttctcccagcttcactatcaacaacaaacagagtaattaaccaaaagaacacatgaaattaattaggagggtttaatatggcaaatacacagaggttattgctggaaattgggggaatcgcaattggggtttgctgaaaaagttggagggaaagtgaagcgggcactaaaaattgaaatttagagatgtgagattgttgagcattagcggcgacctttaaggttattaggggcggaccattccgcccctaatagtcctttatttatatattcatgatgaaatccggttcatctgaacaccacctccaaaccccaaaatcttctataccctaatctttcattttccttcttgaatcccaacctcaccatcattctcacctgagttagggctgcctatcacagaggtaatctctctatctcttttttccctttagtctttctatccattgaaattgatacactgtttttccttttagataaaaattgatacaccttttttttttttatatatatatattatatatatacacatttttttgctaagttagattttaatttgtttttttctttaataatcagttctatattttttattagatgaaatctattttagaagactaagaatacatcttcagtatcaatatattttggatttggatataaaattatttggctctaataatcattttgaattggaagagttaataaaacaactcgtatcatatgacatttcataaagcattattaataaaacatcataatttggtaaacgtttcataaaattttataattatgataaaaaaaaatttctttttgttacttttcttcatcaccaaagttatacaattaagtttttgtaacaaaattgatacacattgtattaatttttattgattttaaaggagaatgtttctaactatatacctatcaagtaataatgaatctgtttcatacttattaacaaatttggttttttttagtataaaatggctgcagatgttgcaagttacaacaatggagatggtagcgataaggacccgtctgatcctactagagatccaaatcagtgcgagtcttcaggtattttctttttcattttaattacactgacaaagtaattaaaaggtgtatactaatgtatttcttttgttattcaaaatcaaaaacagaatcaattgctctcaagaaaaaaggctctggtattgaggtaacatcagaagagagaagtggaaaagatataatatcacttcctaatgttgatcatattcaaagacttagaaaactgcttgggggccgcatattgaaacgtaaatcctcttcccgttacactcggtacactcatgcacgtactctacaatcacctgataaagtacaaagattagagggactgataattagattgcaaaagcaagttcaacacattagtcaaaaggttcaaactaaggaacatttggcaaaggacaacaagatagaggagctaattcaaaagactctggatatgcattcaactaggccgtctcaacctcacatgcctgagcctttggcaaggcactctgacatgcatggacccttaacttctcagtatcagtggcagataccgcaaccaccaccactgcagcagcctcttccgatgccttatcactatccccacactaatgggccttcgccgcagcagcctcctccaccctattactatccccacacatatgggcccccattgcagcagcctatgccgccctatcactatcccaacacaaatgggctcccattgcagcagcctatgccgc

SEQ ID NO: 31665 - DNA, 2896 bp, Cannabis sativa
aactcctttccagggaagggcttgctatcttgaagactgatcctagtgagagaatgatagtcatccgggaacaccctttcagactcgactatcattccacaagaaaccttctgggatcaataacagtgagtgaagaacattctaggaatgatgattgtagagaccttttcatttggaggaactataccacacctccatttaggataactattagaccattatatcgagcttaaaacatttaaacgagtgaacacaaaacaaatattatacatatagagatgaagggcaggagagaagaaaaataatcaattgggattgttggacgtaaaaaaaatgaccaacttgatccgagataaatgttaaaataataggaaacaaacaataaaaaaaaattgagatattaatagaagatcatgagtaaattgctaaatcggcgattaactataaacatgataaaagatagcagagaaagaaagaaagaataaaaaaaaatcataaaatagaatagtaaaaaaaactattcggttctataggccttatgtgtcatctattaaggtatctaccaatgtaactcttcaaaagagtttgtcacatgaattatctatttttttaacagttaatatggataatagtgagattatgaatgaatatatttgagggcataaattaaaaaaaattgacatgtgaaataacatcattaggtattgtattgtattgtattgtattgtatattagtaatattttataaaatttgggtaatcataaaaattttaaacaattattctaaactaattttgattcctattattattattaactattaaaaaaacaacaattaccgacaatggtagattatcttaaattttagttttaatttttttaaaaataaaataataattctttccatatattttacctatggatagtaattttaaaaaatcaacattgaacaatttttcatatatatatatatatatataaggaacactttttaatggatattacccataatggttactaaacaaatttaactatatatattcattttaaaaatattaagccatcaaattttaatctaataacgaataacaaaagagaaatttaaatttctatacttaatttaactacttaatccaaaaaaaaaatctcttttcacattatattaaaaatatgttcatataaaaatatatgagtcaaactcaacttttatttttcttttatttttttcaactgataaaacaatctcaacccatatgatgtaaaaatgagagatttctcattttagatagaaaaattaagcagaaaaactcaaatttttctaattttacccattcatggttaataatattaagagtgcacctatctattttatataaagtatggctatgtaacagaatttttggtttaacggggttttttagtttctactttaacttttactgaatatcccaattacttaacataatattctttattaattttataatattattgtatctatttataaaaattatttagatattttatgtaaaaaaatttaattgtatatatttaaaataaaaattatatctatatttaaaccttaatttcacgacaataatttgtacactttattataatcacactctcctaactacaaattaagaatattatatctatcaccaccattactttttttaaaatatacgtttagacataatatataaaatatattttgaaataattaattttctaattaaatttaaattttgtcaaaatatattctaatataattcttatacatagagaaataaaataaatacgtatataataaaatttatttttttattgcatatataaaatatgtatatatataatcacatctaaagagtacaccaatgtagtcaaaatagctaaaaaaattgtgaaagatcaaaatctcaaactcaaaaaaattaaaaaataaaaaatacacattacttataattaaaaaaatttaacatacatgtattacacttaacattacttaattaaacctaattaaaaaaaaactatgtatacgtacattacacgtaacattaacctagtatatatataatcatttttattattttttatgactttttgtttttttacctttatcatgtcctagtaatatttcattgtaccttaagatcaacaatagactaaagttcagcagcaacaaatgaattataatggcactaatgatcaattggatgcaaccaagcagttggggctatggagacttgcccacaaaagtctccaaatatcaaatgaaagtcctaacttagaactgtcgcggtctcgtgaaccctgtggcagtttgacaattgacagagctgattcgtcaatcaaatcccgatgtgattgtgttatctgaaacaagattagcggaggagaaattccatagataatgtctgaagttacacttcattaaaggaacttacattccccctgttggaatggcagggggatttggtctctaccggaggtgcggtcttaagtgtaaggtgcttagtgaagataagaatttaattaatgtggtaattgaatctgatcctcctagcactccatgaaatttaatgggggtttatggccttccttctttattaggcagagaggcgttctggagcagactaggcaatttattattgaacaatttgaatccgtttatgattattggtgacctcaatggcacccttgcgcatcacgagagtttacattactctaattggagaaacacggctcgatactcatttgatctgtgtcgtatggtcacaagaacgggcgttgttgatctggggtcacatggtggaaaattcacttggtttcgaaaatccaatgtcacaggggtgcggactaaaaagagcttgccttgatagagcgttggtttcaa

SEQ ID NO: 31666 - DNA, 2328 bp, Cannabis sativa
  modified_base (2079)..(2079): a, c, t, g, unknown or other
atccacataattattaatatttataacacttatattatattgtagaaaactttagataactttcaagaactctgccataattaaggtactatttgcttgggaggaataaaaacataaaaataagaacaagaatgggaatgaaaataagaataccaatgaaatagtgtagaatttaaaatgtattaaaaaattgataaacaaaattattaaatattttatcatcttgcattgaaataatatttcatttcaactcaaaaaagtataatcatcccaccaaaatgatggaaaattcattttattggaatgatattctaatactttaaaatgcaaccaagtaaaggaatgaatcaaaaattgtttcttttccattctattccactttattattctgacccaattgtcacattttaaagattgaattttccaccaaagaatatgaatgtatggtaaatgaagcacaattgagagtgtgagttgtgtgactaccaaaagcagtgcctgcccaatagcctggagctctccttgttttcatgattaacaaatatttgatcattatttgttactaatgatttatttattttgtagcaaaattaaaagataaaatatattttttcaagacaaattggtatttttaccaaacttcttaaattgacaaaaaattgattcaacaagcaaatcaagagcaaaagatcatcaggggatcaacaactcaagaccctattcaaaagaggtcttcaaaatctcaaagtcaaaaagcaatccgaaagtcaaagtcaaaatctactctcaggaaaagtcaactttggatcaaaacatataaatcaagctaggaagctcatctacatcaacactacacaaaatcaaatggtataaatttactttagtcttgttaaagtgatttgcatagcacactagggttcataagtacaaattttggcctactcactaactttttcaataagttttctcacccgatggttcaaaaaaaattgattgaatttaaaaatcacattttgtttaagtaacagaacagaattggaatttttaaaaacggataatcgagtaaagagttatccacgttatagtgccgaaacaatacatgttttgaaactgcctaattttcggcctaccttttttcaaaaggtagtctgtttttcacagaataggtattctgttttaaaaacaatagtccgtttttcccaagattttttttgaaatgtgtgctagcagctataaatggctacttttcacaccaacactatataaacttgatttttactcaaaaataggagttggatgagcatttatatcatatacctaacctattaaagtgagattattgagctttcaagtttaaaatccaacaaacacttttcacacagtttgagcctaaatttttgtttattcatcttaagtgtgtttatttatcactctaggtttctattgtagtatcatacttcaagagtgattttgattgtaatttcaaaaacattttcatattgtgattgaggtgaggttggcaccagtattgtaaataacctggttatagtgagattgtcactacaacagtccgagaaagaggttaatagtccttggcggtgcaaaactattgtaagaggtttagaaacaccttggtgaaaatttcctgattagaagggttattcaagcccgttaacttggctcaatattggaactcaaagctaggtctatagctttgaagactaaggacgtaagtggcttacctctaccgaaccttgtaaaaatcgagagtttgaaatttcttacctttaaactctttactttacaagtttaattatttgatctacattatttcatgccatattacttgcacttatttgattaagtgtttaattgcataattttgtgttaaaagttttaaatttactgaaattagcttaaatttcaaattcagccccctcttggaaatatttcttgggctagcaattggtatcagaggaagggctcaatttatttgaatagatttcactaactagagcatggagtttccaagtaattcacaaaataacatgtcggaaggttttagcacaaatagaacancatacttcaatggagtagattttccttatcggaaaattaacttaccttcaatctatagactatgatttttggtatattgtgtctagtggtccttacattgctaaacatgttctaaagggtgtagaagtaattaagacttatcacgtatgtgatgagaatgataagaaaatgctttctaaaaatgctaaagctaaatatgcacttatatgtggtttggatagagatatatacaaaaatattgaacaagcc

SEQ ID NO: 31667 - DNA, 3603 bp, Cannabis sativa
  modified_base (913)..(915): a, c, t, g, unknown or other
  modified_base (1144)..(1151): a, c, t, g, unknown or other
tgattaaattctattattttggcactctaaataaaaaaaaaaaaaggaaaaaaaaaaagtgttgatgatgataatattgtaatatacaggatgtataattatatataaatatatttgggagaaatttgagtttattctttttaagcaggacacaccatgtaaaaaaaaatatttcaaaagttaaatctactaccaaattgtactaacaatttttattctacataaaatacccctcccacaactttcacacattctctctctaactcaaaactaatctattttctatctctctcccacagcatttacacattctctctctgattgaaataaaagtaaaaaatttgaaagtaaaaagtaaaagtaaaatttttgggtgtgtttggtaatattttttaatcaattttttgtttttaaaattagaaaaatgaaaatattttccaaaatgatgttctataaaattgtttttactttttaattttttaactaagaagaaaaattttgaaaaaaaaaaacactttcaaattttttaaacaatattttttatcaatattttggactcctaccccaacctagaccttgatacttgagctcggatcccgacccaaaccctaactaagacctggacgcgaatcccgaccctggctccaaacctgacttaaataaaagccacatataaaaataaaatgaaatttacaaaacacacttttgttttttgtttttaaaattaaaaaaaaaaagatgttctagaacacattattatttttaaaaataaaattttaaaaacatacttttatttttgtgattaaaaaaatttaaaaacaaaagtgttagcaaacgtcacctttgttttcaaagattttgtttttgaaaaacaaaaatgtattctacaaccatttttattttttaattttannnacagaaaataaaagtgtgttctgtaaagttcattttcattttcaatttttgattttatttaagttgggtctaggtccggagtcggagtcgggttcggattagaggccgggtcagcgccagggcagtggggggcagatttgtgtctgcatctggtgagagtctaaaatattcattaagaaaagaaaattgtttaaaaaaatactgaaagtaatttttttttttaaatttnnnnnnnnaattaaaaaattgaaaaagtaaaaacagttttattgaacatgtctttagaatgtatttttacttttctaattttaaaaataaaaaactgattaaaaaaatattactaaacgccacctaattaatttgtgaaattatttattatgtataataaataattattatttatacataataaaaaattaagttttaaaaaaaatattgattcactaactaatgacaagatttatttaggtttagttagtttaaaataatattttagtacaagtttgaaaataaattataaaaacgtatatacttttttagaaaaattagttcaccaattattaaaaaatattattttaatatatttctaaaaatatcactaacctctttctataaataatattaattatacaatatatataataaatacataatttgaaaactaaaatatttatatacttaaatcattttaaaatagaatagtatatataaaaataataacttctccttgaaaattttattttaacttattaaaataaaaaataatacacatttaattttgaagtataaaaatatctgaaattttatttttcaaaattaatattcaaattaattaattaataaaaataatttctaaaagatatgtataatgtgtatacatatatatattcggggtcaagcttaaatggtcttgatggtggcggtggtgatcgaagatgatcaggggaggtcagaggggaaacagtcggtcggccgacggttgagaagccacctaagccaatggctgcggctgagaaaccacctgggcctgtgccgctgtagataagccacaacagagcaaaacacgtctaagtgacctatttgcatgctcatcagtgcctcatgacttgagaccacctttgttagcctcctcctccatgtcgatgtcgaccatgggaccaataggtccgatcgaccaccagaagacagctacaagatcgatcgatccctacgattgccactcgtgcaactcggacccaaaaggctctcctcctccattgtcgtccatttcacgtgcatggcagccatgcatggcacatgcacacgtgaaatttttcacgtggctcacttttgtgcctcacaacttgaaactgcaccatttggggttcatggctttccatttcgagtttctaacaccattttgatgaagttggggtttactccttaatcctgagcttactcatcattggtggatttttggaatattatatgtacataatttgacgaaagattacaaataaattttaatgagaaattaccacaaaatcctatgccacaattatggtgtacaaatttttcaaataaagaccgtaaaatctctaactcaattttaccatataattaatgattcacaatcttgcataaaaaggattaaatcaatcaatttataatatattaacatatataaattcataaatatccaacacagtatttaatctatacaatcatgaagatagctctcgatactaattgtttgtttttatagtcaatataagagttagaaaagcaaaagaggattttattaaaaataatttgatccaatatgaacaataagcccaatgatatctcaatataatgtatatagattaaatctagactaataataagagaggcaatacctcttgtagcctatcaaaggatcctcactatcttttcgtattattatcgaacatccaatccaagaactttctgaagagttcacaccacaatcttccaagatagcatcatcactcaagaatagagggcgttgttagattcttttggatgagtataattaaattagcataatataatctctgttaatttttatggtccatattagagttaaaaaaaagcataaatggatttgactaaaattaattgaatcaaatatgaaccataagcataaggatctcaatgtaatatatatatagattaaatctagactagtgaatacagagataatacctcttgtagcctatcaggggatcctcgctttctttttgtatcattagtctatccaatctaagaacttgttgaaaagttcacaccacaatctttcaagccaaccttaacactcaggaatagatcgtgggccattagattctattaaatgagtacaattatgcaatcacaatattttcttaacttatgagatactgtgaagcaatagggatgatcacaaaactcacaccacactgagttaaggagatagagagagagagagaggcgtgtttgtataggagagagagtgagagtgaaaaaattaatcttattttctctcaaacctcttcttattctctttttttcagggtttttagttcatactgatatatattatataaaatgtgttatcccaaattttgcactctgacgtggcattacgagaatggtgacacgtggagtccgcttggagcgtctgcccgagaaaatagaccgagcaggatgcca

SEQ ID NO: 31668 - DNA, 1897 bp, Cannabis sativa
ggaaggattcatattattccgttgccaccactgtaaagatttcttaatccctaatgtttttatttattgttcttaggaatttaatatatataatgttagataatagaattatattcaacatacatgttagtaaatctagatcctgataaaataagtttacgacagaaaattcatttagacttgtagcaaaaggtagaggaagctgagaaggaagctctcaaaatggttgaggaaccgcagttgaattgagctctaccaaacaaacccttgcttaggcttgtgaagaatccaagaaaaagacttcggagctggaaggccatatttagagaatggctcaggagaagcatgatcaagaggctaggaaatcataagcgttaaagcaggcttttatgtattctctgtacaccatctggaaactaaacaactccgtgatggattttttggatgacaaagccagagaacagctgatgcccaatgttcttcaactagctgaagtagaagaatcgaagaaggtaatgaggacggtggcggtggttgatcctagaacttccctccttgagggtgagaacttggaagactcagctcttttggttgttgacactccttccacgactgattctacaatctcggaggtatcctgtaatgactgttatacttagacatgggattagtgggacacttagcattctttaatatgactatgtgattatttatatgttttattctttatagaccatattttcatgagattgtgtgttatgattattatttcacaattccagaaattttattgaattatatgtgtgttatgcatgctatttgtgaattttcatatttttacatttttatgcccagtaacagtggaattgggtggaatggaaatttattcatatggacacaaatatgtatcaagtattttacggtacaatattattggatatcttagaatatcggggtttaacgaaataatagaattggacctaggggctatgagataactttgtagggaaataagggcattttagtcttttcacccttagagcttagtcactctgtttggaagggataggtggttgcggctcatccttttgaggatgaccagctacttaggaagaaaagaaaaaggaaaataaaaggaaccaaaaagaaaaagcaaagtcaaaagtaaaaaaaaaaaaacaccaaatcaccttctccttttccctctactttgtggcttctgaaccagggccaaaactcagagttttccaccattttcaagcctcttcctagctagaattcatcaaggaattcataccctagctcctctaaacttctaaggtaaaatttaacctgaaatttattggctttctagggtttttgttagttttcagtggttgtttatagtagaacatgtttaataattttaggaaggttatgagatgataattaaaattattcaggactgtttagaagtggtttgaatttttttgggtggttgtacaaaaagttatgcaagtttgagttcaaagaactcaaacttaacttggttatgataatttgaattctgttgcgaactggattgaggtttcttcatgaaatatgttaattaccatgtttttagatgcatgacgaaatttggttatgtttggatctgtattggatgagttataggatttccaaactcggacagggaggtttcggaccatccaatgtaggcagtttctggacggccatttattttaattttttttttgagaatttgattgaggtgtcgtcataaaaagtgttcattttgatgtttttagataacctgcaaaattttataaagtttgtcttagaatttcacgagttatgcaagttttaaaatgggatagtggagtttctgttgggttttatgccataaataaaactcttt

SEQ ID NO: 31669 - DNA, 2440 bp, Cannabis sativa
  modified_base (140)..(141): a, c, t, g, unknown or other
  modified_base (693)..(694): a, c, t, g, unknown or other
  modified_base (818)..(822): a, c, t, g, unknown or other
  modified_base (2029)..(2045): a, c, t, g, unknown or other
attcaagatacttaattatttgctactatttcatgaaatttaatttaattagaaaatatatatttcagttgaaaattaatttattaattagttttggaccaacttaaattagttagttttcttagatattaaattagaannaataattaagttgattttattctagatacttaattatttctattttattgaatttaattaaatagaaaattatatttaagctagaaattttttaatttcaaatcaacttaaattagagtaattttcagaatatattttattttattttaataatcatattaccacttaaaattttgaagtgcatttgttttaaatgtagatattttgaaactttttaattttgaaaattagattaaagttgaaaattaatttgttaattaattttagattaactttaattcaagtaattttcattaatgatttaattaaaataaatagactaaaatatattttagaaaataatatttagtttataaattatctagatagatattttctaggtagatttttggtatttttttagatatatttaattaaataagaaaattcaagttgattttgttcaatatttctaaattagaataatttttcaagttttattttatttcaaaaagagtattatttctaaatatattggatttcgaattcaattatatatttatagaaaattanntttgagttgaaaattaattatttagttaattttggaccaactaaaattaagtaattttcattatatttattggaaaatttacactatggatggaaaataatttttatttctcagatcttcctannnnntaattttataaatattaaactaaaatttatatttagagtcatgtaaattagtgattttaattaaataaatttatattaaaataaatagattaaaataagtatcaaatgaaaatacaacctttaaaataatgagctttagttataagaacattcgatctccattgttggttttacacagttcttgttttagtgagtaatcatctctaatggatgaacgttcattagtaatttaacgtcgtaaaatctcgaaagataagtattattgtaagtgttttattcttactaatgtccaccccaataatggctgctaagagtaagacttacaaggtatgaaacaatagtggaagctcagaagatagaatgtccttgactctcgcctaaacgggacaatgccggattctagtcttgatcgaataaaaggttgttaaaatggtctccattttagatgagttgactactctattcaatgaatgatatctctgactctttcctaaacgggacactgtaacagtttgttagaaaccgtggaaattatttaaggtgtgtttgttttgtactttcacatgtctttcttacttgctaaatgtatgataatttctgaatgtgcatgaatttatattgaaccatgttattttatgttattaatgttgtagtataatttcaaatcttcattgttggtctaacttaacttgttgcttttaatgggacaaatcccaaaggattgtcatccattagacaaatataatagtgttagatctaaacagattagtatttgtaaatgcaacatctacttgtacatccaaagattatagcttagactagtgtttacaatatgaaacaatgaagaatttataaaataagaataacttttgactcttacctaaacatgacatcattgtattcttattttaatcaaaattatcctttatcttcctcttagatttttcatttaaaatttgcttaatagtatattattggatagatggtttataaattatctgcttatgatgtcattctattttcttctatgaaattgaatggcgcagataactaaattcctgacatctatcccgaaatgatataaatgctcgatcttaacaatctcctacttgtatatgtttactttaggcaacctagacttatagttagattatagtggtggtccaagatagaataataactcaagaaatatttggtataaatttannnnnnnnnnnnnnnnntttagattccaaataaaaattttaaattttagtttcctagaatacattgaacaatacaatatgacttcagaaattattaatatccattttctgttattggactcaaactgtatgtttatgtatggaatttaagttttgtattctgcgaccagaatccacttggactattctaagaactctttgctgtaactagacctaagtcatcaaaagaccacaaccatcaattatatatatttataacatttgcatcttgttcatagtggttttgacaagatgattctttgaaaaaagaaatatgcctatatccacttgaaagtacgatcatctatattcgaatatggatgtacattcaggggtggatatgagttttggttatattcttaagacgatcactc

SEQ ID NO: 31670 - DNA, 2525 bp, Cannabis sativa
  modified_base (143)..(143): a, c, t, g, unknown or other
  modified_base (900)..(904): a, c, t, g, unknown or other
  modified_base (1199)..(1201): a, c, t, g, unknown or other
taatcttggatgggtcgaacttaaattaataaaatcttatgttataaattttacataggtgaaattgtgttttgcatttatttttaacattctaaatgtaaaattttttacttatcataatttttggcacgcccggtgggacncattctccttttcatctccaattatgatgactattatttaactttaattttatggtgctaatcatgtttaccgttttgtgggaaaaaaaggcaccacaagtcatagtttacttccagaaactaccaacctcttctgcccaagaagggaaaaagaaccacttctttgcaacattctctatcgattgagcacccatttcatgtagggtacccgaaccaatatagaatgtgaagacatctataccagttagaaaggctgaaagagggaaaagtgtgaagagtatccctaaggctacgcaagccttgagaggcaaggcagcaaagggcttcaaaaagaggcaagcccgggcaataaaaaggtccgcgacaaaggttatcaagacagaagtgaggctaacgaagattggctcccccgtaatgatccaaaaggaatggggccatgagcgtatcttggttggttccattcctattttcttgcccactgtcgcatcagtgatggttatctttacggaggaaattgaggcaacaccggcttctcaacttcgaagaggtaggaaggcaacaaaaggcaggagggggacagagacttcaccttcaccaaaccctttgaaacgagggagttagaaggaggcacgccgattaggcctccgatcgtaatccctgtcaatcgccaaggtcaacagggggcattgactgagatcaatgaacaccctttattagatggggggtgtaagacgcctttctccttcccaaagaaggnnnnnagtgacagtgtaagggttcccaaaacaagccctaactcattccgaaaaagaacagggtgactagaagttcctccagggatatcaagcaacaagggtcacttcaactgttaagcctacctcctacacgggccctgtaactcgatcaagagctcgtgccatgcgtacaattctcgttcaggaatcagtgaacccctttgttcaaaaagttcaggaagagaggtgttgcacatctgaacactctttaaaggacactccctttattgaacacaatgaggggatgtctgctgatctcatnnntcagttcgaagcactaaccattggaaatgataaaaatatgccagtgttagtaactagggcaatcattaatgaagagaagattcaggaactacaaagattattggccgagagggatgaagtagcccgactctcaacacaattatctcatcaagctaatatgagacaaaaggagagtgaggttagacaacattcctcgccttcagcgctgcctgtaggcaatacacaaccgccaccactcggtgtgcaaccaacactagctggtgttcaacctcagcaggacctgaaggcttttatcatggagagtattcgggaatatcaggctgcaacaatgcctattcttggatatcataagccataatcagcttactatgaccaaatcccatttccaccaaactatgtccgacaaaagttcgaaaagttcgatggaattaatggttctccccatgagcatttggcctatttcacctttgcatgtggtgaatctgcccaatcagatggactatttattagacaattcgtgcaatctctaaaagaggcagcattcacctggtatactcagttacccccaggatcgataaatacttgggacatgcaaaaagtttttctagcacagtttgtgagctcaaagaagaccataagtctccatgacctggtggaaacgaagcagcaaattagtgagagcgctaatgagttcataattaggtggagagatctcaatctccaatgtccaaaaaggatattggaacaagcggcggtttcaatgtgtgccaaaaacctcaaccctgaggtggcaacttttgtgggcacaatagaacccaaaactttcaatgagctcgtcttgaaagcctgtaatgttgagatacaaatttctcggcaaaagggtggtaaactctcaccgagatttgaaaacaaaaagccattcaagaagggagaatcaatggcaacttttatcaataccggcaacaaagataaagggaaggcacgagagcgacaaaaaaaattaactctcaaagaaaggaaggaagttaaatattccttcgacgatgatgacgtcgaccaaattttcaatgagttgttaaaaattaaggcaatacgagtcctcgagccaaaatgacccagcgagagttgtatgacaaatgatccaaattattgtcggtaccaccaaattgtgagttacccactgtcggattgctacatccttaaaaatattatagaaggtatgatcaagagaaaagagattgagattgactcttctcttgggaaagcgacaacaaatacaacctccttaactgagaatgaccaaataccaaatgatcccacacaa

SEQ ID NO: 31671 - DNA, 1963 bp, Cannabis sativa
aattcacatctttgctcactaatataactccactttttttattgttgctgttattgattatattgtaagtgaactcattcctaataattttgtttagaccatttaatttaagctataatattttttttttgaatgcttttttatgtttagcaagttttgatgtttcgagatatgcaagagacatcatcaaaagattaattcatgtccaatgccttcagattcaacgaagcaatatgtataaaatgagaatgtgtttagtcacatgaggaagtttagattgattttcacttattaccaatatttttgtatatttataatatattttacttcaatatatattaatatattaatatcacagattttaaataacttgcttaaatgttaatactataacttacttttttttatgctaaaacatctattagttaaacactaaagaaaaaaaaaaaaaatctttaatagatcagggcatctccaatgctcaaatttaaatatagtgtcaaaacaacaccaaaagagtataattgtagcactaaatttttttctattctaactacaacactaaaatttacactaaaaaatattttttattattatattattttattgtactatctcacattgtaatatttatataaatattaaatttaatcataaacacattattttaatattaaaaactaagaaaaatatttagtgtagtctatagtgtctcactatttttagtgtgacactatagactcccacatatataatatgacatttagagttccattaaagcagttttatgtctaaattctactatttttaggattttagtgtcccattaaagaagccctcgtataatcaataaaacatacttaatttcatctcatattatgaaatttatgtatttaataatatctgtattttcatatcacttgtgtatttttgtaatagttatggttgatttctataattctatcagtcaataaaaatgattttaatagtttatcattttttttctattcatttattcaaaaactaaataatttttttaatttttttattagttatgaaaaaatatcttcttacaaatatttatattttatgctaagcatataactatcaagtattccttttataaaaataaataaaataatataatatattcactaaatgtatgtttttgataacaatatatataatttaatttttaaaaaatttctcatttatttaaataatttcttattaatgttttatttttttttaaaaaatatatataataggaaaattaccccacatactcttttttaattttttttttaaatttattgtttgggttgctatacgaattttgattgcaatttaagatgtttagttagttgctataagtatttcagtgtagaattccgtaaaaatatatatataaaaaaactattttaaagtgtaataatagaaaaactctaaaatagtatcaatcatttttattttcggattaatatatattaaaggctaacatattttattgacaactttattctttattttttttaagttttagtctataaatgcattctaaaaaatttcaattttattccctacataggatataaacatgtagttgttaagatcttatatcctatttacggtgctcttttctttccctccctcatgcctgccttaattctttagttttttttttttttttttcttcaaaatttgattctcataaaattcttagttatactatattttaaacgtttcctctctgctctgctttctctctccatggcgaggaagaagagggtaggtgaaaccagtcacgcgcatccctgtggaagacatcttcaatggaaacacttcagaggtggcggcggatgatgattcgcactcgacggaaggcttgcagctaatcgctgagatggtcaataaccatgacataatcgaagcagaggaactaaatcgcacccccaggagtcga

SEQ ID NO: 31672 - DNA, 1761 bp, Cannabis sativa
cctgtacggatcccagcttgaaggagtgcaagctgttgtccgtcatcaactttcttagtcttcgaggcttcttccatgaacctttttataataattttcaatgtctttgtgggtagttgcttgatgttagtcagagcactgacttcgagattaattttcctcgcggcgacaaactgtctccggaaactaacttgcaacttgttccaacagtccacggatcctggttccaattttttgaaccattcctctgcggacccacttaacgttagtggaaagcataggcacttggcatcattgttgattctcatgaccttcattactcggttgattcgagacaaatgatcgctggggtccgtatccccagtgtaagcccccatttcgggcatcttaaaatttttagggagttttgcctccaaaatgtgtctagcgcacggctcctggtcctcacagtcagaatccgtgtcatcccctttttgtctctaggagactcgggcaatatctttgcgcaatatggctagctcagccaagattccttcgttcagcgttccggcggagactgtcggtgcgtgtttctttttgtccaagtgatcccgtaaatgaccatgcttcccgttgatctgatgtctcaaatcaacgggggttatctccttccccttcctcctttctctccgggttcctggtgcacagaaatgctctttcggtcctctcgatcctgaggtccaagactccctttttggagtttgcccctctgtggacctttccctttcgagaaatctgagcagacctttcgcagatcttgcacctttttcatttttccagggatggaagtaggattttgccgttggtttccttcggagggaaatcgtatgggactaggctcccaagacttatgcttctgagtgcttggtgataactcttctggtgtttcctcaagtctcgcagggatggctttaaggtgtatatggatccctactatctccatggctttttgcatggcgaccatcacctcttgcatccttttgttttgttctttttgggcggtgatctcagcttcatgatcagtagccttttgtcttaagatcagcaattatgtgtaactgccgtcgtcgtaggcgtcgtactcatcaacattttcctcgtattcgccattggtggcctcttctcgctcttcggaatccacgttgactcttgaggctacttcctcatcttcagggttttgagcgtcttgaggaggacgggactgacgtgtgttgcgagtttccatcattgatgtttagtttacagggttgttgtctacttgcagatgcttccttcaacgctcaatgaaagcaccaaaatgttcaccgaggttttcggcaaccaatttaataatatatatgagaaagctataggaagtttaatgcatgagatttttacgaggttggggcattaatgagccttagtccacgagtctttcttatttatgagagtatttattacagagaatgttcttggtagttttctctcttagttgctctctttaattcttataaacccagaattctcaacccctatctcagtttatttggggggtatttatagtgtttttctggagtgatccctagaactggagcacttgtctttctgtgtagtttcagtaggggcacatattcccagcagatacaacataggaaatatatgacctataccttaggtatctttggggttaggtggataaagccttttatcacttcttgattgatgtgatccctcatacagtag

SEQ ID NO: 31673 - DNA, 906 bp, Cannabis sativa
tttttggattataataagtaaacgaagatattttttatattagaaaaacgtataacgacatgtggagagggagagacttgtaactacaaacaggagtcattggtttccaactttcttatcgccatggtatcttcaggctcagcagtagtatcattacctctgaatcatcaactttcatattttctgttcccaacaaaacccagaagaaccaaaactaattgcaattgcatttggtcctccaaaccaagaacatctcaaactcaccactactcaactactcccgtacgatgccaaaagatgtatgtccctggtgggtatttaaatgtcagtctctctttcttctttctctctctcatctacaaataaatacactaacgtaaatataataaagagtggaacttttgctttgttatgtaaaaatggcaggatttggagaagcatcaccagaagcaaaagcagccaaaaacctccataatttcttcacttacatagcagttaggattgtcggtgctcagcttcaggttcatataaaaaatctacatatatactgcactattttttttttttgggatgaatttgtaaataaacatggttcttgattaatttattaattaattaaaaacgacagagttacaatcccgaggcatacaaagagctgatggaatttatggataaacactcgttgaatgatggggacaaattttgtgctagtttgatgagagaatctcctaggcataaaggtctaggtatgttatcattcacattagattacatcaaaggatactaaaaaacaaaaattctgttactcaatttaatagttgtctatggcttttgatatcatgtgattcaaatccatgggaaatatcattgggacacacacatggcagctatgagaattttagaggt

SEQ ID NO: 31674 - DNA, 4110 bp, Cannabis sativa
tgttatttctgattgcaaattgttattagaacaaatgtgtgttgtttctgttaatttcattagacggtctgctaatagtgttgctcactcctttgtgagagcatcctattttattgttgatcgtactcttacgagcaatgatgtttctacttaattgctttatgtaatcacaaataattgcaagtaataaagttgatgatgtttcttaaaaaaaaatatatatatatcacaaaatatttaatttgattctatttatattgattattattgatttctctccaagagtaggattgatatcaattgaattatttgtgattttttttaatataaattatctttggggatttttttatattatttgtggattttttttttttgccaagaatattatttgtggacttgatatcaagtatataatattttatttttttttggacaaagaaatcaatttattttgatgaaaggatataatgcaaatgtgatgtgattcatgatgaatattattattattattatgcatgcatatatatgcataaaataagatgtgatgatcacatagataatatttggaataaataaactaaatagtaatttttcaaaaattatagtaaaaacactaaaatactctataattaaattttagaatcattcatggattagaaaaaaaaaaagaaaaaaaaaagcaatgaataaatttttgaaatcaaatatgtattttcataaaaatcatattcatacaacaagtcaccaacaagttatcaatttattttgtatttttaaaaaacataagtaatttattatatttatatttttgtcatagtattaaccattagattaaaatctaaaggttataaataaattactacaaatagtaattattttttatcactactctataaggattctatatatatatagaacacttctcaatgagtattacctattgataaaaattaaataaatttaactataaaaattaattctaaaaatattataacattagattttgatccaatagcgaataataaaagaaattttttaatttttatgcttaatttagctacttaattgaaaaaatattaaaaaatttctctttttacattatatcaaagatatatttatatacaaaatacttaagtcatatccacattttttttatttatttttttgctaaaaaacttttttcttaatttttttttcttcagccgattgaataatttcaacccatataatataaaattgagaaatttttttaattaaataaaaaaattaattataaaaacttaaatttttccaatactacccattcatgggtaatacccattaagagtgcacgacaaaagtcttcaaaaagttacagataaattcccaattttttttttaaaaaaaaacaacaatagtctccaagctcgacattgttctaagtccattagtcctctttgaaagttctagttattctaaaagcaaagtaattttttttaagtatgaatctagatgaattaaagctagaaagataaatcaatgaacacaaattttacaatcttcctctgcattagaaacacattccaaccgagtagtacatgagtccccaagaatcaggttaactaacctccactataaaatcattcagaatacatccaccagttctgatttacaaatcagcaacatatactgcaatgatcttacacaagagttactgattcacgtgagtacaatcaagatcaaagatctaagtccacttagatttgagaagtcaagatccacttgtttccaccaagctgaactctctccagcatataagtctgaacacccttcaaacattgtagattcacactctttctccaaccccttgcagatccaatgagttatgatcaacaacacacaatcgataggaaaaaatacagaaaattatttcgtcgatcctagcagagcaagaatcactagaagattttacaaaaaaatagagagttagttagaaaaagctacaccagcttaatataactaaagctttggtaaaactgaattagctaatctaagaaacagctcaagccagctggcaacgagctgaacaaattaatgaaacaaactaaaagttgacctggcaaaatataataaagccaggataagcagatgcaactaagataaacttagatgaacgattcaaaaagccaagaaagaaatcaaaacagaacactaacccaatattaagtaacataatttgtcatacaaaaacatggcacatacactcttattaatagatatgttaattcctctaaaaaatatcacgtgatgatattaaattacggcataagtaccaaaatattttattttgattcaaataagttcccaaaaagtttactttattgcagatgagtcctaatcttgagaaattgtggttatattccctaagctcgacattcttattaattcgtaggtatccaatttaacagctttgtttgtagttcttaaaagagcgtcaaaaatttattggttcacaacataaaaattattttaaaataatttaaataataaaaatattataaaaaatttaatattttttttattctcttttattaaagattaaaatacatatataaaaaacttctacgattcgccacccactcttcttggtggttgaggcttgctgccgacaagtgtcatccttttatctccacttttttctcttcccatctcacgattccatgcaaaaaagctagataagaattaaaaagggttaattaattagtctttcaatttatttatttgcttattttagattaattttaataaatcataattttgaccaataaaaatcaacacatggtattttttggaacaacaaattgagcagttaaattaggtacttacggactaacgagaatgttctacttaagactgctgccacaattgtttgagattgaagacttatctgcatcaaaatgaactttttaaagacttatgctacgatttaatatcaacacgtgatattttaaggagaaatttacagttttgttaaaaagaaaatcaacagatatacaagaatgtcgagcttaaggattattgccactatttttcgaaattggtaacttatttgcattaaagtacttttttcaaaaaatttaccctaatttttccatatatggacacataaactaaaaaaccagttccaagatacttgtacttattgtcttgaggaattaggttagtgtccatttttatgagtggtggaactggaaggaagtgaaaatgaaagaagggaatatgggtttcaaaacgtgtgaaggccgcaaatgtttcaagaattattgctttactacttttttttttctttttcttttaaggaaacatacaaactgttaagtatttatgcaaaatatattggatattcttcttatatatctttttgtttataattatttagtgtttacaactttcaagctttaagttaccttaaagacttcaaatgatattgcacaagttgaaaatgtctagatatataaatagatagatacatccaataataaataacttttatgcatttcaatagaatttgatccctttttttttttcaatgagtccaacagtttaaaaaagaaaaaacaaatgtcctaaaaatcattagtaattctaatgttcataattttaaacaattaatttttttatctccaattcttaccttggaaataatgttgataccgaaagccaaagatgtgattcatcgactcatgttttaatttattataatgacttactttgttttggtcaaatttttacattatctgtgttttttctataaaagaaaaataacaaaataatgcatattaaaatggaaaagataaaagaaaattattttaatttagggattgtttcatttttacactttaaaaaatatattttatttttttttttttgcatttttacggaattctatatagaaactcatatagcaactaacagaataatctaaatcccaattaaaatccgcataataactcacatagaaaccactacagcaaccgaaattgtaaatttgaaagaaaaaattaaaaaataatatatgaaggtaattcctcttaacttaataattaataaaaatttaaaagaaataga

SEQ ID NO: 31675 - DNA, 2030 bp, Cannabis sativa
gagttattccacattaaataagaaaatttttactcgaaaaaaggtaaatttcttggtttatttattgtagatttaattgtggttattgaaatgtagcttaacttttgttagaattggttttataaatctataatactcatgttaataaatatttctggtttaaagtaaccagattacttattatttttttcaaaagtaaccaggttactttatcatgtttgttaagtaaccaagttactttagagcatgctaattatttttattatttttttgtgtagctggaagtagttcagttgctacctaaagaatctgagaaagaaagtgaaacattaaaggagttttcattccaacccaagtttatgtttagagaagccccacaaacagatgttcaaccattgacggagattccaattttaaggcctagtacttcagtacctaaagcaaaagaaaaatcacctgtaagtattgattttttttttctttttcttatgttttattttcacttcattttgttttattaacgtgtttcactttgttttaggttatggaaaccaaaaattacaatgccgagttcaaaaaacttgataaacggatgaaagatatcttatcaaaccaaaaaaatattcatggcgaacttgtgatattcaaccaaaattttaaagatttttgtaagattctaagtgaatacacaaggagtactccatccggtacatctaatgttgataagtgtgttcttgaaaatgatgttcctcttactaaggtaaccggtttcttttcattctacaactaatgaatttaaattgctaacttgtttgtttattttaatttcagaaggacaaaattgaacattctttatctggccattgaaagttgtacctggtaatgttcatggcggatgatggatatgttgaccctcaaaatgaggtacaagaataaatatttatcctatttatttctaagtatcaggttactttttgtagatacttattatcatattttcgttattattcttggcaggaactcgaaggcaaaaaattgatgggtgctttagttatagaggatcatgattgtactgatgaggttgttgatgcggcttattctggtttcagtgcagcaatgaaatttattcaaaaatccaaaggagaaggagctcaagtatgttttaataatttataattatttcatactcttttatttaaaatttttgttgtcttatgttttcgtgttatttccagattactaaaaatgaagaaccacatacaccttttgttgttgtttcccctgatttgaagagcacaactgaaaaggccaaattgtctactgagaatatggttgatttagagaaaagggagcccaaaccttctgcgatctttcaatccccttttgttactgattttggttcatcagaacctgtaccagtagggaaaaggaagaatttagagattgtgaagggaatcattccctttcgtaaggagattgggaagaatgctactactgaagaaacacaagcatacaacgactggtattttgagggttataaacctaacactaagtcagtattctctttcttcttttatttgtttttttttttaaattttcactacatatttttatgaattattctcatttctataattaatgcatttttattttttgattgtagaaataagttcgtggctgacgctaatgacattgattttgattttgggatcatgcacatcaaaaaaaaatattggttttaccaacttcaaactggtcaatttttgtctgattctataagtatattgttttattagttcaagaccaagttacattattatttattttatagtttgattgaaagtaacctgttacttttcatttctttaatttatgcctttcatttttcaatttgttataaattaagtggctaattgattatcctctcttttttattgcagcatatcgatgttattatgtattatcttaggaaaaagatcatgcacagtggtactatcaacttattagttacgactactgattcaattttc

SEQ ID NO: 31676 - DNA, 1566 bp, Cannabis sativa
  modified_base (1341)..(1346): a, c, t, g, unknown or other
gttctatagcgatcatagttggaaagtggtaatgaggaacccttcattgtaggccggtactcgagatctggctcaatgccattatcaattttctcaaggtaagtaacacatttgtcaaaaggatgtcctaatctcccacactccatacaatactcgggcaacctttcataccgaaattcaacccagaatttctctcttgcttgctgaagcgtgatcattcgccctcttaataatggctttgttgtgtcaattttaactctgacacgcaaataaggaccccacccctcgttaagagaatcttcatagacatccacatactcgccaataatattagcaagtgctttggcaagttcttttgtcttactgagaaaagggagtcgataaatttgaacccaaaagggtgtaaagacaagggaatcacagtgaaccgattctccaggctgtggcgagtacaagataatatggtgattttgaaagtggaaaggttccctcagtagaacccttgttttgtctcctgcacaaccaaaactcagcgaaaacatctcagatgattcagtaattgtgactgggaacctcccattccagtgttgagccatttggttcctaaatgtggtgagccagaccttcttgtttgtgagaacttttgcatacaatacatgatcagcagtattttgattatcaaccaaagccaaaccagagaaatcgaagacagattcttcttcctctgtaagtgtcataggttctttcattttattagtataaggatccatggaatgaagtacagattaacgaaggatcaaggatgatggaaagaacagttattgatggataggagagggaaatttcggatgaacatgaaaaaaaaccagaaaaaaactgctaaattgaatgagaaaaactgttaactgccacagagcaccaaagttgggcagacgctcttttaaaaattactcttctctacaaaaataatttttaatataattctcatttaaatttagtttattatttaattttttttttttttgcatatgttaaaaatctaattattcctttaaaatagaaaaattacattattatatcatgtttatttttaacacaatatcttatatagctacacttacatttattagtatataatttttagtgtcctcctcttcttattttggtagaattttatcttattctcatttttaacaaaaaaaaaattaatgtaatacaaaaaaaaaaaaaaaatagcgagattattctttaattaacttatgtacatattattacaattattttcgtgatttcaattggttattttaaaaaatttgtacttctattattattattattatnnnnnntattattattattattttggaattctcgtaataggatttgatatgtaagattatgtaatttttttttttttttttgagaaaaggcctgttattataaattaaagacaatcatttacaacaacagaaaaaatagtaaaagggatctcttctaaccatatacaattgttatccaactgtaaagcttgcttaactaaatcatgtgcaacttgattaagcatcc

SEQ ID NO: 31677 - DNA, 1460 bp, Cannabis sativa
gaaagaatcaaacaatggtgatgatgagagctctttagtttcatatttgttttgagtcaaaatagagagaatgggagagaatatagctagttaattagggtttttgaatggtgagattatataattttgcagtgttgagaacttattggtagtgagttggttatatttatatatgtgtatatatataagagctagtgaagttttgatgaaaagggtagaattggatgaatcaattttttaatcatttatatatataaatatttatagagagaattttgtttctttgtgaccaatcatgttctgccatgtgagtataaagtgttatatataatatatgtatacgtatatatatatctatatattgccttattattaatacatttaataaattcacatgcaataatagcaatcaatccggacaaactatatattataataattatttatttatttattgaagaaaaatattatcatttatataaatataagaccagccggcctttatggtaaaaccacatattttatattaattatataatttttttttttttggtaagatattatattataagatttaattcatcatgcaaatatatataaatataccatgatcaaagattccttttttaagaaaaaaataaatgaaaaattgatcatgtttatattagtgaaatattatgtatacaaattaattacctgaaataaatctatagaaattgaaattatgatatggcttctttgccttaatatataattgtagcctttgaaattgaaatgataatatatataaatatataaatttatatataaatataataaattatatcaaaacaaagtatggtaattggctagtgctcaatacaatttgcgtgcaaaactttagaagaagaaaaaaaaatggcattttaatattttgttttttcaattaatattttttgtgatttgtaataataattaatgaaattaggtcttgcaccacacaaaagtggaatgacatatgattgtaataattaatgaaattaggtcttgctccatacaaacatatcataaaaaataaaataaaaaaatcataataaatttaataaaatcataataaatttcctagcttatgtattgtatctattttctattttatattttttaaaaaaacatcacacaaattatatgaaaaaaaaaatcacaaattatgatcataattaaaaattaagtactctcatctcaattatatctttataaataaataagaaagagatctgatcatatattcacggatatattgatcaataatattattctacaaatttaatatattaattaaaaaagaaaaattaaatctaattaataaccaattctttagcttggtgacatttatatattcaatatctcatttaaaaatattaatggtagaaataatttcattttcttttaattttgaattaaatattatgttaatttttttt

SEQ ID NO: 31678 - DNA, 1829 bp, Cannabis sativa
aaattttctatttgggttcggatgacactcaaagagggtaaaaaatgaaaactttttaggtgtatgtgattaagtatcgaaaatggaagatttaagaaaaaaatgtgctcaaatatttgagaaatgggggagaaaggaaggggcggaggtggtggtggcaagggttttgggttttgggttctctacgttttgggtttgttgggttctgctgggttgaggaagaagacgatgctagctatatattgtggacgaccctatggcgtcagttcctatataagaaccgacggcatagggtacacatgtcaaataatcgtgtaccttattctgtcgcttcttatataggaaccaacgccataggttaatttcatataacccaaagtcgttcaacccccaacagactctaaatggtataatgcaattctatacctacggtttttataaaaaaaaccgcctctaaaggtcaattttcaataaccgggaatttttacaccctttagcttccctttttataaaatgggttgaaaaaaatgaagctaaaaacccactttgtagtagtgatttttatttttttttttatatttttttttaccgtagagcatattttttaaaaaatattgtattttttttaagaaattttaagattactcttgtaattatatgtagatttgctttattagcattctcttatataaaagcccaagtttagtatgataatattttgtatattattaaaagaagtagttaaaattataattttcataatcttgtattccaaacaaattgttttgtagattagttcctaggagatttataaggaagaatgcggaaaaagatattcttgaagtgcaagatattactatataaagtacccacaaaattttgaatgatagtgttgaatttagcatttcaagagatcaaattggtgaaatggctaataaaattgctaatattatatggagagcaagttaggacttttttaatattttttttaagattagagaattgttagttgggaatatactcatttagtaccttgtgttttcacgaaaagcatatttggtacgttgtgttttcaataatacttaattggtaccttatatttttaaattgtacatatttggtaccctaaagtaaaatttaatcaattcagttttatcaatttaaccaaatagctttcagttatgtgtaatcaaataattaaatttgaattcaaaattcataaaattttagactgttaattgtattgataaagttttatcaaaaaaatttgaatttagggtaccaaatatgtataattttaaaatacaagatactaaataagcattattaaaaatacagggtaccaaacttgtatttagacaaaacacagggtactaaatgtgtagacactcttgttagttcatattttattataacttttgtcgattttgtattataaatgatgactttcgtaattttaaaatacatgaatttttttaagatgttaatgaataatttttatttgatttttatattataattttatatagttatctaaaaataaataatattcataatgttttatttaaaaaaagcaaaaaaaaaaaattgtgctttttgtttttaaaattagaaaataaaaatggttacagattatacttttgttttttgtttttaaaattacaaatcaaaagtggttagagaacatatttttgttattttatttttaaaaacaaataaagtagttataaaaacccatttttatttgggccaagatgtaaaatggccctaaatctaacaattaagttaataaatgtctcttttttaaaaaaattaacaaaatgtcattt

SEQ ID NO: 31679 - DNA, 1829 bp, Cannabis sativa
  modified_base (980)..(984): a, c, t, g, unknown or other
aacatattgatgattagtattccaaaaattcatatacttgtgtggtttggagatgatattaaatttgagtctttgctataaattctcctcctcaaagtcccaatattgaagagtctaaaaatgtcactctattattaaagctagtaatatatctctaataaatacatatttatattagcaattctttcattggactcttcgttttagtaattaaagaagtttggttatatgtatacaatgattttttattgtacatataaaatatatatatatatatacaatcaatttctcattctaactactgaatcaatagaattttagaataaagttttactatgctttgtttcatttcttagcgtattttatcttaagactttatttaataattttctctttcttttttttattttttatttttatatttagttgtttcctttaaattttgtaaaaaaacatatattatttgaatttttcaaaaacaaaaaaaataaatgttaaagttatatattgctatttatgatttaccataaattatttctttacattatggataactactatatgagtatgtattgagattatcatacctttataaacacaactatattttacttactaaatatactgacccacaatttatttttataaaataaattatttaaataataatactactttacttaccaaaatcttaaaaaaaaatcaaaactttaaataaaactaacaatacgtggttcggcacgtaacattcacctagtatatatatatagggatatgattttgtcctgtgatgtactttcatggaatgtattccgtggtacattagatgggtctcagggtacattaaatgagtgtccgggtacgtttttacttttttaaccctaattcccctagatcaatctcaaccgtcagatcaaataactccctcatctgacgattgccgtacatcacagattacaatccatgaaagtacaataacnnnnnaaaattatatccctatatatataaatgagaagtttgaggcagtgatgtggcagtctaaaatctctctaaaggtatttttcttttttctctttaattctatcaattttttctctattttttctactttttttttattttttaatattaattattaattttcctttcctatatagcttttcattatttttttaatgtttttttttttgaaagaaagtaatctttattagacagaaacatccgctaaaacaatgggctgaagagcaaggggaacatcgctctcagtaaaaagacgacctgaccaataacaagcaccacgtgccatacagtgcgcggctttgttagtaaaccgtttaacataagcaatagaaatatcacttaaagaatataaaataaatagacaatcttgaacaaataaaccaaaaatagaaggcatagagaccgaactaagaatagcctgaacaactaaaatgcaatctgtctctaaaatgacatttaacttgttattcctctttatccaactaagtgcctctttgacacttagaacttctgcaattttgagtcggcaactgacagaagaaagagttgaaaacgcctcaattattcgaccatcacagtcgcgtgtgacaaaaccagtaccgatctcatttgtgtcttcaaaaaactgtcccatccacattaatttttaactgtccaacagctggtttgaaccagtgttctcttgtgtcagtgcgattggaagccaaggaaaccgagtccagccgcttagcctgagcacacgcacattgtggaagagtggtacgagtcagccaaacaacatcagtagcactacaacttttaccattcca

SEQ ID NO: 31680 - DNA, 5263 bp, Cannabis sativa
  modified_base (2143)..(2143): a, c, t, g, unknown or other
  modified_base (3521)..(3521): a, c, t, g, unknown or other
taaattgtttaaatctatcataatctacatctaaatataatattattaaattaaaaatttaacccacaagcaatttttgtttgataagatttcatatttaagcctctttatacattggtaaaaacatgattcatttaaacatcaaaactatatattaataattatgtaattttattacatcactattcataaatttttacagaactatagtagaaatttccaaaaatttattctgataacttcatttagaatgtacaaatttttattgtatattaagaatcataaatcacacttcagtatcactaataaattttcaatttattttgtatgaattcattctaatatagttaatgtgattattaacacatactggattgttattctacattcataatttcttataaggtttacaaacaaacttaaggaagtcagtaattgtgagtaaatcttatccacagacaagatgattcccacgtctagaaatttaaagaataagcaatatagtagtggttttgttttaaaattatcaaagacctttatgttccaagcttctttagaaacttgatttagaaaaatatttaaaggtctttccaacaaaataatttcactcataaagatatgcaagttcaatttgacaattaaaaacgcgttattaataaaaatttctctacattatagcaccaaaaattatggaacatatctccataaatagaataaatgttaataaatggtagagatattcattacaattgattttactaactttatttagagcttgtgtgacttgcattaagaaaagtatacaacaagctaaaatagtgcacattagaattctgtcatattaaaaatcatacaagtcaattaacacctgtagatatgaactcgtatttttcaaaaaaaaaaaatcatctcatttattaatgattacttacataaattatatctctacaaaagcaaaaaaatttaaatcttaagtagagaaatattacaatttcatattaagatagtgaaatcaaatatagatggaaaatattacattaaaatttgtgagtatggtgtatggataaactcccagtctatttgtaaaatttcttaaaagcatggattcattgcccgatacatatgcctggtacacccaaataatagtgtgacatatttaataaactaaacattgggctggagtctagcaaactccaaactttcctaaatttttgtcggttgatacttttcaatgggagtgtacatatcggatcgtgttctaaccaaaattgtttctcaaacgtattttaagttgtgataaggctagaacccgactttatgacatgtacacattttaaaaatacccgtatactagttagagtacatttgtcataggatagatcttggcccaaataccataaatgagtattatccatctcacaacactagaattgtgtaattaagaattgacttaatcagtgaaagcaattgatctaggaacctagtttctagaaacgatcatttattttcttaaactttcaccgcaagtatttttttttttttgaacaatgaacaaattaaatttcattgagaaaaaaattagtgttgagtatttcaccacaagtattagattattatgattcacaacaacttttaagtttaatggttattaagaattcataactaatcatttataatttacaagtcattgataaaattctaataagtcatattgttatttagtaattgcttacaattctaaattacatgcatatttttagtgattatattatgtacaataagagttcagctacaatgtattaattttagacacaaattaaactgtggaatgcaaagaattaaaattattgtacaatatgccatgaatgaagaaaatatcctaaagaataatagagtctatctttagtaaagttgcctaatagggtggagaacgttaattaagtattggttttttttaccaataaatactcattaggcaacatggagaaacataaagatataaaacaattgtcattgctaagaagttcattttgatctaagaatcaataacaaaggagatttacaggtctcacttatctttataaaagattctactatggtaaccttgacatttgttgctcgtttcaattcattaatcaattcnaaacagtgaactagaggagaatgtatacatactactataaagattttcctctaatagtggtgaacatatgtaagcttaaaaagtctaccgattaaaataaatttctcacaattggtattttatcttgtcatctttttctttaattttgaaaagagatatgaattaattatataccagaaggtcagtgggagtaatatttgttttatatatagacaatatgttacttgtaaataatgataaaagttttctatataaggtgaaacaattcatatatatctcaaattataattttgagataaaaatataaataatgtatataattttaattaattagagagtagccacaatatctctgattaaataaaattatgtattattcatctcatgttacttttatctttaactgtgataattaaattcaactcaaactagcatctgaaaatagatttagaatgaaaataaattaagaacattcttttgcttctattgttagaagcttaatgtatgtctaaaagtctaaataagattttgcattgtatttgttttaggaatattaagtagtatcagtataacttaagttaagaccactttatacaaaatgatgaagtatctttcatgagatacattaaatattactttcatacatattttattaaaatgaattgagattctggaaatatagttaaccacttacattccaacttcattgttatattgataaattatcatgtgattacgtctttaaaattaccaataagttgtatcgtggagaatttattattttcattatagaaattcgattcgtttattgttttgaaggtacatctcgtatggtgttttatagagttttatactaggcctagagttcagaattatatttcaggccattaagatcaaattttgcgacaaatttagctacagtatttatggctaagaactataagtagagtacgtactaatcgaagttagcatatcgatattaagtatttagccataaagaggcgtgataagtggtcattaagtgcacattgttgaattgggtgatcacatatccttgattaaacgtatgatgcaacacaaatttaaggatcgtaaattaaatatgagattcagttacccataggtagttttcatttgtacaactaaaataattcaatgaaattttaatttcaatattttcacatatttatgtgcaccttaatttcatatgagaaaattatcataagatgacctgaacaaacataaggtttagggtttattcgtttaagtacattatcacataaaatacattgttatatagtaaatatattataatacatggaagataatacacgacatattatgaggacatatcactatgattcatatgtttattatntaatgaggaacattgggtttgaatgttttagtctagatactgaccaagtggcagaatattagaatattttctaattttagaataaaataaagaattaattttgagatagatgaatataaaattgaatttagacaaaattaattaggtgatattctatatatggtcagattttgatattcattacctgatttgatttcttaatcaattgtcaaaatattctgacaattaatgtgacgtagatactgatggagtatctcacttataaatataggttttcggttcccgagctcttcactcattctgtgcaaatagcaaaattctatctaaaaagagttaagagagtgtaggaaattattcctaatataaccctacacacagcaatgatataatcagaaaacaaggtcaaaactgacctttaaacccagtaaaagacaatgttgactccttctgatttaaacccgaaacgacaaccacatatccaaggctacaagtcgttttatttatcctgaaccctaaaacacatatcagatatatatactcttttaaccaaacacacaacccaaccccttaattgaaaaaaccctaaccgttagtcatctccttcatggttcttctctgaagaacactaaggcaacaatattattacctcaaaaataccagaaatcaaccccagaaaattaacccttctcagtccgaatcaaaacccagaaaaacaaacataaatcagatacaatatagcagtaaaacaaaaaagaaaaatggagaagaagacaccaaatttttatagaagtttctcaaaatattgtgttgggtacgtcctctttgagctcgcctcgtttcactatggatcttcaatgatcaagagattacaatggctaggattccaaatcacaggtacgattggtaattcgaaatatttacagtgtttttactcttctcttttctctctgtttctctcaaaaatcagtactgatgttgttttcttctttcttgtgcatgaacaactccctcctgagttttggatctttgagctgtaactagggttccaaggcatacccactataagcctcttccatgaactcaccactgattttgttgctctgtattgatctggagttgtattcggatttgtgtttttctctctgtgaacaaatctggttgttactgttatattgctctgatttttgttgttctctactggtttatatatatgttgtagaagagagcatagttaggagagttagttacaaactgttaatagactttgtaactaacttaaatactttgtctaggttaatagaggccgaaggccaccttaatctttttactgcttgtaatctctgtgtatttgtaaatctgaatagtgtgcaagaatatggggatttatttcaacagagagcgaggaagcccaaattctcttatcaaacctatcgccgagattgaagctcaatcattaatagctggagatatttcagtcctttcatcgcatatacgatttctatatatatatatttaattattccgatttacatttcattttcatattatattaattctaacagttacgcctcccgtgttgatcctatatcatacatctgttctatataaaatgtggttataatataatagagttcttagtttatgaaaaattattggtgactttttttttaaataaaaaaaataacaaattatttttaaattttaatatttagaattagtacttaaattttaaatattatttt

SEQ ID NO: 31681 - DNA, 1525 bp, Cannabis sativa
  modified_base (902)..(908): a, c, t, g, unknown or other
gccccaactggtagaccagttcccaactggaattccggttctacatggtttcctggggaccaaccggcatttcggttcctacaggtccctctgaaccaaaattccattttagagaaggaattaccgaaaattccataactccaccaaatcaatctcaaactcaaagcaaccttccagacctgttctacacaccctagagcacatatttaaagcattaaaacaaccacccatgcccaaaatcgaatttcactattaatgagtcaagcttgagttcaaaactcaaagcttgctcattccatataacagcccctaaaaccacttcaaatcaactcaaacatacatattttaacctcaaaaacaacctccaaacaacaacagcaacaacagcaactaaaactctaattcatgaaaaactatttccttaaaattcaataatacaagagtaagagcttaaagaattatacctttgcttgagatcacttatcaaatagctgaaaattactagaattactgagaagaattcccaaccctagcagccctaggaattcgagagagagagggtaaaagagagagaatggtttctttttccttaagaattttctaatttcttcttagtaaatgagatacaaagtgatctatctaaatatttcagctacttactaataaaaaatcagattattacatcaacacaaagtccacaaaaggacaaactacaaatggcaaaaagactattttgcccttccctcaccaagcaacataaaatggcacttaagggtatttttgtcaactctaattctcaacaattcccattcccaatgtctaattatatcgccctgctatattaaaaatactacgatgtgattctaatagccaaacaccgcgctccaatgttgtcgggcacnnnnnnngcaaaattatgaaatttctatatctgacatataaaatgtattctgaattcaaataaatcaccataaattaataaataatttccataattaaaccctaattatatgctaatttccaaatttaagctaagcggtctttacaactatcccccctttaaaggatttcgtcctcgagatctaacctgaataactctggatattgggctctcatgtctgattctaactcccaggtggcttcctccaccttcctatttctcaagagtattttgaataaagctatggtcttattttgaaggactttatccttcctatcaatgatctgtcctgcctgttcttcatatgacatgtctggctgcagttcaaggttttcatagctaagtacatgagcagggtctgaaatgtgttttctcaacatagagacatgaaagacattgtgaactggtgaaagagctggaggcaaagctaatcgatatgcctcttttcccgaaacgcttgatccccttcattggagatacttgtaaaaacacgcgatcccttacttggaattcaacatttctgcctttcgaatctgcatagctcttttgcctactctgagaggcaagcattctagctttaatctt

SEQ ID NO: 31682 - DNA, 3368 bp, Cannabis sativa
attttcgttaactaattaataagcatttatcgtaataaattaaatacagaaactataagaaatttgggaagaataataaaagcaataatgacaccaggttttttacgtagttgtccagttaattctgcatagtccacgagtctatcttattaggatatttctagatacagaattaaagttttataatcaatgatcttttttttctcaaagattttgtgtccccttttttgtataatctgcccctatttataggaatataggttggcagttatttacatttgaatttgaaatacataactgtttccacgaaatgtgggctttgaccacgtcccattttaacacgtgtattggtaaagatttgaataaccgtttatcactattatcttcaaagtagtggatacggacgtgggataaacgcatctcgctagaggcatctcgctttgtacagagatgaatgacttggtttactcgtattccatcaatggcatgagcaccagtgtactgagcaaacttaagaactgctattcgaccataaggccttgctgaatggacaattatgtcctccatgatcttatgctattacacttagttattataacgtgggttatgcgctaagtgttccaacaaccaatttgcctcatcgatactttcttatgtgtagcgagatagatgtctcgctatgcattgtccgtagttccctcgggattatgccttccgaggcaagatggtttctcgtcaatacatgaattgatagtttgtatattcttgtctcacttaatactatacagtcagcgagttacgaatatactctgtttattctatatttaatgagttattccattttgcatttaatgacataattatcattatatttgttggttcatattccacgagattgacatgtgtcactttctgaagtacaaccgaattttgggtataacaattgccccttaaaaagtcattttcaatgaaaagtaatttttaaatgatgagcgagggtatattcgtcatgatccattttgaaaaatgcatacttttgaatttggcggtttatgttttcgaagcacatcttagcattaatgagccatcttttccacttctcccttattcgtgtccgttggatctctgtcctttaatcctacagtaattaagtttgaagtataaaacagaaaaagaaccatttttccagcatttttgtcgtgtcaaaacaaaaacttcaagcttttctgtgaaaaatccattcccattttctcaaaaccttgcatgccctcattgtcgttaacatatttcctgtgaatttcctcagatttagtcttcaatctcagacgtcctcagggctcgttcaatcgttcgtctcaaacccaaacacgggattctcccccgcgcagacgtatctctttaaccagtatgtgttcattctctttcttcttggtatatttttttagtcataactaattgcatcatcgttcttctttgttgggttttggtacaaatttttttttatctttttgggtttaccatatttataagtttctggttttaataaatttcttccaggaattgggattgctctttttatagaaatttcccaatctggttttgaaatttattctccagaattcttagaaacagagtgtcccaagaaatttgcccttccattgaaacctaaaacccagaaatctcaatccttacttgaagtaaatgatgcaaagattagggaccatttaataaaaaccaaccaagacgaagtttctagtcgccataggtgaattctgcaagagatatctgagggtaaacactgttttttgtgaggcgcagcctggcctgaacctccattattatcttttattccactcgcgagaccaatatttttacccgaagtcactgttactactttttcaccaggtgacctcgagtttgatattatgtctactaatcctcgaagtcaaagaccccacaggatcccaatgtcactttcgaagcttaactcattgaatccaaggtcaaatctattggagcatttgttggaggtattttaaaatcctgcggcatcgaacaaaggcgcgcaatgtcgcattaggtcaatggctcatggggaattcaactatttcccccctaagagagtacttcacgaggagtgtagtggggccaacactagtgacacgtcgggaataggcacttggagccttgatcacattaaggtcggtgttgttcttcccttgagggattatttcaaagattttcgaaattacctcggagtcgctcctttcaaactgaatcctgtctcgtatagaatcctggcaagtttgaaggttctataacacattttaggatgggagtgccctactcctctggaaatagtctacttatactctgttaacgcagtttcccatattcctcgtcttggtatctcttgaatttattttccaactcacggattcgcaattggattggatcttcttgctttcagttggcattgagtttttggcataaatcaggtgcattctgatttaagcgctcaacgttcacaaagatctagatgtcttcgttcatagttgctcatggatcttgtatctgagtaactctcagattgatgactcctcgtattactaatactttctcgatcatcactatgtcgaggtctatcccctcctcgcgtagatcgactgtgatctcgagatcttgaacaccccgagctagaacttacttcatcctacacagttcttctccttcatgggaaattgatcacgttttatcaacagttacatattttgaattaaatgtaaacaactgccaacctatattcctataaatagggacggatcccacagaaaaaaggacggagaatttgagagagaacaatgtatacgatcaattgtatacatttgaggacactcctccttaaattgcactcacaagatactgaaaagatcttctatctttcagatgagcgatctctcaaacaacaaccatatatttgaatgtgaggatggagcattcgcagatgaaccttagaagagagacaactttatcccaacatcattatcaaaagataaggttctagcaagtgtggaccaacaagactcgtggcctactggcgagataggtcgcatggtccgagagttagaggcactaaatgctattgagatacggggaagcgagtccaccgtacctgctcaagggagctttatccatgtaaggggctgctccggatatagaagtcaaggaaatggggcaagattttaaatttcctgctcgtgtggatgaaagggatgatgatgaagatgacgcaaaatctgctgaggatgctgttacgaattttatgtttattacgcaagtatacgtaatcaagtagtatctcacgcaag

SEQ ID NO: 31683 - DNA, 5124 bp, Cannabis sativa
  modified_base (31)..(71): a, c, t, g, unknown or other
  modified_base (2125)..(2127): a, c, t, g, unknown or other
  modified_base (2881)..(2883): a, c, t, g, unknown or other
tttccataaacctcattgattagcaacgagnnnnnnnnnnnnnnnnnnnnnnnnnnnnnnnnnnnnnnnnngttagggtgttacaattaagatcactctggatgacattgaagaagaggttaactattggaaaccttccatcgtgtgctatgttttgggatcaaaccctcctctgcacattttggaaggatttccaaatcgaatcgatctggaaaaataaggttgacaaggttaagatgctaacatatgggatctttaatataagattcaattcaatggaaaatagggatcaagtgctgaatggggggtatatctttttcaataaaaggcctgtgattatgaagccctaggatccaaacacgaatttcagaaaggaagatgtgaagcagatgcctatctgggtacaacttgaggatcttgacctcaaatattagggtcaaaaatcacttttcaagattgtaggccaggttggtaacacaattatggtggacagtgtcacaaaggagagggaaaggctgagctatccacgggttcggatcgaagttttagtgaatcaagagctacctgatttattggaatttgaagatgaatttggtatgaacacacaagtgggcattcactatgaatggaaacctgttgtttgctcaaatttttctggtatgggacatatcacagctgaatgcatggaagaagaattccaaggccaagcaagaatggattattaaagaggacaagaggcaacagaaaccagtaagtgatgaagatggttttcaagtagttagcaaaggtaaaaaggttcgagaacagggtcagccatctgggactaaactggaaaatggattttaggttctggctgaggatgatgagactgaacagacaggttatgtataggagttggtgacttgagaacatgacaattaaagagaggggggacaaccctctcttggtcatggataaaatcatagtgtggaatgttcgaggagccaacagtcagcaaaacacaacaacttatcagacagtttatcagaacacaaaatgttggctttgttgggcttctcgaaactagggtcaaggttcaaaagcttagaaccttgtacctaaatgattttaatggatggtgcttctcgataaacatagcttggcatcaaggagggaagattgttattgcatgggatccaataaaatttgttgtagatattatcaagtgcactagtcaattaatgcacttggaaattgctgcaacagatggaaggtttagtagctgtcttactgtaaggagtaaatgacaatgatggtagaaaggaactttgggtagatctttgttcactggaaacaagtggaaaatggctcattatgggggatttcaatgccatatagccaaagaagaaagggtggggcagagagttaaataccatgttgatacagattttacaaattatattcaacattgccaacttgaagatgtaaaagccactggttgtttctttacttggtctaataagcagcaaggaaaggatagaattacctcaaaaattgacaggataatggaaaatcaagaatggcttgaccattatcctaatgctgaggcaatttttgttaatgaaggagtttttttatcatactccaggcatcttatccatgtaccctaggtggactagtggtaaaaaacctttcaaatacttcaggatgtggaatttacatcctgattatttagtaaaggttattgaggtgtgcaacagagaaattcgaggggcaaagatttttcaactgataagtaaattaaaggctctaaaacctatcttgaaagagatcaacatagatggattctctgacatttaggctgtttattcacaggccaaagaagagttagatgagctgcaagacaagattcagcttgaccctctcaatcctgtcctgcacaatgcataatgctgccaaagacaatatgcaggggtgtaggctaagtcaagattgagctagtttacgacatgttatgggcgtgctttgtgtttatgggaacattggtattgtatgggacactgtaagccgaatggtttagagagcatatgtcgatgggagatagcggattgggatgacttcaagtcttaagagtaagacttcgtgnnntcaagtttgtcaaaagttagcgagacatcagaggatgcaggtttgattttgggagatggacttgtgatacattttagcgagtcgacacaagcaggagccagacaacaaattcgtggttttaggtgattgttagatcattgaccacatgaaagaaactcagaggagcatgtatgaagtgggtcagatgggccttttgcatgaagtcgtgggtgtgcggtagggctggagggccaataatgagtacttcgcgaagagattttgtgcaagagtgcacttggtgcagttagcttgcaagcctcgtctaggtgggacgcaccaaattttatcctgcgatcagagtgtcttgctcagttaccatcaagaggatggggcaccatggagttggcgtgtaaagtttttaaagagacttggattcagtggaagcataatctgtaggtgtcgtaggatacggttggtttgcgaacctcacctgtaggggcgcaccatacttagtccttgtcaaaaggagtatgcattggacaattggagtgagctactatcagaggaggtgttagcttcagggttagtgttgcaagggctacttggttgactggagggacattgtgagggactcggaggagttcatgttgggggaagtattctagtgtagaggcactactccatgtgtggttctgaataacggcagtagcacaggttctttgatcaagtccatgtgtgggagagggagatcgtcaccaagagggtggttctacgnnngtagagggacaagtgcagacttaggattcaaatgaagcttagagtaagcttaggagtcgacatcaagaagagttgtagtgggccgtcgatgagggcatcgacatgttgaagtgggggcgaatgtaatgttcgtgccaatatggcacgttacaagctaggtgatgcccacaagttggccaagtggtagtcaagtggtggggcatgttgttgtgcatgttggtggcatgctgatgcttagtttgcatttttgtaaatatcttcaatattgtctggattgggacaagacttggtatttgccatttatttgggtctacaaatacaattgcacaatcagatttgagaaactctgggatatggtatatgatttggccacatatctacatagccaaaatcatgtatgttcctggtagaaggctaaaaacttagaatgctttttaaggggggagtacctggtgtcagctctccaccatctcttgacaccttggtgctaagtgagctactactagtcagtgggactagtagggtgggcatatgaggaccacgaggggactcatatgtctccatgagttggaatacttatggaaactatcgggccgacccagtagtgcatctaaaaatgctgccagagattagcgggtacgtttccattggcttgccggtatgccacttgcacgaaacgtggcctaaacctccaagagacgttgtggtatgctttggccatgagtctcaacacgagatgacatgcgtagtcattcatgggctagtttgcatacgcgcatttgacggatacaccatattggaaagagatagaggtctaacgtatgctactagttatgtggcttgtctcgagggcgtgccaacatgcgtggaggcatggtgccttgaggattggtccatggacatatggagtccttgggcgatgagagatactgtttggacagtatcgaatggggcatgatagaagcgttggcacgtcagcacgtcagcttagtgttggcatcttggtgcacatgctaccttggtcacgagtgataggtgagcgatattgtttggattatcctcataatagtgagaacctatggacagtgcaagtatcttggctagagagcctcgatgcatggatacactcatggatgcttgcgagcatgactcggcgggagttgttcgagagacgaaagtgtgcacaaggcacacgctcgcgcaaaaaatgagcccattgttactcgaatgattggaaggctgaccttggcttagagaagtcaaggtatcgtacgggtgttccgctccctgaaaaggtgagcccgtgacactaagcttacctgtggagtagtatggtaatttacataaataaatacgaagcgtaattaatgagcacatactactaaataaagaaaaagtggactagtaactagaaatttggtgttatacatgctcttaatgaccacaattaaaatattatatatgccaactataataatttaggataatgctttagtagaggtattaaaaacgactttatgtagagttattttttttttaatatgtgtcattattttattttatgtctattaaatattatttctttatttatttttttacacatataattatttgttaaaaacactatcattcctttaaaaaaaaaaactagcattcacttctctcttcttctcctccccctttttctctaaaagttcttaaaagttgtttatcgaaaaacctaaactataaccaaaactaagagctttgatattttttcttttaagaaaaaataaaggttgagactcaaaaattctctaatggcaaagtcaaacaacaatgcaaaaaaaaaaaaaaaaattgtacatatctctcttctcagatcatatctaccaaaaaataatttcttttagtggatatgattatttttgacaaataattagaaaaagaataaataataaaattaaattaaattaaatatgaacataaaatgaaacaataacacctattacaaaaaatggctcaacataaagtcattttcaatacctctattaaagcattatacaataatttaataggaactatacctttggtaaatattctcattccacgtatacacatcactctctccaaacgtaattcatccattatttctcactgttatattatattgttataatataagatagattaaaatattaaaatgtgacatattatatattgatatgagattaatgtatataatgtgattgagagttaaat

SEQ ID NO: 31684 - DNA, 1452 bp, Cannabis sativa
  modified_base (52)..(55): a, c, t, g, unknown or other
  modified_base (1207)..(1208): a, c, t, g, unknown or other
accatgcaacatagaatgatttctgatcttttattaattagtaaatttgatnnnnttgaaatgagttttatttaggacagaaagcacaatagtacattgacctcaagttccaatcatctttgttctagtgttaccaaaagaatatagtatggctggtaaccaaatggaatcattgtatgggagactttggatgcaaggacctccagtccttcagggagagctagatatgaagaatgctctttagactgagagccctacagaatttgtttaaggcctcaagggattttataagatggtgggatcactgctcctcttacttccaattatagtacaggtggtagtgactccttggttgaacaaaagaggaaacctgcatcgacattggtgagctcgagttagaataagaggttttgggggacgtaaggtcaaggtagtttatagggtgggtttggaagacattatacttatctagagtgctttcatgactataagaagcatcatccaggagaatgtaatcgtaaggaatgttttcaatgcggttttgtaggccactataagaaagattgtcctgtattgaaaggagaggaactggaacaagaggaaaataccactttaatctgggtgctttccattacacaagtgaatgcggccgtcagtccttcagtaggaacaagttagcttcttgtcaacaactcttattatattgtattgtttgactctagcgctataaattcatttttggtgtcgatggtaattaataatttggtaggccccgttgttgggattttatgccataaataaaacctattttaatataatcttatatgttatcaatataagattagaaatcatttatgtttacatatattactcatgtttattgtttaatatacaatttctattaaatccaaaatatattgtaattcacaattatagtgatgtcaacagtggaaggtaattgtgattattttcttcaaaagattatgtcccataattcatcagcgcactagatttactctaatgtgatatttagtgataaactttagttacaccttggataagtgttatgttctttccaagacattggcaaagtatgctagtatcggatgcatggagtatacattggactgggactgatattgatcttggtaaatatattataatcttactgttctatctttgtaagtcaatatcactggttgatctnngatcaaaagatcttaatcttgatatggttagattcgatctcaagagtgttatttatgttcttagagttgttagttaaagcctatctattggtttgggaaacacatacatcttgagaacatgatagtacaattgagtgggaccgctaatcattaatacggaatctataacttctatccggactgtagagaatggtgaatagaattatgtgttgtattccataaaatagtatatatttatatacaa

SEQ ID NO: 31685 - DNA, 1094 bp, Cannabis sativa
ggacacacttcgttctcgctggcaatcggcttgaaagcaatgttacatgtagaagtgaacatatcgactcatagaagagagtttatgatcaagaagaaaaccaagaactcctaaaattgtccttggatctgcttgatgaaaaacgaactgagtcgcaagtcactaatgcagcgtatcaacaccaagtcaaaagatacttcaacaaaaaagtcaagaaatggctattcaatgttggagacttggtgataaggttagtatttgtgaacacgagagatgcgtctgtagaagtattcaacccgaactgcgagggtccttatataatcgaagcagtagtaggaatcgaagtttacaaattttctcggctaaatggctcgctaataaagaactactggaacatggaacattatggaccctactaccagtaaattaatgatgtaactagcattgctaacgtaatattttaaacttcagttatgaataaagagaatcatttcttttatttaagtaattacattacttaaggggaatttgtgtatgattaaccggaattcatctggaaatacatgatataatgcaaacccacaactttaaaaatttcttttaagggttttgttaaacctttctgacgagaaaggcataacaccatcataactttttgatttaaacctttctgacgagaaaggaaaatcaaaatttataaatgagatataactcataacttgcgtacaaaactgaatattaatggctcatataatataagaaagtattaaaggagacatcaaggtgtctcgataaaagtacctaaacctaatgtatgaataagcgataaaactattcctataagcaatcaaaaatgtacaaagtgatgagatcattaaaagtatattcaagtttgcttaagagggattataacagttattgtaaggcagagttgataagtgctcgtaaatcaaaagtcgggtagataataaactgcccgtgcacatagttgattactaactacttaaataggaaaattacgagcaatggaaagacttgattaaaatatagttgtttacattgtgaatgaaatcataagcaaacataaatattaa

SEQ ID NO: 31686 - DNA, 2288 bp, Cannabis sativa
  modified_base (1664)..(1668): a, c, t, g, unknown or other
tatatatttattattatttttggcttgaattaatatatattatttaagaaatttatttgctcaatttcttaattgatatgtattttttctttattgttaacttcatgagagtagatcatgtgtgtcggtagcgacgctgaaaagtcttaaaaactgtctctaaaggtggtttttgtagtaatgagttaatttattttcaaatataatatattattatttttaatagtcataataaataatatttatatgtaaagaaaacatattacatttaaatacattatagttaaatacataatgtatgtgaagaaaaaagccataatagtaaattaaaaaagttattgtttacaattttatgaaaaataaaatagtaataatataaaagaaaaaagaaagaaacactgcctaattttttttttaaaacaaaatattaattattatttaaaatttaaataacaacaacaacattcagccctttaattgaaggcataaacaaagtaaacatatttgttctaaacaggacaagatgacacaatggcagtagaaagaaaattggctaactcatacaagtcccacaaaacataaaattattagaaagaaagtatacttgaattcctccaatgaactataaggttatgaagaacaaaaatgttaagataattataattagagaaactgttaattaaacaattaattaatatgtgattcctaaataattggaatcaaatgtactaatatacatactgcccatccacaaatcttatcatacatgaacaagtaagtgtaattcacatagttaattaaaataaatataacacataaatatcactttaaaattttgactatgaaccttcacttcaaatattagtgaaagcaaggattgtctactgcaatagcttgatgaaacaatagatattttgatggcctttctattttgagacaattgagttttccaccactgcagaatccatataacatggttttgttgttctcatcgtcacccaaattagaaataatcttggccctttcctcccaagaattccagctaacacattatattcaaagtttaatagtgacaaaatcatattaattatagaaaatcaaatccgcttatgagtaagtgttatctgcaaccaaaggagagaaatcattatctaatgaccctaacttgttccttaaatattcatgctattcgagcaaactcatagtcccaaactgcaaaaggcagcaataattaaggcatcataatctcaccaagatcaaaaacaaaacaaaacaagcatttggtagtttcttttgttcttcctaacttaaatgtgcaaaaaacaagcatttggtagttttttttgttcttcctaacttaaatttggaaaaccaactggtatatacctcccctcatacgatgtttttcatatgtaacaatgataagaagtaattattccaaaagaagaaattgagaatttattaattggtgaaagcttgattaacactaaactgaactaatatatatatttatatatatattcgtgtggtggcgtagaatagagaaagctcgaatctatcgcagctattgctcttatctacaccactgtgtttgataatcaaatattaatgggatttgttttattttcattttattattttattatatatataaataatatttnnnnnttttattaaatataaataaaaaattacccatgaatttctcataaaacccaatatgtcactgactaaacaaacaaaccccaatatagaatagacatatccagagaattgaatactctctaactaaacaaaccccaatatgtcactgactaataacataacccactaataaccaatgtatacacaatagtctaataaataatataagaacaaaaaaaaaaaagtttgggctcaaattatttttgttaatttatcttgctactcgatcgtaaagagcaattcttctcttctacctaccctccatgtagaagagtctgaaattatagaatgtttaaatgattaatttcaatcatatatattaaggaccaaaaaaggtctttttataaaaattttcaaaacaaggccatattctaaaaacaagtcaaataagaatttatacatagaaatatgtatctttgtcgaaaaaaaaaaaagaataatgataactgtataatcacctgaggacgaaaaccacttaaacttctgatattggacatgtctcaaataaatcgtcataattaaactcacttaaactagaattagaaattcccttcaccttcatttgatatcagtttagaatccat

SEQ ID NO: 31687 - DNA, 1209 bp, Cannabis sativa
gggttttgccaccaaaaaaaagataagggggcgaagtgtataacattaaaacataagggagtttcgctacaaattactctaatattttatataatttaaattaatttaaaattggtataagttcaattaatctaaaataaataaaattaatattcatatatatttaaatcaatctaaaataaataatatcaatatttatataaatttataaaactaaacctactagcactgttaaatttaacggaatattcttatatttttaaaagattctgttaaactaacaaaaaccgctgaatagtcacattttatatataaagatatatgtgtgttgatttatttatcagattatatattgtttaattttattttcttattctatattttagtattttactttttatgtgttatatttttttatacttttattttctttctaaagcttatatatatgtctaatattttacactttatattaatatagttttcttcatggcaaaccttgcaaaactcgactttgtggtacttgatatttctgaaagaaattatttatcgtagattcttgatgttgaaatctatttagatgctatgggtcttggagacaccatcaaagatcaaaatactgaaacaaaacaaaataaggtcaaagctatgattttcctttgcatcatcttcatgaccgggtaaaatctgaatatttaatcttaaaagatcatcttgtgtttcgaaaaaatttgaagaaagatatgaccatcagaaaactgtcatattgccaaagaccaagaatgatttgttgcacatgaggttgcaatattttaaatcagtaagtgattataactctgcaaaagttatatcacttctaaatattagaaaaacaacatacactacttttttgtataatatcacttctaaattactactgtgtggagaaaaagttactggctatgaaatattagaaaaaaaaaatatacactacttttcatgcctctaatgtgctcctaaagcagcaatatagagaacgaaattttaaagaatattcagaattgatttcatgtcttctagtagctgaacaaaataataaacttttaataaaaaaatcatgaatctcgtccaactgggtatgtcccagtccctgaagtgaatgctaaaatttctgacaatcatgatcatggtcgtggtcattatcataatcaaagtaatagacgtggtcgt

SEQ ID NO: 31688 - DNA, 1276 bp, Cannabis sativa
atattatcacggtttttaataatttatttatctattattattaaactagtttataaaaattacacacgtggcgtccctgtagattagggcgttacatcacaactagagttaaaccctgatttcatactcataaaatatattcatggcatttaaaatttagataatcacatagagctcggaacgagctttccaaaatcggaatcaaaagatatgcattttcaaagttcgaattcaaaacggccgcccaaaaaaaactcgagggcgggccacgacatgcccaagccatgccgcggcacctgggaaaaaatcccaggttccaccaacaggggcgggccggggcatgctcagaccatgccgcgacacctatgttgaaaacccagaaatcaaccaccttaaaacacgattttcagcaacaaatgaacaccaaatcaccccaaaacttgatcaaactttcaaattaccaaataaagttgctaacaaacattatagggataaaatatacaaccaagcattaaattccaacataagaacccccaaaaccaaattacacaaataacacaaaacgcatgcttaactaagcaacttcaagctcttgaacaagagcttcatctcaatcaactcaatcaattttccagtagcaaccaccttaagaacacaaggtttcaagctagaaaataccctatacttttactctaagctcaacaacataaatccccaccaaatcatgtaattccataatcaatttaccaagattaaaacccaaaaccatgaacatgcaacttcacaaacacaacaactcaaaaaatgcttttcaacatataaaaaccagcaagaatttcaacaataaatttcaaatacactcagcaagaaactacctcaattccaagcttaaaatccttccaattcatagttccaaaatcaagcaattctctcaaagatcaacaattgacaaaagaatagggttagagagagagagaggggggtcgggttggaaggagaacacaccagaattttctatctcctttaccaaaaattaacttctttttgttaaatgtaaaatatgggtcaaaagaccaaaatgcccctagggccaatgcatacataactacacacaagggtatttatgtaaattcatgcatatcaaacctcaaataaaatttcaaattatcgccaatatataaaatgccaaataatttaatccaaattgcatttcgggcccgaacccggttcggcccgaaatacccagttgtgactataccgcgccaacttgttagaa

SEQ ID NO: 31689 - DNA, 1262 bp, Cannabis sativa
ccaggttggtttgtttcttcccttgaaaacacttgtttacccattttctatgaagacaaagaagattccttagacaaattttcagtttgatgcttagaagtggcctaggttgacaaaatgtcaacctaggcacttggtgcctcgggtacttggtgctccgggtgctcaaaaatgaacgttctctgaatttgattttgatgcctctaatatgcttgtggcatacctagttcacatcacattacaaattttgacccatttgtactaagacatacctaaaaactgaaacactagttgggtcgtcaaccttggcactgggtgaaaccctaggcactcgggttgatttttcgtggtattagttcttgtattcttacctctcaagccttggacttgaatgcttcatgtctttatagtaaaaaatactgacagatagtgagttggaaacaacttggagggatccaaactcccattccaaagttcccaaagtcaacctgggcgcagggctaagaacccctcccaggtcgacttgtcatgactcgggactactcaactccgagatgttttctttcttgctacatgtcaaacattgatgtccacatcatcaggactatttttggtgtaagcaacgatatatttatgaaacctgaaaggttaataagtgccatagattctatattgtattatagaattctctcctatcccattaatgctcatgctcatgagttgagactaaaacaagagcatgttattttgtgaatcctattagcccacattattctttgaggttaacttagaagatcatggtgtggtttttatcatcattatcttcatgattgcatggatatgatgatcgaaataaatatgaaaagaaagcaaggacacttaataggcgttaagaggtatttttctgttactattatttcattctaatttatttttgaacaaaaggaaactttctattcaaaactgagcaagaaatacaaccaaggcaaattcctacaacaaacacgacaacctaccaactttccacaactctaataatataattatcacccttttttacattagtaataacccccaaaataccccacttaacaagaaatctaatctctttacaaaccactttaaccaagctacaacagctatcaaacacacatctattacgattcctccatatcatataaattgtcgaggcaatgacagcatttatcactttattcttcagccccatatgtgatttcgagcaccaatcaactagatttttt

SEQ ID NO: 31690 - DNA, 3972 bp, Cannabis sativa
ctatgatagcatcaatagcacccaaaagtataattggtcatgatatcactcttaaccagtactatgccggtactaccgaactgacacaatggttgtgctgctataatagcgccatttaatactttctggggtgaatatcactcttaaccaatacggtgcctgtactgccatactaacacaatgattgtgtcgctatgatatcactaaaaacatatacaatcacaaacacaacatgtatatatagtatgctctatgctagtcttacctcgtttccgaattcaaataagttggccaatttgaacaaaaaacctcgttctagatggatgccctaatcacatatactgaaatgggtaattaacacactaaaaccctaatctaaaaaactcaaactcaccactaaggatttagctatttgtatccatgaaaatgataccctaaataccagaaaaacgagaaaaactagggttcccaaaacttccccaaccggcagagtggttccccaatcagaagaccagttttgtggggtttcctggggaccaactggaattttgattcctatatgtcccactgaaccggtcaatcgattcagtgcagaaaacaccaaaaacaccactaccacctcaatttgatcccaaattgctcaaaaacttccagaacacctataccaacttcacataacataattgaactagaaatgtaaagaccgcctaatttgatatgttgggttatcaaataattagggtttctttatgagaattaattatttatttatgatttacatattatggaaatttatttaatttcaacatgtattaattatgctatatgtgaatttctcgttttctgtgattgtgttcggtagtagtggaaagcgatgttgggctattagagaatcacattttgtatggtatagaattttattaatagtgcggcatcattgttaggcattggaagtgtcaggaattttccgggatttgaaaatgatcaaactaccttggatagttttaagcattttaatattacttaagggcaaaaagatcttttactaggttattattttgtcttttatgagcaccaataatttgaacattagattatatgaatattagggatgcttatccttgaaggaaattagagtaaactttgcacatctcactctctaccatccctctctctctcgaagcacctagaactagcaagggggaaagagctttcagctgaaattcaagagatttgaaccagggttaggagttctaattcaaggtataagacttagccttcttctctatggttttctttagctcaagataggtttattgcgtgatttgtgtgatttgaggttctgtagttgtgcagctagtttgggtttgaattctggggttaagataggtttattttagttgatttgagctgagatagttgcttgtagtgagagttgttcaagtcagagcttagagaacttaacttggttctctaatggtgcttttgattattgagttgtttattgtgttctgttgcttggattgtgttcgttggagttcaagcaagtattctagaggtttttagagagtttggggttgatttttatgtggggagcatttttcaggttccaagctctgaactgaaattccagttcagggggacctgtaccaaccgatcgactgatttgtccctagggaactggacttctggttgggaaccggtctaccagttgggccattttttagaaccctagttttccttattttgtgttatttggggtattaacgtgttattcatcgatagggatatttctagttttgactttaagtccccgaaaagtattttagcatatctctcaccacagttacaaatgttgtgatttagggccctgtgaaacgtcgagctgtaattccacttaagctgaatggcaacatgagcacaggaacgagctaagattagcataaagtacaatatatgtgaatgaatgtatgttattatctgtttacactactagaactactaaatgtttagttaagggtgttagtacagtgtaggatgttagggtagttacagttttaccaacaagagtaccaaggggtacgtcgtgcatgtggtacaacactcagtaactttcaaaagtacagtaatggccctaccaacacaagtacggagtagatactctagtgcaatggtacagtggtcgtacttccattaagaatgttcttaaccatttgatgagcttggtagtcaggctcaggacggcttaagtataaagtctgtattatgttacctatgtatacgttatgcatatcttaatgagtctgttgactcatcagtttgctaccttgtgtaggtaaggaaacagctaagctggaggagcagtgagttggagcttggcaaggattgcacatatcgcaacagtgtaacctggagggtttcgatcatatagcattttgagttattttctaaagttgccctgcattttgtataagaaaatatattacgagaccttataatagtaaatgtaattttcaactgtgttttatcttcaggatcctgacctataagactatataaatataatataattagattaatttttgttaatcaagttttcaaatacaggcgttacaagaaacaataacaattaaccataaaaatacaaaataccattgttgagtcaagtttgagtactcaaacttgctcaacacaaacattggtcttcaaaaccacttcataacaacattaatcaacctaaaataacctcaaataacaaactgcaacttttctagattcatacagaactaaaattatcatttagcatactacaagtcaactaacaactatagtaattcaaagaacaagggtttataaggttaccttgggtttatgctacttcaatcctttgtcaaaactcggaattctacgaggaaataggttgatttcctctcattcaagctgagccaaagaagagagaaagggtaaggtgataaggtttatccattttgtcttttctttcctttaattaattaacctactaactaatcaaagaaatacagctggaataacacctaagtgccagcttccacgccacaaattagcaacctcaaaccccaaaaacaaaatacctaaaatgcccttacatccacttaaagcaatttgtaagcttaggggtaaaatggaccaaaaccataaccccgcttatactcggtattctaaatattccttatattttttctgctaagaaatagattctaaacttacccatgtgactctaatattcaacatattttttcgttgtcgccgagcaaaaatcataaaaattacataattcatatttaacttaaataatactcctaaagtttaataaaatatctaaaattgagaaattataactccagtacccaaacctaaaattgaacccaccatttaataaaatcatgcataactataaaaatgtcaacaattaacgctaattgcctttactaatctatattctaacatgtggtcattacactttgggcattctttaggcccgtagaccaccctctcctgttagtttgtttcctgaggtatggacttcttgttgataggttcggtgttcttgaggtatttgttagttatgggcatcagtacccaactcttgagtattttggttaaaatatcttcgaattaagtcagtaacttcttaagtttgacgatcttggtcgtcttggcaccttctcatttctcgagcatgctcttccaaccaaaattggaagtctctcctttatttagcgagactttcagttaaggccactcgagtttgagtctcattcttgtgaacagtttagaactagccttacattcggcctatcgcgtctcgtaactgatccatctctaggtcaattcctttaatatccacatggggttcattctgtagcctaaagatgctaggggcccgacaggtttgagtttagctcgtgtcgtcattaggtgggacaaattttt

SEQ ID NO: 31691 - DNA, 1832 bp, Cannabis sativa
ccgccaccgtagtattggcggctgacgatacgccggtcccggaaatcaagacagaggtaaacaaatggtttaacgaaaacataaggccttttaaagaaagatcaaaggagttggacccagctctggttaaggcagaagaatcacctaggaccgttacagttagaaaagacggcagcggagatttcaaaactattaatgatgccgtcaaaacggtaccggaagacaacacgcaacgggtgatcatcgatattggaccgggtgagtacaaggagaaggtgaagatcgatttcaaacaacactttgttgctttggttggttcttctgtcacagacaaacccattattaccttcggtgatacggctaagaagctcggcacagtgtatagtgcaaccgtcattgtcttgtccgactatttcattggtgtgaatctcgttatcaaggtactaattaatatttttatattttttattaaaatatgcatttattctaattgatttgtttaaataatatgtgtagaattctgctccgaggccagatccatacaagaatgatggtcaagctgtggcattgagaattgctggaaataaaggagcattctatgactgtagattcattgggtttcaagacacgctttgtgatgacatgggcgttcacttctttaagaactgttatattgagggtactgttgattttatcttcggcagaggaacgtctatgtatttggtatgtaataatttaattatttcattaattaattaatatgtaattataacaacaacaatacataatagtagttaatgtattatatgcagaacgcacaagtatttgtgctgggtgacaaagggctaacagtggtaacagcaaatggaaggaactcttcatcagagaacactggatattcattcgtgcatggtgttattcgtgggctcggcaaaggaactacctatttaggcaggccttggggtgacatgcctcgagtcatttatgcctatactgaaatgaccaaagttgtccaccctggtggttggagcgtcgacgctgatgatgtcgggtaagtatatatataatccttaattaattcaccaaatatatgtaggatttttattttagggtctcacaaactaacatgacataatttaattatatggtctcgttactataaatgaattgcatcaatatcaacgagtggcgttatactgatttattgtttatatatgataatgaataatgcagtaaagtttattatggagaatacaaaagttttggagaagggtcaatggcaactaaaagagagaaatatgtgaaacacttaaccgatgaagaagttaaaccttttattacactcggctacgtccaggcttccaagtggttgctccctcctccaaaattgaagaaataaataataaaaaggaaatttttcagttaattaagaaactatatatttgtttatatatatatatatacatatgatgtgtaagtaacaatgatcaatatgataattctccacgtacgtagtggtccgaaggtcatgggattttcatctcatgtgaagctccatctcgagaccctatatatatatatacctacgtacttaattctttttctctttttaagttttcatcagtacttaagaattttgttagtttcttttgttattacatgatatctaatagaccccattttgcaaattaaatggtgtgttggtgtgtaatttaattttgacaatacattatccaatggaaataagaagttaattttttgctctaactttattgttatttatatatatattttttttgagaaaaaattatttacctgtagttttttttttt

SEQ ID NO: 31692 - DNA, 1313 bp, Cannabis sativa
atttccttacctcgaatgtggagttctagccttgattgcaataagagtgatccttgaaaaccaataatgagtttcttatgaaaaacctaaattttacacttattaattagaacatatcacaatagtatatatataaatatatatacacgagaccttaactttgaatctataaacccaaaatcatagaatgatataccttaattagcttccaatgagatctagttgagcaccaaaacttgaacttcaaatgatagatggtgacgctaatatgatgtaagatatatgagaggatgatattaacttagtgtcttagccttgagttaatagggacaagaaaacaatggtttgtgggtggtgtttggttttatggtgacatattaagcggagctaaggcttcattctaaaatgaaataagtgaatatatgagggagagaataattgcaagagaattttggtatgtaaatccataatagagattggtgtgagctatgtttacactaatgactcctatttatagccttaagctttagttaactcaccctaagctatatcctttaacttatgccacgatccccatctaaccatagttaaactttataaagctattaaattaagcaattagataaatatattcatccttagcccctaactattcggtcaaagcttcagtaattccccaaataaatcgaattgaagttagcaattggtttttgatttgttaattggtgagagctttatcctctctagttcccacgtatacaatcttactagactaggttgtataagattctccttaaacttctaactatccttagtacaactattactactcaataatgattataaaatcttttcctaacttaataatattaccatatcaaagcacatagtaatttcaaataatccaagttataagaacgacacaatgcctacaacttgaaagcaagacttactcataatttgccacctgtacaattttaattttatgcttaattactaaccaccccattacttgtattacacacatatactgtatggaagtagcttacaagcaactagcaccaattcatcaaataaacccatcaatttctcaactaatttaaaaatctaaataattcactataatttactatatcatgctacacgtgcatgctttccatgcataacataaaatcactataactttattatcgtaaatttaaagaaggtcactcttttactaatttattcatctattcactacttccacatcgagatatctagactattctaataataattaaataagtaattttaataattgagttattaca

SEQ ID NO: 31693 - DNA, 2503 bp, Cannabis sativa
  modified_base (152)..(157): a, c, t, g, unknown or other
  modified_base (232)..(233): a, c, t, g, unknown or other
atttttgcccaatattttttttttcttttttaatccatataattcagccctaagccctagttaaaacactataaaaggaacatgatgctctcactcatccaattgattttcaacttgccaaaaatttagttttctctgtcagacaactagtnnnnnngagagttccttctatagtgatttcagcctctttcattattcttcatacttgagccttagtgatagagtgccatgnncacgcatagcaagtcaagtactcaatcatagtgagtaagacggtcgtaaccaaggagagaaagagatctaggctcagttcttgataatattctacaacagaaaggaacaaaggttagacatttgagtggaataagtcatcatattctgctacagccaatgtaaggttttctaaactcttacgtgtttaatttcattattttagagatattcatctttaggaagttaatcaacatacttgttagtaaacctagattctggtaaaatattcccaacatgtgaatccataccatctttctacattcaggaaagttacttaaagagctggatactactacactttctcttattcccaagaccgaatgtccaaatatggttagtgatttctgacccataacttgctgtaatgttatctacaaagcagcaactaaaatgatatgtacatgcttaagacaggttttacctgaattggtggcacaaaattaaagtagttttgttcaaggtagattcattgcttatagtgttatggtgtaccaaaacttggtgcgacatcatgggcggaagagtaaaggccaaattatatgatcaaactggatctttgataagcctacaatacactagaatgggatttcatagaagagatgctaatagctctgaacttcccagtaagcttcctgcaattggtaatggtatgtatctgaacttctcccttctgtctttatttcgatggatctttacatggtttctttgaggcaaaactgggtttgcaacaaggagacccgatgtccccactaatttttatgctttgaatggagtacctatctagaatactatctaaagtgggtcaaaaagttgatttcaagttccatgaatgacgcctagatttaaaattgaaccatctatatttttcagataatgtcttattattttgtcatggagatttcaagtccatatactttttactacaacgactggagttattttctaagtcttcaggattacatctgaatataccaagtcaactcttttttgttgtgggatggatgagaatgagatacagtgagttattgatgcttcaggtattgtccgaagtgaaatgccatttaattatttaggtattctgaaatgtgctagaagattatcggttttagaatgtgatattttggtggaaaagatggtagagaaaacccaaatatggggaacttggaatatttcatttgctggtcgtgtgacttttataaatgcgattctcatttccattcattcttattggtctcaaataacagtgttgccaaaaattgtactaaagaagataaattcgatttgtagagcatttttatggcgtgacaagcagagactcaagcacctggctataaggcataggaacaattatatgcaacccaaaatcagagggtggtttggggatctaaaacacactgatatggaatacagtgggattagccaagtatgtatgggcgatatcatcaaatcaagataatttatgggtgaaatggatacatagtgtctacctaaaagataaaaattggtggactattcttcccctacgaatagtaattggtattggaagcaaatagtgaaaatcaaagaaaaatataagttcataccaaattatcaaactcttatgacagagaaatagagtatccaaacgggctacatggtgcttagtgagaagcaaaagaaagttacatggtatagggaagtttggaatcggtaaaatattcccaaatatagtttcatcacatggcttgcaatccaaaattggttacatcaggaaagtttggaattggtataatatttctaaacatagtttcatcacatggcttgcaattcaaaattagttacaaacgaaggataggctagctgcaatttgtctcttatgcggagcatcaactgaaaatattcagcacttatttttgattgtgaatttagttccaggtgcttttggagcttaagaaatggctagactggcagataaatgtgagacccttatctggaattttccaaagtatctcaagaacaaaaattttaaatgcaaaaaaaaagttactaacaatagtgactagtttggtttgccaaatatggatgaacaataatgattattttttaaatcagaaaatgcatattgttgaagtgtgtgtacagactattaaatataatgttaagaatataatcactaatattagataaaaaaaaatatttacagaaattggggaagcatggtttaatgcactataaaaaattgctactttta

SEQ ID NO: 31694 - DNA, 1942 bp, Cannabis sativa
atcgagtttgttgtaggaaaacttcataacttgacattgtaatctgatctgttggaacgaattaaagttgctcagttaattgatccagagttagtgaaaattcgagaagaggtttcctttggtcaagccaaagaatttacagtatcagatagtgggatgctgttgtttaagaccaaggtttgtgttccaagtagtgcaaaacttagaaataagattcttgaggaggcccataccactccatattcattgcatcttggcattaccaagatgtaccaagatcttaaaccctacttctggtggagcaggatgaagaagagtgtggtagaatttgtatcctagtgcctaacttgtcaatagatcaaggctgaacatcagagaccggtaggttaattgccgccattgacacttcctgagtgaaagtggaagggtatcaccatggactttgtggttggattacctagaaccacaggattgcatgattcgatttgggttttggtatatcgattcacaaagtctgcacattttctaccagtaaaaacaaccttttcagtagatcaatatgcagaattgtacgtgaaaaagatagtgagaatacatggtgttccaaagtccattatatcggatagagatcaaaagtttacttctaaattcaagcaaagtcttcagcgggctatgggtactaaattgaaattcagtacaactttccatcctcagagtgatggacagtctgaaaggacaattcagattctggaagacatgttacgagcctatgttatggatttcgagggcttctggaacaagtacttgccactaatagaattctcgtataatatcagctaccagagtacaatagggatggctccctatgagtcgttatatggaaggaagtgtaaatctcccattgactaggatgaaacaggagaaaagaaatatctgggtccggaatcagtgcaacgaactaatgaggctatagaaaagattaaggccagcatgcttgcctctcaaagtaagcaaaagagttatgcagatccgaagcgcaaaaatgtagagtttcaggtaggagatcatgtattcctacgggtgtctctgatgaagagagtcagacgtttcaggaaaagaggcaagttatgccctaggtttacaagacctttcaagattctcgagaaggttggactggtggcataacgtctagctttacctccagctctttcagcagagttcaaaaaatgtgttccccatgtttttacatgttacgaaagtatacgtttttctgatcctactcatgtgttgagttttagaatcttgagctacaaccagacctatcatacgaagaatagccactttagattctagacagaaaagataaggttcttcggaacaagaccatagctttggtcaaggtactttggagaaataacaagctggaggaagccacctgggagttagagtttgacatgagggctcagtatccagagttattcacattagatttcgaggatgaaatccttttaacagtgaataattataaagaacgcttagctttaatttggaaattagtagataattcgggtataattatgaaattagaatattaattatgaattatcattttatggagatttatttgaattcagaatgtattttatatgccatatatggacttttatgtttttgcatgttttgtgcccaacaatatcgaaacgcagcgtttgaccattagaatcacattttagtatttttagtacagcgaggtattatagttagacaatggaaatgccgagaatagtcgagattttagaattgaccaaaataaccctaagtgaattagaagctttttagacagtgaagggtaaaatagtctttttggccatttgatcctttgtctttagtgagttttatttagcttttatataatctgatgttatagtgagatttccctcac

SEQ ID NO: 31695 - DNA, 1412 bp, Cannabis sativa
  modified_base (27)..(38): a, c, t, g, unknown or other
caccatcgtgtgatgccacgtcagagnnnnnnnnnnnngataacatttgccccccaagtatgtacgagactctcaaagttgcgtgtagacttcatccaagctctccttgtgtttgaatgggtgacacgtgtcaggcgcgtctattcgcgactcgatgtgaagctgacttggtgtccttttggtttttggctaataaatgccctgacaattaatatttcgaaatctgattttctctcaccacagttgacagctgcacttgattgcttttgattccccatattcacttttagggaggaaccgaagtttgtggttcttttgaaatgattaccccttttcgttctttgcctataaatatcagttggcatttgtcctcgaacggattttcaccaaccttccttgctaagtaagctcagagcgaaaagagaggtttttggattcaagttttctgaagtgctttcctgaaaactgctcgtttggcttggtgcaacctgaatccagacattccatccttgagtaagttctcaatttcttttatgtttatttcgcacattttttttgatgaatgcaccttcaactttgttgtagaagatatgtaggaaaccctaagtttagaaactctgcgattttccttcgttacggttcattcgatttcaacgttcgtaatgcttgctttttgaactgcataatgcctgtctttcatcttgcttattctattcatgatatttttttccctaactcgagaaaatttcaaacttcctgagttttgacttttcgttaaatattcttattcttttatatgttgagtactcctggtctgcatatttgcctgttttaacgttcgatatcccgaccaaacacttatattttgtgttgtcttttgtacatgaaccaaggtgacatgcattttagcttaagtcttctgtccagcaataggataatggctcgtccaaaaaagacaatgcgtagaatcgatgcatctgaccctcaaatgatcaagcatgccaccttacccagtgtcgaacatgatccatccgtctaggcggaggaggatcatgaaggggacgccgaggtctaggagattgaggaacaggaggatgttcgtcctcgcaatcctcattatgtcccccatactatgggggatataatgaggctagggagccaatcaatgctgatggcgatgtcctggttgacggcgtggactatgccagtgaagaacttaatgctgcggttcctcacaaaaggcaaggtactttgggtgcgaggtgggtgagccctccgtcaaaggttaccaaggcacgtttatgggatctggaccaggatggctacctgggcgaattagactgttacattctcgctcacaacaatcgaaccacaaaccatgaaaggggaatgtgtgcctggtcgggtgctca

SEQ ID NO: 31696 - DNA, 1266 bp, Cannabis sativa
taaaataatttccaacactattcactatgactcagggtgacactgatgctagtccgtcagtggtgagaagttagttgtccattaacggttgttcttattctatgttatttgattcaggagctacccattcttatgtatcgagtggagcaattgaaatttttcataaaccgtgtgatgtgtatgctttggggtttggtaccctgttaccctcaggagacctaattgtatttactcggtggattaagtctttatcttgtttgattgccggttatgaattgatcgccaacctaattgagttacaattgtttgattttgatagaatcttaggaatagatttcttgtctaaatacggggcaacaattgactataagcaaaaaatggtggtatttaaacctgatagtgccaattcagcagtgtttgtgggtaaagtacaaggatcgcgcatacctagaataacactcttaaaagataaggttctgatgtgcagaggttgtctaggattcctagttactacagtggataccggccaaactgtgtcatctggacctgagaatacaacactggtgtgcgaatttctagatgtatttttagaagacttacctggattaccaccttcctgagagattgagttcgtaatagagttagttccgggagcagaaccagtatcaaaggcaccgtatcaaatggctctagtggaattaaaagaattgaagatccaactctaggagttactcaacttgggatttataagacccatgtattctctctggggtgctctagtgttatttgtgaaaaagaaagaccggtcgcttcgaatgtgtatcgactatcgggaattgaacaagcttactatcaagaataaatatcatttacctcgaactgacgatctatttaatcaactgaagggtaagacggtcttttcaaagatcaaccttcgctcaagttaccaacaactgagaattcgtgaagagaatatcccgaagcctgtgttccgtactcggtatggacattatgaatttttggtgatgtctttcgatctcaccaatgccccaactgcatttatggatcttatgaaccaggtattcaaggattacctggacaaatgtgtgatgatgtttaatgatgatattttggtttactctgaattagaagaagaacatgaattacatctcagattagtgcttcaacgattacaggatcacaagctttatgctaaattcaagaagtgtgagttctggctaccacgtgtctctttcttagggcaca

SEQ ID NO: 31697 - DNA, 2395 bp, Cannabis sativa
cagtttgattaatagacaaatctttcttgataaaaaagaataataaagtaaattaatttaaaaataattatggtagaactgtacatgtaaataaattggtggtgaaaatattgaagtaattaattttgttatagctagctattagtataaaaaaattgatagcaaattaaaataatttttggaaaataaatatttatataaaaacaattcaaattaatttttttttaaaaaaaaataataataatttgaattaaaaattaatatttcttttaattattaacattatttaattttttaaataaaatatataattatatactattataatatgtataaaattttaattatatacaaacagtcctatcataaaagtatacaccttatatcataaccacaaaattaatggtaaaaaaagcttccctaccgataataaatttatgctaagtcctaccaaatagtcttgcccgatatttatagagaaatgctaaaaggtattactagtgcctaataccctactcggtatcatactgctattggtgtaattaagtattgagtctcatataacttaagaaaataattttaaaataataccactaactaatcgtaaaataccacttatgtaaaatgtgctaaacactattgatacccaataacaatgctcatatttacatactttctctttctcgcttagaacagtatagcatagtacgtacaacgtgtgcctgtgttcttatttaattgttgatcaccaaccaaatcaaccaatccatttgccctcttaaatttctctgatcatgttgtatgtatgtatatatatatcaataaatttactcatcagacataacaggtcgtacagaagtaaaataaacactgtatcttttccctaacattacttctttaagcatttcttttgggtaaattgatttggccaaacacttagacagacaatacaggagagtttgtaactaggcattaattcggtcatcttatatatatatatggattcatttatatggcattgtaggggtatcaatcaattcacctgtgttcatgattgttgcttattttataatgagaataatgcatccaaagaattctgtccggtgtgtgggactagtagatgaattaacgaagcaacaaagggaaagaaaataccgcaaaaggtgatgcgttactttctattgactccacgtttgagaagaatgtatagttcaagacatactacaaaggagatggtatggcatcatactgggagagttagagaagatggtgtcatgcgtcatcctgtagatgcgaaagcgtggcaaaactttgacaacttgcatcctgatttttccagagatcctagaaatgttcgcttagggttagctactgatggatttaatccatttagaaatatgagtcaagcgtacagcatgtgtcccgtagtgttggcaatctacaatctcccaccgtggttgtgtatgaaggacaccaatttcatgttgactacccttattcctggtgcgagatcaccgggaaaggacatggatgtatttctcaggcctttggtggacgaattgaaggaattgtgggtgaatggggtcgatacaagggatggtactaccaattcaatgtttaagatgtgtgcggctttgttgtggactgtgaatgattttcctgctcgcaacagtttatctgggtggagtggtcaaggttacaagacttgccctacatgtaacgaagacacttcttccatgagagtgctcaataagacctcctacgttgggcatagaagatttttgtcgtctaatcatcgaatgagatatgatcacacatttgatggaacaattgagaagcgacgtcctcctagaagattttcttgtgaggagatattagaacaagtaaatgccctaccccgagtagcgttcccctggaaaacacacatgtcttttggtggtgtgaaacgaaaaagaagtggagacacaagtaattggaggaaaaaaagcatattttatgaacttgagtattgaagttcaaatgacttgaaacacaacatagatgtcatgcatgttgagaagaatgtgtgtgacaatattcttggcacacttttggataatgacaaatcaaaagacaccattaatgcaagacgtgatttggaaaatctaggtgttcgaaagtcgttatggatctacgaagatgctaataaaaggtttatgaagccacacgctccttatgtgctgaccactgaagcaagacaagagttttgtaaatttttgaagggagttaagttgccagatggatttttttctaaccttaacaaatcacttaatctccatacaagattaaagcatgaatttcgagggatggggcctaaactcccttagcgttttgctcattgatggtaacctatctt

SEQ ID NO: 31698 - DNA, 2527 bp, Cannabis sativa
aaaatgatttcccccatgtcatatattgttctttgtcgtaatgagttttcattttttttagtaccttgcttgattggattaagggaaaattacaaatttcccaataaaaaattaaggatgccctgttttcttattccttcctctttcgttaaggaagatgtttcattgggcatcaaaactttgaaaagaaaaaaaaaagtgtatcatcaattataaaagacctgagacttgtccttcacgttgtacgactctttattaaaatttgaagactgagtcaggtgttgaaattgtttttatattcagatcatataaataatagttcattcctgattcaatccaagccggcttccacagtttccttagcttttgcaaaagaaaccatgtcgaaaaatcaagttgacttacttaaggcagatgaggatttacatggcggggtttgtgttgagttgaaagaacctatggattcccaggaattttctattcggcttagtgcttctttgtctcaatggaggctacaagtacgatgtccttttttcatttgatgattccaagacttttcttccttaaattgttttattataaaatagatcaattattatttttgttcttgtatgtaatatatacaggacaagaaaggtgtttggatcaaactgcctatttcgcaatctaatcttgttgaagctgctgtgaaggtgaacttaaatagtacttaaaagtttatttgctaaccccattcatgtttgtttgtttggctcatgttttctttctatcttttctatcttgttttatgtttgtttttcaggaaggatttaaataccaccatgctgaaccagattacttaatgttggtcaaatggattcctgaaattgctgatactctgcctgcaaatgcttcccatcgagttgggatcggtgcttttgtcatgaacgataatagagaggtattttttttgtttttcttaagatttaaaacttgtataaaagagggagacaaagacatatttgtaagtgtataaagagtccacaccaaaataaattcttaagaagctaattccttacagaaccgaaaaacagaaatccctcaaaatcttttacatcaaaaagccacatgaaaaccccaaattttattttatctcatatggatttcatactgtcctcagtttcatctaagattatcctattcctgtccaaccagatgaacatacatcagaaacagctacctttcatcagctttcatgagcttcatctctcggaaaagccaaaatatttaagtggatatgcattacaagacatgttaggaattaacagccctagattgaatattcattttttttttcgtgtccaacagtcaactttatattaaaatgccttctctcatgtgttaattacagtattaagaaaacctgtactttttttcttttcgatttcatgcattttgaattcaataccagatgcttatctgatgcttattttatagttgcatttactctttgactgtataagttcataattaggaattgatacactttgtatgctttcaactgctttcactgtactgattttcactgatcataagttgtttgtataacacacgagcttgataccatgacctagtataattttcatttgaaattaaattatttctttttgtaggtgcttgttgttcaggaaaaaaatggtaagtttaaagatttgggtgtctggaagtacccaactggcgttgtaaacgaagtgagtacatgtacattaatttgtgacctttatggaattacttttaaatctttataaatatattgttgagcatggattgagaatttccatcaacagggcgaggatatttgtgatgctgcagttagagaagtgaaagaagagacaggagtaagttacaaaattgcaatttctgtttccacatatatatgctttttcagtgcagccacatctcattcaattgtgaatctaagactctttgttttattttgctttaggttgacacagaatttgtggaagttttagcatttaggtagggaatattctgactcacatattgactaaatctttgcagttgttttgtgcatgtaaatatgtaactaactatatgaatctcatctccttttcaggcaaagccatatgtcgttcttcaacaagtctgatatgttctttgtttgcatgttaaaacctcaatccttcgagattcagaagcaggttgtagaaattgctgatgcgaaggtaatgtctggtgacaatcgttcatcaaactttacaatttcttctttatagaattgcattagcctttttttttcctttccctttttatgctgcacagtttattgatgtatatttttctagattccccgtctccttttgctttacttttgcacttgtgatttttcttgtttcaaaagataccgaaccctgcacttttatcccagatggggtatcataagctcttacagcaggtgatagcaagatttcttgtttgatgagtgatgatgttccagaactaactttaaaattggcaccataaaaac

SEQ ID NO: 31699 - DNA, 2170 bp, Cannabis sativa
  modified_base (763)..(772): a, c, t, g, unknown or other
  modified_base (802)..(807): a, c, t, g, unknown or other
  modified_base (1315)..(1326): a, c, t, g, unknown or other
atattagttcactgaaatatcattgtaatgcccgtatttgaaaattgacttattcggatttaaacttattttattatatttataaaaccttgaagaccgggatcccgagtttaaaaccgtcgttaaaatacatatatactatatatataaagttacataatatttttttaacaaattacagggcaaccacaaaatgtagtaagaacattctcaatggaagtacgactggtgtaccacatgcactgaagtaccgactccgtactagtgttagtagggcctttcttgtacttccgggagttactgagtgttgtatcacatgcactccgtatcccttggtacccgtattggtaataccgtaacctcccttaaaactctacactgtactaacacccttgatattacaaccgtccagtgctagtagtgttaacaaataataacatgcattcattcattctcatatatactttatgctaatcttacctcgtttccgtgctcaggtgtgccggtcagcttgagtggaatagcaactcaacgctttacagggccctatatcacaatatttgtaactttaatgagagacacgctataacagttttcgggaacttaaaataaaaactaaaaatatccctatcgatggatcttctcgtgacgtataaattaaagacatggtagtttaattgagtgggagcgctaattataggtacgaaatctatagcttctatctggacataagtgaaacaataattttcttcgagcttggctnnnnnnnnnnaaatggttgagtactcatttcaatgattannnnnnttcactgaaatatcatttataggcagccaagtattttaaggataaaatatattgaaaggtataacggtaaatttgtctctactcaatgtagatcatctataagatcattgattattgagattataataatggataatttcatagcgtatctatatcgtggaatatatagagcgctctatataattaagagtgcaattccaaatctatagtggtgcaaggagaaattaataagttagagaatttacttaataaattctatagctacttattggaagcttgattatataggcacatggtccccatactaattgagacaatactacttgtaagactctgttaattaattttatttgatcaattataattctaaaattagactgtcttatttatgagttttcactaagttgtgacttaattgtgaagaaaatagattttactgtttatttattaattaagaaactttgtagagtctaattaataaataatataaatgacaattttatttgannnnnnnnnnnnattattaaataaataattttagcatttataggattaaaattaggaaatattgcatttgtgaaataatagataaatagttgaaaaaatggcaaaaatataattagtgggatccatctatatggttggccacttaagccctatttttgctattattttatcattttgtattccatataattcaatcctaaccctaagtgaaatagtataaaaagaataagatggtctcattatccaactaatgacttataacctagtttacaacttgtcagataactagagaattcttaagacttctttctttcttctaatttcgaaatctcattgagtgttcttcaacaaattttgagctattagtgagtgaatgcatgtccacccatagcaagtctaatactcaatcatagtgggtaagactgtaaagaatccaaatacctgaagaagaattgggctcaaatcttgataataatctgcgacagaaagaaacaaaaattagagatttgagaagaaggagtcattatattccactgcaattaatgtaaggttactcaaactttatatgtgtttaaatttgattgttttagaaattcatatttaagatgttaataaacatacttgatagtaaatttagattttgataaaatataatccaacaatagcaacattcaaaactgaagaataaaatttaacttttcaacttcatttcaatttgtaatattttgaaataaaattaataagtaaataaacaagaggagtgctaagcaaactctcttttgcactctcttttacactctctttctaattgagtgacatgtgtaacaatttaaattatgtttaaaaatagttacaa

SEQ ID NO: 31700 - DNA, 881 bp, Cannabis sativa
aataaaatttaatgtaagcccaaataaaagtctaacacaaaattcttttgaattggaccattgcatctcttaagagaataccatgaacaactaacatgcaaaaacatataaaaaattcacttgttttcttggccaagcagactagcaatcttcactattcttagtggagctttaacatcagaattaagatttggactagtggtcctcttgtttcgaaaaccaagaacatcaaagaaaattagaagcaaaacagaataagcctttatgacactcttggttgccgcattcatctttgcatttctcaatgaattatagagaaagataatgccctcattcacatcaaggcaaccaaaaacccagtgactaactttctcaaaattccttcgaatttccttgttgaagctccctcaacaaaaggatgtgaataacttggggataaaatttatacttagggacatccaagaaatgacctaattgagtatcacggaacattttcatcacattctccgaatattttttcttgatgttcttaataacaccataagtgcaataattgacacacttagacatgtgataaacagaaggacatattttatattcccaaacctacatagatatacagaaacacaaaaataaaaaattgaattttataacatacaaagtttcaaaactgtattaaaattataaataaacttaaaaaaagacattcacacagaacaactaaaagatgtcaagaaaactagtatacaaagtacattacagcaatttataaatatcatcacgaatatcaactaaaacaataatgaatcataaacgaaacctacaaaaattataaagaaaaataataaaaataacaaaacacactacaataagcattcaac

SEQ ID NO: 31701 - DNA, 4242 bp, Cannabis sativa
ttgatgtttaattaaattggatgacgattagattttgaagtctaactactcattgaattagatcgaattagaaaaaataaattagagtacatcggatgtccaaccctaataaaaccattatttaaccaacttaacaatacaaaaaaaaaaaaaaaaatacatgtgattccacaaaatggcaaaataagagcattgcacaaatcgattccaaactgttctcttacaacattgtgctcaataatattacttacgcctactatagacacatcaaagaacgctctgtttacaaatcccaaaaggaagaaataataataaaattaaaacagacagacagaccaaaacacctattcataagggatccagacacaacttctccaaagaaataaaaaaattaaatatgaaaaaccagtgaattatatcactacaaaggatattaacatatgcaagcataattgaaggatatacagcaaggtgtcaaactattttgcttgactcatttggtgagcatcatcatttctcgacatcagttccatggaggagatgatggtctatacacaaagtcttgtgcggacgttgtaccatagttcaagtcaaggttatgaagttgctccattagttgagaacgtctctccttgaaaaaatcaagtcgcgttgtcaattcgactaaagcagaagatgggtgtcttggataatctgccacctagaacaaatgggatgcagatgattagaaatatacagtaatcagaggaggcatgagtcacttagcagtaatacaaaagacagcaaatttagtaaattgagcctaaatgttggtttgagaaactgtcttacttcagctgctctagaagtggagggcactgcagcagaatcaacagctgaaagatcgtccactgacatactggtggatgcctctgtactctttgaatcactcaaactagttgattccatgaatggtttccgacctggctgcctgttgatgctaccagatgacaacacttgtcctttcatatttctccaatcagttcccaacaaactttcctgttgggaaggaactaggattaatattggcgtgtatttgagaaaaggactttctacaagtaaggataagaaagaagggcacagggaaaataatggtgaactatgctatttttaagaaaactgctacgaaacatttatgttgtatttcgctaactccacctcgactaaaaattagacaaatgaaaacatgtttggtcttcaacgtacaaaccttaccattaaaggatttaaatttttaaatttacttatttcagacagaacaaaatgaggaagataactggaaaggaatagaacaaaggaagcactaaaattaggactacacattcttttttccttgtgtgcatcatttgaatgctttctttccagctcaggactacacagttaagtcaacccactaactgtaaacatatccttggttactttcatttcactaataattaagcaaaaccatggagcctcagaagaaagcacaaagacaaacggaaggagcaagataaaatgattatcaaattctagggtaatatattcttgactgaactaaacaaaatggcagaagcttaaaagacctacctcagtagtcctttgcttcctttcatgattacagaaagcaagacttgtgtcaaaatcttgctgaagaaatcttctgcagaaaaccaaagagagaaattacaattatttataataaatatgcacttccacattagcaatgcatgtcaatgtcatgtataatgtagtgcgtgtaaaggagatagtgatatgtgaacataagatgtttgcaagttccagagcataaaaatggagatagacatcaatccaaacattttaaccataagacctcagaataatctgacaagaccttaattttaaaacgatagtgcagaaacatagaatatcagcatgaaagagaaagatagtgataatgatagagtgaatgagtttctgtattgaacaggtaaaatctggtacaagtgttgaaggtaatttgagacatcttccactcaccgaattcaaatccataaggacccacatgcctaattgatacccacagatttaaagtactaaatacctagctggaatataactaattatactcacacaagaatagggtaaaaaaaatcaatgacatgaaaggactttcttattaggcctagcatatttacaatattgggggcctattatagtctttctgaattaacccaagacactgacatcccaagtataacaataacagagtaatttctactcactgctgagaattatgagtttgaacatgttgataacgatcacatgcatcagacaaggaaccataatgattttgccgctgctgattaagttgatgatggagttctgcaactttctgcttcaatctggcaacatcagcttctgcaagcgcaatctcctctagctcagcccttgtcttcacatcaggtttagcaataagaatttgtattacacaagcatttgaaagaaacaagtaagttgagctgcataaaccttggaatccatgctgcgggaactggaaaactgtccggtagacatgctcaaaccaacttccagtgcagctctaagatctctctcagcttgaagctgctcttgcaatcttgaaacctgcagtcattacaaaggtagaagacttaagacataatatataaactagctgttgctcacaggtgcattcacattcccagtaacagaagttgagatggatcgtaaatgtaaattttttacaggaagatgttagcatcaagaactgacattattattcttgtgctgatttatatatgaaacagaataaaataaccatatattaacacacgaaaaatgaaaaaaaaaatgcataacagcatatattgacacttaaaactattttagcataactcatatgcctcagtcaccaaggcactcacttaataggcccttctgtttcaagaaggggcaacaagaaaaaaaaatattctccaattgcatgcttaaaaggagacataaaagaataacctgctcctttgacatttgttcaccccaatggttggacgggctaataaaacaaagcaaattaaaaaaatgtaaacacgaatatataggttctgcaaggaaaattggaaagtaaaagataatgcaagcatgccccacaaaaactaacagtggagaaactattccacaaagacaagggcctgtcttgtacccttgtaaagattttccactttaacaataagaacactacaaatttggcttacacactctcaccctacacttttgacacctcacttcatttcataaactcctctaaacaaaagaatgcataaagacctaagcataaggtggccttgtcaccaatgcagtatctaacatatgcttatgcttttttatgaaaactgcaagcatatatccaatggaaaatacttgatctgagggaatatgaacttctaaagcagataggctgtacataaacctagggaagaaagtgcaacaagtaaaagaatcgtacgtcttgttcaagtgccaaccgtctctcatgcaatgcttgcttccttctctctaagctagcttgtagaattgcatttcctctggcctataataagtgacaaattcagttagcgatatcaacagcttccagtgtattttatttaataatttagggaaagaattatacctcctttgcaatcctgtgttgcaagtcatttttcgcaatttcaagcctttggattgcaagcctacaaaatcatataaattttggttacttgtaataaagtatacaacagagatgagaactcaacaagaagttgcttaagctgtacaataattttttaatatttaaagtcagagatcttagaaatgaccaacatagtttctttaactaaaagatatatatttccctgacaaagcccagtttttgctgtcaaaatctcattcctttagaaactgatagtcaatcagaccaactcactctaggagtagcaaaagttacaaataagaaaaacaaccaacactatacctcatagctaacacaattaacacaccttacaagtataccagtaacataaagatttaaaatttcctaagagaatgtcatgagttctttttaaactaactcgcataatgatgtcataaaacataatacttaaaacattatgaatgaactttgcataaaattaaaaaaaaaaaaagcaagtttgaaacccaaaattgagaaacttactcctcctc

SEQ ID NO: 31702 - DNA, 1600 bp, Cannabis sativa
  modified_base (164)..(165): a, c, t, g, unknown or other
  modified_base (208)..(210): a, c, t, g, unknown or other
agtttgatgtactataaatctgtactgcaaaaaattgctacttttagtgacaactctttaatcacaacataaattttttgtgattaaatatgatttttagccacaacaaaaagttatttaattatgactaaaaacatagtatttagttacaagttgtcactaanntagttttagtcacaatatttattgtgactaaaaacacatttannnacaacaaattgtaatttttttgactaatacttttagccacagactttttaattacaacacaataatgataatttataattagccacaactttttttatctttagtcacaaattttgttgtgactaaaagtaagattgtttgtagtgctgatctagcagatgaaccgaatgtaataagattagccgactaattatgatttttgtcccttaaacttataaggtcgttacaaatctcttctgaactattgagaatattattggatttaattttttttttttaaattttagtaaggaaaatctaatatagatgagatatggtacatgataaagttcgagaggcatgatttgatagatattaattaagtctaaggagtatgatttagtacatgaacaatcatgtaagtagtaaaagtgaatgaaattagaaaaatatccttaaattcaacgatctcaatagttcagagaaaattttcaaaaaaaaaatcaagaatataatttggtacatatcaaagtttaaacgacaaaaattttaattagcttaatatatatgatcgtccgcctatatatatgtataataataacactacaagaaatgtcacttttgccagtatatttttgtgctggtaaaagttggtattgcgctgggtaaaataaaatttacttgtgatgtgttggcaaaaaggagttggcaaatcaatgttggtattagaacttttgtcaacataaaatgaaaagtgctagcaaaaatgacttttctcaacgcgtaaatgtgttggtaaaagttagattttagccactgcaaaaactttgacctctttgccacgcagtttacgaaatgcgctggtaaaagttacttttatcagtgcagtagcgaattgtgacatttcttgtagtgtaataataattagtatacatgtgtgcatgggttataggagtgtgtgtatatagtttggtgggtttggcactattgtcaagttttaaaaggttttgaaattaaggcattattggagtttagccagaaatggaaaactactgcatgcctactcattgacagcctaaaccgaatctttttatttatttattttattttatatatcactaataataataaaataataagtaataagagttcatgattttgatgcagtagtctcagaatctcatatacaaaaccctatatataatatatatgatcgatatagagtagaaggtgataaggtgcaaatgccctattcaaataaacacaatcacttttctcactttatatatttttgtttacttagtaattacaaaatattttctctcaaattacatctgtctgtaattatttgattaaatatgttaaagtacttctaattgtactcaaattcaattccactataactttctaa

SEQ ID NO: 31703 - DNA, 1933 bp, Cannabis sativa
tattacatttatctcaaaggtaattttttttttgtcaaagcatcattttattcattggcttgctacgccctttgggcggcttcaaactaaaaactggttcttgaagtataaattttgtcttgatacgaattgtatgatgtgtggttctgctaatgaatcaaaacctcatttgttccttaattattatctaactaattggtgcatctgtgagattgagaaaaatacattatattataggattgccttattggcattaccaagatggatttcttttgtaaaattgagcaaattcagcaagtaaatgtttgcttgaaattacggttaacatgtcctttttaagtaaatttagtgacttaaataaggtaattcaaaatgtatttatcattaaaatggtaaacccccatcctaaagtaaggtaaacaacatgtttgagtaaattaagtgcataagagaaagtaattcaaaaatataatttatcattaatatggtaaaccactattttaaaataaggtaaataacatattatttagcttaagtttttttttagtgttctgtgaaattattttcttttaattttttttgaaaattagcttaaatttcaaatttttctttttaagtttttttttcaatcaacttaagtttttattatatattttggtaaaattggtgccttaatttatcattataatagtaaattactatcttaaattaaggtaaatatgtcattttaggtaaactaaatgtcttaaataaagtaatctaaaacataatttatcattaaaatggtgaaccaccatcctaaaatgtgttttttggactcattgttatctttttcaatgatattggtgttcatatctatattagttaacatcgatgcctattcccaatctaatattttattatgggttttgttcgttattagtgttgttacataattactacattataatagtataatttctttcacttcttctactatttgattaaatgtaagaaaaagtttatgcatgatttgatgataagcctagattttgttaagacttaaagtgtaggtaaactatctttctttgggtcgtttatgctacaacggcaaaatatttctaaatttaattttatttatacttacaaattcatattttaaaaataacgaatattaattaaaaattcaataaaaatataaaatttattttagaaaattaaactgaaaaaatattttgtttttttttttttcagttaacttaagtttttattatttactttttattttttatgttgaaaaaaaagaaattaaaaagagatagagtcccaataatatatataattcttttctagtcttctattatttttttttttttgacaacaaatgtagtttaaaaatcaattgtttgataaataggacccaatttaataattaagcaaaatatttgacaaaaaaaaaaaactttagttatttttgatgaaatgccttaaaccctatcatattccctttccctcttccttacgccaagttgatgacttcccctatattcatttatccttcaacacctagtagttgctctcccatttctcactcatcaataccagccatgtaagtttgtaatatgaaaacttttaatatgtttcaatttttttggtcccaagattttgggtatcattgccacattaatgattaggtgagctatacaaattcgtatatatgcaaatgttatttttcttctagatataaaagtttgaggtgcaacaccttactcttccttcttgatgccaatttttagactacaactcttcactctctaatttcatcatttcaggtatgtgagaagttttttatcttttctattcacctttttgtttagttttcattcaagttttagctcttgtaggaattttaatattgatagaagcatccaatcattaatggatgcactcatgc

SEQ ID NO: 31704 - DNA, 3973 bp, Cannabis sativa
aatgtgaaacaaccttccaacaattaaaagaacatttagtgaaggctctaatactgtccaaaccagacggagaactgttgtttctaaacctagtagtgtgatcatcccgtaagtgtcccattagtgcgagaagaaggaaagttacaacttccaatatattacgtaagcaagagactgttggtcattgagtccagatatcctataattgggaaggtgtcgactcgaggactgattctagtcatatcaaagtcactctaagccaatacttcactgtttaccttgactgtggagataatattttctttctcgactagaggtaggttcttccctactctgatgactctagtgggttcgtcactaatacatacttcctctacctcttccattggttctattttttgttccacaccaacccatagatctaactcatcttcttggaccacccctagtgccggctgggaagatggggtacatttctttcctagaccatgagaacagtcctggttgaaacgctatagtaacttcgtgcgcttctttgatcacctctaattgtcctaatgcttcaagtgtcacttgggaactttaggcataggttgcgaatggatgtcaccaccccaaaatctatcagaaatggtcgtcccaaaatggcattacaagtagtagggcaatcaactattacaaatctactgtgcttgaaagatgacattgcattgcttccagaaacttccccacttattgtcatcggaagttgtatttttcctatggggatcagcgtgtctctattgaagcctttcagttgaatctggcacgacaacagattggcttccaccagaccaatgactttgaatgctcctttgaaaatgatattcatagagcttctattatctataagaattatagaaactctttgtttgctatctgagcctgtatcacctaagggtcattgtgaggaaaatgtacatgcctaacatcgtcttctgtaaaatttattggcaaattcatcaaccttggacgttgggcatgtgattataccaggttgcaagctttatttcggtttaattcatttaagtacctttttttacacatttcaggtactttcggcaatgtgaggtccactacaaatggttgctacatgaccatctaaagttggtagagcagctccgggagggtaaaattttttaggactgggggctacaactaatgctgctactggagcattttgtacccactgaagggcttgtgcatttggagcttggattccacttgcttgtggatgacttactctttgaggaggatttatggctccatgctgtcccaaaatgaaaagttatccatgtgcaactgcatgtccaggataaatgactagaatccttacccaattggaaaaatgtccattttgtaccaatccttcaatttcatcttttagatagtcacattctattatggtttgcccaatattgtcatgatattcgcacctcttatttggatctctttttggccctccgcccttgtacattggaagaggcttcttgtaatgaaccatgttacaagttgccttattctctcgagtatctataagacttgtatactcaatgtatcttgactcttgggtctttcccttctttgcagaatcattctgatttggaccttttaaactctttttactctgtgactgggttatgttggactctgtaacttctgctttttggtttgtttgtccaggagcagcactgtattcggtttgtgcaactttaaacccaaaaactagcctctgcagctagctgcacagaagtacttggtttataaatcgtaagagttttaaaaatagttggtggagggtaaatagacggagtcgccatctacaaagtttgggcatttggtatatcggtggaaggtgctggaaatactccatatgattcagtataggcttcttctaaatttataaatccttgagctcttgtcaagaaataaattagagtgtttgctcttttgcattgaaggtctccccacaacaaagatctagttgcaagtcttaatgttaaggccaccatttttatgtcatcagtgaccttggttttagtagctacatccatcatgcattggatgtatttcttcaagctttgtcctagttttttcttgacgttggtcagggagatagctttcaggtcgaaggttgttgctacaaactgctttttaaacatcgcttgcagatctctcaaattgtggactgatctcggagataatctcttctaccagacctccgtagacttatttagtgttagtgaaagcataaacaatttgctcgtcactagccttggaaacttgcataatgcgattgtatttggatagggggtccctggggtccttcattccttcatacagttccatctgtggcattctaaagcgtttcgacagtagtgcttctatgattcttttcacacaaggctccgtatcttcttcctcagagtttgatacaatgtggctttgcttcctagagatcttttttgtgattttcatcaactcctcaactttgcattccagtcgttgagtcttgtcgcatgaagattctcttatgcgaacacgatctttgatatggtttctcagatttttcccacgggtctggctttttctgctttggctctttcttttttctcgttcaatcttctttaaagatcagtcatggagagacttccactgttgcaaactaatactggatatacctcattgtcatcatcatcatgattattagaatcactgagatgatgcttctacttgcaggaccctgaagcatggtttcctttcttcttctattgaggttggtcgacagttttagacttttgatgttgcttggtggaaggagtcttctatagattttcaacagctatccatttccctttgtctttacgaagacttgaagttttgggatcttttgtatctaccctctcaagagcatcaattgttggagaagcttgtacatcgggagtccctttggttagggtggtcatcacgacctccattctagtcatctttgtgagtagtaactcgttgaattgatcctgacgagttaattttctttctgccaattgatgttttgtagccataataaccatggggtctgactcgtcaagttgattcttttcttcgacattatcatcataagctttgttctgaggatcatcttcaagcatatctttgggtgtgtcctgagaattttcttcaacgtcgtcagaagtactttctccagattttgcatcttcgattattggatcgtctcgattctgatcttcatcatggtgacctttctggcgactgtttgcctcgtgtgggtcatcactgttccctgctttggtgctaggaccaataaaatgaaaaccagactttgttcgggtgagtaccatgattacttgagtgcaatctccagatggtatcactgcttccttcagctctcaataaaagaaccatagtatttaccgaaatttttaaaaaactaattataaataattagaactgaagaaataaacaaatttaaaagagaaaaaataaaaaagacacaaacaatttttatgtggttgggatgttaactagtcttagtccacgagtcgatgttattatgtaactctttagcttgaaaagcctttgggaaatacaatgaatgtaagttctcaagtttgtctgagcatgtattgtcagagaattcaacccttaatccatacgattcacatgatatttatagtattttgagaaatacacttagtttctcttttccctctattgtggagtttataattaattacacatttgggctgcctcttgatttctagcccaccaaggataagatatgctgactaggcagatggaattcggttggatttagtcaaaaccgtgtactatgatcgtgggtaattaactgtgaattaatttcctgatatctattgtaggaagttttcccttttggcttgatgtgatcttctgt

SEQ ID NO: 31705 - DNA, 1314 bp, Cannabis sativa
cagttatttattatgagatttggctagaaaagcctaagagattacaatgaatatgagcactctattcttttcttgagcaagtaactcaagaatttacaaacctttgtacgatggattcaatgagtatttatagtgtaatagaggtcatacttagttaccttttccctctaatgaagcccagcctatgaggcattacgtgtatactgatgtggataattaatcacgatcaaatctgttaacaccatgtcctattattgtgggtaattaatgatatattaattacttaatctctagttgtatagtttttgagatttaaggaaactatttccttatactgtacgaaatagaaaacaagaaactataactggcttctaggtacatgctaaaagtttcttctagctacacgaagtcatgactcttccaaatgctgactaggcttgtgaaaccttgcctacgcgaattgtattgattttcttccagaaggcaaaatagatctttggcttggcctaacttacgttatttgggcccactaattggccttaagcttctactttgaatccacgtgtccctttccgaatacacgaataaaattttcaacctaggctatttccaatcaattttccaaataattattccatgtgttttttccatcatcaaaaataacgaagatacaagtaaaattggggagataacaacagttctagggacatcgaagctaagcccagcgcccaggttgacaatcaacctggtgtgctagtttcaatcactcaaatacaaattctactctaagcattttctccaaaatggtcaaaaataggataagagacctcgtcctcaagttcaagaaccttaaaaatatcaaaccgacatcttggaagcttcaaaataagcactcaacgcctgagttaacatatggcttggtgtattgggttttgcttatctgattttgattctgtctcgattctttgtcaagtttttcaaaataactgagaagcaatgaagtcatcagaagaagagtagtcattcataacttcatattttcacttttaagataaagtgacttactcgaaattggggagtttcgagtctctcgttcccgcaaaataacagtatctccaagaactggtgaccaacttcaccatagcgcaaaaactagctatgtggtgttaaaatatcatttaggtatcaaaatattcatcccaacatgttttccaactcatccagtgtacaggttgacgtcacatgtcaacttgcgcgctggatgtcaacctgggtgttgggcgcaaaacaaccttcagtaaaatagtcataact

SEQ ID NO: 31706 - DNA, 1364 bp, Cannabis sativa
acactaaaaaaaatggggtatgaaatttttgcggtgttgtatgatttataattttaaattttgatattgtagttcaaaccgcatgttaaaaaaattcaaattattaaatagtcttaaaatttttggacttaactatttcaccgctattaaaattaagattaattaagattttgccgcctaaattttgacatgtaccaaattatgcttctgaacttttcgccattaaaattttttcttaaattattaaaattgttgggtttaataacttttgtctaattttattagattttgctaatatgatgaatgtccatatactaaattgcctccaaaattcaatatttataaaatcatatcccctaaactttaacatgtaataaattttcattcatcacttttgttaataaaattggacaaaagtttttaaatccaacaatatcaaatcaatagtttgagaagaaattggagatatgtgtttagtttttatattaccgttatgttagttattgtttggattttggcgccaaattgtgtaatcatattaccgttgtatatggtcgttatgttagttatgtttggaccccggattaatagaataaataggtaaaaaaacagttgggaaatcattgtgtgtttgattaaacaagtttgctaattgtctcttcacttgagcataatttaattacaataaattaaattttgatcaaacttaatatgtcttaagaaagtcaaacttaatattagatttcacacaacaaagcttagtctcaatctcaattttcccaaagctttgatcccaaacaagaaccccaaaatcatcaccattcaagaattgaatctgttggaactttgtgaaattgtgtaaaaaaataaaaagtgaagtgtgtgagtgattggagtatcacatgggatagaaacactttattagaagtatatatatatatatatatatatatatagtgtaagtttgagatttaggtatgggccccaaggggtacccaattttgtgcgcatgggtaagaactcacacaccgcacgcacgcacgccactgatccgattttacttatgtgtacttaatgaaaaataaaaatgatgcacttgacatgtttaggatatgaactgaacttgcttattgaattttataattcacatggtataatacacgaaaggatcgcaacatattcaactgaaatgaaaggtaaagcaaaaagaaaaaatagaacctttactgaattagttgtgactattttgttgaattctagtgttgcatctcattggtggggtgaaattttattaactgtttgttatgttctgaatagagttcctaaatctaagagcaaaatttcaccttatgagatcttaaaaa

SEQ ID NO: 31707 - DNA, 2164 bp, Cannabis sativa
gtctgggtccaggttcaggtctggggcccaggtcccccatctaggttcggatccttggtcccggtctaggtccaaaatcagattctggtttggatctcgagttttggtgcgagtctaggtcctagtacgagttcaagtttgagtctgggtccgggtgttggtcgaagtccagatccctgttcgagtccgggtcgtccaggtccctgttcgggtccgggtcggggtcccgatccgggtcctagtcaaggtctaggtccaagaccaggttctggtcttggtttgggtccgggtttaggtcctgagtttgggtctcggttcgggtctcaattcgggtctgggtctggcttctaggttctgatctcggtatgggtatgggtctaggcccgtgtccaagttaaggtttagggattgaggtttagtgtttatggatttagggcttaggttttaggggtaagtgtaaagagtttaggatttaaggtttaaggtttagggtttagggtttaagaattcgcttccagtttcaggtcacagggtacgatttaaggttcaggtgtgggtctgggtttgagtccgtgtctgggtctaggtccgtattcgggttcacgtttgagtcttggtcccaaatccaaataccaccacatgtcgagtctagttcgagttctagtacgggtacaagttttggtctgggtctgggttcgggtcaaggtccaattccctaatttaaacaccgactatggggtcgggtccaagcctctggtcttggctcctgggtcccaggtccaaatccaaatcctggtccagatctagctcatgtcttgggtcgcagtttgggtctcaaatcaaggtttaggtcttgggtcctgggtcatgggtttgggtccccaattcaggttaaggtctttggtcgttgtctgggttagggtcccagtcccagtgcaggtcccggtccgtgtttggtactggtccttgtctcgggtcttggcctggtctcggccttggtcacggttccattctaaggtcctaggtctgagtatcaggtccaaggtccgaatcccggtgccggttccagtatgggttctgttcttagtctatgttcaggtctcggttgtagtgcgggtctgggtcccagtcttaatctcggtctgagtcctagtttttggttcgagtttgagttttggtacgagtgtggttctaggtcaaggtcccgagtcacgggtcctgggttccaggttctgggtcgtaggtcctggttcaagtttgtgtctgggtatcgatcccggtctaggtccgggtccgggtccatgttctgttccacgtctagatccagttttttgtcaaggtcaattcctgttccatagtccttattccgattcttcttccgattttgggtctcgggtccaagtttgggtttggatgctttgtctagaaattgttctagatttggatcttggtatgattcgaagatcaagatgtggaatatgggttgggtccaagcctcgggtcatgggtcaagatctagatcccaatctttggtcccgatcacgttccacttcggatcttgggtcttggtccgtgtccgtgaccagtcctggtctaagaccaagacttgtgtcgggtcaaggtcttggttggagagtccgggtatgggtcccagatcaaacacgaactacgagttaggttcaagctccgggtccagatctagttcacggtcttgggtccaagtctagttccacttcgggttccaggtcccggtccaaattctaggtcagggtccaggtccagggtcagatcatagttctcaatcttagttctaatggtcgtgtgttgggtccaggtcccatatccaagttccagtcctaggtctcggtccgagtgcaggacccggggccaaggtcaggtgccccatccaagtccgagtaccttgtttagatttcggtctgggttccgtggcccaggtctagataccccatccaggtccgaatcctaggtttcggtttgggtctagtcccagtttcgatttcgattcagtgtttgggttcgagtttgggtctaggtttgggttgaggtctgattccttatccgagtctgtgtctgagtctgggaccgggatcggatcccggtctgggtctgggtttaggtccaggttcgagttcgggtctcgggt

SEQ ID NO: 31708 - DNA, 6800 bp, Cannabis sativa
tgtaacatatatttaatcaatctcttattttagtccttgtattattttacaatagagttgtaatgcctctaacaggactatcacaacaactactgaagcaagcagttgcttcttaaatctcaacatttttgctctagaaatctgcctcaaaactaaaggcggttacacacaagtataattgcaaccacctcattgtttgattactccaaaataatacctgatataataatattttgaaattctatttttataattactaagtgaaattattgaacaatttaaataatgcgaaattatagtaaattatttgaacaaaatttatctatgttctatcacacacgatttctgaaacaacagaaatataatgcagaaagtaaaaatatagaaaataaaatgacacacaacattttatatgtggtatcaacaactctttcgaatttctcctagtccaggggccacggccaagaatgaaatttattagattaatctcaaatgattacaaaaccaaattgacttcaacaaataaagactccatctttgaatttaccgcaactgttgtaatctattcttctaatcaaatttctaaagtgccgacatgccttgaactccattcaaattgtagcacttgtacactttatttcgaagagtgactcacatgcaatctttctcccgaagagtgtctaacttacaatcttccttctgaagagtgactaccttacaatctttctcctgaagagtgactcacatgcacttttcctcttaaaaagtgactcataaacaagacttctcctgaagcttgatgtgtaatatccaaggtgttcaacctgcacaatttcaataagaaacaatacagaataacacaataataaaacactaagaacttgttggactcaagttcttcacacaacaaagaaaatactctctaactttgaaagtaatttataattaatacaccaagagagctaaccaataccaaggacctaaggatgtatttatacactttagaatccctctaggtcgtggtcaaacaaccaagaaaccatcaaatcaataaatgaaaatcttcccaaaaaggaaactcaaaatctgtttgaacagacagtcaatccgttcaaataggtacaatgaacctggacagttttttagcaaaattttcataaacaaataagacaactttgactacatcaacacacagtttcttggtcaagaaatcagataaatgaataaaatatgattaagacttttcataaaaacaaaggataatatcaaatattctaaataaggaaaactcaaatttaattcacacaaaatcaaaagggatagaatgattttgaaagccttttcacactaagaaaaggaaactatatttttgaaaataataaatgcataaacaattaaaactaattttgaaaataccacaaatattatttttgtctattttatcaaatatgctagtaaaggattttacaatctctccctaaggcaatttgataaataaaaataaaataaaaacctacaacacacatgtcagaaataagtaaagagaagaattccccctgcaagcatgcataacttataacaaacatgaaaaataaactaaaacttaactctctcttaaaataagaaggtccagagttacacaaatcaaaataaaacaagtttttgagcatctactctccccttttgtgtctttcaaagcagccacaataccaaaaatataaaagaaattgatatgccaagcctaagactaaagaaagtatcaatgttcttaggaatggagacaaaaaatataggacaagaaaaaaccaagcttccggggccttagacaaggctttgacaacatcaagaactgagcgttagagtccctcaagagtcattattagagcaatcaaggaatccagtgaagctcgaacaccaaagagtactgcagagttgaagcagtttgaacagaggcttctgtaggaaagtcatctaaggcaaacacaagagattgaggcttaaatttcttggatgatgaggcttcaatagtatcaagaatcagagaagatgtctagtaagatgcagcagtagaagaagccatcaaatcctcttgctctgtcttgatatcacttctctgcacactcaaaattttgtaaataacttaaggaaaaggaaggtttaagtttttcttattacctttccaaaaacaaatgatttgatcatagatgaccgtggccaaatcaatatcatgctcagttctaaccttgtacaagaatgaggccatatcaaaggagatggttgtagtgtgagaagtcggtttccaatttattgtagtaaacttgtgaagcacaagatacatgaaagtgagattggcgaccgagataacataattttgaggccacaccatcttttgacccacacagtctcagtaagaacctcatccttgtcaagatgttcactctcctcttcatctggaatagcaagagaaggaagatgcaaagcctttgctacatcttgtggagaaaaaaagaaccaatgacctctcacaaacactttacaaaatatggtagagttagaatgatttgcatagaactcttaaacaatcctatccacatagcaaaaaaaaaaaaaattaaacaaagaattttcccatttcctctcttaaagaatgttaagaacaccatatggacaatgattactcaaatataatttctttcaacaagaaatttgtgcataaataaccatgtcatgagcattatcattgtaccaataaaagagaatgagttttgaagtgtaaatctttcatacttggagaagaaataggttcagtgattggtttcttgcctttaccttttgatgacaatggttaaggaactggtgcaggtacagattctgcttctataacagaaatagcaaaatctttagactcagattcatcaaattctaatgcaggatcaataggagctggaaaagattcatcaaactcattagtctttgcactcagattcttcttccttaggttcagactcagtagaagatggagatggagatggaaatggaggatgagtctttaatttcttctttatagcagatggagaagatgatgtgcccaaaattaattttccttttggggccaactcatttttctttgattgacttggcttcataggcaatttgagaagcccagcagtagcaccagcagcctttgacgaagatgaactagatttaccctttgccttagccaccttcgagggttcaattaaaaaagagccaacttttttgactcgagatggcaccaccacttcagatggtggtgcatcgactccaagatcagaagtaatttttggaaacaccattggatgcttattggagagagaaaaaaccttcttgcgagccttggtcttggtggtgcgaccaatagaggccattagagtagttgcaggcgacagtgaagtaaaaatggaacccagaggagatggagatgatcgcaattgagatgcagcaggggccttggatgattatcctctttgggtcttcatcatttttctctttgaaaaaaaaaaaaactaaaactcaaacacactcacacgagattgttgcgatagaaacacaatgaagaagagaataagaaatcgtgtagacaaaaggaagtgggtgagaaatatttataagacaagacgtaccttttctcaaataaacttaccataaagtagtttccgttttctaattgaaccaaaagggaaaccaaaaacaacaccaccattacacacgatcagccaagaagttaccttttttttaaaaaaaaaaaaattgacttgcaactaaaaagggaagcaataaaaaaaaaactttttatatttatttatttattaaaaaaaaaacactaaagaaaccaaaaaaaaaaatagggtccattaaaccccacgcgatcagcccaagacaacttccccctttttaaaaaaattaagataaaaatggcaacaaagacaagtaaatgatgaaaaatatcaaacataccataaaaggataagttgagaaaaataagtaccttgatgaccaagaatattttaaaacaaatcaataaaataccaattttcacaattggtacaattaattcggccattttttaaaattccatgattttattaaatgaaaaacaagaatgacaaaatctcaaaaaaaaaaaaaatacctatgatcaatgtgccttatcctgaaaaagacataagacaagccaaatgaaaatagatgttagtgtatgatagagaaaaaaaacactcgtgatttttgaaaaaaaaaatagaaggaattttcgagagaaaaaaattacaattcaatcacaaacacgtattctttaagaaaataatctacatataagagtctgacacaattttgtttttattaaataaattgtgtagtattttgcttacaatgtttcaagcataagtgtgtgatagtatatgcaagggaacattgcccatttgacaagaaagtctttttctaaatgtaaaaaattgtaacctatgaagacgctgtcacactataccagtggtagatagcctttttctatggtagcatatcctcttcataactctgaattacaaagtaccaacttactcaaaagacggctttcacacactgatgcaggtagctctattcttatataggagcttcaaacaatgctacacaaaggatgctcaaatattaaccattgattgattcactcgaatatgcctaggagaaattaattatttttctctcaagaaaaatacctctagaaactcaaaaacacaagtcaatttatctttcaaaacacaaaacaaaattttcaaaaaagattttcagattttttaaactagaaataaacatatttgattaggcaacaaaaataaaattttgagtattaaagagaacataccccgaaggattttcaggaaatcaaagcgaaccgaatcaagaaccttagtgaaaatgtcagcattttgtttatgtgtttcaatgtatttcaggacaagaactttgatttcaactagttctcttatgaaataatgtcgaatgtcaatatgtttagttcgtgaatgttgcatagggctttttaaaatattgattgcgctagtattatcacaaaagatagttaaagtgtcaagatcaaacccataatccaacatcatttgcttcatttataagagctgagcgcaacaactttagagctcaaagcctataccctttagttccttctggatatcccaaaagtacacactttagagctctaggctctaactttctaatactctggtgtgtatatgctgcaaacccaaaaacctttaagtgggatagatcaggtggtttgccggaccacctctcttcaggggtctttaactccacagcacttgatggacttcggtttgtcaaataagctgctatgagaactgtctccccccaaaatccaatagctaaccctgcttggaatagcatgcacctagcctaatttaaaatagtcatgttcatcctctcacctactccgttgtgttgtggggtaagtcttacagtcctatgcctttggatgtcatttttcctgcaatacatgttaaataaatcattgcagaactcaagaccattatctgtcctaagagtcttaactcttttattaatcaagttttctattaaaattttgcatttttggagtttatttaaggcatcatttttatgtttcaaaagaaaacctataatttcctagagtaatcatctactatggatagaaaataactactcccccatgtgtagctatttattctggaccccataaatcagcatgtacatattctaaaatttcttgagatttatgtgttctaattttaaatttaagcctatgatgcttacccaatatgcaatgctcacaaaaattaactttacttactttatctctgcataaaagattttgtttagtcatgatttgcaaatctttctcacttatgtgcccaaactttctatgccataggtttgccttagaatcttcaagagtttatgctattgtgttgtggccatttgaaactggttctccctttaggtagtatagaccccattccttgtagactttctttatggtcatagaacctttgcatagtttcatggtacctattgcgatcttactcacaacaccaagctcatctagcatactaatagaaattaaatttcttgctaagttatgcacaaatcttacccttgtaagagctcttacaaaaccatcatacatcttaaagctcacattacctgagccttcatcatggcatatttggttgttgcctaagatgaccttccctcctttggattccctaaaatccattcatctttgaatttagttgcagtgttgtaaacttctccactctcatagccatcacttagattagcttcatacttctttccctttttctttgagaaataattctctccctaagttgagtcactaacgctaccatctattcttcctttgttatttctattccaaaaatatctgtctcttctggaatgccctagtttaccacagtgatagcagccattaggatctttttgtcttcttaatggactcttcccctttccatgccttccacccttggaagaatctttgttgttactccttcccctattgttccaaggtttcttttgtttaggccttcctctactcaagttcagctcaccattagagctccccaacttgtcattcttcatctctaagttcatagactttagtgcagagatggcttcatctagggtaatagaagttcttccatacttgattgatatctttacttccttgtaggatt

SEQ ID NO: 31709 - DNA, 4665 bp, Cannabis sativa
gccaatctaacgagaatggagtgtgtcccatcgctatttttctattgttttgtgagcccaaagtacttgtggtagttcatctacccatatttttttagcaacgtccaacttcttcttaatagtatcttttaaagttttattaacagcttctacttgtccgtttgtctgaggtctcgatactgacatgaagcttttaatagtcttatttatttcacataattctgtaaatagcttaccgtcaaactgggttccattatcaaatactattttaatttgtattccaaaccttcaaatgatgttctttatgaaaaaatcaagaacttttttgtaagttatggaaacaagaggttcaacttctgtttattttgtaaagaagtagactgctactactgcgtactttgctccgactcgccccgtgggtaatgccccaatcaggtcaatcccccatcgggtatggcgaggtcatcattctcaactctattggtggtatgcgaggtatatgtgaaaacctttggcatttattgcatctcttaacaaattcttgtgtatttttatttattattggccatccttgacggataattttctttgacaaactatgccaacttccatggtctccacaaaagtcttcatgaatttctttgattatttcagtagcttctgctggtaacacgcatcataagagaggcattgaataagctctcttgtacaattttccctcgactattatatagcgatgtactgaatacaagagtttgtgtgcctcaattttatttataggaagttcctcattgagtagatatttgactatgagtgtcatccatgttggcaaagcatctatcatctctacttcttccttttcacatatacttgggtcgctcaaaactttgaccagtaccaaattcaacatgtcgagttcattttgcaagtgcatcgacattagagttatgttctcttgaaatttgttcaattctaaattaatcaatcttttccaagttttttcgaagcttctctaaatatttttccatcttaaatcgttttgcctggtattcacctagaacttgattcacaatcagttgtgagtcactatagcatataagattcttaacttttaatgcttcaactattctcaagccagccaacaaagcttcatattctgcttcgttgtttgaagtatcagattggaatcttaatgcgtagtggaatttaaagttgtcaggcgacatcattatgactccttcccctgagccattctcatttgaagccccatctacatataatttcctagtttcaatattgtgctcgacgaatgggtcttcttctgagattattccttcaataagaaagtcggccaaagcttggcctttgattgatgttctcgggtggtaggttacatcgaaattgtcccagtttgattgaccattttatcaatgttcttgaagcatcagattttgataaaacttctcttggtggctgaccagttaagactttgatgggatgtgcttcgaaatatggccgtaatttacgcgatgcatgatttaggcataatggaagtttttttaagaggaggatatcttgattctgccccttgtaccttttactaacatagtaaacaggttgttggtgctttccctcttctcgtaccaaggctgcactgattggatgttccaagacagctaagtaaaggtataaagtttctctagttattggtttggccaaaattgaaggtgtcgataaatgtttctttatacttttaaaagcttcctctcattcttcagtccattcaaatttcttattacctcataaaacattaaagaatggacgacacttgtctgttgatttagaaatgaatctgtttaacgccgccattcttcttgtcaaggcttggaattcttttggcttcgttggtgaaggcatctcgattagggccttatttttttctgggttggcttcaattcttctcgcatttactatgaaaccaagaaattttcctgaagaaactccaaaagaacatttcttcagattaagtttcatattatattttttaagtatcccaaagcactctgcgaggtcctttgtgtgatcttcactttttatcaactttttagcatatcatcgacatagacttccatatttcgtttaatctattttttgaacatcccaatcactagtcgttgatatgttgccccagcgttctttaaaccaaatggtatgactttataacagtatggtcccatatttgttacaaaacttgtatgttcttgatcagggacatgtattttgatctagttatatccataatatgcgtccttaaacgtcatcagctcgtgtcctgtagttgcatccactaactggtcaatccttgatagtggaaaagaatcttcttgacatgccttattcaagtttgaaaaatcaatataagttctccaggtgccatttggtttcaagacaagaacatgatttgaaatccacgagagataaaggcatcgtgtataaagtcattggtaaataatttatcatcctcttttttaagtgccccttgtctttcagagtctaggggtcaccgtttttcctgggtaattaggatcgatattgaattgatgacggatcacttaagggtcaatccctatcatgtttgctgcggatcctggtttgccttcaaaaagtcaattaactgctattttagtttttcatccaaattcttcccaataaacacacatttagtgggatcgtttggatttaaaataacctcttctagctcttcaattggttttagatggttattctcgtcttagattctaggatctaggtcctcttctttctcctcgccttttttctgttatgactaccatcagttgatgattggctcttctattttgaagttctacgcgataacattcgcgagccaacaattggtcacctcgtagcacaccgactcttgcttgtgtcaggaactttagagataggtgtttgattgaacttactgtccctagtccaatcaatgtagggtgacccatcaatatgttataaactgatggaagatcaataactaagaacacctgcatcagtgtcatggataacggtggctctcctacagttaatgggagtttaatgaggccttggctggagatactatcactagtaaattcgaataagattaccatgcaaggttttaactttgcattttgtaaccctattttcttcaatgtatccttgtaaaggatatttaccgaggtcccattatccaccaacactctttttactctcttattggcgagctgaactgtaatgacgagaggatcgacatccagatacctcacatgctttctattttccttttagaatataatcagaggttcctttgtcttttcttttagtggttctggagcaaacaccgattgctcgttctttattttattgacatatctcatataggcattatcactatctcgagtgagatgtggccctcccaagataaccaatatatcctcgcctcaacagggggaggttgtaatctctggttatctgggtcattgggatgattgggctggtttggcttgttcccttgacgcttcacatatgtctaaaatatccacgcgagattaagctctctatctcatctttcagttgtcgacactcttcagtaatatgccctatgtctttatgaaatcgacaaattttgttgagtctcgcttatgtctctcatgtcttataggttcaggtttgcagaatccaaccttgtgttcatttgcgagaaagatgttttcacgagtttcattcaactcggtgtatactgtgtagattggaacatatttgtcatgcttcttttgtttctttttatttttagatgattctcttgagtcatcttttcttttgttgtttgaaccacttggattttcttctttggtcgagacagtacttgatgttgcagtactcgtgttgggtttatttctcgagctactcttaagcaacttcatctcgttccttgcttcctctttgcgctcaagcacttgcgctctttcttttaattcattaatgtttcttacttggtgaccctgtaggtcatcgcataactcgcccccagtcgttgaaagataagttgtgatatctgcttgaagagtagtaagctgaatactgtcattcaagtttctaacctttgcagcatcttaggtaagccttaagtgactcgcctggttgctgttttatgttagttagggatgatgcttcatgtttcttgtatctagcagcttgaaactatttcttaaagtctttggacagctgttcccaagatattattgaataatgagtaaacttgtcgaaccagctactcgctgacctagttaaagaagtccggaataagatgcaatgcaaattagtcgagacactgctggctcgcattatggtagtaaatttattcaagtgagcgactggattcgcagtcctaccatactacaaaatgtgtcgatttttgaatccttgcaggaatttagaattcaaaatattatgatgaaatggctcggtctcctcatccgagtcataacaaggtaatttcccatgttccccatcgtgatactttctaaacttatcctccaacttaatgattcgtagatggatgggatccacttgctattgttttgcataaagctgatggcataagtcaggtgc

SEQ ID NO: 31710 - DNA, 1551 bp, Cannabis sativa
aaagtaaattgattaaacctatacggtagaggcaatactgctcataccaggtacccacaactaaactggaaatacccatttaccaaattttcaattaataacaattaatcaaagatcattctttgatcttgaagtttcttttctatgtttgatataaatcttgataatttttcaaacacatgcagaaatatacatacctcaagtatattctctattttattgataatcccttagcatgaattactatgtaaacttatagtgagtcccccgttagtgatgctaattcatcaacatctaagacccacatatacttttcccatcattaccactaaggttttactccctagttcatacgccaccattgctcccttgcaatcatcactatcttcatacttagttaaccactctaaaacttattttacactcaactaatagcttgttctttagtaagcaacctactttgtgatccaacattcaccaatcactcaattacatgtccattaaattgcatctcagttcataagctttttctcattcaaggtgagtatgcctttctataatttcttaataaagtaatcctttcccagaatttcaatggtctccttatataccatattgactatccagtcaattataaagtactctccatcattactgtatcaccttaagtcattcaggtaatcttctttaccttagtgataccactactcttcctgacgttcttttatacgtcaccccggtaacgtccccgcttcaagccttcattgggcctttaatcccataaaatgatggctcttatacacgagtgcatcagtctggctacttcctggactgacgactggccacatggaccaatccaagtgtttctaacgtgttttgctctgactcgcacgcttcatgggaaaatttcctaaataaagtcaccctaagtcacatacactcaaccatggagttccttcatggtgggataccaaaacagatgcttcttgctaacataggtagtcccacacctacataatcttaaaatcactacataatcgctgccctcaattcacctaggattctagaaaatactcataaaaagtcccacctttgctaatgctaaatcacttttaaacaaaagattttttttatttgaatcaattagattgatgcctccattaactactcatgaccaatattccacttaggaatacctgtaaacttaactcatattgtcatttttctaatctgtctaccctgtcagatgaactaccactaaataacatacaaacacagtccatttagatcttttgatgtctcccattgagagtacaatgtttaatactaatataaatcaaaatagcaattataatattacccataaattctaacttgagtcggctgaaggatcgatattcgggtccccttgaattataactggcacttgggcaggacccatacacttttcacctttaacatcaaatttcttaattgcgggtaggttctttttagatgacccactaccccacaataaaataagatatggctctacattggctcaaatggcac

SEQ ID NO: 31711 - DNA, 2369 bp, Cannabis sativa
ttagggcacaaaacccaatagggaaacccatcaatattttataaactgatggtagatcaacaactaagaactcctacattagtgttgtagacgatggtggttctcctacagttaattgaagtccaatgaggccttggctgacgacactatcaccagtaaatccacataagttcaccatgcaaggttttaattttgcatcttgtagccccatttccttcagcgtatccttgtaaaggacgtttaccgagcttccattatccaccaacactctctttattctcttgttggcgagttgaactataaggacgagaggatcgacatgtggatacctcacgtgcttcgtatcttcctttgagaatataatcaaaggttcttctattttggcttttttcagtggttctgaagcaaacaccgattgctcattctttatttcattgacatatttcttctaggcattattactttctccagtgagattcagccctcccaagataaccaatatatcctcgccttcaacaggaggaggttgaaatatttttttatctgggtcgttgggctgattaggctggtttggttcgttcccttgacgcttcacataatatctgaaatatccacacgagatcaggctcgcaaaatgaaaccctgtgctcatttgcaagaaagatgttttcatgagtttcattcaactcggtgtacacggtgtaaatcgacacatatttgtcgtgatttttctatttcttcttatttttagatgattctctcaagtcatattttcttttggttttcgaaccacttggcttatctacttttgtcaagacaatacttgttgtggtagtacttgtgctgggtttatttcccgagctagtcctcaacaacttcatctcatttcttgcttcatctttgtgcacaaacacttgcggtcttttgttgacttcataaatgtatcttactagacgaccttgtaagtcatcccatagatcgccccaagctattgaaaggccggttgtgatccttgcttgaggagcagtaacttgaataatgtcattcaagtttctaacttttgcagtggcagtactgaattgactcaggtaagccttaagtgactcgcctagttgctgctttatgttagttagggatgatgcttctggtcgcctatctctggcagcttgaaattgtttcttaaagtccttggatagttattcccaagaagttatcgaatggtgagtgaatttatcgaaccagctactcgttgccccaatcaatgaagttgggaataaaatgcatcgcagattatttgagacgttgctggctcgcatcatggtttgatgttattcaagtgaacgactgggtttgtagtcccatcatactgcgatacatgtgggtttttgaatccctgagggaatttagaattcataatatcaggatgaaatgaaatggctcggtttcctcatctgagttatatctaggtaatttcccatattccccatcctgatattttctaaacttatcctccaactcaatgattcgtaactggatgggatccacttcctgttgatttgcattaagttgatggcgtaattaaggtgcattctattttagtcgttcacaaagatcaggttgtcttcgattcaaatgttcacaaagattaggttgtcttcgttcataattgctcacgcatcttgtatctgagtaactctcagattgataacttctcgtattgctcatgctttcttgatcaacataacgttgaggtctacttccttctcgcattggccttcctgatctactgtgcgctcgagacgtcgagtgtcctgagctagaactttcctcgtcttgtactggccttctccttcggaagaggtttgatacatgttctctatttagatacgtctatacaccttccctctcggatcgagaaggacgttaggggtgcctcggtggtagcccacttgtcctaggttgagcctcaggatttctcttcttattacaagggatttcttgttccctagttcggggctgccttgtgtcctcattcctgcgagaaggctctggtacatcattacatccattcccctaattcataaatccttgggatctttgaggaacttctcgacgtttttcttggttattttgatgctcatccattggaacatccttagtacccctacgttgctcatcctaggtgttttgggtatttctttgatttgcttcctacctcttggttcttgaacctcgagatctgcctcgtggctttcttaccccaagatcaggtttattctgtgtattggttccttgagtttccttcgccgtagttgcctctctttccaattccactaatggtacttacctagtgttgggttttgtgccct

SEQ ID NO: 31712 - DNA, 5801 bp, Cannabis sativa
aacaaggtgcatcttgtttttttggtagcctatcacgaaagaactacatggttaagcatgcttaacctagggtaattttaggatgggtgacctcctaagaatttttctcaataagtgtgcgagtgaggacaaagcacgctggaaatacttgtgttggtttgtagggccaatcgtcaatccatgaagcagccgaagtgacgtactcgtgtatatgagccatcattacatgggtgtaagggcccaatggaggcttgaagcagggacattacacttgccaaggcctgttcccaccaaaaccattgaaaggcgacatcaacactggttaattttccctatggaatgagtgaagttgattttcttttatacaagccacactttaaaaaaatgtggtctgctcaacaaataacaaccaaccatggatgataacaggaaatatgcgacttggaactctcccattcctcctgaggaagaagatcaggattataccgcccgagccgcgtataattataacacaataactcatgaagttgttaagacccctgaaggggctccccaaggtaataccaattatatttatggatggtcacatactgtccttaatacagacctggcttgccttgtcaaatttaaggatagtcactataactttttttatctagaactatgttgatcctattgctcatagatttgatagttggcaccccaagtttcatgtccaattaacaagtaacaactcgtattatggcattgctaatcaatatagctcatatagccttggggccgcaagttgggattcagatttatatcctcttaactcttttgacctttacatgattactagctttagggaatctagtaattttcaaactaacttatcttcgtgtaacatctctgagtgtagtctatgtgggaatatgtcctcgtaatcttaatgctatactttcctgataagtttgtcttatttgtgcccttctatttttattttgtagacatggatcttgaggtggatttcaaagaggcacttaatagtcttactcttccagtgaagagaggaaacaaataagttgccttaaatgatgatggatctttgaaacaacccaaagctccaaggaaaaggaagagtgaaaataaggcaaaatccccaacttcatctcctcctgctaccgagaagatccctacttccaaacctcagacttctcctattgaaatttctgaagtcgcagatcaggataaggaaaaaaggattgctggtgacctaaacaaagttaccttcgatcctaatttttttgaggttcaattgttggacctaattcttttccatcccagtgaagctgaagtcttaggtgcaaaagcctattttggctttattacctgagcgaattgctattttaggaattatgtaaaggattattgggatctcatcatctatggcttctcctcagatctcctcaacaggagtgaagaccggatgttctcgataagccttcttttatcacttcttaccccttcctctctcttttttattctaattgaattacacatctcttctttaggttattctaatggctaaccttagttttcaatcccatcaacaaaatagtactcgtctcacactcgaggtaaaaaaatctcttaagaggtgtgaagctcttgctaatgagaagggttttattgttggagatgtaaacaaattaaagaaagaaatcgaggatcttaaaaccaagcatgcacatgagattcaaaaaaagtcttcaagaatcaagaacttggataaaccttaaaagaggttaccaagaagtccaagaaagatttggaggaaaaataaatagacactacaaaaaattattacttttagtgacaactttttattcacaatataatttttttgcgactaaatatgacttttagtcacaaaaaaatgttacttgtgactaaaacatagtatttagttacaagatgtcactaatttagttttagtcacaacaagtattgtgacttacatttagtcataacaaattgtaatttttaagactaatactttatttacggcacaacataggaatcatgatttataattagtcacgatttttttcacttttagttacaagttttgttatgactaaaagtaagattttttgtagtgggatgctaaaaagatgataaaagcgatggctcaaaggtctctcttcaaagtttagcaaagtaacaaaggattcagtcttagcttcctaaaacccaatgtggaaaggagtgttgctatttttttagaaaatggaggaagatgagttggctacagagagaaccaaaaaagtagcaaggggcattggagaaatcaaggaagaagaagaagaagttgtttctaagtcccctactaaggaagcttaattagttataattgtgtgtttgttatttttaactcatgagatactgtaattgagatgagattgatcataatctcacaccactttaatggtgttaggcgtgtgagatgtggagagagagagtgtgtgtggcgtatagaagagagagaatgaaggagtgaaaaaattaattcttattttctctctcattatcgtattgtttctcttgtatcttgtactagtatattatttatgatactatgtatcatatatatagtatcataaataaacctacttaataatatatgaaaagaaatatctaatttgatttgaatttagaatttaaattaaattgtaaatatataataattaaaaaacaaaaatcaattaaattctttattttattatctttttagttaaataaattatccaataatatatttaattcaacaatgaaagataattaattatttttttaattattttaactaataaaataatcaaataaaattaacacaggtctttatatgtcactctacacgtgtggaccatgcctacacgtgtgagccatattttaaggtctaaaattaattttttaattttaccataaataagatttattatttattcttcaataaataataattaattaattcgcattaatctcgtatttcataaagagtaaaataaatattattttctctctttttaatattacttaagaataacattatatttaactaattaatatatttttatctaataaaactaaatagttaaatactatcaattataaaattcataatttttataaaaataataatttcataaattactattttgcccttaagaatttatttctcatagaaattaattctcactcaaattcatttatcaaataaaatcttcctttgtcagtgttatataaaggtgactcggggaccatagacctatattttaaagctccaataaatgctttattattatcgatctcattaatagaattatctaatttattaattctattattactccactatcaatattgaaagtgcactctttgacaatatagaattatatttaaagaattcttacttgtataatcaatataagtagttcaccctccaattattagtgcataattagagtaggtcaaaattactgttttacccatctaattatctattgactccttatgtaccattatttcaatgtgaacaattaatctataacttattataaatttggatccaattgttagcactcccaaaattaacactataagagaactaatattcgatctattaagaaaacttaaattccactattgtataacatgttctcactcactcatgttattaagctcccaaaaatagaagttgtaagaatcatattctctgagaaacattaacgagtgaatcaaagaactcaatgaatacaaacaagagttgtatacttaggattcaagttgatctactgatgatcatcattgtgatatgaataattctttcatggtaaacgacacgttcatgaaagacgtttattacatatcggtccagtcatgcataattgaattatacacaacacatttattactacatgtctatccacatatgtgatccgaattaaaattacacacactagaagtatagtgtatagtaaatcgtacttagcagttccatattaaagagttccattactttaatacacttccgacttattttatttatatcgtaattctcttgtatgtccttacaagattatacactctccatataaataataaattttcagatatttaataattatactattataattaatgtatcatttatgttataattgtatttcatatattctctaatatattatccattaatcacttgattttagggcataaatctcaatatgttattattgatttctctcatattaaattatttttatttttctatttgattgctatgaatattgtgtattcttgttaggcatataaataattaaggttttgtatattgttctattatcatcttagaattaattctcacctaatagtttaggattctaagtagagtgataattttcaattaatagtaatgtcaaatgtattattgattctgatgaaaaatagaactcaggttacatgaattatatgctttattgatttgttacctagattaacttatctccatagacatcaatgtttttcttaggttaaatagatttcatactttatggatctattgcttagtaaaaagatttaattattgagcacttcgccttgattaattgtaatagggagattaaaaaaaagtgactacttcagcattttttgcggggttaatagtttaattgaaaaattagaataatgcttttattattgatcttgaatgattgttgaaggtggagattaattcttaactatttcttaatagtgtaatatctatctttatttacttcatatttattgtttaatctttataattaaaaactttcactttttattcttgttactaatttttaaatattaatttgacaatagtcctcatgagatagacctgtatttacttatactgaagtaattggtaatataaaaataaaattattcggtatggcttacgacggacatcaaaaccctaagaactcatgtatagtttagtttttatgtggttttctttattaaaaaaaaagttaaaattaaaaatcaagtgtcgaattgaaatccaattaaacaaccgatcaaatctaattattaattgaattagattttgaaacttaattagattggatcagatgataattttttaaatctaattactaattgaattagatcaaatatctacccctagatgtttaaacttatatatgtatcatgtccctcttgcgaggggctttcaatatacattttgcctagatcgtgttataaagatatgttagtattgttgtgtccaacactattataatgagttaacgatcaataaatagttaataattttttataatatctaataaattaaaatatatagaaactgataattaattatatactcataaaatattttaatatcttgtagataacaattatgtaattatttatatctaccacatgtataaataatatcttaattacaatatcttacttaggaaaagtttggagatgtcttttggacatattggtaagagtacttttgtttttatttggtaggtaaagaaaatttatttgaaactattatttatatgagtgtatatttagttgttagttagaaaattacataaattttatgtaattaaaaataattttcaaaataataatttaacatgcctataaaatagacttcataataacttatttttaaatttttaaaatatgaataagttactttttattttatctattctatataaagtgtgcctataaaacagaatttttggtttatgaga

SEQ ID NO: 31713 - DNA, 1531 bp, Cannabis sativa
aggatgttaatgaaacatacatggtagtaaatctagatcctagtaaaatatttccaacacaaagatggtatcttggtggatccagtaaagattgaagcggttcaaaatcggcctcgatccaagtctgtaactgaggttagaagtttcttgggattagcagggcactacagaaggtctattgaggggtttcctaagatttctacacccttaacggaattagctcaaaagaattgtatgtttgcttggactaacaagtacaaaagtagtttccacgaattgaagcaggagttaattaccgcatcaatgttaaccttgtcagtcagtgatgagaaattcattatgacgcttataaacaagggttaggttacattttgatacagtctgagaaagttatagtctatgcgtctaggcaattgaaggattatgaatagtggtattctacacatgatatgggattggaagcgacgatgagtggaattggttagagattatgactgtgagattctctaccaccctggaaaagaaaatgtggtagtggatgctccaagttgaaaaagggtctagggcaagtctatgaaatgaagaaaacctttctaaagttagtcaatattacaataaaatttaatttgttagggagaatcaagacaacccaacaaagtgatctagaactacacgagtataatgaaaagcctaaagccagtggtcaagtatgaaagatgacattgtgaaatatgtgtcaaatgtttaacttgtcagcaagtttaagcagagtgtcagagatcagtggaaatatttcaacctctaaagattcctgagtggaaatgagaaaaagtaaccatagacttcgtggttggattaccaagaatagtagggttttatgattctatctgggtaattggggatagatacacaaagtcagcacattttctttatcaatgcggacaatgtatacggtggattaatgcgctaatctatatgtcaaggaaataattcaactttatggtactctaaggtcagtcgtttcaaatcgagacctaaagtttacatccaagtgttgagagagtttgcaacgagtaatgggtatcaagttagattttggtataatctttcaccctcagactgatgatcagtctaagagaattattcggatatctaaggatatgctacgggcgtgtgtattagactttgagggttttggaataagtattttcctctgattgagttctcataccataatagttatcacagtactattggtgtggcaccgtacaaaatgctctacggaaagaaaggtcgttcacccattcattgagatgaagctggtgagcagaggtaccttggacctgatgtagtccaaggaacgagtgagctcatagaaaagagctatgctgatccaaagcatagagatattgaattctaggttgggaattttgtctttcctcaagtgttttcaatgaagggaactcataaattggaaaaaagatagataagtcctaaagttaccggtccgtttgagtttctggaaagggta

SEQ ID NO: 31714 - DNA, 1252 bp, Cannabis sativa
ctcaaaattctgaagctgtttccccggcactgacacctaaaataggggcttagtgtaatatttctgatctgtataaagcctggtttgaaaatactgtagcttttgtgatttcgtatgtacatcagtgcttctttccaagtaagtatatttatttggagttttgattcttgcttagtttgtattgtattaggactcaatttcagtatttgggtagtcatttgttttcaatttttgtttaattggattggcttttgaggttctggcaattcctttttgacttcttcataaaatgcaggtattttaattatcattaccattattattattttaattttttgaagcaaagaagaataatttatttcatcaaccaccaaccaatacaaaccagctacctaagtagcaaaaacaaaataatgacttgccaagcaatgaagcgatactttggaatacaaagcctattccacacaaccttagtatagcaaactttaacaacagtaatgagagaaaggtaaaaagtttttaccttaaaatttcctttccttccagcagctaccaaatcctaaaaatcaatagtatttctaagcttgagaagcttcttgaaataccaactataatcctgcttagcggtgaatctccaaaaatcctgcctctttaagtaaatggtattgatccactttacccaaagccaatcttttttagaggagcccaaaggaaatcattatcattatttttttgacaataattggtctggtttttcaaacatggcagccagctcattgtataatgatgttatgagcttttttttttctttacgtaaaatatatttatgagcatttcatttaccaaagtgggaatttcatatttattttaatgttggtagttgttttacagtgatatctagtctttgacagtgttagaattagtttttattttttaagaaatagtaattaatcttttttttcttacaattgggccggtttagaaaccgggttgggtctgagtcgccccgactcaaaaaccctgatgggttgggacaggtcaaaacactaaggctatgtttggttggaaggaggaagagtaggacggatggagaggttagagaggatgaggagtgagagggatggagaggattgttaatctcctttgtattgtttggtatatgtttggttggagggaggaagagtaggatggatggagaggttagagaggatggggagtaagagggatggagaggattgttaatctcctttgt

SEQ ID NO: 31715 - DNA, 1551 bp, Cannabis sativa
ctttactagacaatgttgaattgcgttttgttaaacgatttgcaaacaagttggctcactgcttagctagagattcttgtttctctccaggtatatgcttcagttggaggattattcttcttctgaagcacgttctattatttttaacgatttgattagttaataaagataccgattgctttgagtaaaaaaacaaacatcacgagattataaaggataattaaaagcttcaaatatcaaaatatttaaatttatatataaaaaatagtttaaatgttttagaaggtcctaagcttattggtgccttttatagtatttctccatcattatttggtcattttattatctgaccaacatcaaagtaaattaactaacaaataagcacataataataatcttcatttagtgttaagttaattaattaaattaatcacatgataccacttgatcttgattgggtttttagttgagcattaaatatttaggcaaaaaaattgtgttgggtatagttgccaacttgccttaatttgtgtctagttagatttgtgtatattatatatatagtaaatctactatacgacgtagtgtttttactatagggaaataaattaggccaatcaaaatttaaagaaagtagattctataaaacttttgcatctgtagaaaattattatgctatattatataataatattattgtattattattttttagtttctgtaaatattatgaatatattaactattgaattcttagacttcgaaccaaattgtcaagatgttcaatactgatatacactgatatgctgtatatatttaattttaattttttttattatgaaaaaatataagataataataccttaggcagcaaaaaaaaaaaaaaaagacaatgcaattagtgtttttttttttatataaaattacttttttaagattttttaagttcgttagtttaattgtgttataattattattttttttatatttgctttgtttagtatttatcacataaaataaagtttttgcaaactcaaaattaatttttggagaaccggcctcacaaataaacaatgagagaatttctacagtaggggcggagggatatggggtcgtgtcggggcacaagaccccactcaattttttaaaatttattttttgtatgtactttttttttttttatatatatatatttgtatatttatcccccataaatttaatttttgttttagttttgccatctcatattataattttgtccatattaatttgtatttttttatttttatctttacatacttttatatttattttcataaatttactctagtctttataaaatttatatttttctttataataaaaataatatttttttttataagtgtaatttttatcaaataataaaaatttgcctccttaatgtttgtggctagctcagtcactgacagtaagatttgtagtttttccctcatgctataggaaagcaaattcaaccaattataattaaaagaaaagaagtgtacatagtaggagtgttcataaaatata

SEQ ID NO: 31716 - DNA, 1881 bp, Cannabis sativa
tggtaaaataattcccaacatgtctaagggactatgttcttcaaacattgaaatggtttcagtcttatataagacgacccaccttagaagccaacaattttgagataaagccaaccatactccaaatgttacaatcttcagtccagtttggtggactgccatcagaagatccaaacctgtatctatttaacttcgtcgagttatgtgagatattcaaggtgaatagagttaatgatgatgccattggcctaaggatgttcccattctcgttgagggagcgagctaagagttggtttatgtctttgctacccaactacattgttacatttactgacttggtaatgaagttcttatcaaagttctttcctctagctaaagctgccaagctgcgagaggagattaataatttttgtcagctcaccaaccaatctctctataaggcttgagagatgttcaaggatctcattagaaagtttccacatcatgggatcgagaagtggatgttggtccataaattctataacaagttgggtagtagtacccgaacactcataaatgtcgcagctggtggggcttttatgaggaaaagtgcgaatggggcttataaactgcttgaagagatggccatgaataaccaacaatggtctactgagagaagccaaccgaagaaaattgtgggtttgcacgaagttgatgccataactaagttgatagcacaagtagaggccttgactaagttgatgactactcaaataaaatgggctcaattactagtgagctatgttggggggagggggctcactcatatgacaccttccaggtggatgtgaacaatttgtcaatggatcaagctcaagccattaagagttattcttagaacaataactatggttacaaccaaggagggggtcgtcgtcagaattatcaaggataggcttcaaataagcagcatcaaggtttctaccaatagagaactcagccccaacaaagccaacaacattccaaacaacaaggtcctagtggagggtctaacattaaaatagatttgctacttcagttcatgatagagaccagatcttccattataaccttagaaactcatatggggaagttggctactcaaatggctaattgctcccaaggtaatttgcctagtacaacggaggtaaactaaaaggagaattttaaggaaattcatttgagaagtgggaagaagtatgaggggcctagtgagaaataactagtggaagaattagatcaggatcaacagggaccaacaccaaaggaaaagaacactactgagggtctttacttcaaaagaagtttcaccacctatcaacatcgagcaccatgtcaaaattccttatctatagaggctttgcaagaacaacatggacaagtagctttctaaaattttggaagtattcaagaagctgcacatcaacattccatttgtagaggccttggagaaaatgccaaactatgtaaagttcatgaaagagatcttttccgagaaaaggaagataaagtattttgaggtagtggcattaactaaagagtgtatagtgctatattgcagaagaagctccctcccaaactaaaagatcctgggagtttcaccataccatgcaccatcgaaatgatagaagggataaatgctctttgtgatttgggggcaagtattaacctgatgcgtttgtcagtttttaagagattgcaatcaggagaagcaaagcctacagctgtaaccttggaactagctgatctctcattggcttatccaagaggggtaatcaaagatgtccttgtcaggtggatacgtttatttttccaaatgactttattgttcttaagatagaggaagatagcaacgtgtccatt

SEQ ID NO: 31717 - DNA, 1954 bp, Cannabis sativa
caagattgtctaattttgttgtgactgtgcttgctgttgccatacttgtgttgggtttacttcctgagccagtcttcaacaacttcatttcaatctttgcttcctctttacgcacaaagacttgtgctctttcattgaactcattaatattcctcacagggccaccctggagatcatcccataactcacctcctgctatagataagtcagttgtgattcatgcttgaagtgctattagttgaatatatcattcaggtttttgacttttgtagcagccgtactgaatcgacttaagtatgccttaagagattccttaggttgttgttttatgttggtcaaagacgacgcttcgggtcgacggtctcttacggcctgaaattgctttttaaaatccctctacaactattcccatgatgttatggaatgatgggtgaatttattgaaccaactgctcgcaacccttgttaaggaggttgggaatataatacaatgcaagttatttaaaacattgttggctcgcatagtagtattaaaattgtttaaatgagcgaccaggtatgtggtcccatcgtattgcgagacatgcaggttcttaaatccctaaggaaattctgaatttaagatatctggatggaatggctcggtttcttcgtctgaattgtaacctggaaatttgccatgttctccatcttgatatttcctaaatttatcctttagttgaattattcgtaattggatgggatccactggctgctgatttgcgttttggtttagttgattacataaatcaagcgcattttgattgagctgcccgcgaaggtcaggctgcctttgatttaatctctcgcgtaaattaggctcgtgatgcctttgttcatagttacttacagatcttctccccaagtaactctcggattgataactttgtgagttatttatgctttcctggtcatcataataacatcgagatctactcccatctcgcatttttctactcgaccgactatgcccacgagatcatgattgtcttgtgcttgagcttacttcatctcgcatcgtccttcttctttggaagagattagatatatgtcccctactcaagtacgtgtgtgcattttctctatttgcacgagaaagacgctaaggatgtctcgaaggaagaccacttgaccttggttggtttctaggatttctttcattatcacaaggaaatccctaattccctggtcgaggctgcctctcttcttcattcatgcgagatgattctggcatgtcagttcgttcgttcccttggttagcaaatccatgggaagtttgtggaacatctcgtcgatgttcttgtttcctttcattattaggatttggttgatttgttctgtacattgggacatcccttgtactcctaggttattcttcttgagtatttggggaattcccttagtttccttcttgtcttctggtcctagagcctcgaggtcttcctcgcagtctccttacagtagaattaggttggttttgaggaactgtcccgtgtgtagccctggctattgcaacttctctctccaacttagcgttttgtcggtttgtttttgccaaacgttatcggagttgcctattttctaattctaccaatggtacgtatctggtaggatcataggcatcttcagtcctcctttctgagatttgatcaccatcagtattgaagttactatcattcctccctgaacgtggtgttccagatgtgttgggtctttgaggtcccataggttctttgccaggacgatgggttgtttcttcaaggcaattatcgttatgttgatcgttatcagccatttagtatgggttaattgtgtttatggggagggatttttctgagtttttttatcaccaaggctctcaatgaaagcaccaaaccgctaacacagatttttgttaaccaaattaatagcctttt

SEQ ID NO: 31718 - DNA, 2664 bp, Cannabis sativa
atttatatatggagctttgcaggagaatatcctaaaatggtcatatatttcatgttttataacccttctattttaaaacatggaagagcctccataattttgtttgtttggtagttaaataaggtttggtaaattgactacttctaaaatgtgaccctatcatgaatcctaaatttttagagaatttattggaaagacaaaattaccctcaacgaatagtagattgtgtaaccatagtctgacttttttcaaatgatgtagtttagccatataatagttttcaaacaactgagtgtgttagagttagttaaataactgagctgaacactttgtgttgttgttagtcttgaataacagctttctgttatttagtttagtcagttaatttctgttagctactgattagttactaagcctacattatataaaggctagcactgttaattctttgtactgttcaattcatactcaataaaacaattcttttgtttcttgaaagtatgtttccaagcaaaagtaaaatgagctaagtttggagttatttgtgaatatcaactcaatgttaagaatttgtgcagcttatggtggttgtttatttactaaaacattgtgtttatttcactagaatctcttcatataataacaatgtcagaaactattgccccactgatgcagttgtgatggtaatctacattttatcttaatctaaatcactgttccttttatttttcatctctactgcccattttgttttttgtttttatatgttaattagttcttcactggtttagtatatgtatttaggtgaactgaacaaagagtattgaatgtgaaccatgcataggtgaaacaactcaacaattatctaccaagattatcaatttgaagagggcatttatcataagtggtgatttctattcaaagtgctacaagcgaaggtaaaccaacctcgttgaactcggttcatgttcctgcagtttttgcataaccaatttcccccagtcccacattgttgtaccagagtgaggcttgaagaaggctttgtttcaagatattccttctaagagagacctcaaagttttgtgtattagatttgtgagttctttcctttgaacaagaaatgaatgcaaggaaatgtggacatgaaatatctcttaaaatgttttgttgactaacagattttgcaatagggtagaggacttcgatgtggggctgttaattatgttgtttatttgaaaggaattaaattattgattgcaagtaatactaatagcaaaattcttttttggttcttttttcaaagaatactgttattaggcaatagacacttggtctcccgcactcaataatattatatctcaccaatagtcatatatacctcatactagtagtgctaggcgtcattgatgtttgttttagatcattaattatgtttaaattttgaattataagaaggtaagtgttctttttaaacgtttcttcccttcattcttgaaaatttattagaaatttttacatgaaaatacaaaactcaacttttattacaattttaccttcacaaaagtagggtacctttcatacgatggttgccccttttttgtcccaatatacgtgacagtcatgaaattggtaagtgggtcttaagatcaggaagtaagataaatttaaagagaatttatctagattagatggtggtatttgggaagtacctctgagaattttaactgcatcctgatgccaaggtattttattcatctctgagagctaggcaaggccattttacatcacagtcctatttttatatctcattttttatcattctttttctctcttacaaaaaaaaaaaaaaaattaagataggcaaggccattttacatcacagtcctatttttatatctcattttttttatctttctttttctctcttacaaaaaaaaaaaaaaattaaaagcattcctcctatatttctctatcttttacataattaataaaagtagaatgttttttttggatgtttgtagtttattcaaaattattttatgaatgatttatatattttaacaagattaatgtcttgttattttcttattgatttatagttgtctttttgttattttatatttgttttatgttgttgtctaagtgttctatagttgttttcctgttatttttatgtaattagtaattttctccctgaactttcgacaatactgattttggccactaaaagatacggcttgttaagaatctcccttgaccttttacatttacagaaatttagtccttctgttaggttccgtctcattattccgtttaaatgatgacgtgtctttgtcaattagcaactttgtccttaaactttaacaactatcaactcataccccctcaaaataaaaatgagaaagatttaacatttttttttagtaaatcttaaaaaattagtttagatcttaaaaaaaaaattattttgaatcattaagaaaattaaaaaataaattaagattttaaagcgatataaaaaattatttatttttttattagaaaattcatttatatattacaaaaatattaaaaattcaatttgtcaaaactaaattttacgggaataaacttgactaaattttatttttataaaaaaaaatatagatttgtttaagtaaacat

SEQ ID NO: 31719 - DNA, 1355 bp, Cannabis sativa
agtacgaggctctgatccatgggaaaaaattggttaaggagatgggagccgaaagggtattagtccagtcagactctcagtttatagttcaacaagttaaaggagatttcgaggctaaagaattaaaaatggccaggtatttggccgaactaaaaaagttgattgcgactctcgactatttccaaattagccagattccccgagaaatatgcatgccgacgccttggccggccttggatcctcgtcccccctccacatcacaaggacaataccatttgacttgcccagagggtgcaaaggcaggggtactactggcccacattctaggaggattcggcaaatcactcacgaacatgcgaaaaatgccagaaacattctccatccatcctagcccccccgacggaattaaccaccgtccaaagcccgtggcgattcatgaaatcggggatggatatagtagggcccttgccaacagcgccggcccagaaaaaattcatgttggccctcaccgactatttctcgaagtggatcgaagctgactcattcgctcagataaaagacaaagaagtggaggggtttgtttggaaaaacatgatatgcaagtttgggctgcctcaagagattgtagcagataatggttcccagttcatcagccagaagttcagaagtttctgtgaacaatggaaaattaaactcttattctcgacaccacgttatccgcaaagcaatgggcaggcagagtcatcaaataaattcatcataaataactttaaaaagcgactcaaaaacgctaaaggaagatgggcccaagaatcgcctggcgtactgtgggccaacctaaccacgccacgtactagtacgcgtgaaaccccgttctcgctagtatacgggatggaagcagttatcccgacggaaacgcaagtgcccacttcgcgatccgagctaagtaacgaagacaactctttcctcagactacaagccactaacaacgtcgaggaaagaagggagtgcgccttgtcccgaatgcagaactactgttccgctgtggcaaagtaatacaataagaaagttaggcccaggaacttcctcccgggagaactagttctaagaaaattttttcagaataccgaagaagcccgagcgaggaagttatccatcaactgggaaggaccgtaccgagtgataagcccgacggggaacggagcgtacagactgtccaccatggacggagccgagatcacaagaagctggaatgcaaggtacctcaaaaaattctatgtataaactaaaagctagggactctaaattccactattactgtcgccgtaccttctcttttaaataatgaaaaaagg

SEQ ID NO: 31720 - DNA, 2568 bp, Cannabis sativa
  modified_base (1009)..(1010): a, c, t, g, unknown or other
ccttagccaacgggggtaaaacggaccgaaaagtgatagcctagccacctcaaaggggttggccggccaccccttgccggccagcttctagacagtacaaggctagccagcctgtttcctacaggtgcctgaccagccaagattggacctggcagaagtctagcacacaaccttacacgtggactacaagctggactaaaaattgggccttaacagcccaataaagtagatgaaaaagacttatgtttgaagggaattttagtcttttgtatttaatcaatttagtatgtaaatatctacttatttttatttattaattagggtttaagctctcctatgtaaagatccttaactcaatcctaaagatcctaagtctcattctaagaaactaagtccctaattcatttagccgtcaggctctaagtctgatagccttctctatcacacgcccactatagcatctctcaacacttgagatttgtcatcattgactcctactttataaccttaagagagctatatcaaatcccacctatagtgatctgaatagtgttatctctcggtatcaatacaactaaaagtggagtgttattactcgctaactaagggggccgaaccattataaaatgcttgtgtttatttacttttgagttctaattatgtaacatgtggtaagcatcagtttaatatgaccccgctgtcagttcgctaatttttgaggtcaacacctactatagggtaggcgactaccttgtcttaattaagacaatgatggtgtcttttgtcttgacgaattttgttttaacaacttttgtcttgacacattttgccttaacaaattttgtcttttttccctataaaattaattttaaaaaaatatttattacaaaaataaataattactatttttccaatttaaaatatatttttttaaataatattatacaactatttatccctacccttgacaatgtttcaaggtggcaatttggggaccatggacctatanntctaagctccaataaactagattattcattgagtctcatcagccaaataattttgtttataattccatgattactccactataaatatgaaagtgaactcttggtaattatagaattatatatacggagttctactatagtgttcattgatataattaatttcagtgattacccctccttgtgttggtttgtaattagttttagtcaaattactattttacccttctaattatatctttatcttttagtaccattaattcactactggaagtataatttagatcgtatataaatttgcgcacaactttcaagttccacaattaacacataaagggaatcaacattcaattcgttaagaaagtcaagattccataattatagatcatgttcccagtcatcttctttgagaaactttaactagtgaatcaaagaaaccaataacatgaacaagagttcatgattactaaggagttaggtcaatctactattgatcatctttatgatagaaattaggtatttacagtaaacggtaagtttgataaagacatcattatacatatccgtccttgtcatatataatctctcttatagacatcacctttacttagatgtcttgatacgtcaataattcagattgagattacttgcaccgaataacgggcatcagtaaactatactagcaaccattgattaaagattcctaaacttaatatgttgctaactattttattcatggctaagtgatcttaattctccgtacaatataagtcacaacctcatgtatgaataaggatttttttgatatttatagataaattattcaatattaaatattaataatttaacattcatgcatatattaaaatgttcaactatttattaataatcataaatatctttacaaaaattttacggcataaacccaaacatatggatccttgataagaaacaccaaattcttcgaaacgagaccatagtgttggtcaaagtattttggagaaacaatgcagtggaggaagccgcctaggaattagagtctgacatgagggcttaatatctagagttattcaagttagatttttaggacaaaatccttttaacgggagataattgtaatgacctcttaactttattatgggaattagcagataattaaaaatttgtttgatcattatcattatatgcccttgtagataattagggcttattctcgaaaataggcattaaattattaatgttaactcagaaactttccttagtaatgtggacatcaatgtttgacacgtgacaagaacgataatatctcacaattgagtagtcccgagttaaagtaattgacctgggaggggtccctagccctgtgcccaggctaacttcgagaactctagaatgcaagttttgattctgataagtcttttacaactcattatctttcagtattctgtaccataaaaacatggaccaaccaagtgcacgccccatgagcggaaaatacacgaatcaacacctcaaaaatcaacctaggcacctagggtttcacccaacacctaggttgaca

SEQ ID NO: 31721 - DNA, 1598 bp, Cannabis sativa
gtaaatacaatatttgtatagattcaaaatattgaggctcccgttttattggagtgctcttaggttgtaaattggtttgtgcagcattctctgattcataaaaaaaaaagaatgagaaggaaaaaaaatggggtttgaaaaataagatgactgccatgtcatcaggtaacaggtgaaaacaaaaaatattaattttaaaaaaattattagtaactttaaatatcattcatttgattatatctaatggtccatacttttaaatacccattcatgggtaatacccattaaaagtacacccatataataatatacttagtaaataatgtaatattttaattcaaagtatatacatgataattgtcttaaattatttaaatttaagaatataataaattacaatatatgtattatcagataagttacctaattaaaaatattttaaaaatatgtatatggtatataattaacattcaaatgaacatactaatgtaacaatagctaaaaaaaattacttaaagaacaaaatcttaaatccaaaaaaaatgtattacctaattaaaaaaattaaacatacacttaacgtcacctaattgaacctaattaaaaacaaaattaattatacgtgcattgcacctaacatcaacctaattttttttaatatacataaatctggtttttaattgatttttgacaatgacattcggtgatgggtccactctagttttttcttaggttttttcaaagtctggataaggaggatattggtatattgttctattttttatgggctttgtggaaccaaagaagtaacatttttcataaacaatcatcgcttcccccaagggaagtatatgattagagtcttaatttcttttttaagtttctggatgtgcagaaggctgaagcatcaggttccaaacctcattctccagtagtttctttgcaaccaagggctttaacgcatcaaatgggtttggatcggttcaaaatttttagagatgcagctattgacacgtataatcccaggcatagtgtgggagtggtagtcatggacgcatgtgacagagttgtggcaggctttacgactccttttgctggtttagagccacctccggttgctgaggctaaggctatttgccatgctatccactgggctcaactaattgatctgcttgtagatatacttttaacagattgtaaatcaatagtggagagactttcttgtaattggaataatagtattttggataatgtcctaattcaggtcaaaaacttgttatcattcagtcctaacctagccatttcttatattccaagggattgtaatgtaattgctcataagattgctaagctaagtttaggattagataatgaattagtttggaatagttctctaccttttcttatagcttgttgctttggactctctttaatgaagcacaagtttatttcaaaaaaaaaaaaaaaacatatctaatttaattataaatagatatttaattttttgcaattgatagattgaatcgattctatttaattagattggaatggaggttaaagttcaggttcatttcaaatggtgtttataattttttttt

SEQ ID NO: 31722 - DNA, 2697 bp, Cannabis sativa
  modified_base (2078)..(2080): a, c, t, g, unknown or other
atttttgtctggtacaccattctacagacataaaattccaacaggaagcccatttgtgaaaatggcccaagtctttatagctgccatgaggaaatggaaggtaccaattcctcatgatcctaatgaactttatgagcttgatttggaagtgtatgaaaagaaggggaaatatagaattgatcccacaccatccttaaggttagtatatatgtacaatagtataatttatattatatttacatatatataattggtataactaatgacaaagagtaaaaaatgaggttcttgtcttaaatttgataagtttataacggaaatctcctctatgtataaataataaaaggtaatttaacaagaaatactacaactataaaaaaatttacttttacccataatagtagtaaaaaaattatgattaattataaattctatttttttttgtgactgaaaagttcgtgactaaatgtgtttttatttacaatatttattaacactaaaactaattaaattagtgacaatttatatctaaatactatattttagttaggaaaaaaagtttatatttgactaaaagttggtaaataaaggtgggctttttttaatgtgctacatgaatttatgagtaatactgtatatgcatacaaattttacacatttatctcataaatttatcaagaaaaattttatttatcaaaagtgacttgtcatgtaatatatggtaccttctcaaatttatgtgcaatttatgtatatatgtacatattattactttgaatttatatataatgcataatggatatatgtgggtacaggtgccttactaaagcttcagtgaaaacaggctcaacaagtccatggcaactatgttcagtaactaatgtggaagaaaccaaacaaatggtaagaatgttaccaatattgatagcaacattcgttccaagcattatgcttgctcaagtaaacaccctatttgtcaagcaaggaacaactttacaaagacacatacgcaactttgaaatcccaccagcaagtctaattggtttcgtaaccttatctatgctcatcagtgttgttctctacgattggtactttgttaaaatcattcaaaaatggaccaaaaaccctagaggaatcacactcctccaaagaatgggaatcggaatgatctttcacatcatacttatgtctacagcctctcttattgagagacatagattaagtgttgcaagagaatatggtgttgttgaaaatggaggacaagttccactctcaatctttattttgttacctcaattcgtccttatgggcattgccgacgcctttttggaggtggcgaaaatcgagtttttctatgatcaagcaccggagaatatgaaaagccttggaacttcttatgccatgactactttaggtgttggaagctttcttagtagttttctactttcaacggtttctaatattactaagaggaatggtcatcatgggtggattctcaacaacctaaatgattcacatcttgactattactatgctttttttgcaatgttgagttttgttaacttcatttgcttcttgtttatttctaagtattatgtctataaggctgaagtttcagattctattcatgtactcacacaacaactaaaagggactaggagcccaagtaatcatgatgattcctagatatgatcaatacttaggaaactttgttagtttgttagtttttaattaaagcatatatagagagaagagagaggttccatatctaatatgttattaaatgattatatatgtaatgtagcccttgtttttgttttcctaaatgaaaaagtttttacatattattaaatttaagagaagaaatatacatattttaatatgtatacacaatttataatgttatagctatacatataattattaatattgaatagttaaaaaaattggactttttgtctctttattctttctttgtcttactttcacaaaataatgcgttaatctatagtcaatgcctcaatataattttttttttttaggttttaaattagatactgaaatttttaatttttttnnnttttttttttttttttctgtaggacaaattttttttttttaaaagtactgtgctttttttttttaaaaaaaatactgtgtaaattttatacaatgtactctgttaaattttcacagttgttccacggttattttttagttgttccactgttgttttaattgttctattttattattttacggttattttataaaaaaaataatatttttgtaaaaaattccgtgtgatagcaaaattgtaaatttttatctaaaatttaatatttttgtaaattttttttttgtttttttttttttaaaaatctggtttgataaatatataaattgggtaatgaagggtggcccacttcaccaatattatgtatttgggaaagcaactttttttttttttctaaggaattcatatgttatgtatggaatttttgggcttgagtttgggtgggccttaggcacggacttaacccgccgtaattcaagactgttcctgtgtaataaaaactctattgatatagtgagagtagaaacatagggaaaaagtgaaagaggtaattattagcttgatcttcaacgacacctccattattaccgttgttgcctccattattcgcaacattagcg

SEQ ID NO: 31723 - DNA, 3277 bp, Cannabis sativa
  modified_base (1083)..(1088): a, c, t, g, unknown or other
ccatataacatctcatagggagccatctttattgtactctggtagctattattgtaggagaactcaattttaggcaattacttactccatgaaccctcaaagtccatgacagaggctcacaataaatcttcaagtatctgaattgttctttctgaatgaccatcagtctgagggtgaaaggctgtgctaaattttaacttggtacccatagcgttatgaagactcacccaaaaatttgatgtaaactttggatccctctctgaaacaatggatttaggagctccatggagatgaactatctcctttacatacagttcagcatattgatccactgaatatgtaactttcagtggtagaaagtgagctgattttgtaaatctatctactatgacccatactgaatcatacattctcgtggttctaggcaaactactaacaaaatccattgcaatgtcctcccacttccacttaggaaggactaaaggttgtaataaccctgccggcctttgatgttcagccttgatttgctgccaggttaagcatttggacacgtagtcaaccacatctcttttcatcccgtaccaccagaagtagggttttaaatcctggtacatcttggtggttcccggatgcagcgaataaggtgtggtgtgcgcatcatcaagaatctctttcttaagctcatcgacactaggaacacacactcgagctctatacaacaacattctattatttaagactgaaaagtctttaggccgaccagccatcacctcatctcgtacattgactagcttaggattttctggttgagctattctgattctctctaatcaatcagattgaattgttaagttgtgcaacttttcaaccacaaactcaatccctgcactaaccaactcagaagctagttgaggggctatcagaagtgtggtgcaaacctgcccgggacctcttctacttagtgcatgtgccacaacattggctttcccagggtgatatagaatctcgcaatcatagtccttaacaagctctagccacctcctttgcctcatattcaagtctttctgggtgaaaaagtatttnnnnnncttatgatcagtataaatcttgcatttttcaccataaaggtaataccgccatatctttagagcaaaaactacagcagcaagctctaggtcatgagttgggtagcgttgctcgtcatcttttagttcacgagaggcataagctatgactctgtcagcttgcatcagaatacatcccagaccctgtttggatgcatcacaataaacaacaaatttctcttgatttgatggcaaggctaacaccggagctgttatcaaacattgcttgaactcctgaaaacttgctttgcatttatctgaccacacaaatctctaatttttcttagttaactcggtcagtggcatagagattttagaaaatccctcaacaaaatgttgataataccttgataaaccgagaaaactttgaatttctgtttctgatatttctgtttctgatttcagcctctgccaattcttcaccgactcaatcttacttggatcaaccataatcccattcttcctgacaatatgtcccagaaaagacacctctaacaaaaagaattcacactttttgaactttgcatacaacttgtgatccctaagttgctgtaatactattcggatgatgctcgtgctcctcctctgactgagagtatacaaggatgtcgtcgataaacactatgacacaattatcgaggaagtccttgaatactctattcatgagatctataaaggctgcaggagcattagtcaatccgaatgacattaccagaaactcttagtgcccatatctggttcggaacgtagtgtttgatatatcttcttctcggattctaagttgatgataaccgaacgtaggtcgatctttgaaaatactatctttccttgaagttaatcgaacagatcgtcgattctgggtaatgggtatttattcttgatcatcaacttatttagttcctgataatcaatacacattgtgagggaaccttctttctattttacaaacagaaccggagctgcccaaggcgatatactgggtcaggtaaacacgatatcaagcatcccctgcagttgtaacttaagccccttgagttctgtcggaatcattctatatggagctttagaaacaagttcagctccaggtgccaaatcaattacaaaatcaatttctcattgcagcggcaatcctagcaactcctcgggaaacatgtcaagaaaatctttaaccaccctgaatccctcaggcccaaacgtttcaggtctgctacagtcaatcaccaacgctaaaaatcctacacatccactgtgtagtagatccctagctcttagtactgaaataaccgggatccgagacccctgaactgacccaacataaacaaatggatcctcaccttctcgttgaaaagtcaccattttccgtttacagtctatactggccgaatacttggacagaaaatccatcccaagtataatgtcaaattctgttaattccagtttgataaggtcagcactcaaatccctatccacaatcctaactggcatagttctaatgcacctattggagataactaactccccgttaggcattagggttccaaaccctctctcaagggtatcacaaggcctacccaaaagatcaattaacctcgtagctacatatgagcgtgtagctcccgaatcaaataatacaatatagaaattgttgacaagaagctgacctgttaccacagaaggactggctgcagcatcagcttgggtaatagcaaacatcagaccaggtacaggttttgcctctgactgggctcttctttctttgcatgagggcaatctttcttgaagttccccaccatgtcgcactgaaaataagtcttccgattgcactctcccggatgatgttccttacaacgtgggcattcagggtaagagtaaccctggcgtctgcctctgccctggttcccatggaatcacttactctgccctgagccaccagatgcaggagtaactttcctcttctgatcagtggtgggatcaccaccatccctatcatatacaagagtaggaaaagtgggggttccaccaacatttggagtcacttggggctcctgaaggaatttaactgcaccctcggctctcagagctcatgggctctagaacatctaccaacccgcagtctagaaggaccacccgttccaggagggctcaacctgagg

SEQ ID NO: 31724 - DNA, 1448 bp, Cannabis sativa
  modified_base (184)..(184): a, c, t, g, unknown or other
taagtattcattcgacgatgatgacgtcgaccaaattttcgatgagttgttaaaagctaaggcaatacgactccccgagccaaaacgaccaaacaaggtcggtatgatagatgacccaaattattgtcggtaccaccaaatcgtgagtcatccactgtgagattgctacatccttaaaaacatnatcgaaggcatgatcaagagaaaatagattgagattgactcttctcttggaaaagcggcaacaaatacaacctccttaactaagaaagaccaaatgccaaaggatcccacacaaagggacataatttctatggtatttgaagttgacaaggaagttacaatagtccaagcccactcagatatgcaaaactagaaaacccaaatattcctacgttgtatgagctcatgacaaagcctaatctagaaatttgggaggactagtatgatagtgaataggatttggaaagtacatggaaaacatgtactcggaaaaaacttacaaaaattccatctcgaaaaccatggaaactccagagtcaaattttggggtcgaccagatataaaggatcaaaagaataaaaacaggatcagaaagaaaaaggtcgtttccaaaagaaatgaattcgaacagccaaaaggaaatctagtaactctggaggaatttttaccgaaagagttataggacaaggcaactgttggtgatgacaacgtgtcccgtttctgaacctaccccacctgaaagtgaaaaagaggtagatgaaatcaccttgcaagatatgcgacagaaaatttttccaaagaaggaaaaagaagtgaaagagcttgaaaaagctaaacaagaccttcaaaagccttcatcttcggcaaaccaagaatttgttaatgacagtcaaagaggcaaaagcactggtgaagataaaatgatgcaagcaaaatatgatatattggctcatctaaagtgcatccctaccctcttaagcatttatgatgcactgcaaatgtctcctgagcatagaaatgcacttattgttgcattgacaagtcctgcattttacacgaagaaaatagagccagtgaaacctacatcacttgagacgcatacctcttgtatggcatgcataacttttgatgataaggatcgttagttgggagctgccttacataattggcctctctacatgacgggtatggttgttgatattcatgtaagccccatcatgttggattatggattaactgtgaatgtactctccttaaaaaccttgagaaatgctggtttacacccacgtcaattgtctccgtcatcattgataattcaaggttttaaccaagctggagaaaaagtaaggggaagtgtcacacttaaaattgaaataggcgagttaaattctgaagccttatttcatgtcatcgattcagatacatcctacaatgtattgttaggg

SEQ ID NO: 31725 - DNA, 2960 bp, Cannabis sativa
tctcacaagaccatggctcaaaataggacgttggaggagttgaccacgccaaatcttgaccaacaaccactgtgcatccattatccacctttggatctccacaatccggcctcatccacttgctaccaacttttcgttgattgcctggtgaagatcccaacaagcatctaaaggagtttcacattgtctgctcttgtatgaaacctacatcagtaactgaagaacaaatcaagttgttggcttttcctttctccttgaaagatgctgctaaggagtggttgtactatctaccacctggtactactgagacatgaaatgacatgaagactgttttcttggagtgatactttctagcctctaaagttggaagtatcagaaaagaaatttgtggaattcgacaagttacaggagagtcactctatgaatattaggaacgatttaagaggttgtgtgctagttgccctcatcaccagatcattgaacaacacttaattcaatacttttatgaaggtctcttatcttttgaaaggagtattattaatgcagattttcgttaacgataatgagcctaattttgtgataggttaagcataaaaattatagaaaataaaagaagaaatataataccagattttttacgtggttttgcagttaactctgcgtagtccacgagttaatcttattcagacttttctgatatagaactagggttcttttttctcattgtattcttttttctctcaaggatttttcttctctttttttgtacattctgcccctatttataataacataggttggcagttaattacattcaaatttgaattccataatgatattttcccgaaattgtgggctataatcatgctccacgtaaataaatacagttattatgtgacaatcacacagttgtaatttaaaccgcttttaaagggtcaatgctgacgtggactcagacatgctgcaaaacatatctcgctgaggcatctcgcttggtgcacgaacaacttgatatattcataagtctttcggcaatgacatgagcatcagtactgagcaaacttaagaactgctctttgaccataaggccttgcagactggacaattatgtcttgggggttatcaatagcaacaataaccttggcagcgagctggagtttactaggagtatgccttactatagcgaggtggatgtcgcgctactcgtcatttatgtccttcgagttattacacttagttagtataatgcatattatacgctaggtgttctaacagccacttcgcctcgccagcacctctctacatattgcgaggtgaatacctcgctatgtattatcgatgtcattcttgcgattgtgtcttctgacatgaaatggtttctcgttaatacgtgagtcaatagttcgtacatccttgtctcgataagaaatgtgcaatttgcgagttataaatataccctattaacttctgcatttaaagagttattctatttaatatttattaatataattgccattatatttattggttcatattccctgagatggacatgtgtcaccttctgaagtaccagccgaatttcaggtataacaattagccccttaaaaagtatttttttaataaaaggtgctttttaaatgattacagagggtatttttgtcataacctattttgaaaaaaatgcatgcctttaattttggcggttttatggttccaatgcacatcaatagcattaatgaaccatcttttccacttatcttccatttttatccattggatcttctatattccgatctgatagttactaaattcagagtataaaatggcaagaatccatttttccactatttttcgtctttttcaaaaactcaagctttctgaaaattttcatttgagcttcctgaaaccatgcatgccctctttatctttgacattcttcctgtgaatttactcagacttgcacttcgactccaagtgttcaaaagactcatcacatcttcatttgcagaatttcccaacacctgactactcaacttcacatagtaagtgtctcatccactcttttttttttgtttatctttctgggttatgattatcttgcactttgtcattccatttggtttaacaattcgagtcacaatttctgggtaaattttagggtttaggcacgatttaggtttttcatatactttaagcctctagtttaataaatttcaaccagaaaattggattgttcttttttgtagaaatgtcccaatctggttcaaaagtttattcttcggaattttgaaatcaaaatatcctaaacacttagcctccccatataaacccagaaatttccaacctcggtccaaattagaagtgaatgatgccagaattagagactatctgattaagtcaaaccaagaagaaactgctagtcgctataggcgattcctgcaagagatttctgagggcaagcatcgttttttgcgagacgcagcctggcctgaacccacgctattaacttttattccactcgtgagactaatgtttttacacgaagtcactgttgcttttgaaacaggtgaccttgagtttgaaatcatgtctcttaagcctcgcaaatcaaagacctcacaagatcccagtgttacttttgaggccgagattatcgaatccaaagttaggtcgattggggcctatgttggcggtatcttaaaatcctgtggtatcaagcagaggaagggttgtgtcataaagtctgtggcacctggggaattcagctattatcccctagaaaggataatacgtgaggagtgggcctagcacgagtaattcctcgggcgttggagcctggagccttgaacatatcaaggcttgggtggtccttcccctaagggattactttaaggagtacgtactgcaactacctcggggttgccccattccagctgaaccccattttgtataggatcctt

SEQ ID NO: 31726 - DNA, 3466 bp, Cannabis sativa
agatctaagacttagactaggacccgaacccagactaggacccaaaactggaccaggtcccgaacccggacccagacctagacacgatactggaacatgaataagaactaccagaccaagaccttggaacaagactaggaccatgacaaggacccaaacccaaacttaacaccaaacttggacctagccccaacccaaaaaaaaaattggaacttaggcctagacctagacctaaattagggacccgatccacgacataaactcagacttagaatgtgatccaaatatgaaccagaccaagaccaggatcaaaactcaggacctaaatctggactaacatcttaacccaaacccaaacttggacacacacctgggaccctaactcgaactcggacccgaacccagactaagactgggatccagacctggacccaaacccagacacagacttggatagggactcagatctcgacccagaccccgacccaaacctgaacccagacacaaaatctgagtgtgggtctgtgtccgagtctgggtcttggtccggttacagttttgattcttggtctagctcctagtccttgtcctgttcttgggtcccgatttgcttttggtttcggttccagtttaaagtcacggggtacagatcaagtctaagcatcgagtcccaaatcctaagtcccgaggtgggtcgtaggtccaggtttgggtctaaggtaaggtcctgaatctcgatcaaagttctgaggcccaagtttttgtgtcggcttgggggcccaattcccaagttttagtcccccatctatgttcgagtcctaggttccggttcgggtccaattttgtgttccgatttcggttcaggtctcgggtctcgatccgagtctaggtcccgctttgggttcgggtccaagttctggtccccatcccaatctggttcaaggtttcaggtcccaagtccgagtttgattcttgggtcctgggtccagccccggttttggggtctgggtttgggtccagtcgcggtcttggtccaagtcccgatcttggtttaggtcccaagtgacaggtccaagtctagggccaagttccggtatgggttttggtctgagtttgggtttaggtttgggtccgattatggtcctaggtctgggttcttgtcccagtcctggtccgattcttattccacgtctgagatcgagtccagatccgggtgcaagtccaggtcttggtacggatctgggtctgggtcctagatttaaacactgactacaggtgaggtcgaagcctcaggtcttgatttggatctcggtcttgggatcccagtcttgttccagttcgggtcctgattcccgggctgagtctcaagtttgggtttgggtctgggttcggggttgtgtcccggtaggcagttcttgggtttcgggaccaaggttgggtcctatctctcgagtctggggtcaagtttttgatatcggtcccggttctagggcccagttttgggtccaagtcccccatctaagtcacggtttgtttcccaggtcccatgtccgagtctgaggtcctaggtcctggtcttgaaaattgggctctagtcccagtctaggtttagggctccatcctagtctgggtttgggtcctagtgctaaactcggtctgagtcccgggttcgagtctgtgtctcgagttcaattccgagttctattacgagtccagctcagggtccgggtttgggtatgggtctaggtctaggtccaggtttaattttcggtcttggtttgggtctaggtcttggtttgggtccgggttctagttcaggtttgggttctggtctaggtcccgggtcacaggtgctaggttcctagttctgggtcacaggttctggagtaagtctgggtccgggtatcgatcctagtctatgtttgagtctgtgttcggctatgcgtctagatcccgttctttgtcgaggtccaattcctgtttcaaggtcctgattctgcttgttgtttcgatttcgggtcccgagtcaaagtctcggtttgggtccttgtttggaaatggttccaagtttgggtcttagtagattcaaagactaaacaccaactacgagttgggtctaagcctcgggtcgtgggtcaagatctggatcccaatctttggtcccaatcttgttctgatttgaatcctgggtcccggtccgtgttcgtgtctgagtcgaatctaggaccgagaccggggtcgggtctggggtcctagtcccagtcctgggtcccgattctggttataattttgagtttaagtccccaatccaagtcggggacctgggtccaggtctaagtctccaatcccggtccaagtcctgcatcaagatctagatccaagtccgtgtctgggttcgggttcgtgtctagagtcccgattcgagttttgaattgagtccgtgtcccgctccaggtctgggtctgggtcctagtcagattttagttacgagaccgagacctggtcctagtcccttggtcgtgttcccgagtcccggtctacttccggttccgcttctagttttggttcacggcgtccaggtcatggtccgggtctgggtttgagtccaggtatgggtcctagatccaaacatggactatgagttaggtccaagcccccggtccagatcaggatctcggtctcgggtcctagtctagttacactatcctaggtcctggtcttggtcctagttcagtgtctgggtccaaggtcaggtcttgggtctcagtgtcagttccaaagcccaggtctcaggtccaagttccccatccaagtcccagtcctaggtctcagtccgtgtctagggcccatttggggttcaagtcctagttcgagtttaggttcggtttttgatccctctctaggtccagatctaggttcgagtcccaggttcgagtctagatccaagttggggtctgagtcatgagttctgagctgggtctgggttccgaggcctgagtccaggtcccccactatgttcgggtccatgttcgtattcgggtcctagtcccagttcaaatttcgattctatgtccaaattcgggttcgggtctaggtctgggtaggggtttgagtcctggtctgagtctagggttggcttgggtcaaagtctggatcccggcttgggtctgggtttgggtcaaggttcgagtccaagtcttgggtacgggtcaagatttttctctaggtctcagtccagatcaaggtcccaagttttgatcccggtctaggtatgtgtccgagtctgggtttgggatcggttccgaagttcaagttcgacctgatcccgaacccgaacctgaacacgaacttggacccggaccaggacctaggacctgaacttagatgggcgacccagacatgggaattgggcccctgaactaggaccagaacttggtctcagaacttggatgaggatcgaggaccc

SEQ ID NO: 31727 - DNA, 2627 bp, Cannabis sativa
ggaagttggaagcacacgcccctcaaactcttcgaagattatctaaaaggcatgatctcagttgtgtgatgctagtagagcttgaactgtcctttgggaactagattgaaagatgatctctaagcacatcaaccacattatatctctattgtcaaagtctctaaagtttgaaaagatatatatctctgtcaataaatgtttacaaagtataatgtctctcacttgtgctaagaaaatcaaacattttatgatataatatgcccaaaaaaattgaagagaaatacaatatgccccaaaaaaatttcaagtttctgacataatcattaaagcactcataatatagaggttcagtgaaacaatactaccacaactgatcacctcgagggaaggtgttgaagagcccttccaccaagaacatatcataattttcaattgtcactacaaataaaaacaagtaataattgtatggctattaatgagcaaaatcgaaatatatctactttaattcaaaaaaaaaaatatatctactaattctttcgaaattcaaaactacgtctaagaacatgtcacaataaaataaagaaaaagtaaatacttactgaatggggataacctgctcaagacaaaaggactatccaaaagacaaaacactagacaacaactagaccaaatataagaatcaacagcaaaacataaaatgtcactataatttatttatcgaaattccactctgcattgtcttgcagcagaaagggatccacaacaacaagaggaattaaacataaattacacaatatatatactattaacataatctcacctgaaagaaaaatgatatattgcctatctccttgtgtatatactagttaatttgttccacatgaaatccttgacataaaattgaaagctaaatcatatgctaccttgtaatattggcagaacaccagtttaatttttcttctgtagtgatataataagttagttttcaaatccataacaactacaataaagagtcaataaacaaataaataaataaataaatacaacaatgattattatggatctctgaaaaatatttttgaaatgttgatccatataatgctgttaaattcacaacattataattcttttgctactaaaagagtgcctctttagaaagtgagaacatttttaataaaaaaaattacatctctcaaacaagcaatgcagttaataacataatctataaaattattaatcttgatattatatcttcttcagagaattatatatacatctttcgacatggaagggaatagcaaacaccaatactgtcaatctgtttacgatttaacagccaaatatatggctttatttctatatattatgcataaactattgttcccctaaagtcttcgcaaaagtaactatctagcacaaattatcctattaatgtaagattatagcttcgaatttgtagagaaaagctacaaaacacatgtttaacaaactaaatcacatatcagataagaagatatatatataaataacgcataaatatatactcttctgtgtatggatatgtcttctacagtcatgactttcatatttaatactaataataaacaattattattgttatatatatataaaagaagaacaagtgtactatactgattgaagtatatgctctaataagtaccgaatcatcaatctgtaaaagtacataataaaatgacataaggatatatattatacatatagcaaattaagattgggaataatttcgtcattaaatataaaaaactaaataaattatattttttcagacaaatagaggtctcccacaacacttttcaggtaaaattgaaaatgtcctagatatatctatttcaaaacaaaactggtcatcatgagatttttatccataaataaatcccttttggtatgcccccaagtcccataaaaaaagtaaaagaagaaaagagaaaagaaaactagaggggagcataggaattgcctgaaatttacatctgaggcacaagagtgagcaaaaaaggaaggacaagaaaaaactattaatggaaacaaaatccaattattcatgtcaatttcctgctttaaattaaagaaaacaacccaaaatctaaaatagagcattatgtaaattaggttctcaagggtctcactttccacccaaggttgggaagtgcccaggatcttcaatggatggagcagacacatagctgctctggtagtttccagcggaccctcctcctcttgaaccaccacggcccctgcctcggcctcgaccacctggagtgaagtaccttttacaggtgagaaatgtaaaaggaaaaagaaactggaaatatagagggaataagggtttgagagagtgctaaagtaaatagggggaaactgaaaatatagagggaaaaattttggagtttgccgggaagaataaaaattttagcaatcctgtttgcttttggtaatgactaattaatgatcctatgccattatttatttaattatttttttcataaatataattaaataagctatcatatataacatttaaaattttattataaatatttaaaatagatatagttttatgaaatttttaaaaataattataaatt

SEQ ID NO: 31728 - DNA, 3128 bp, Cannabis sativa
tctgttgctcctatacgtcgcccttcgtctctcgatcgtctggctcatgaagatttctcgagccccttctttctcaacacagcagactatcctgggttaattatgattttcacgatcctcaatggtgctaactaccaatcttggaaacgtgggatccctatagcgcttacagcaaagaataaatctgctttcatcggtacccttccttgaccaacagttggtaatcctcttctcaattcttggatttgttgtaacaacatggtaacgtcttaactcgtcaactctgtttcttttgaaattgcacagagcatcatgtattttgatcttgccacaaatatgtggcatgatcttcaagaaagattcaatgagggtaatggacctcgtatctttcagctgcaaactcaactcacctgtttgtagcaaggtgatcaatctgtcacctcttatttcaccaaattaaaatcgttttggcacgaattaaaggaattccaacctaacactacttgcacctgtggtgtaatgaaactcttccttgatttctacaattagaaccaagttttacaattcttaaatgttctgaatgagtcgtatgcttcagtacgggctcaaatcctccttaatgaacccatccccaacttatctagggtgtttagcatgattgttcaagaggagcgtcaaaggactcttggctcctcagatctatctaccttggcatcctttgttcgtccttcttcttccaccattcctccatgctcaaagaaaccaagaccctcatgcaccaaatgtggcaaaccaggccattatgttgacaagtgttattttattcatggttttccttcggactataaagataagaagaaatcagacaaaggaaaatttactgcaaatcatgtcactattagtaatagttcagaaaatgttgctagaaactcagctcatgtagatctctctactcagtgcaacagttaatttcacttctcagtcaacaacttacccaaattactcctcatgatgatccaaacactactcctacagcatccaacatggctggtaacaaatctttattttaatttatgtcttggatcattgatagtggagcaacacatcacatgtgttccactgaatgacaatttattgacagtggagcaaatgaaaaatgggaatacatctcatataatcaaatgaaaagtggcattatatgagattaaatcaattaatgataagtttgtcacaattctcacaattttatgaatgagaattaaaattaaaatgcttagactcatgataggtgaatacataagcactcaattacttattcaataacataattaaataaatttatggcatgaatataattatgtttcatctaatgaaataaaaaaaattatcagaaaaaataattttattcaatttaatcatgtgattatgagtcaattaataatttaaattgaccaaactcaaaatataatcacaaaattaaatgagaaaataaaaaatgaagcaaaatgatgaaaatttagttctaaaagaacactccacgtggccccacccgccacccaaaaatttattttttttttgtcgtaaaaaacatgtcattttttgcaaacgacgtgtcgtttgactaaaaacgacaaccccaaatgcccaacggtgtgtcatttgcgcatgggggtctgatccatcttctttgccaaatgggtcttgatttgggtcgtatcaactcagtttcaaacttggttggatctcggcctcctctacacctttttggataccgtttgaagggttttcaccattgttcgtgctctttaacttttccatactcatttcgctcgaaaaatactccaaacgagtaaatctcatatatacattcaaccattaagatttatataaaaaattggagttttcagcatttttaacataaatgaaacggaaaatacaatttaaaatatttataaactcaatacttatcatccaatctgattttctctcgaacaatataaatttcgaaaaaaaaaaagagtttttgttaaatgcaaaccctaaaatcaaatggatagactctgataccaattgttaaaattactacacattgaacatgctatatcaataacaatcaacaactaaccatacatgctcatattagccaagaacaaacgtttaattttagagcattaacataataataagcatacctcaaattttgatattgatctccaatgacaatgttgattacagttctttaatctatacatacagagaaaagagagcttgggtataatgaacactactctcttccattccttttacaccatagccacaaccctttatgatgaattatgaaccaattaggcctgcgtgcccaatttaaaagaattaattgtcttaaccaaatggactagccaaagacgttttagagcgtatctatgagccttaaatatattaatacgttatgtccatcctattatggttccatggtaaaatgttaagcatgccattgtgagtgagacttgtgacttagtttaaccaactttccattagagttaaattttggctcccatcacactcaatcttataatacgttgatgcaaagagtttgaagaaaagtcgtagcaaaatggacatgacccaactgtctagtttaacctaatgcacgccataaaatctaacatttactagttctaaacagcatgacaatgccgagtacaaaattacaactgtcattaagagaaaaaagattaaataaaaactatttggtagttataccatgttctcaataattgctattgatatagtttcatcaaatagcaaaccatatcaatctgccctatttatttagtaaccgtagtttgttccatagaccgagccatagcctccagcatggcctgcgtgtgctgagttagatggaggagatgcatacacagaaccatgagcagcataagaattatagccttggtccgtggagccagcagcttgagtttgtgctgatccagcattattagcagcttcaaccatgaaattctgcaacagccagccaaaaatattatatacatgtatatatcaagttctaatccaatttttttctattttgtttttgcagattacccagcaaaaattccatgatatacaaa

SEQ ID NO: 31729 - DNA, 1469 bp, Cannabis sativa
ccgaatcacaagtggttttttttttcggctcttttgttttacagctgttttgccatgattatttatttgtcgtcgatttaattatttgttctcaatctcaccggaattgatggttgttttccaattgttctgaatttcatgtagttgttccgtccgtgggtgtgaaagatagatgcttcattttatttttttggtttacagtataacagaaaaaaggggctaaaacagtataaaagttatttctgcgacaatatttttgtaataattaggtcaaaaaaaatttcctgtatattctattatattttcatatattagcaacgagtctctctaccccaccacagaatcaacaattaagagtttgaaatcgttaatataatttgggaataattagtttatctttcattatttttttatatttattaattattttatttcttttgaaattggttgattataacaaatttaaaaaatttaaatgaaaacaatcctaactaattatacataaattatttgtaaaaaaaatatgtgtatataaaacacatttattttcttttgaatgaaataatatatataaattatttttagttcttattaaaaatattaaatacgcgtatatagattatatatactgtatagtttttttatgatcaaaatttgtaaaatatctctattatattaaattaaatatactattccttttaaaaaaattaaatatacaattaatggttggaaattatttgaatcttacacttttatttaagctattttcattgattattactttttcaaattttaaagatttttttcctctgtaaaaatatcttatactgaatgttaaaaatctcactttatcatatatgtttaacttcttaaaatagaagacatccacacaattattaaagatatgatgaattcaaattatccaatacaactttttatattcttttctattaacaagacaactgaagtaacaccaaatcgcaaagagaatatatccacagagatattttttgaaatttgaatgaagcctaatcgtgtaaaaaaatttcaaaaattgagaattaagttaatcgtaaagattatttaattttttggtttaattattcagtttattttttgaaatttgaatgaagtcgtgtaaaaaaatttcaaaaattgtaggatttgtcagaaaaatatgtgggtaagatgattttttttaatttaaaaaaagattgttttaattttttgggtttaattattgggttttaaaagattgtttaattttttgggtttaatttgaatgaagtcgtgtaaaaaaatttcaatataaattgggaattaagttaatcgtaaaattgtttaattttgtttgggtttaattattgggtttattttttgaaattttaatgaagccgtgttaaaaaatttcaaaaattgtaggatttgttagagagatatgtgggtaagatcattttttttttttaatt

SEQ ID NO: 31730 - DNA, 3788 bp, Cannabis sativa
ctatttaattaaatatataagtaaaatttaaaatatttaagtataatgaagaaaatcaacttaaatattaattttctatttaatgagacccagactcggacttagaaatggatctagattaaaacctagactcgaacccaacgcggacccatacccagaccgggatcgaaacgtgggacctggatctggagcgagacccagacccaaacctggaccggtacccaagacttgtactcggacctggacccaaacccagactgggaccaaggacccgtctctggatgggggaccttgacccgggcctcggaacccggaccaagatcgaaaccttacattacgacccggactaggatctggactcaaacccagaactcgaacccagatctggacctgaaccgggattggaaaccggaacctgaactcggactaggacttgaaccatgatcgggtcctagactcagactgggacctaggacccagacctggatggggaacctagaaccgggacccgggcttcagaactggcgctgagaccctcgacttgaccccggacccacaccctgaactacgacctagaccagaacctttgacccaaagttgaactagactaggacccgagaccaggatcctaatttcgacccgaagcttggacctgacccataggcgatgttttgatctgggacccattcctagactcaaacccaaacccagactcggtcccaaacccagacccagaccgggacctgggaacaagactagaggactaggacccgatctcggtcccggaacttgaatgtatctaggacccagatccaaacacagactgggatgtggactcaaatcaaaaatcggatcgggactcgagacacgaacccgaacctagacacggacttggatctagactttgatgcaggacctggactgggattggagactcagacctggacccaggtcccagacctcgattggggacccaaacccaaaattagaaccagaatcaggacccaagacttggaatgagacccaagacccgaccccgatctctgtcccaaacccggacccggacatggacacggactgagacccaggatccgaatcggaacaaattcaggacccaagaatgggatccgaatcttgacccatgacccagtgcttggacccaacccatagttggtgtctggatcttagaatcgtaccaagacccaaacctggaaccatttctagactaggacccaaaccaagactcagacccaggactcgaaatcagagcaagaaccggaatcaggaccttggaacaggaattggacatggaccgagaactggatctatacgcggaactgaacacgaacccggacctagattgggatcaatagctgaaccgaaacctacgaaccagacttgtgccaggacctgcgacacagaatatggaacccaacacccgtgacccaggacctggataagaacccagacccgtacaagaaccccgacccaaacatagaccaataccaagacccaaacccatacccgaacaaaatcgtagacctagacctagacccagtcctagagtcaaactcgtactagaactcaaactcgaacccaggacttgaacctggaccgacatcaggactaggacccagacccggactaggatcgagccctgaacctagactgggactagaacccatattgggactggaacctgggacctgagactcggacttgggacctgagaaccgaactgtgacctagatgggggacctgggccccaaacctgaagctggaccaagacctggaccaaggatccgaacatagatgggggacttggaaccaaacctgggcccgaaataaggactgagacgcaagctcgaactcaaactaggacccagacacataccatgacccaaacccacactcgggaaccaaaaccaaaaattgtactagaaccggaccgggattttggtatgggatccgagaaccggggcttgtacccaaatcacgacccgaaccaagactcgaatccaaacacaacctaaacccgtaccctgtgacatgaaacgtgaaccgaaactagaagcggattaggacccaagaacaggaccaagaccaggacctggacccagacccaaaactgtaaccggactaggacccggactcgaacacagacccactcggggattgggtccaaaacctgaatctaaacccgaaccgggactcaggacctgaacctagacctgaactcaagacccaaacattgaataggactcggaaccctgaactgggatcgagacccaaaactggaccctagtctcggtcctgaacctagacccaaacccagaccaggaccatggacatgaaccaaaaccagactaggacccgtgattgggatcgagatcttgtcttgggatccgagaaccagggcttggacaagacccatagtctctgtgactcacacaaggacccgaaactagagcagcactcagaccctgacccaaacctgcgacccaaaagtggaacatgaaccagaacatgacctggaccctagaacaggtccgggactgtgagcagaacctggacctggactaggacccagaactagaccagaacccagccccggaactcaggctcggatccagtcccaaacctagtcccggacccagactaggactgagactcgaacctgagctcgaactcgaactcataactcgatcccgaacccaaaccacgctcctgacctaaattgggattcagacttgtatattgacacgaacttagacccgaataccgacccagacccaggcccagaccgggatcgaaacacacgacttggacccggacccatacctaaacccgaacctgggacccaaaccaaggacccaaacctggacccagactgagatcggaaaaacccgtacccagactaggactaagactcggaccccaaccccaaccttgacccaaacccgaacccggaaccaaacccggaccccaaataaaaactggaactttgactaggacctggacttgagacctgagactagaacctggaccaagaccttgactaggactgacacctgagacctgagacccgaacctggaccgggacacagactgggagtttgacctaacctcgtcctaaaccctcgcagggacttcagacccccgatccagacagggatctagaccctgataaggacccgaacatgaacctagaccaagattgggaccgagacctggacccaaacacacactgagagctggactaaaaccatgactcggcacccgaacccgaacgaggacccagaccaggatctaggaaccagtctttaatgggagaccaagaccagggagctaggccccggaacccagacccagatgtaaacttgggactcgaacccgaacaaggacctgccctaaacccaagaatctgaagtcggacctagacccaaaccggaaacctcccttggacccatactaggacaagaacctggacatgaacccataccacgacaaaacccaaacccgaacccgaacccaaaagcagaccggaactcgggatctgaactcagacccaaacctagacctacacccagacccgaactcgaacccagactaggatcggaagccaagacttagactcagaacaaaacctggtctcagacagagatcaaaacttgggactcagacccgaacctagccccaaaccaaggacaatatcccacacctggagcccgatccaaacctagaccgagatccagaccctaacccaaactcagaccagtactcgaact

SEQ ID NO: 31731 - DNA, 1900 bp, Cannabis sativa
aagaaatacctccaaaatggaggatatcattttcatgacagaagaacttcatatccaatttgcaacttggatttctattcccaatcccaattaattatgataatgcctaaagggaccttttttttttgtatatatataaaaaaatactacaaagttcaatgaaggtaaactaattggttgattcaatcaaagactcttgtggaaatgtggaccataaagagagattaaagagacaacattttatggttcaaaatgagtggcttttcgttttgaataagagcctcagaaagaactcatttacacagtcatcacaataatgatctctaaaaaatgcccccaaaataaataagtttactgatcaagtttaaggttgttgtcaagcacattggaggaaccaaaaagtggtgggatgagttgtttatatattcacaatatcagttataacttcccataacatatatatttatacatatatacatatatataaatatgatggtaggtaataagtagtccataacttcccatttcatgtgggaatttaatgcaatacaatactagcttgcttcctataacaagctccctcttctttgagttgagtgaatcaaaagaaaaattcacaaaagaaaacaaatttagtgttttttttttatatatataatttagtttgattttctgactgactcatcaacaatgaaatatgtagtcaaatatatataggtagaatacaacagagagaaagggaagtgagtggaatgggctttgaaattaaattacatctaacatggttatgtctcttcacaatactaatggcctaacaaattcattaaaaataattaagattaaatgtttcatttataaatttaattaccaagattgattgatgtaaactttatgagtttcaaatttataccagcagccttgataatgaaaatatagtagtatcatatcattgtttatgtttatgtgttttataatggtgaataaaaaaactaccattgatcgactacacatgtttctcattagtttataaaatagaacaaaaaaagtaaagatcagaagacattgaaataactggaagagtttaatttctgagaaaatcaaatgatcaaataatgagtctaattgggctaaaaatgtactttgatttctataatggaggagcagaggacgacacttaaacagaatagggaggcttttcaaagaatcatgtaagatttactcaaaggccttgtttatatgagcttcttgattataataacataaagtgttgtgctatgttgtgtttgtttctctaataaactaatttattttttgcatggctttctaggctatggccaagagttcttgtagatgttaacagaatagacatgtccacaactttgatcacatatttgatcaaccaaactcttagctcacccattccaaagctctgatttgattgctgcctatgcaagcaattagatacgggaatactttttttttttgggaataaaggaagttaagaaaaaattatttgtagtatatatatatcaatctttatataagaacatatgtaccaccatttcaaaatactgaattgctgatcactcattcacaggaactagctatacatattcatccactctagctaatatagattttttttttattctattatttatttatatgattaacagattgctgaactaaaatatcgtaggcttgctatctcatttgttatccatgtggacactcgatatatatatatttttaacatgctatctcggatggtataatttcactatcgaacataaatttgatttatgtatattgatcctatttgccatttgtgatattgatttgcctttttagcttatcgaaatttatattggatttcgtccttcagtcactaatgaaaatt

SEQ ID NO: 31732 - DNA, 927 bp, Cannabis sativa
aaattttagtcataaaaaataacagtatttgtgacaaaatattttagtcactaaattttttctacgaccgactttcagtgactaaatggcgactaaaagtaattagtcaaaaaaaaattttaagtgactaattaatgagttttaatgactaaaaatttagtcattgaaaaagagttttcttgtagttaacaaaaccctcttggaaagggtcaggtgtatgctcaaaggtgctggcctagaaaggaagttttggggagaagctttgcataaagtctgctacttgattaatagatgtccatcagcaacaattagttgcttggcaccacaagaaaaatggacatgtgtggctcagaactatgatcacctaaaagtctttgggtgtacagcctatgcacatgtgaagaagacaaattgaaacctagagccttgaagtgcatgttccttgggtaccctgatggtgtcaaaggctacaaactatggtgccttaaaccaggtttcaaaagaagcatgatcagcagagatgtggtattgagagaagaagaaatggcaatgaaacctctaccagtcccaacactcaacatagacaacaactcctccaaactaaacattgaggtggatccacccaacaacctagatgaaatgccagctcaagattacaatactgacacccatgaagctaaagaagagcttgatgactagctatctcctggccagagatagaagcagaagaagcatcagaccccttgccagatatggtgttgtagattactctacatttgctcttgtagctgcaaatgagttggaaaactcatatgccacttcatataaagaagccattgaatgtaacaacaaggagaaatggctgaaagccattaatgaagaaaaagcatccatcataaagaataaaacatggtttgttgttactaa

SEQ ID NO: 31733 - DNA, 2135 bp, Cannabis sativa
cagttctattgatggtgaagtggtaatatatctatatatatataataaatgcttattggatggaaatttgttgtgtatttcttaataacattgtcaatttattattatctctattacaaatttttgtgattctttgaaatagtagttttaactacaaaatattttaactattccatataaattaatggatacatatatatatatcacaattatatatatatacttagtaagtttaaaaagtaattctatttaaaattaatttatataattatatcactatattatttttaaatttatattttatctaactttcattttattaatttattatgatagatcaaagacttaatgaaactagaggatgatgaagttaaaagattgaagaagtttgaatctcaatttgctgaaatgtttaaaattgtgatgatagttgaatggtttctatttaccctcttgaatttcaagccgtttacaatagagtgtaaatacggaattgtaaacgtaataatacaatgcaccataatctgtttatctttactgaatatcattggtattctaggtgaaatttggttggcaagtattgtatggtattctctccatactgatattgtgaaaaaaaatttaaaggtgatacaactatgatcattatggatgatgaaactatgctttgacatcttaagaaggtgcatagtcgtaagaaatattatagatgtgtttatggaagggtttattatgtttttgcgttcattgtttttggaagaattgttatagcaatgacttatgaaaatgtgagtgttttacatcatgtgtgtaaacaggcactaatttattattattatattattattttaattatataaactctttttcatatatatataatatgtataacatgtatattttttcacttttgtaggatcagaagtgttgaaggagggagaagtgttgaaggagggagaagtgatggtctcatgggcacaagtttgtttaatttacctagcttgatctgtaagaacttattaactatttttcttcattttttttttgtttatttaattaggtacctattaatgcatgatctttcttaattattatttttgtttatttaattagtaacttataacttgtaaacacacaataaattaagagtaatcttttaaaatttaaaatggaaggaactactcaatactgtgtgttgtaattaaaaaggaggttgtgaatttgtgttcattttcttctataagaagactatatggttaatacgattttcatatttcttatttaaccaagagcacaaatcatggctgttaaagaaaagaaaagaaaaatataaatcccaaacaaattgaagcataatgaattagttcatttctcaaaaattcaacaaacataagaccaattcgatcgtacacatccaataaatgaacaaaaacaaaacacaacaataaagtacatatacccatatattaatagtacaaaaaacaacaacaaaatacaaaaatatgttgtgttttgaaaaaaatatttgttcctccactaaaaaaaacattttcactatagaaatcattgagcatgatatattatatttggttgattaatttttggaaaaaattaattaaactttcaaccatagcatgtacaattttaaaaagaaaatttataactttatctactttatagtacttaattacaatattatatttgcataaaaaattatttacaatttattatacattttattaactatgagaaacatatttttaattttatatataaagtatatatgataaaaatgaataataaatatataagcatatatacaggggcggaggtatttggcaatgtatagaggccatggccccccaagaatttatatattctattttatcatatatataatttttttttaattgatatgtatttcactatatatggtggtggccccttaagtcaaaagtcaaatatcttttatttttaaagaaaaagataataaagaatataccaacacgtcaagtacattagttactatgtatatattctctaaaataaatcatttctttccttttttttttaaagcaattatttttttcattaatatcaattagcaagatatttttttaagtttattttgtaac

SEQ ID NO: 31734 - DNA, 2206 bp, Cannabis sativa
gtaaatctgattatattgaatttagttttatttagggcacaaaacccaacaatatgcttacattaaaacctcaaatctgtaagtatgcttatattttagggggcgcgtttggttgggtggaacgaaaacataggaatagaaatgagaatgagaataggaatatgaatggaataaaataaaattttaaatgcataaaaaattaataaaataatcattaaatattttctcatgttacattagaatggtctttccttctgtttcaaaatgaaaagtcattctactaaaatggtggaaagggcattccaatactttaaaatacaaccaaacaaaagaatggaataaaaattgcttcatttctattctatttcatttcactactacctccaaccaaacgccaccttaaatctcaaatatgtactgaagtatgcttacattttaaacctcaaatctgtacaagtatgcttacattttaaacctcaaatctgtacaagtatgcttacattttaaacctcaaatatatactgaagtatgtgataactctatggtatagaattattttttatgcatttaaattgaaattattgtgagaagagtagtgaaaatgtatttgtttgcttaattttaattagttttagtttcattttctctttagtaagctagcttttaagtattgtaaaaaattactattttaattgtgtttttttaattgttgatttttttttttttttgtgggaaagaagaattaatttgctaaaaaagaaaaagaaatgatgcaaaagaaaagtttgaacaaaagctgaaaactggaaggaaatgctgaagcaatgctatagcattctgggcagtttggtaagtgacgtgaaaaaagtctaaaaaatgaatttcacttatgcacatcagcaatgatgtaccagtcactcaaaggacgccagctggctactgtggaaggaagaaaactaaacctagtgggtcaaagtgcaaaaggattgggcttctatttttagggtgtcatttttgtaccctatttacccaacaactaaaagagactaagtacaacaccttcttctacacatgagggcagctgccattttttaagggaattaattgcagaaagtacagagaggaagaaaagagaagggggacccaagtgcaagagaagagaaggacaaaagctctttttgtttgcatttctcttcccttttcttttatattttgttcttttcttttttgtctttaaatacaaaaaacttgataatttgtaaaaagggcagcaaccatggatgaacattttcaaatgtggattgtattttttgttttgaagatgagctaattttcttaaggcttgaatgactatgaactcctatgttgggtatgattaatttttaagcttattttagcatctttggctttgttcattcaagtgagcttgtcattttatttgattgttatttcttggccatgagtaacaatttgctaagctagatcttgttccagaagggttatatctagtagttagacttggatggagcaagagaaatcctagatttaggttttctttgtaagtggaataggaatatttcatttacattgcataacttaagaattagtgcttaatttgtgttctgcaatctggtttgatataagaacatgtgaatctagatggtagagcttaaattgtgagttttggaaaattctcacaaatacataaaaaattctgttatcaatgtgtatgaatgctgaagtaatgctatagcaactggaaagaacctgactagggggaattagttattcaagccactttttaccatattacatttcttgcaagtaattttctagcaacagtagcattaattttagcaagtttaattacaatcattttaattttgaatcattgctcaactattttcatatttttatttttactttaagttgtaattagttgattttacatcatattttgtttgcaatccctgtgaagacgatcttacttatcactttattacttgtgtgactgcgtatacttgtgtacataatttttacaacatcatgcttacattttaaacctcaaatctgtagaagtatgcttacattttaaactagggttgtacataaatttttgtaaactgcctaacctgaataacccgcccaaaccaaaccgaaaaacccaacaaaaatttcaaaccgaaaaacccgacaaaaaaataaa

SEQ ID NO: 31735 - DNA, 2587 bp, Cannabis sativa
ctagttactaattggattggatcgaatgaggaagaaaagattagattggatcggatgcccacccctagtgatagttgagttgttttggtgttgtttgggggcttgaggttgtgtttgagcaaagtttgagtttaagaactcaagctttgctctctaatggtgaatttttatataaatgttgttggctggttttattgtatggattatgtttattatgatgtaagtaggtattctgggagttttgatgagatttgggattgcattggagttgtggtgtggttctgtgtgtatcctgcactgaattggaattccggttcagagggacctgtaggaaccggaatttcggttggtcctcaagaaaccctgcaaaactagaattttgattgaggagtcggtctaccggttggggcattttagggaaccctagttcttcttctttttttttttttgcaatatttagggtattgacatgttatccatcgataggaaaacttttagtttcaagtttaagtccccgaaaagtgatttagtgtgtcactcatcagttttacgaatattgtgattaggggcctataaatcgtcgagcagcagttccactcaggttgaccagcacacttgaattcagaaacgaggtaagattagttaatgatatgcatatatgtttacatgtttagcgtacatgttaggtgccattaggtgccatcaaaataactcaaaataacatataataacatattagggtatcagtgaggtatacatagagttgcaccaagatacaaacatatatatgttaggcaaatctatagccatcaaattagcatatcaggacattagtgaggtgtacatagagttgcacagagatgccaacagatatatgctaggctatcagataatataaactaacggctaccacatcagtacgactagagtactgagtataagctggattcgcatttagtcatactttgtcgagaacgttcctaatctagttagcagattgtgactaggtgtatgggcacctggttgcggtctaaatatatgtttatgtttatgattatgcttttcttactgagttcgtcgactcacagttaatgcttgcatgtgtaggtaagggcagggctaaggttgagcagccgtgagagcgagcgatgaaggattgtacatattcaagggcagttaggtctggagcgtacagtctttgggcgtgttggacgtattttgtatagtcactaggcaataacttttgtattatgtaccatgaaacagttgtaaatattttataaacgggatgtcggttatacatatgttataattttgatgtttataagtagttgaacaaagttttaattattcatgatttttattaaactcgttgattagcaacgagttgcacaatataaaaacgtaaagcttaaactagtagggtgttacattattgtatatattttattgtattttaatttatgtaactattatattatatattatttattcatttatctttatcctaattgagaaatgattaaatatgcatctattagattaaaattaaccacctaaactaaagttaatgtgtataggttttgtgtgtcaattttttagaataccccaaaattatccctctcatttcaaaaagcccaaaaaaagaaatcctctttctattctctctttttctctcgctctttccctctcactttggcagttttcttctcactcaatcgaccaccacaaactatcccaaaattcaccactcgcactatcgcattatcgcaccaccacccacgaccctccctctctggttctctttggtgcggggccgacgatccacgacccatgaccaccatcgtcgaacgggaagacgaacgatttgtggtttctttgtattttttggtaaaaaattaaattttagtgaaacatacattttctacgatttttttgtatatgattcaatattggttcgatagggtggcacgatactagtgtaatttggaggttaggaatgaaaattcaataatggttcgatggtagtacgataattgataaagacacgatatagcctgactgtggtccgataataatttgataggtacttaaaatttatgtcataaaaaaaaaaaaaaaaattgggtgagatttttgttataagagataatttggagagagataaaaaaataaagctatattatcaataatgatttaactttagtttaggttgttatttttttccaatataagcatgttgtattccctactaaatttagtctatatttaaatcatctccatagtcttagctaaagcttaaactaatactttttaaaagttttcaagtgagtaaagattatttctcacaaaaaagtattgattgtggagtccttggatgacatgaattttgctatgagtaattttaaaagtaaatagcattatagagtgcctatccctttacattatcttggtgtaaataactttttgatatatattaaagatattatttatgtttttgtctcttctaaaacttgtgggtttatagtggttaattctacaatgagtagacatttttttgggataattacacaaggcactatttttt

SEQ ID NO: 31736 - DNA, 1887 bp, Cannabis sativa
tgtgagtagatctaagatcctgctaaaataaattcccatcaggaacataccgaatggattttttttagggagtatgagatctctaacaaaatgtaaatctatctcaatgtgctttgatcgtgcatggaatactggatttgcagcaatagcagctgcactttgattgtcaacccatagtattggacattgagtagaagtaacatgtaactcaaaaaggagtgagactaaccatttgatttcagcaatggcattagctaaagccctgaactcactctcactactggactgagcaaccccctgtacttcgtctatcatcaacacacgatgcccagtcagcatcaaaatacccttctaaagttaaggaaggagctggtgtgatatgaacaccatgatatatggtgcctttgagatatcgcataagcctcttgcaagtttcccagtgaagacttgtgggagcatgaataagctgacttagtttattgataatgaatgctacatctggtcttgtgagggtaaggtattataaagcacccaatgtgcttctgtaaagagtattatcaccaaaggttctccttctgtaagagagagtttaatgaccgaacttgtaggattagaacaaggtttagctccttccatgttgagacgaacaagtaaatctgtgatatactttgtttgtgacaaatacatgcctgaatgatcacgataaatttcaacaccaaggaaatagtgaaccggccctaggtcctttaaagagaaggacttgttgagatcaataattaactttgaaatgagatgagtgttaggaccagttactaaaaaatcatcaacatagataaggaggattatgatgttgttacccgaaccataagtgaacaaagaggtgtccgattttgaagcactaaaaccccattccagtagcttgtctctaagtgtttgattccatgcacgaggggcctactttaatccatagagggccttgtgaagttgacacacatgagtaggtttggtaggatcaacaaagccttctggttgactcatgtagacaatctcatgtagctcaccatttagaaaggcattggagacttttaattgcttcacttgccagttaagagacacggctaatgtaagaataattcttactgttgctagtttaacagctggagaaaatgtttcctcatagtctatgccaggtgtttgcaagtagcccttagctacaagtcttgacttcagtcgatcaagattgccataagcatcaagtttcaccttgtgaatccacttgttgccaatcacagtcatatgtggagaataaggaaccaaataccatgtacctgctttttttagagcatcaaattcttgatttattgccttgaacaaccttggattgtttaaggcatctgtagtgttctttggctcatatggtaaaagtgactcgggtaggggatatttggtggctgtgaaggctttgggttttctaatcccatttaaagaccttgtcttcatagagtgagtccttatagttgtagtactcgtgacttgattgtcctgatcaccactaggaggcatattgggggactgttggctatttgtcactgtctgctgcaatggtaaagtaccatttgtagccgttgggactttagagtgtataggtgggctaaagttgctttcgactgggacagatggaaagttggcagtaggtaaagaattatttaatgtatcatgggatgtatttggtatagggatagcatttgtagtagtgtctatgctagaaaaaagaatagtgtgggtaatagtggtgaggttgtcattttgtggggtagtaggaggtatggactgtggggtagtggttggtggaggggctgtagcaggttgtccttgtggtgatgtgtt

SEQ ID NO: 31737 - DNA, 1571 bp, Cannabis sativa
catggtattaaatataattgctatgtaattaaaactgaaaagaagatcaaaaaataaataaataaataactgagaagaagatagcatataattcatacctattttttctttgctttgatttgatgctttggaagaactttttctacctatcaaaataaaaaactcatcttgaaatttgttgaaatgaaaacattgaattatataggtgttgcagagatattaaaattcccaaactacccttacataaacaactagttgggctacattattgttatgcccttgtattttacatcatattgcttacgtatatactccatatatatcttaagttgaaaattattaagactatttttccctcatttttagataaagtataagtggctactattaatataaatcaacttcctacaattttcatattattattattctttgctaccattttaaatttattaataaaagaagatttaaaaagaatttatatactacacgtttctttttaggtccaataatttaaatttgtaattaaacttaatttttgaatttattaaaaaaaattaaaaataacttataatacatatttttgtctagatctaataatgtataatatgagctagccttacttgtattgacaaaaattacaattttaatagcataaaaaggcagaaaacggtatcgcgaaacacgaaaaatcaactggagactataactattgggaagggatagccttacctagtttcactgccaccctatctaaatttgcccttgtgggcttcttgtcttgctttcttgaaaagaaattgagtttttagcagctaaacactctcaactatcgttttacttgcacttaatcctccaagcttaaatttaggtagtaaaatcttgtaaactactgaactgttagcaaaaataaggtgtcatctacttaactgcctctgtggactacttatgtgtatactcttgtacatgtaacacgtttatattggtacacctaatattattaaaattatttcaaaattcattttaaaattaaaatattaaaaaatattataaattttgaaataattttttataatttttaaataataaaactaggtgtaccaatataaacgtgacacgtgtacaagagtgtacacataatcagtacatgttagcagttaaatgtgaaaaacatatatcaccttaaatttgctaactgttcaatagttttgagagttttaccactaaaatttgagcttgaagggttaagtgcaagcgaaatgatagttgagagagtttagttgcaaaaaactcaaagaacttcaattacacagaaagtaaagacataattgacctgtggaaagaggcctgattccagcctcaaacctgtaattgcccaagacatctttctcagctattcgactaatattaataagtaatcccattgtacattgtctctgtttattgatgaaccactctcctacttgtagataaactattttgttgactttacaactgggattctctttcaatgaaatcatgttgcttctaaaggctgccctctctcggctagatgttggtccagcctaata

SEQ ID NO: 31738 - DNA, 2259 bp, Cannabis sativa
  modified_base (177)..(180): a, c, t, g, unknown or other
tttttttttttcatttttactctattttatttttttaaagcttatataaaattttttatttcttatatctttttatatgttcttttcattgatttttttgttgccttctctctgttttttctctttatcttccctcactattcatttttttgtcttcttcctctctctctctctctnnnnatatatatatatatctttttttccacactaattttttctatctttatatatatatatataaaaatataataaatatatatttctatatttttttttaacactttttcactctcacaaaattttattttattatttttttaaaaaaaaaatatataaacacttactatattttttttttccttttacatcttcttactattcacacttaaactatttcatactatttttctataattagtcacacttaaacaaatctgaattaatttcttttaacatttactaaaatatgattttttttttttttactttcatactttttctcatatttttcttaacactctttctctatcttaaaaagaattaaaagcactcctcctatatctttctctcttttaaatgatgaataaaagtaatatttttcttttgatgttttgtagtttattcggaattagtttatgaatcatttgcatattttaacaagattgatgccttgttatttttctactaattatagttgtcttttagtcattttatacttattttatagttattttttcatgttgttgtttatgtgttttatagttgtttatagttatttttatatatattttttgtacaattgttatttagttagcatatttttagggtttatatttttagtttattccatacaattttttttattgtatatatgtttattttttttttgttatttttacactattttttagttatttctaagtagttttcaattttttttattcaacagctattttttaattatttttttattcatgagtattttttttttctatggtgtatatttttaatttttttctgacaatttttttttgattgtatgtgtgttgctttatagtttaaatacatatatttagtttattttttttgacatattttatcaaaatacaatgataagatttttttattttttaattgatacagtgtatagtaatagatattgacatattaattatatattacttattatattatataccctattttgaaatcatgttattttattattactaatattaatgtaattatttatttaaattttaaaaaatatattattattttaactgtaactaattcaaaaaagaaaagagaaaagaattgaaagtataaagttgtaacaacaaattctcagaaaaaaaataatgtactagtgcaaaaaaaaaaaaaaaattaagttgtcaaactaagtaaaaaaaattcataatacgaaaaatatattgagaagttaatattattttgtatatattacaattatattattgttttgttatttttctgttactttgtgttttttttttatagttattttcatattatttgttaagtagttttagagttcctttttatttgttttttttattttattgaaatataatatttttgtaattttaaaattttaatatagtattttaaaaaatttaatacattaaaaatgtaaaaaacaaaaaagtgtgttacaataaaaatgtaaaaataataaaaaaaatatatttctatacattgtttataatttattgtattaaattataagaagtacttgtatatataaaaaatcaaaaactatacagtatatggatatatttgaagcatataatagaataatagtgataaaagttttttttttttttgataaaatgtgacaaatcattttgagtgggtgatgaagatagaactagaaagtgaatagatatgagtggttctaagtgtttgaagcaagaaaatatcaagttggccaggttgtcccactcccaatgtggtatggacttatcacttgaaatatcaaccgtacctaatatacatcgttggtcttatcaaaacttaattaatgataagtacgatccaattaaacacttccaccatcttttttcttcttttttatttatttaattttttttagaaaaaaaaatatctcaagtctaataataatcttatcatatacaccatatctaaggagctcatcaaatttggtgttgcactattattaaatttggtgtcaaaaattatttctactccaaccacaataccaaaaattacactaaa

SEQ ID NO: 31739 - DNA, 1134 bp, Cannabis sativa
caaaagatgttccaaaagggtatttggctgtttatgttggagaaaacagaatgaagagatttgtgatccctgtggcatatttgaaccagccatcattccaaatctttctaactcaagctgaagaagaatttggattcgatcacccaatgggagctcttacaattccctgcaatgaagatgccttcatagatcttatttctcgcttgaatgcctaataattttgcttacacactgattattgacagtctctaacaaaaacttttgttacaattttgtaaggcagacattgcccatactatgtaaatatttttccttggggaccaaagttaaaaatgtccctaagattgataaaattcaatactacaacactttttcttcattcaattatatggttgatgtttatttccttgtccatatcctattctattgtttcaaatttaaataaaataattattagtgtatatgtacattttcaataaagatgacaaaaattgttgaagaactttacccatttcaaatattaaatttaattttagaatgagtttacattttttctttctttctttctttttgaccacacgttgagtcaaatggattttgttacatactcataagataatttaattatttttaaaattatattatatgtatattctaatttagccaaaacagaggtaatatttgctaatatccataggttttcaatgtaactgcacataatacggtagatattctatataacctattatattttcagagcataccttatataactagctatagttgacaagtatgcatgaaattaactacattaaagattcaccaatataattgtcacactgaaccttcaaccattaaacttaaattgttcttaataattttatgtgataattgaaaaaaaatgaaccaattatttacatattaacaagtgataaaaaaaatgacccaaacttgactattaaaattggaattgtagctgtgcattcaaaatcattattttgcattatcttcatgtttagacattacatgtgactaagtatactaagataatatttctcaaaagaccacatcaaaatgcctatgagcttaagttgggtgttacagagtcattcaaagagagttgttagcaataaa

SEQ ID NO: 31740 - DNA, 1452 bp, Cannabis sativa
tatcattttatgtcaaattaataatattgtattcttcattcaagaaaacacactatgaggagaaagttacaaaggaataccgcaaatattgaaattttttaccattaaatatattgctatatttaccacgcaatatattaagaaaattttatcattttaatttgttttaatttttatctttaagatgtattcactttcatagatgattgggcaacccactcacaaaagtaaataaattttaataaaatatcataggagagtatttttaattaatggatgaaaaaaaaaagtattcctcgacttattcctaatatataagaccatttctaatatatgggataaaaaatatgttaaatttgacacaaaatatcaataaatgttatatttgacacactttttgtaattatgctctaatgcataacaatagattaaaatgtaaattgacataaaaattaatgataatcaataaattaaatatatattttttaaaaaataatgataatattataattaaaaaagtatattaaagtaagtaattaatgttaaatgataataatataagtaaaaatgtgcattaaatacgtgtcaaatttgatataatactatatcttattttaaatttggtcaatttttttaacgtgatgatcaaaatcactcatgattaataatacaacaattcacaatcaggtggaacctccttgaactaggatagctcatcgtctaatcgaagagtatgttttgccaaaccatgagttatcgaattcttatcgtaagcaacatgagacaaaactgctctcagaaatttagacaataaagctataacatcctcaaacaacacccaaactcattaaaaaatactctttctttgttgatagctattagcagagaaagcaaatttaaataaacctctctaattgagattctgtacgaatgaacccaattgagtcctaccaaaagagccaagatttcaacttgtaatactaaaatactacatgaaaaaaaaaaacacacacacaaaaaaaaaaggtattagaagacacaatcttttaactaaaataataggctaaattccattaaaacaactgaatgaattaaactaaaaactcaactacaaaaaagagaaggaaaccccaactaaaaatctaaggaaaactaaccaaatatattatcctttaactagtatcatcaaactaagaactcaaaataaaacacaaaaactcaaaaaagaaaattttaaacaaagcgtaaccaactcaaaataaaatagtaaaatcaagaaaatctgtaacaagtaaaatatgacacaagttttaacacaaaagaatattttataaaaatatcaaaataaaaatattacaccacttatttggtactctattgaagatgctctcggagcacgctgcaagaatgcagctttgggagaagttataaggggtaagttggaaaatgcct

SEQ ID NO: 31741 - DNA, 2075 bp, Cannabis sativa
tttacttggtgtaatggtcaaaaggagaattttatgctggaaaaattagatagatgcctagccacttcggattgggttaatctttttcctcaaagtagagctttctatcttgaatggtggtgttcagaccacaaggctttggtgcttgataccgaggggggatgggattctaatgaagaggggaaggcacttcgatcccggtttcactttgaagaggcttgggtagaagaggaagagtgtagtgacattgttagagaaggttggaacacgggggctccttgctcatcggattgggactttaagagtaaaactcaaaggtgtgggagtagattaaatagctggaatagaaagaagaaaaaagagttgaagcacagagttaaggagggtacaaggagggtgaatgagttgtcaaaaagaatgaatgttgataattggggattacttaaaggtgcttaaaataaccttaatgcaattcttgagaaacatgagaggtactggaggcagcgaagcagagctttatggatgaaatgtggggataaaaactccaaatacttccatcataaggcgacggcgagaaaaaagaagaacaagatcagtgagataatggatcagcaaggtgggtggatgagagatcactctgacattagcaaggtcgctactgaatatttctaaggcattttcacttctactaactcgagtgagcagataatgagtgaggtggtggacaaagtgaaatgtaaagtctctgtgaacacaaatagggaccttctagaggctttcactgaagaggagatcactagagtggttttctctttgaaccctctaaaggccccaggaagagatggtctccctgccctttttttccagaagtattgggaaactactaaaggtgatctcattcgggtttgcctcaacatcctcaataacaatgcgccattggatcatctcaatgacactcttattgcgctaatccccaaagtggacaaaccgtcaaagatggaggagtttcggccgattagcctttgtaatgttatataaagatcatctccaagtgcctagccaatcgaatgaagatgtgtttgaatgaggtaattttggagtttcaaagtgcctttgtgggaagtagaataattcaagataacgcaattgtaggctttgaagggatacattgtatgaaacgaaacaggtttgggaatggttcaaaagtggccttcaagttggatatgtcgaaagcttatgatagagttgaatggccttttgtggaggcagtcatgttgaaattgggatttgatagtcagtggatcatgaaaatttctcagtgcatttcttctgtgtctttctcggtgttgattaatggaagaccttcgaatatctttactcccaagaggggactaagacaaggggatccactatccccttttctttttctgttctgtgccgaggctctttctagcctaatactgcatccggaagagatgggtcttattcatgggctgaggtttggtagaaatggtgtataggtatcccacctattctttgcagacgacagtttgatttttgtggaagcaactaaggaagaatgtcaccaagtcaagaaaatcttggcagcctacgaagcggcatcgggccaaaccatcaatttcacaaaatctgagatgtgctttgggaaagtggttgatgaagtctcgaaaactgaatgtgcggatttatttggagttaagaaggtagatttttttgacaagtatcttggtatcccaatctttgtgggaagaaagaaatgtgaactttttgctgcaattaaaaagagggtgtggaatagacttagaggttggaaaagaagcttgttttcggcggtcgacaaagaggtgttgattaaagcagtcatccaagcaatgccttgctatacaatgggggtgtttctactacccaagaaaaatatccatgagctccgaggaatgactgcaagattttggtggggttcttcaaaagaaaaaaagaaaacgcattggggagcttggagtaaactttgtcttcctaaggagaaaggggggttggggttcaaagatttggagctt

SEQ ID NO: 31742 - DNA, 1170 bp, Cannabis sativa
aaaacaaattattttggtaatttaaaaaaatttcaaaagaaatatagtgcttcgaaacaaaagcggattgaaaaaggaaaatgtcttgtttgattttttgataaaagtgttgcttctcaaatttgatatttttacaatgcttattctagacatatgacaagtgacaagaattttttggtgaatatcagaccaatgcaatgtggtgaggtcacatttggtaatggtttagcaggttatgtcattgatttgggaactctagaaagattaccaaggttaaaaaattttatgcttgttaagggactaaaaggtaatttacttagcattagttggatttgtgatcaatggtatactatcaatttcgacaatgatcattattttattcgtaacagtgataaagaatacattttacaacgttttagacgtgtcgataattattatactctcacttgtcatactgcatgtgataatatcagtgctatatatatttccaaaaatcatattcaacattctcatacaaaacacattgatataagtcattgtattagggaacttgttgacaacaaaacattgctgttcgaatatgttgatactgtaaagtaattggctaacattttcactaaagccctagataattcaagtcggtttggctccctcagaaattctttggggttcgtacactactacaatttggacttttaataacattatttagtgactcgcacttttgtgcgtgtcactaaagaattaagattaatttttagtgacacgcacaattagactctaattaaactatcagtattagtctcttataatgtgtgtcaatagaaataggaggtatcactaaagaataatacccataattttttaattttttgtatagtgacacgccaaacgcatgtgggtaaacgtgtcccgacatgctaagcgtgtcactatagcatttacttttttcaaatttaattaatatttttttaaaaaaaatattaatctatagtgacacgccaaacgcgtgtgggtaaacgtgtcctgacatgctaagcgtgtcactatatatcattttacttttttcaactttaattaatctttttcaagaaaaaactttaattatatataaatataatcagatattttattaattaaataaataaatatcatatttatataaaaaaa

SEQ ID NO: 31743 - DNA, 7398 bp, Cannabis sativa
gcatcaaaacacatcccagaccctgtctggatgcatcacagtaaacaaaacacttttcttagtctgatggcaaagctaacaccatgttgtgattagcagtgagcataaaatccagaaagctgaaaaaaccgtttaaaccgaccaaccgaacactattggaaccgaaaccaacaaaaccaaaaaccaaaaaaagtgctaacggttaaaaccgccattgaacggtcagttttttttgggtaataaaccgaccaaaaaaaccgaaaccgaccgctatacatatatattaagttattatttttttttgcatgtattatagttactaataatatataaaaataatatattattttttattaatattaaaattaaaagaataagataattagtttttgaacaattaatttttatgtttgtagttgtaaaatgtagaataatgcatttatagaataaattggatcatttttttttaaaaaaaaagttcagtttgggcggtttaaaccgaccaaatcgaggttcaaaatggtcggttttaagataggttctggattggtcggtcagttgattgcacaaatctagaccgaaaattgaattttgcatttttatagagaaaaaagccgaccaaactgatcgatgctcagccctagttgtgatcagttgctgcttccattcttgaaaactcgtttcacacttgtcggacaaaacaaactgttggttcttcttagtcaattctgtcaatagcatcgaaatcttagaaaaaccttcaacaaaacatcgataatacactgccaactcaagaaaactttgcactttcgtaattgttcttggcctcagccaatttttaactaactcgatctttcccagatcgaccataaatccatcctttccgacaatatgccctaaaaaggagacttccaacaactagaattcacactttttaaattttgcatacaacttatgatcccttagttgttgtaaaaccatttggagatgttgttcatgctcctcttctatctgagagtacacaaagatgtcattgataaacactatgacatagttatcgaggaaatcgttgaacattctgttcatgagatccataaaggatgtcggtgcatttgttaatctgaatgacatcaccaaaaaactcataatgatcatacattgtccaaaatgcggtcttcagaatatcttcctctcaaattcttagctgatgataactagaacgcaaatcgatcttagagaatacagtcttaccctggagttgatcaaacaaatcatcaatcctgagcaatggatacttgttcttgattgtcagcttgtttaattctcgataatcaatgcacattcggagggatccatccttctttttcacaaacaaaactggagctccccaaggcgatacactgggtcgggtaaaccctaaattaaccatcccctgaagttgtatttttagctccttaagttctgctggagccatcctgtatggtgccttagaaataggttctgccccaggtgccaaatcaattacaaagtctatctctcgctgtggcaacaatcccgataactcctcaggaaatacatcaagaaattctcttagaattctgacattctcaggcccaaatgtttcaggtctgctagagtcaattacaacgaccaaaaatcctacacatccactgtgtagtaaatctttatcttttaaaactgaaataatctagatctgagaatcttggacagatccaacataaataaatggatcttcgccctccgcctgaaaagttaccatcttacgtttgcagtcaatactagctgcatatttggacagaaagtccatctcaagtatgatatcaaactctgttagttccagctctactaggttaacactcaactccgtattttcaatccaccttttagagataaccaattctccgctaggtagtagggttctaaaccctgtttcaatgaaatcataaggcctacccaattgattaattactctcgatgccacatatgaatgcatagtcccagagtcaaatagtacagcaaaagaggagttattgacaagaagctgacctgtcactacagaagggaaagctgcagcatcaacttgagtgatagcaaacacctgagtaggtacaggcttcgcctcttgcttctattcttttttctttgtttgagggaaatctttcttaaaatgcctaactatgccacactggaagcatgttttccgattgcactctccgagatggtatttcttacaatgtgggcactcaaggtaagaataaccttgacatccgcctctgccttggttcccttggaaccttttattctatcccgaaccacaagatgtcgggatagtctttctcttcaaatcaatggtggaatcaccaccatccctaccatatctagaagtaggaatagaggtggtcccaccaacatttggagtctctcagggctcctgaaggaatttcactgcaccctcagctcacagagccttctcagccatctcagcataagtcattgtgtcactcgtagtaattaccagatcatgtttactcttggcatttaaacatgccaaatacttctgtttcttactgaagtccgtgggtactataccccaagcaaccttggctagacgatcgaacttcgttgtatattccattactgacatgccttctccctgaaccaaattagtgaattcttttcgcttagctatagactgcttcattataatatttagcgttgaacaattcccaaaactcttcccaagtcattgtagtgacgtctcgggtgagggataccaactcccaccacacaagagcatcctcttggaactgaaatgtagcgcaggtcacctggtcattcccggtgacacccatgaaattaaagattctctctaaaacagtgagccactgctcggccttcataacatccaggcctcccagaaagattggaggtgtctgcttgtgaaacttctcatacaatggctccatacggttgctagcaaaagattattctactagacagttggaaccaaagtggtcgacgcttgctgcggaggcattgcaggaggaccctgctgtgttagcctctaaatttctttgtcttgttggaggattcgaacttgcactcccgctaatctttgctcccaattcagaggagcttggggtggattctcatgtctaccaccctgaaaccttccacggctactaccgcatccacggggattcaggggatttcgacctccccaactgcctctggtcttgaccatgtcgccctgactcttcgtattttgctgggcgtccatttattaggacttagccttgcaaactcataggtcaagtaggtcagacattgatcatatatattctatgtaccacacttatagattttaaggtaatgcatttaaataaatagttataaactattatgcttcctaacatacttttctaattacaacagttactaaacaagtaaaggcttactgaaccgtgagtcgagcttttctctgacaataattatacatgtcttgatgatcttcggtagataaacctggcggctctgataccaaaaattgtaacgtcgtgatacttaggcactacagtgatttcctaattactgtggccgcccttgctaatcaaagggttttcttgaaaatcatgctaaattaaaattttgataaaactttaaacttttattatcataaacatatatttacatataatcgggatcccaatctaaacttttacaatcattttcaaaataatttattacaaacatattgcacatcgactacaaaatacagcccaagtcgtcccgagaccgaacactctaggtcacaccgtctcgacatgtacaatcatcgcatgaacttggaactcactgctcttcaacttttacctgtctacttacacatgaaagtaataactatgagtcaatagactcaataagaaaagcacatagcatacaatatattacactgacttgtatctaggcacccatgcacctatccacaaggcttatcagattagtaagaacgttctttactaaggtacgaccactatacaacatgcactttgtaccgctactgtactagtgttggtagggtttgcatcgtattttgagtaccactaagtgttgcaccacatacattctatacctattcgtaccagtgttggcaacaccatactatactcattgaacatcatacactataccactattgtactagtgttggtagtataccaatcacaaattgcatgcatatattacacatacacatattcatatataaacacgttctatgctattcttacctcgttttcgaattcaagtgtgttggccagcctgaacggaaaatcacacgctggatggatgccttatgtcacattcacgcaaatgggtaaacaacttgctaaagcccgatctgggaacctaaattcacaactacaagttttgctatcgataactaacatgataataccttaattatcaaggaaacactaaaactaaggccctaaaataacacaaattgataaactgagtttttctagggtcttgcctatgaaaaggttaaccggttctacctatagaaccggttatccgattcataccagaattcctaaaccagttcgaatctcacttaattcttcccaaaattttctcaaactttgcagaacacccgtaccaacatccaacaacagtttccaagcattaataataagaaaaacatacaaaatctgaaagtgccactaatgaattctcctctcaaactaagaaaaccagcaacaagcaacttaaatccactcaaaacaacctcaaaaatcacacaagaacaaagcctaacctaaacagcctccaattctcaaaatttgcatgacaaaaccaaacttaaagcttaaacaacataaagtctaaagttatagggtttaccttgatgaaatccttccaccaactgctgggcaacactctgaattctagcaagaatcaatcagagcaaggagaagaaccctaagttcttagtttcttcttggttcgagaagagggggagaaagagggtaggaattctaattgtttcttgatttttcttaatttattaactacaaaattaacaatcttaggctaaagtaataagtggccagctgctaacctaggggcatgccacctaatccttaatgcaaaataccaaaaatgtccctctttcttccaacttaagcaattctaagcctaggggtaaaatagtctaaaactataagcccacttaaacttggaattccaagtatctcaaatatatgtctcactagctaataattaggttcttaactgacccaagtggctctagcgactatccatcgtattttccatagtcaccgagcaaaaattataaaagtcacatatttcatattaagcttaaataatacccttagagtttaacaaaatctctagaattgagaaattataactctaatacctatttctaaaaataggttccacaacaaatacaaaatcatatataattataaaatgtcaataattaatgctaattgcctttactaatccataatctaacatgcggtcattacaacaagtataatttttagtgttatctgagtttctggaatggtggtgggtacaatactgaggcctaatactagccaaggtcgacccaaacttgggcccaatgattatgtcaagctatggttacaatttggacataagcccaactccctaactttccaattcggaccaccctagcttggaaaaagctattcggtccagaagtgaagagtttgtcaagaccaataaggataccttcaagaggtaattcggaaacaggtcatcgaagagttacttagatggcttaagggtatcaaccaacatagaaccttccaaacacggccctgctgtgccagagcttgtcccctacttcagactgacaggatgtgtgtgctgccaaaaagaaggccacctttttgtccaatgccatattctctcatatttttgatacaaacatgacttcacacaggctttaaagaataagtatgaagtattgtataatttgtaagaccccattagaaggaaaatggtaactaagtataacttctattactatataaatacaatacaaatccttcatgcgaagggttagaaattcttaactcacaagctagagaagagcagggacggacagactgccaaggttaagggggcttaagcccccactaaaaaaattattttaaaactacataaatttaattattcattcaattatttgtaaatttaaatagaagcctccatacacattcaataaaaaaatcaagcccccacatattttaatttgtaaaaagtaaatgggccagcccaaacaaaagtctaaatttacaatatttactttatttataaaaagaaataaaatgataaatgaaaatacttttgatgttgtggaaagttgaataattaaaaaagtaacttggcttgttgcagagaaacagaggcaacagaacggagagatcttttccaaaacaaaaaaaattaaaattccacaattacatcaatataaaattgaggattgaagctacaccaatttggaaaattacaaacaggtttatatatatatatatattttaatctcacttaattgtttgtaataatctatttagactaaagttaataatttaggggtaaattctttttcttgttattgtgtttcaatttttttttttttatttcttaatattcttattttattagttataaatatttagtttatttgaaaaaataaaaatttgaaaagtgagaatttaaaatctagaatctaaactatttgagaactgaaatttggggtcatcacactatgaaattgcaatttgaaatttgttcattctatattattaatttttaatctgatttaatagtttgtaagaatctatttaggataggataataatttaggggcaattttttttattcattttgcataagaattatcaacttgatggttcactatttatttatattttaattttttggtggtgagaaataaatagtttatgtgaagatataaaaatgtaaaaaaagtgagagcttaggatgacgattaatcctcatttccttttcttgtctcactaacagagtatgtgtattaatatatttttcatattttttaattcaccttaggttacatgtatgaaaacaccaatattggaaaaatattttaaaaggaagcttgagtcaccaaattttatgagtaagaatggagacaatacaaaatcagtttgtgtggatattgatcttgatgagcttcaaacagatccagggttaagaattcatatttcaaagtataatccaaacattcaagatgaagtttgacgatcatatttgcttaaaggacctcgtcagcctcga

SEQ ID NO: 31744 - DNA, 2871 bp, Cannabis sativa
  modified_base (2844)..(2846): a, c, t, g, unknown or other
gggcacccccagattctataatggcgcaaactaggtgtacgaccattccataattctaaaggtgtcttagggactgatttagatggaacaacatttaaataataacatgaaccaaaaggcacattaaataagtgatgaaaatacttctatctctttattgatatttaaataatatagattacattaaaatagagttttatttagggcataaagcccaacaatatccacaacttatacacaagagccacacagtccatctgcttctgcttctactaaaaccatgacaccatcacatatctcacctatccctacaaccactcaaccaatgcctgtgactcaatcattagctcaacctcatggtcctataacaaacaagcattcaatgaaaacaagagccaaatctagcatttacaaaccaacggtttatctagcttttcaagaaccaacaagtgttaaaatggctatgcagcaagagaaatggttaaatgcaatgactaatgaaatgggagcattaaaaagaaatgtcacctggacatatgttccccaacttgatggaagaaccccaattgggtgtaagtgggtttacaagattaaactcaatcctgatggtacgatcaataagctcaaagcttgattagttgcaaggggattctatcagcaaccaagcttcgatttcattgagacaatctgtcctgttgtcaaaccagtgacaatagggattgttttatctctagccttaacaagaggctagtgcattcaacagttgcatatcaataatgcttttttaaatggtgatttgaaggacgatgtctacatacaaccccttggctttgaattacctgatgctcctcatctggtatgcaaactaaacaaggctatatatggactaaaacaggctccaagggccaagtttgataaattgcagcaatgtctattgtcttttggctttgtttttttctaagactaatcttaagctcttcattcaacatacatccaagtctgtgatactcatattggagtatgttaatgatataattgtcacttgaaggtatgcggcacaggtatcttcactgatactggcattggacgataaattttctctcaaaaatcttgccagcctccattacttccttggtatagaagtttaacacactgacaatggcttgcacgtctctcaagggaagtacataaaagatctattatgtaaagctcaaatgcaagatgccaaaccattctctacaccaataacaagtggtttgaaaatttctgcatatcaaggtgatcctattgagaatccacaacagtataggtctattgttggtgcccttcaatatgaccatcactagacatgaaatttccttttgtgtgaataaagtgtgtcaattcatggcaaatacttttcatcatcactggaatgcaatgaaaataattttgagataccttagtggcactgtgtctcatggtttaactctttaggattttcaatattccttggttccaatcttgtggcatggcaatgtaagaaataacatacagtttccaaatccagcacagaagctgaatataaaggtccttgtcaagttgcttctaaaattacctggatgcattctctattcactgaactcaaaatacagcttcctggagcccttgttatcttgtgtgtaaacttaagcaccattcttttaatagctaatcctattagtcatgctcgtactaaacatattgagctggatctgtattttgtttgagaaaagctcactcaaaaactggttcccatccaacatgtccctgcagttgatcaaaatgttgatgggctcacaaaatccacctccactgctcgattttctcttttcaagaccaaacttggtattgatcccagtaccaattccaagcttgagagggaatttcaagacagttagttaaaactatttttggtgttggttatttctgttggctttcggtgacacttgttctgttatgctttacttcttttgagcttgtgtatataaactagtgtaacactctcatttcaatgcaatgtagtctttctcaatcttctttcttcttctttttattgtgttcttgaagctctgcaacaaaggctagaagaggttccaacactaacaattatgaacctaattcttttctaattctattaatatactgaaacaataattatatactttgaatctacaaatataacatgatatttcaactacaataaaaagctatattaaattatattttgaataaaatgtttgtgcatgttggggttgtcttagatattgttagttattaagttgttatgttagttacaattagttatattcataactaattctgttagttagttggttgatgatgtattcagctctctttgtataaataccattagttcattaataaagataattcaatttatatggtatcagatgcttaaaaattttctttctctcccttcttcttcatcttcatcgtctatactcggctctgccattgatattcaccatggttcaaacttaggctactggttccaggagttctgaccaaaatcctctgccacatacttcactgacaaccctagatgctccaacaaacaacgattcgatcattcctctagcttctacaattactggagaaaacaataacaatcagaatcttctacatcgccctgctcatgaagatagttcgagtccttactacctaagttcaggagatcaccctggcttaatcttggttactccaccactttctgatcataatttttcaggcctaaagacgcgattttgaactttctaatggagcaagtgttggaatacaatttaccaggatctagatttactnnnaagtatgtttttaacatcctaatat

SEQ ID NO: 31745 - DNA, 2872 bp, Cannabis sativa
attgttgctaacagtattggctcagctcatggctttataaaatgtaattttatttatctggcattctttttaacaaaaatgcttgtaattatattatacatggctatcaagataaaaatatataattacaatttgttcatgtaccaaaaaataaaaatactataaaaatatcacctcaaaaaaaaataaaaaataaaaaatatagacatatagtcccatatgaattattatattctctacaattaattgaagttgttgtgttaggttttttttcttaattattgtaaataatttaattaacctattcgttgattatgttcgatgatgaatatttgtctattaatactatttagtatttaccaatcaaaaaagaagaagattaaaaaaaaataatctctttataattaccctagctacctaatatattcattaaaaaaatgttaaaaagtacatattatattgttattgataaaattaaatatcaaatttcatataatttaatatattaactttcatagaatatcactaaccactcataatacgccacttttaaattcaacgtgccatatcgctattgttacaactaaccatcgaaattttacataatttaatctattaatttttatggaatataggtaatcaataaaataacaccacttctatatgatattaagcattagtggtactagcaagtagcaatgctcattcataagcaagattagtaatttagcttcattattgtttcaaaagaaaagaccactaataataatgatcatacagtacatatatcaagtattatatttactattttggtattccaactcaagttattatgttttctcttttctatattttttcaaataatttcattctggataaaagtttaattaatacacaacacaccaataaaataagtcacctaattgataattctaaagtggaccctaatctatgaaagagagagcctttcggccctggaatgggaatgggagctagctaagatgagagcctgattctaattgcattatgtgaaaactgttttgaagggaactccatctctctctctctctacatatatataaataacaattatacacacacaaacaattaatatacgtttagcataataaccactaattattgttcaatccggtgtggtttagtgcactttaagccctttaaaccacaggaaaggaatcccatcaatggtcatgatgaacatagaaatcattcaattttaatcattttgtccaagctggaattattgactttgagctcccactttgcataaatcgaagcccaaattttaggtaaatgagtatatcaactgggatggttcagcttcagcaggcatgctgatgacacacagatcaatatgttaatatattaataaatataattatgaattagagttgcaaaccttttttaaaagaagggattttgcaatctttaaataaagaacctaattcaaaatttaaatttggattaaggaaaggacaaccttaattaatataaaataaaacatttggataggacaaaaagttgaacaaacatagaattgaaatcagattttacttgactcctaaatcaaaagcaggtggtgattaggtgctagctctattgggatttgagattattttttttaggtatttacaacataacccacatgactatgcttcaatgctgggcctgccttggactggcccccactgcttgtaacttttttttaaataatgtaatcatattgaagttaatcactccaaatctcttatcctctaaattttgaaaacaagctgaccccaatgttttcctgcactgtaaattgtaactcttaagaaagagttttggatgaagatggtaatctaccaatgttgagcttagttgtgtaaaaagtccttttggcagtttattttacactacaaagaccccccaccccactcagactcaacttaattaatcatctaaaaagttggaaaaagaaataaggggtaagagttcattgagttaaattagagtgtcaaaactcaagcttgtcaaaaaaaataaataataaataataataatatatcaaccatatccattacctttgtctctcacctaactctcatttagtggtagcgttattggattttatatgttcctagaagagtttgatcaaatggtctttaatctttctatatatctgaccacttgattccttgaacatgtcacaagtggagcactactatttgttctttcaattgactagaaaattttgattttttttagtgccattgaaaagtcaaacgacttgttcaaatattgtcactagtttggtaattggttagctatctttgtatatgtacactaatattcatatgtgtaaatgaagtttggtttatttttttaagtatgagataggaatatttttggatgataaagaagtggagtggggtggtgaaatgaaccataaaatagtacctaattacccaattttagacttctacttccaccttcttttatgaaactagtcaatgcatatctctttgactactttaatgaactctactattaaaaaaaacattgaataaacataaatgcttcattttggccacaaaggaactaaaaccatacatgtaattttcatgtcaccgtatttgatgaattaagttacttaattgatataagcttgttaccttcagtataaaaccaaaaattaaaactataaaagagaaaattaaaaagctataacaggcgtcaatagagaagtactagaagaaaaaattgagaaaattatgaaaaagactttgggagttttttaagagtctaattcaattgttaaatttagacccccaaacaaaaaaggtcatatttttcactctctctctctctc

SEQ ID NO: 31746 - DNA, 2777 bp, Cannabis sativa
  modified_base (1456)..(1458): a, c, t, g, unknown or other
  modified_base (1761)..(1761): a, c, t, g, unknown or other
tacatcttccaggttggcatcttgaacttgtggggcaattctaaaacattaatctctggggagaaaggggatccacatgcttggtccaactcgaggtcattgttcccctgacccaccaggccttggaacatattttttagttcatccaactatgcctgcacagctggactaacttgttcggcctcttggctgacaagagtcacgtcagcatctctttgagcgggattttgagcacgggttttgggctaacgactggtgcatcatgttggtcgtccaatcctctcctcctgtttagatcatttttgagatcatgaactgtccccaatccatcaaatatagaaacacccagctgtctcactgactggttggtttggccattcagttggacgacaccattaacttggttggaattattaggtataacttctcctaatgaattacttgacaaggtatgcccgcctaccgcttggcctacaagtgggacctgtgaccggggattggatgactgaccatttataatctgagaggtgttcaccggtggatctttgtctgtctcacccagggggatgacggttgcaggctgttgtccggcagcctgatagggtttttgtatcaacacggtggcctgccaagttcggacctcaatggcttcttgccgagcccttaatgtttccatctccttgtcccttcattcagcgaacatgcacctctgctcttcaaatgcaagatttaccacagcacggagttccttctcatcgtgatgcagggtgtatgtatgaccttgcatgactccaagagcagcacagaggtttcagattttggtgtcatctctaatagtttttcaaacattggttgcaggcggaacgacagtgttaggaatgtcttgattggctgctgatctggtattcccagtctcttgcacaccaggcgcgatttcactcacaagagtcgttacaccgtgacctgcagttgatggttgttcgggatttgtggttggtggaaccctcgtgttccctgggttctgcaatgtaggatccaccgcctgtggatttgttggatcaaccacgcctctacgagtctgtactaccattatgtttatgactaggtttgagaatgatcttgagttcaactctcaatgaaagcaccaaaatgtcgaccttgctttttgccaacgacagtgagtctaaattgtaagtgacaagtagtatcaggtgtatgtaacataataaatcgaataaagacacgagaattttacagaggtttagccccgagcagtttggtaatagcctaatcctcttggtttgtattcacttgagaataaggaaaatagtcccctttcttagagctcttacaatagtatctctgaatatgaattcttagataagtttttcgatcttttgcccagtgagtaagaataactatttatagggctataagcttgggagggaagaatttnnnttctgattacaattgatataagtggagagattgcatattaaatacagaatacactaatcaagggatttggacagcttgccatatctctatgatctagtcccaaaatcatagggatttcttcggtgactcacgatgcaaaagctgaaattactaagtgctggcgtgctgttaagactgctcactacccagctaagaaggcttcgtccgagcgaatatatgtggtgccctgttcggcatatctcttgtgagaagatacacaaagttgagtccacgtgtcaccatcgtgtgatgccacgtcagagngcaaaaattgggataacatttataattataattaatgatcaaataaaatttccatttaacttatttattaattagacctttcaaaggctcttaattaacaaacaaaccttaaaatctattttcttctctaataagcccttgcttagtgaaaaactaataaataagactgtattcatgagaattctaatagattaattaaatcaataactgagtctacaagataatattatctcaactagtatgaggaccatgggcctatataactaagctcccaataagtagttcgagaatttactcatcttattaattcctcctgactccactatagatttagaattgcactcctgataatatagaatgctctataccaagtacagatacgctataaattatttattttttcagtccaaataattaatgatcctcattgatgatctacaccgagtagggataaatttaccgttctacccttcaatttattttatccttaaaatactcagctacttataaatgatattccagtgaactaatataattactgaaatgagtattccaccttttaaacttgtttagccaagctcaaatgaaatcatcattttacttctatgtatctataagttagaaaagatattacggtaagtttatgatatctttttcatttaacaatacatccaatacatgcttactttactaatgccttggaaaaggcattctacatacaagtgtaagtaaaccaaattgttgattatcatattagtgtaaactctgtatactgataaatcatgtaacaaataaatttaatcagacaatcttaattattttccactgtgtagacaccacaataatcatgatgaatactaatgtaataaggatttaatagaatttatatatcaaacatgatcatgaaataaacatgtgagctaactattatatttgttatctatatttttactaagatgacacgtggatactaattaaagaaagttgaagtgtaacgtccccgcttcaagcctcca

SEQ ID NO: 31747 - DNA, 1737 bp, Cannabis sativa
tccttatatacccaagatcctttccatttctagccaatgtgggactttggttgtacaccgaacaatccttccctcaaacaaaggaccatcttgcctcccctcaaacgattatagatctaaacctgaatccctcgattccaacactcaagatccccttaagtaagctagatgaatcccttcaccaactaaattcaaaatcccttcgaatacctgaatccctcgatttcaacactcaagatccccttgagtaagctagacgaatacattcaccagcaagattcgaaatcccttcgaaccagatctgaacctctgatgactctaacatcaagcttcacctcctttgtttagaaaatcccaggatacattcacatggctaatatttagaattttgctctgataccacttgtaaggaccgtcaaacaccatctttttctccattggtatgatattatttgcttttggcctaagcccttacgaatttgtttttgagcaccttctcaaaaggccaccacattccaatagagatgatggtggtgttcatccttatatacccaagatcctttccatttctaggtagtgtgggactttggttgtacacccaacagtttactttgaattggttactttttaatattaagttatttagtattgattaaaaaataattttttttacataactaacaataaaattaaataaattattgttcttttaaatctccaataataaatttaaaaaaatatatgtaaaaaggaaataattaattttgttttaaattatatttttcccatataatataaatttaatctattaaattttgaaatatatttatattatatatattagattcttaaaatattatttttttttgtattaaaatattaattgcacatacaatatttttaaatatacataaatatgtgtagattggattggatcagttactttacatatcaatcaacatccaaactgtacaaatacaaaatttgaattttttaatccaatctaattcgcagaagtgcagatatctgcactttacagattagattagattagattttgcggattgtataagatcgtgtattttacgaatatccctattatatattgttccaatttttaacataaaaataaattacgaaaatttgaaagtgttatcagcatttttgtaagcatgccatgtggatattaattaaagacggacaaggggtcattaatcccgcagaagctcggtcgaagtgtgtcagcctacagacctagggaccatggtgtgtttatgtacaatgttagaggttgtctcccatgccatggtgtcgtgcaaagcatgagtgtccttgtgtactgagataagcaatccaacgactagcagaaagggaaattcaaatgagaatggctcaaaggtgacacgcgtccaaagcccagcctgtacaaccaatacaatctgacacccataaaagcaacatgggaaatatgccatctacaaattcaatggtggtatttcatccctacgaagatccattaaagacagcccatgcaatgtggttggcctataaatacctcatagatagcacaagggaggggattctcttcttcagaccttcaccttgagattgaagactcactcttcatcaagaaaatttattactgtaaccctattattaactctagagtattcctactaagcttcatcttcatcaagaggagcacagtggaaaggaataaaatgttgggttttatgc

SEQ ID NO: 31748 - DNA, 1575 bp, Cannabis sativa
  modified_base (1315)..(1316): a, c, t, g, unknown or other
gtcttgaacttttttggacgtaatggttgtcagtggctcggcttccgtccacttagtgaaataatcaatcgcaaccagtgcatactgcactccacctttgccctgggtaattgtccaatcaagataattccctagatggcaaaaggacaaggactttacatatgagttaacttgttaggcggagcttgaggtatctttgaaaatctctggcatttgtcacattttttaacataggtctttgaatctttgatcattgtcgcccagaaataaccttgccttagaattttcttagataaactctgcccggtggcgtggtttccctaaaatccatcatgcacttcagacaaaagtcgtgcaaattcttcttgggtaacacgtctaagcaatggcatggagaatcctcgtctgtacataattccctctactatgatgtaccgtgtagccttccttctcatcttttgagcttcatttcgattatctaggagttccccagtgttgaggtaggtcgctattggcgtcatccagtttggggaagtatcaatcatttcaatctctttcgtgctagtgatgctaggctcttcgaggaactggataggaaccaaatttgctctatcatttacattactacttgcatgtcgagctagtgcgtcagtagtcgttttctcttcacttggaatttgtttgagagcgtagcttttaaactgtgcgagcaggtcgcgtattttgcacagatatcctatcatattttctctccgagcctcgtattctccagatacgtgatttaccaccagctgtgaatcactgcagatttcaacatgttcggccttcttctcctgggatagttttagaccggtaatcaaagcttcatactcggcttcattattggatgctttaaatccaaactttactacaacttgtaggtgttgccccccaggtgtgacaagggcaattcctgtaccagatagttgatctgtagccgacccgtccacatgtagtttccaagtcggcttgtcttcattgatacttggctgaggtatttgtgctggctcggggttgccttccgatatgctttcttctttgcctatgcattctactacagagtctgctcaggcctggcccttaattgttgttcagggttcgaagataatctcgtattggcccaactccactgcccatttgagcaaccgcccagaagcatctttttttttttttgcaatatttctcgtaacggttggtcagtgtatacccaaacaggatgagcttgaaaatagggccttagctttcttgtttctagaatcaggcagtaagtgagttnntctatcaatgggtatcggccttcagcctcaatgagtcttttactaatgtaatagaccggatgttgtatgttgttttcctctttgatcagtacggcacttacagtatgctctgtgacagccaggtatatcccaatttcttctccaaatagtactgaggttttgcgagttgcatatttagctcttgaaaagcttttttacattcctccatccactcaaatttcttgttttctcgcagtatgttgaagaacggaacacactt

SEQ ID NO: 31749 - DNA, 1988 bp, Cannabis sativa
tggagaaaacaaggtgttaattttatgtcctggagagcatttgagctatgtgttggcaattttatgtcttgaaatttcttaattttttattactaagaatttgtctcataaattgttatggaataaataaattgtgccagtttattatataaaaacccaaaaaacaccaaaaacccatttgaaaagaaatataagagctaaaacaacatatatatacatgaagcacaaatatatgagatagatgagataggcatatatatatatatggaagaagttttaataattacattaaatatataactaggttatatttttttttaactattagatcattatagaatagttgtgattaatttaaaaattaaaaaaaaaaatatatattaaataacttataatttgataatttatctctttataaaaaattaattaaaataaattatatttaaaattaaattactaataattattaattaattttatacaatttgttaataagtaaaaatcttttagtaattatttttttaacttaaataattgaaataattgcaacaaaactccttgtcgtttaaaattattacacgtataaccttaattaataaaaaaatagtatatggatgacctctaattagaggtaatttactttcaatcttatgttttaacctttttaagtgttaaattagtgtgttagtccaagattggttcaagttatttaattttttttttattttaaaaaataaaaaaattaagtaagaaaatgtaataacaactataacattaatgattgttaactatttttgctcctcgttgaaatcattttcatcaatctaaagattgcaaaaaaaaattatcaaagtagactaccaattaattgaaattgttgcttctttttcacaaataagcataacagtaagaaaatagcaagcaagttattaaaaaccaatgagagatctaattgtagttggttgaatagagaaatgggtttgtggcatagatgtaggagattgtatcgaaatgaaaaattcacataatattatgttggggtacaaactgaaatcctatttttatatataaaggaggaaaatgggtcaaatggttgttgctaagaataattagatgtaattttaaaaattaattaagtattcaaaaatttattttaaaaggggtggaagtgtaaattttataaaaataaaataaaattttattgtaaatataatagttaaatggtttaaatgttaaaaatattataatagggacttaattataaaaataaaattatttataaatattaattgctaaaaggtcttagaaaatatttaaattaaaattaattattttagaaaaattattaattatgattaatttaattctaaaaaagaaatttttatctattggtaacctgctattacagatttaaaaaatgtaacatcatgattacaataaaaatataaccattagtagtcacccatatatatatatggatcatttcttactaaacaaatttaacgataaatattaattttaaaaatattaaatcatcacattttaatttaataacgaataataaaagagaaatttgaatttttttacttagtttaactacttaattaaaaactaaataaaaaaaatatctcttttcatactttattaaaaatatgttcatatcactacaagaattttatatagtaccggcggagacatctgccagtattaattttctaaaccgctggtaattattagccggtattaattggtagctattaatgactattagcggccaaaacggacttccaccggtaataatattagtaacggtaaattaatacggtggggtccgctggtattagtgtcacttttacacactaacacattaataccggcggaccacatttagtattatgtcgatattaatatttttatatgtaaaaaaattattatttttaatatttatataataaaattaattataattatatatacagtagaacctc

SEQ ID NO: 31750 - DNA, 1105 bp, Cannabis sativa
  modified_base (856)..(868): a, c, t, g, unknown or other
gaatttttgtgaaagtgtaaaaactaatttgaaatcactaattctatcagtaaggctatataataaggctgctctaagggaaattaaggaattattcagactcaaggaaagttcgatacaaactttggcataattcttgacatggaataatgctagtgtgactctgtgataataaaagtgcaatttccaaatagtaaagaatcttgtaccctaagaggaataaaacatataaatggggaattcacaaaatcatgaattttgtgagtaaagaaaatgtgatggtggagaatgttgatactgagtacaaactatcagattctattacatagtttatgccaaatactacatttgattaggacatcaagtatatgtgattaaattgaaatgtacttttagttttatattagtgtaagagggagctttttggaattctatgctctaaataaaacccaattttattataatcttatttactttcaataaagatcaaacattatattttgaccttgtcatatgctttgttcacatgttttatatatgattagtatgtttaatatataagttctattaaattctaaacatatagttattcacaattatagtaatgtcatcacagtgaaaagtaattcgaattatatgtttcaaattattaagtcccgcgatttatcaatgtaatagatttgaacagacgtgataatcacctattgaatttgcttacacttggataagtggaatgccatttccaagacattagtaaaataaactaatatcgaatgtatcagctatacatccgactgaaccgatattgatagtggaaaagatatcataaaattactgttatatcttttctaagtcnnnnnnnnnnnnntgatcatagatcatttgatctcattcttgagatggttaggttctagctcaactttattgcatattttctttgacttgttcgctacaacttaccaatagaatttgcccaatacttacatcttgagaacacgctagtgtaattgattgttaatcataaatatggacatctatagcttatatgtttattataagtgagatgatggtttccttagagcttggcttaactcgataaatgata

SEQ ID NO: 31751 - DNA, 1988 bp, Cannabis sativa
ttgacatattgtcaacctgggctatttctaatcaagttattgaaaaagtgttccaggtatttttttcgtcatcagaaataaatggagattcaagcaaactcgaggagaaaatcacaaacccgagaccctagacaaggcctagcgcccaggttgacaatcaacttggtgcgctagtttcgaccactcaaatgtcactctcaaattgacgattcgacttttgaatctactttttcttcattaaaaatgggaaaataagtactttcgaggaagaaacaacacttcatgtgtgccagaagcaaggcccagcgcataggctgacattttgtcaacttgagcaaatttgatggtgttttctaagaactcttctgagcattttctttgttattagcaaatattaagatttaactattttcagggaccaaacaaaacttttgaagggccataactagtacccatcgcctaggttgacacctggcactaggcctagtgcccaagttgacatattatcaacatgggctgtttccaatcaagttctcgaaaaagtattccgtgcatttttttgtcatcataaatgatggagatttaaccaaactcagggagaaatccacaaacccgagatcctaaaaatagggcataacactcaaattgacaatcaacttggtgcgttggtttcgatcactcaaatatcgaatctaatttgatcattgaattcaaaatgttcgaaagcggtgtaggagacctcgtcctcaagctcaagaagcttgagagtatcaaaacgataacttgggagctcaaaaatgaagtacccagcgcccaagttgacaaatggcctagtacgataggtttgcttattcatttctgattttgttttgactgtctgtctagtttttcataataactaagatccataaagttagagaagtcaaattcacaatttcgaatttctcattgcaaccatgggaaacttactcagaaatgaatatttttgagtctctcatttctgcaaaaacagtaacatctttgagaactagtgaccgactttgccagaacacaaaaacaaactaagtgatgtcaaaatatcacttaggcattttaaagtacatcctaacattcaggttgacgtcatatgtcagcttgggcactgacctctcactcaatattgatctgattgacgcgattcaacttgcatttcgaagatattttaatgttctatcaagtcatgtctcatattttaatcgaaattctgaagttatcgacctcaaattttatcccaagagagttacaaaaataaactctatattacctgtagcgggtcctgccgggctccgaaaagtgactatcaacctcagaagttagttttcatcactagatcatcatctacggtcaaaaatattcaacttgtattttttcattattttattcatatttttgtaggcctcccttcaacaataaaaggtgagctcttttagctcatttttcacatttagaatattacccacatggtcagagcttttatctctagtgtttctttttattaattggagctttgacacttagcctgtttctgtaataccatctcgtgagtaataaaaacttgaagtagacttagctccattactatctcgatataaggagtgaattactataaatttattgtgtctctcttataattacttaaaaactattttatgctcgctaatctaacgagcaagtgtggcttctaagtctcagtctagatttctgagtcaataatgattataaatattaaattaaaaaattcataacaaatatattgatcatgtattaacatactaacatactaaaaaattaatatgataaaaataaatatttaatataaattaatataattattaataaaaattaatatatttaaagacttaagatgcatcacccctcctaataagttattaaaatttaaatataatttaatatagtatggtatgcaaaggatgggtatccgatccaat

SEQ ID NO: 31752 - DNA, 3702 bp, Cannabis sativa
taagtaaagccttacaatcatttaccacttgaccgaaagtggaaatcataacaattgaacttcttaaggcttgaacaacagacaagcagtccgttttgattaccacttgctgcagtcgactggtttttatccagctcaaaacctcccgaattccgacagcttcagccaattctggtgtagcttgaacattgaacaatcttgtatgaccactgataagaactcccctagtgtccctggcagcccaaccaattccaaactgtcgggttgtttcaaaattcgctgcatcaacgtttaccttaatagtattctccgttggaggcacccaatgctcggctccgtccccattgatcaaaccagtggacagcagctctaaaccagaggaatgagcatttttccattgtgaaaggtaaacttttgctgacgaaacaataaaatccacagtcttggatttattttgccacacccaatcgtttcttgcgttccagattgcccaagcaattgccacaagcagttcacggttctccttgtctaacatttgaaagttgctgatgcaccagtcgaaaaaactgtgatgttgctgcaaaactgagtgaataccgacactgtcccagcaatccttagcaatttgacaggtcactaaagcatgggagatcgattcttcttcaacagaacacacatgacagagagaatgagggactgcgtgtttgattcgaagttgcaccatagtggggagacagtttgtgcatgccctccacactaaatttttcatttttggaagcatttttaggttccagaattttttccaaaaactatttacttgagattcatcaaaattcaccaaacctttcagctcttggagacgtttccacttttaacagtgtataaaccagaaatttcaccaaaccagattaaacggtctggaccggttgcaatattgataggaatttgagtgatcaaaactctatcccgaggttcaaataagtcattcagaatctcaatatcccagccaagtccatccatagtcaatagattggcaactttaacattctgtagtcccggatgagaagaaattacacaagcatttgctttgtctggcagccacggttctcctagaacatcaatgctttttccatctccaacctcccatcgaacaccaccagcaaccaaatgttgtgcctctagaatactcctccacacaaaactaggattagaaccaatttcagctgtaaggaatgaccattcgagtaataccgagctttgaaaatacgagccaccaaggaacttggattggttagtaagcgccaaccttgctttcccaacattgcaagattaaaatctctcagatttctgaaccccattcctccttcagttttgtgatgacaaagtctttcccaggacatccaatgaataccggagttactactagctaaagtcctccaccagtactttgacatgaggctttccatatctctaactacctccatgggtaataagaatacattcatggcgtagctaggaagagattgggcaacggacttaatcagaatctcctttcccgctctagaaataaactttgaaccccaaccttgcaatcttttcctcaccttttctttcaaataactcaaagccgaaactttgtttcgactcatagagcttggtagccccagataaagactaccttccagtgcaggcgccgttcccaactctccacaaagatggtttctcaaagtttcctaagtattagcactaaagaaaattgaagactttgagaaattaaccttttgacccgacgccaattcaaacttgtgcaaagcttccttaatccgaaaagcttcagcttcagtggccttgcaatacaagtagctatcgtctgcgaaaagcatgtgagagatccttggcgccccattagctactttacacccgtgcagccatcctctttgttcataacgtctaagcaaagctgaaagaccctccgcacaaaggatgaaaagataaggggagagagggtccccttgccgaattccccgagaagggatgataggaccgacttcatggttcccgtgaacaatcgtatatcgagctgaagatacacaattcaaaatcaaccgaacccaaagctctgcaaaacccattctcctaagcattgcttcaagaaaagaccactcaattctgtcatatgccttgctcatgtcgagcttgagagccatatacccttcctttccttttctcttcctttttagatagcgcaacacctcgaaagagaccaacacattatccgaaatttatcgcccggggatgaaagcactttgattttctgagacaatggaatcaatgaacggcttcatcctattaaccatcactttagtaataatcttatgcatgacattacacaaagcgataggcctgagatcagtcatagcttccggattcctcttctttgggattaacacaacattagcttcaccaaaaccatcttcaatcaccccatttgtaaagaaagaccgaaccacattcaccacatcgtgtcgcacaatagaccaacaacgctgataaaaagccggggtcattccatctggaccgggacttttgtctgggtgcatctggaaaagagccttctttacttcctcttcttggatgggctgacacaactcagtattcatcatggccgaaacacaaacaggaacacattccaccacttctctacaatccgtattagaagaagtaaataatccttggaaataatctttcatctctcctagattcgaatcccaggtggcccagttaccttgagcatcttttagttgctcaatttggttgttcttctttcgactactagccgctttgtgaaaataactactattttggtcaccttcccgtaaccaaaattgtttggctctctgcttccaataactctccctttgatcaagagctttaaaaagcttttttttcacttcattataagcttgcaccgaactgacatccctcttaccctgtagcagtttcaactgttttttgtaatctttaattcgatgattaagggaacccgtaatctccttgccccataccttaagtttctcggcacaaaggtttagtttaccccccaaactataatcatgaccaatttcccaacattcttttacaatttcagcacatagcggctctttcaaccaagtgttttcaaatcgaaaacgatgatgaggagcaaaaacagtggaaaggaccggttcaagataaatagccgcatgatcagagctagagtaatctaaattagagagagtagcttgtggaaatacctggagccaagtcgaatttgcaacagctctgtccaagcgaatctcaatccaattagtagagcctctacccttttcccaagtgaaagggtgaccttgaagttcgacatcaaccaaattacactgctgcaacgtcaaattgaaacccgaaattaatctttggggataaggccgacccccctttttctcctcttgccgaacaatattgttcatgtccccaataagacaccatggtagtgccgaacgactagccagagtccgaatcaagttccatgtatcctctcgcctactccgatttggttcaccatataacccagtgagcctccaattaccaaactgagtggtgtgaacaataaggtcaatatggttattagaataacccattagactaccatcatctttatttttccac

SEQ ID NO: 31753 - DNA, 1167 bp, Cannabis sativa
acccgtaccagaactccaactagactcgacatgtggttggtgtttggatttgggaccaagactcggacctgatcttggatcccgatccaagttctgaggccctagttttagtcccggttttagggctcaattcctggttcttggtcccccatctatattcaggtcctaggtcccggtttgggtccaagttcgtgttcaggtttgagttcgggtcttaagtcccggtctgagtccaggtcccgatttgggttcgggtacgagtttgagtcccaatcctagtgtgggtccaagtttcggatcacaggtcctggttcttaggtcctaggtctggcccctaatttttgggtctgggtctgggtccaggtctcggtcttggtttaggtcccatgccacaggtccaagttagggtccaagtgttggtatgggttcaagtttgagtttgggtttaggtttgggtcctgttactgtcccaaatttgtgttcaagtccaaaacatggcccgattctaattcttggtttaggatcgagtttggatcctggtttgggtttggatactgatccgggtccacgttattccagttctggtcacgggtcttgggccgcatcctatgtttgggttttggtccacgttcggggttgtgtcccagtagtcatgtcctgtgttccgggtccaaggtcttgtctcgtgtctcgagtctgaggtcgagtttttggtctcggtcctggtttcggggcctagttttcggtccaagtcccccatctaagttcggattccttgtccaagtttgggtccaagttcgggtttggggcccaagtcccacatctaggtctggatcctagttcccagtctaggtccaactttaggttcgggtttgaatcccgagtttcgtctgagtttaggttccagtatgggttcaagtttgtttgagtcagggttcaagtccgtcccagtcttagtccaggtccctattcgagtttaggtcgagatcctgatccgggtctgaattaaggtctaggtccaggacaaggttctgctctgggtttgggtctgggttcaggtcctgagtctgggtctaggtgcgggtctgggttttagtcctgggttccagtctttgtatgggtatgggtctgggcccgtggctaggttaaggtttagggtttagggtt

SEQ ID NO: 31754 - DNA, 1336 bp, Cannabis sativa
ggagatatgaccactatccaacaaaaatgacatgaacctagccttaagagaacacgagccgcccaaacttgttttctcaatgagtcgaaacccaacaaaaagaagagcttgaaactcactgattatgataaaggagagaacatgagccatgaacacccaacccatcagcgtcaagctgagagaagagagagagagagacttcgaggccgagatcgagatcgacaaaggggacgaaggctttgagaccgttggatttgtcgtggcctttgagatcaaaagcgaattaggcgtagccggtcattttgagcaaagaagatcggtgtggtttggatggtccagcttatgcagttgttgtagtcgtggaccatgaatattagggcacaaagagggttaggatttctggtgctgcacaatgagggtgatagagaggttcgggggagacagtgagaaaggaagagatagctagattatggtgttttggtgtagaattccatactattccctttatacccttttttaattgctattttctttattttcttttactaaatcattttcaacactcttttactgtcggttcataaccgagacttaagactcttttagtctcggcttataaccaacactaaaagatcttttagtcacgattataaatcgactactcaatctctatgttatatatttctttaaaattcttttggtctcagatattttcttagtgtcagtttactaatcgacacttaaagtcattataggtgccaattatgaactgataccttagaattggggtggctttagtccgttttttaaaaaagcggtccctcgaaccgacacaaaaagtttattttgtaatagtattgtactagcacatttgattctttggttgagttttgttcttgaagggttgtgttttacaacaattcttacgagaatagacagtttttattttatatataaacgccttatttatatttgcagtatgattgttcaataaatagcactacttttatttaattcttgtcgacataacaacatcattagtccaccacatggacatgatgaactatatatatcaacgtaagtccgtaattattgttcataattatttaaaaagatcatgatatgatgattacgaacaagccccaaaccgcttctgaagatactgaaccacattcttctccaacatgaaagccttagcaagaacatcagggttgattggtgggttggatccaaacacggcattagcaatggtaatcactcccggattctggcttcccaatccagcaaaggctaaggctggagtctttcctatattgaactggaagtgaatcattcc

SEQ ID NO: 31755 - DNA, 5798 bp, Cannabis sativa
atcagattatattgaaatgggttttatttaaggcataaaatcccaatagtgtgcaccttttccaatccagaaccctgtcctcaatcttctcttgaatctagtatagtctaatgtcaatgtgcttgctcttctcatagtatacagggttcttacataggtgaattgatgacagaatatcagaatagactgtccctttgtctttgagtagttgcaactcttgtagtattccctgtaaccaaatagcttccttgaaagtttcaatggtggccatgaattcagattctgtagttgatagtgccaccactagttgttgttgtgatttccaacatatgcagcttctgttgaccatgaacacataggcagtagtagatcttctgttatccctgtttgatgcataatcagcatcaacatagccttctaatctcacatttgatgtgtctttttgataaatgagaccatacttgattgtacctttcaagtatctaatcagccacttcactacattccagtgttctaacccatggtttgccataaacctgcttaatacactcagagaatgagctatatgaggtctagtactaaccatgatatacattcgacatccaacagccatagcgtagggtacacctttcatgttttttctctatgtttcagttttaggacaatattcattcgacaatttaaaatgccacgcaagtggcacagcagtggccttagatgaatccaagtttaatttcttgattactttctcaatgtagcttctctgagtcagtgtcatcttcccttcttgcctacttcttatgacttctattctcagaattttcttgacagctcccaagtccttcatttcaaatttagaattaagtttgtttttaatggcttgactttcagtcttttctttgctaatgatcgtcatatcatcaacatatagtaataggtacacaaccttaggtgtccctatttccttgtagtagagacaagagtcaaattttgatcttgaaaagccaatactttgaacaaactgattgaacctttgagtccactgtctgggtgattgtttcaacccatacaaagatcttttaagcaagcaaaccagatctgttttgccattttccacttgaaaactaggtggttgctccatgaaaatctcttcatccagaaaaccatttaagaaagcaattttgacatataactgctcaacctccaagtcattgtgtgcatcaatggctagcatcattcttatggttttgtactttacaatgggtgagaagatgtttgtgtaatctaccccctcaacctgtgtgaaccccttagctaccaatctagcttgtatctaggtggctctccctttgtcattccctctttctctttaaacaaccatctgcaggagacaactttcttatcttgtggcctaggcaccaaaatccaagttttgttcttcttcaaggagtgcattttttcacccagagcagcaagccactttttctttgatttgcaagcagtggtttcttcataggtagtaggttcaggatcactttcagattgaaccacagctaaggcatagactatcaaatcagcctcagcatgcatgctaggggttagatcctctctcctggtcctgtctcaaagattttcaacctgctgctacttgcacatgtggtgctatgaaaaacctcttggattactacaaccagaaccaagttcttcaattctcgattggtttaaatgaatcttatggctctgtccaagctcagatcttttcaaccaacatattccctcaatttccaaggtcttttccatgatcgttcaagaagaacggcaaagaacccttggatcctctctttctttagacgctaccacccgcccatccacaaaccatcctactcaatctcgcacaaagaaaccacgaccatcttgctccaattgtggcaaaccggggcatcttgtggaaaaattctatttcatccatggatttcccctggatatggtgacaagataaagtagacaaaggcaaatctgctgttaatttggccacttccaacgagtaactcactgattcaaatgaggcttctacctccaacattaatctttatttttagtgtcagcaactaatctctttgcttagtcaacaactcaacaatcaagctcctcgagttgaccctacacctgcacccgcatctaatatgtctggtaacactccttccccttttttctcttggattgttgactacggtgctacacaccacatgtgttgcaataaactatgttttgcatctttttcaaatacttctttccctaaaattgttctgttaccaaatagaacatctattcctattgaaaatattggcacagtttacatctcaccgcacatttctctccataatattcaatcatttaggttcaatctttttttagtcaatgattatctcaacaacaatgctcatgatgtggtttttcgcacaaattgttgttatatttaggatccatctcagactttgttgattgggacaactagaaagcaaggaaatctataccagcttcttcaaagctgttccatcgcaactgcctcttgtcaatcttctcttatagttcataagaatgtaattgaaaggccaaatcgccttattttctgttatgtagaccaatgggacaatcgccttagtcacccttccatgtatatttccaacatgatcaataaaaagattgatagttctttttcttcacaactaaatcctcattgttccattctccatttagccatggaaaaaaagctaccatttatttttcaaaataactttgctgctgctatttttgacctcattcacattgatatatgggtgccttttaatataatcagtgtggtaggttacaaatattttttaataattgttgatgaacactcaaggtatacttggacatacatgctaaaaactaagtctgaagttcagaccattatttcgtcctttcatagcatgatatgtactcaattttctacctctattaaaatacttagacatacatgctaaaaactaagtctgaagttcagaccattattcctgcctttcatagcatgatatgtactcaattttctacctctattaaaactattcattcagataatgctaaagagttcaatttgacaacttttttttgcctctaaaggcattatacatcatcattcgtgtgtggacaaaccacaacaaaactcagttgtggaaagaaaacaccaacacccattgaatgtggcccgggcattgagtttccaatccaatgttcctttagtatattggccctacaacattcaaacaaccacctacttaatcaataggatcccatcagtcctattcaaaggcaaaacacctttctttcttctacacaacaaagaaccaaattatgatcacttaagaacatttaggtgtttagcttatgcttccacccttgattctcaaaggcataaattctcccctaaaaccagagcttctgtttttctaggataccctgacggtatgaaggcatacactcttcttgacctttaaaccaatcaattatatcactcccaagatgtggtatttcatgaaactatatttcttttccaaaatcatacttcagaaaatgatatacataaccacttcacaccccatattttacatgttcatagtcccattacctcttctcttcaacctttcccttctcctaaggatcctcctgagaagaaaataacatatggccggactatcaaaactccaaataaccttgtgactacatttgtcatgctacatctacatcctttccactctcaaactttttgtcatattacaatctatctccatcattcaaaatagccatccttacagcctatactgctatagaaccaaaaagctataaagaagcttctaaattctccaaatggctcaatgctatggatattgaaatcgatgctcttaaaagaataatacttggataattacaaaactcccacccggccacaaggctattgggtacaaatgggtgtataagatcaaatacaactctcgtggagaatataaagctcctcttgttgccaaaagcttctcccaacaacaaggtgtcgattcaaacatatgccccagtcgcaaagttcaacacgttaaaagtgctccttgcacttgcaaccatgaatgactggacttttcaccaattagatgtcaataacgccttcttacatagtgacctccatgaaaaagtatacatgaaagttccccggctatccatgtcctgccaactttgtctgcaaattgcaaaagagtatatatggcctcaaacaagcctctcaccaatggtatgaaaaactttgtacaacacttctcaatgatggtttcaaacagtctctatcagatcattctctcttcataagacaaacattaacatcttttattgtcgttctcatttatgttgacgatatattaatttctagcaataacacaattgtcattacctcatttaaaaagtccttggacagaaaattcaaacttaaggacattggttccttacgattcttggcttagagatcaaccgttccaaagaaggcataaatatatcacaatggccattcacacttcaactcctcaccaatacaggttatactggtgtaaaaccagcctccacacttatggatccaaatttaaatctcaccaaagatcaaggcgagctcctgtccgatcctacttcatatcagagtctcattggtaaacttatctacttaaccattactcaacctgacattacttatgttgtcaataggttaagtcaatttttaactccccccaagtaccccatttaaatctcaccaaagatcaaggtgagctcctgtccgatcctacttcatatcagagcttgattggtaaacttatttacttaaccattactcaacctgacattacttatgttgtcaataggtttaagtcaatttttaactccccccaagtacctcatttacatcctacacaaaggatcctacaatacctttaagctacttcgtgtcaaggcatttgttttctcatccaaaactactacaaaacgccctgcttatgtagaaaccagcctttccccccagattgtcccctgtcttttttctcagatgcaaactggggtggctgctaggatacaaggcattcaatttctggctattgtgtttttttaggctcttctcttatctcctggaagttcaaaaagcagcccactgtttctcgttcatcagttgaagccgagtatcgggtaatggccaatggcccttgtgaagtaacttggatccttgctctcctcaaagatctcgaggtcaaccatactcctcctgccaatctctactacggcaacactgctgcaattcatatcagtgaaaaccctgtctttcatgagcacacaaagtatgtggagatagattgccattttgtccgcaagaaagttcatcaaggagtcctcaagttactacatgtttcttctcggaacaacttatatagctgatatatttaccaaggatttgtttctttttattttttttgaaattgtttccaagatgggtgtcatatatttaattttatacacaccatcatgagggaggctattagaatttgtaataagctttaccttaattgtaattagttgttaattagttgagtttgttataacggatttgagcttaactctgtctactacaaccctatataaactcttccttgctctgtaataaaacaattttttccagatataataatcaataaaaagagtttttgtaacgccctaatgctaaggcacgctacagt

SEQ ID NO: 31756 - DNA, 2676 bp, Cannabis sativa
tcaataagggtaataataataatgattaatccaattaataaagctactaatccaacatttttctttaatttttacacaaatctaaaacatgggtttttttttttcactacaccaaaaacattactaaaaaaataaaatacaagatctagtgcaaaattagtgtaaatcttaataattataacaaaaaagagagaagaaaaacacttactcaagattaggagggaagaagtgggtgtgaagatttttgagaagtgttttaagcttatcccaagaagaagaagaagaagttgttgttggtgatgataatgatgatgaagacacaaaaagtaaacttgtgattctttgtgttaaagatgctttaatgggtttcacttcacactcttcatcacttatactactacttttttctccaactatggagtttgtaaacaacatcaaaaacacacacaatgttgttatcacaacacaacactttctaactctattcatcttttcttttctcaagtttaagccctaaattgttgaatgaaaagaaactagtataagtaggaaaaaataagagagaggaagatagaagaagaagaagaacactttattagaattaactaataataaatatgaaaatatgactatatatatatagaaatgctagaaatgttaaatgtgtatttagtagtttttggtgtgttatattattattggtgtaatttaaattttaagttatgtataaattaaaaaattaatttaaatatcaactaactaatcataaaatatcatttataaaaggtgttaagtactgtaaatattcaataacaatatttatatataattttatatattaaaagtgattatataatataaattattggttcaatatttgttaaatattaacaaaatattttaattaaaaagctattatatgagaaataagtattagtaatatttaatattttttttattattaatataattaaatgtcgaattaataatcttatcccattagagaatggtactctaaaaaatggtagtcggttaacaatgctcatatgagtacgtgtttagtttttgttatgagacttacacacgtgtcattttctagtatttacacgtagaaaagactttttggccttatcatcaatgatctaataatctattctgatatttgttttttttgaaattgttgatatttgtttgttgttggatgatattaagacatagatattggtgaaaatgataagtgttgaaacaaaaaaatatctgtattgtcttataaaaatccaaacaaaagtacacactgtctaccactttaggtaatgataaaattattagtaaagattacttctttcctttattggccatttttaattaataatatctaaatattaagatttttgtaaacaatatatatatatatattctctttgttttatttatcaataattatgataaataagaataatagcaaaaagaaattataaatttatggataaatataattttaaattttgtattttataaaaattattaattaatttttttattttattaaataataaaatagattttatattttctaaaatgataaaattaaaacctgaattcaattttcaataattttattttttaatataatcaattttaagataatttctaatgcgataggatggcccttactcctgatttttagtgggccataaaaaaaaaatattttgaacccttatttagaaaaaaacatggtattttcaaaattagtaaaaaaaaaattgtataattttaaaagggaaatatttttttttgggcccctgagctaggtgagccctaagcacaggcctagcccgcctatgcccaggcctgggcctaaatacgatataactatttttatcataacatctctaagtaagactattattaaattttattttgataaaaaattaattcaaggtcttatttctacaattttaaaaaatacaaaatccattttattatttaacaaaatggttacaaaatacggaatctaaatttatttgttatttaaatttttaaatacaacattaattcttaagaaaaagttataataatgactcgtccatacatataagtaacaacaatgttcaatattagattcttactattataacttaattccaaaaaagtagtacattattgaaaatgttcttaagtacttcaattttatcttcattaccaaaaattatttaaaattttatagaaattaatacaataaaagtgatactatcactgtaatatacatcattgtatggaaaatttgagttataatttcagtaaatatcaaacatagacgatggagacaataataggcaacacgattagtcgatcacattccaaagaggaagcaattggaataacaaggaagaaacaaagcgctatcctcaaccaccattggctgccggaatggatttaaatgaatctacaaaacaatatgcacacaattattatgattttgatgattttggttgaattcaactgtaaagtttctaactcgaatgccccacaaccataactagattcaatgtgtttgaatgaatcaatcaatagacaattagtccaataggatttaccacttgaaactgtacataatcccgaaaaggaaggagctaactaatcttaactgtcgattaactgtactaacggttacaa

SEQ ID NO: 31757 - DNA, 1675 bp, Cannabis sativa
taaacaatattatgttaaaaaaatgatgtaattgtatctaatatataaattttatactaagagttgcacatgcaataaataaaatattttatgcttccatatccactaatatttcgggacgggcacacttatagacttatagccccagtaaaaaaaattgcgttaaaaaattaaatatttttctttttatttgataattatagcacaaaaaattaaaaaaaaaccataaaaataaatacattaaataaagtaaacataaaaaataattaataagaattaagctcacacataataaaaattctgggtctgtcactgctaatatctatatatttatataaagaaaattactaaagaattaatttgaggtgacattctaaaatattttttatctattttatttaaatttctatctattttatttaaatttcagtgaatttatttaaatttcagtgaatttagttcatttgactcatagtaagttttttttttctttgtgaaaatttcacactatgagtaattgttaacttaatcttgcctaattagttataattttttagttatttattttgagtcgtaaaatcaaaatttataatttaaaagtcgactaatattattttttaatagtacatataatttttaaaagtggactaataatgtttctcaaaagtatacatatatattattattatttaggaatttattaatttttaatattttttttgttaccattttttaatatttgttccaaaatcataatctttttatatattttaaaaataacaaattatgtttttaattacaatactattattttgtttataatacacacgccaaaattaatgttatactttaaattatattactcaatacgtaaaaatatataggatatgtctatagtaggtacattagttttgtctctatggtagggatatttttatagccatagatatttaatctaatggtaataaattagtgagtgtatataaatagttaatattcaaaatgtactagattattggtgaatttattcttttaataatattttaaaattaaataacaattcttttaataatattactaatataatattctgacctcttcgttaattcattttttagcatctctctcctattatcgttcttccattgaagaaccaattctcaaatccacaatgaccattcccgacctccttgtcgccaaccccgatctcctcggcctagagcttgcgctgctgctcggggtcggtcaaggagtgcgagcggctaaggcagcgactgagccaccgcctatgacagcaatggtgtgccatctacgtcagcagcgagaggaggaatggcggccgacggtgtggtgaggagtctggggagaagttgaaataggattataatttgaagtcaagatatattatgaacatgtatttattgaaactttgttctgcattaaaaacttatatttcaaaatcgcagttggccccttttcataggtttactttgataaccaatctcaagattagttagttttgtttcattggttctgttatttctgttaagtactgtgtcttaactaactacttgtaacggttttctgttttgtaattgttcagctcttttgagctatatatacaataaatgaatccctgaatgggataagctttgcttcaagcctttcttcctct

SEQ ID NO: 31758 - DNA, 2431 bp, Cannabis sativa
aagaaaatactaaggctaggatatttctagcctaccatgatggacgattcaaaggcttatgtaaagaaatgtgataaattctagagattttcaaaaatactccgtgcaccgcccaacgaggtaactcagatgcagagtccatggcctttttctatttggggaatagacttgatcggataattgcccaaaggtaagggcggggtacagtatgcagtgtcgcagttgattattttacgtagtggacagaagtcaagcccttggaaacaattacatctaaaaaagtactagactttatggtgaagaatataatatgtcagttgggactcccacacaaaattgtctcataacagtttgaaaaccaattgtttatagacttctgtatgactcataggatcataaaaagttcctctgcagtggcacaccctcaatcaaatggtcaggtcgaagcagtcaataagacacttaaaggcaccatgaaaaaatgacttaaagaagttaaagggaactggccagaggaactaccagaagaattgtggtcatattgcacaaccgaaaaaacaacaactagacaaacaccatttgctatggcctatggttatgaagctatgtatcccgtagaattagaacctccatcccacaaaagattgacctacgatcaagaagctaatcatgctctcctagcagaatcacttgatgaaattgaagaaaaacgagcctcaagaaacctaaagttagtagcccatcaacaaaaggtggctcggtacttcaacaagcaagtgaaggcaaggaaaattttttgtgggagatatggtcctcataagagtattcctgaaccaaaagacaacactgttggtgtgctcgaaccaaactgggaaggaccgtatcagatggtcgaagttttagaattaggggcatacaaacttgggcggcatgacgaaaatatgaatctcattctagtacctaggtattggaatggggaacatttgagaaagtattattagtgaatgtaccaggtcagatgaccactttaagtatgcaaagcaagaacatttactcttaagtagatggccttctaaacagattccaccaaaaggtttggatagaataattaagtactcaggttagatgaccacctttaaaagcacaatttcttttataaatgcaattgttttacgtttaaatttagctaaagatcagattagatcatgtaatagctttatgaatgtaagttactatagtaacaagattgttttgaccaagaaatgaataaagatgtttaattaaattctaattgtgtcaatttcattagcaagttattaatttacctttaaatgcgtacaaaggtctgctcgacccaaagatctgaacagacgaaaaccatacttgtgaaatgcaagtgaccaagagtcataagcctgctcgatcacttaggggaaactatacacgtacaaagcattggtaaaagtaaataacaagctgaaaaaaatataatagtttgcacgaaaacaagggaaattattcattaaaaaagataacaaatcacggtaaacccaggattaaaggttgcccggtcagctagttatccgaaaataaaaagaaatataacccaagtttgaaaactgcttggccggtcattttgtctctaataaaggcccatggatgtataaaaaaagagaaaagatgtttcaaacagcaggggtcctaggctccttgtacagatcaacttggtttgaaggggccagaggcttgacaatctggatgataggggtctcattgctcttgtcggttggaactgtgggattgtctgcctcaaggctttctttggccgcctgacctgcacaataattaagatatgcctctttggaatctcttgaggtaatcaaaatttcctgaaggagttggccttccaaaattcatagaagaccaccaaggcagcagtttccaggttttccacttccttcaagagctcctcttccctcgtctgcttggccttaatgtcttcctctaggtcggacttttccttggttagctttgaaagaagagtgcgaagactctccctctcatctttaagtgcattgacctccttggacaatgcctcgttgtctgcctcgagctgggcagtagagggcatctcttgaatctcctttgtcagcttctcaacccgattattggcaacaaggagcttcttgttcacctcccctagctcggccctcatgtccacgaccttcttgttagccccatccacctccctctgcaaagtgttggtggtggcaagattctttgcaaccgtggatttggcctgggagttggcgtaggccatcttcagtttgacctgcaggggaaaatgttaaaactggaactggtaaaaagacaataaaaacaaagaagaaaatatttacccaagttgcctccttcaggactccaccaatca

SEQ ID NO: 31759 - DNA, 2701 bp, Cannabis sativa
ccggagttctgttttgagtgtggtatgcttggtcatccttttgaaaaatgcattgcctttatggagagaatggattcgggtaatgatgatgacttcccctttggcccatggatgaaaggagccaaacttccaacaacgggatatgataaatatcgtactgacttcgccaaaggaaatgcttggccgttgttgacacgcttagcaagatcatctctcacttcgactattcctcgtctgaacacacttcccaagccacagccccatgttttattgcaaggtgaatcttcaacacccctcccgactggccataatctttcagatatgcacaattcggatgttgtgcatcacactataccggttgtaacaccaaaccagcagacttcccactttccttccacttccacatcacctacaccctctgctactatggttactcacaccagcaacactaccatctcccccactaccattagctttcccaacatcttcgtacccgacattggaaatgcttcccggccacctatgccgtatgccacctaccctcccaacacaactatgcacaatctacatagatctccacaatccttaaccttatcatcaaacactgctactgccattcctactatttccaccaccaaacctgtccccttcccctctacaccagcaactacactcaaaaaccagcagaaattaaaagggaaagaaaatgatcctccagctctctccccaaagcgacaaaatgattccccctccatgagacaatttttaaagagatgtcgcaatcaaagccccatgccttttacctctgttctgtcacacggtgaaggttcttgtcagaatgtttccatggacttaatggattcagatggctctgttgacagcgacgcggagattgctttgcaatcccgcggctcattatgaaaatcttgagttggaatgcacggggattggggaacccgagtgcgtttaggcaattacggctgcttgttgaacaacagtcccccaacattgttttcctcatggaaacaaagctatgtattaattcaattactcaagttagacaatctttaaaatttaataatggaatggaggtacctagagttggatatagtggaggtttaatgcttctttggaaggatactgtggacttgaacttacaaaattatggccgtggtttctttgattgttttgttactcttcatggtggtcatgtttttcatttcacagctttctatggggaaccagccactcaaaatagagacatgtcttggttattgttgaagcgtttggcagatgtagcacctttgcttccatggttggtcattggcgacttcaatgaaatcttgtcttccggtgataaagaaggtggttcaattcgtagtgatgcccaaattagctccttccaaactgctcttgatcactgtcaactccgaatactgccgtatgttggtgaaaagtttacatgggtgaagaatcgcaagtcacttgcaaccattaaagaaaggctggactggtgttttatcaatcataagtgggatcaatcttttcaatcaccacagctaactcatcttgactttcatctttcggatcatcgtgccattacagcagaatttatgccactcaactctgtctctaatgttgacaaaagaagaagtcgctttcggtttgaaaggttatggttatcggatcctgagagcaaaggtattatctcagctagctggtctcattttgatatagctgacccgattgcagctgttcttggcaaaattgactcctgtgctaagaatttgcaatcatggcacatctctaagtatggtaggatgaagaaaaggattgctgaagcccaacaaaaagtctcacattttaataatgtacaacatcacagcagtgccacactcacatctttgcaacaatctgaggctattttagatgatcttcttgagcaggaagaagtttattggcaacaacgatctcgggtggattggatgcaatcgggggataaaaacaccacgttttttcatgcgaaagctaatgccagacgggctaataacaaatttgtttctctcaaatctgatgcgggagtcacagtaacatctaaacaaggcattgctgatgttatttgtcaatattatgctgaaattttcacagcaggccctaccgatgatgatgctattgctgccctcatagatgctattccaacaactatcactacggaaatgaatgatgatcttactaagcctttcacagccaatgaagttgaacttgctctaaagtctatggctccggacaagagtcctggacttgatggaatgtcagccatgttttatcagcaaaattgggatatagttggtccacaagttatagctgctgtccttggtgttctcaatgaaggtgctgatccaactccgctaaactcaactttaattacacttataccgaaaattaagaagcctcagttggtcaaagactttcgtccaattagtctttgcaatgtcatttccaagctcatcacgaaggttttggttggtcggttcaagcatgttctaccatatgtcatctcagaaactcagagcgcttttcttccaaatcgattaatcacggataacatactagtggcctttgaactcattcatggaatcaagcataaaacttctggtcgtaaaggagtggcggctctcaagcttgatatgagtaaggcttt

SEQ ID NO: 31760 - DNA, 2387 bp, Cannabis sativa
gaccaaaatggtgatcaggggtgtgtttttcaatcgggacacgatttgggtcgtacgggattcgagaccagaacccgcacgcatgcccctcaggtcagggatgaccttccccaaaacaacgcgttgtttcgcgtctaaagaatcccgttgttttcgaaaatgacctgtcatttcctacaccaaaaaaaaggaacaggcgcgtgggggcgcgtgtacatctatttttggaccaatttttttttacaattttgctctattttaattctcgcacttaattgtgtgattttattttgtgattggtcaatttaaatgataaatgaatacatcattacatattaaatgtaaactaaattattttataataagtattctcacaattttattttgtatattttatttattgaaaacataattatattcatgccaccaaatttatatgttattggtattttgtgaaaatgtaattatgctatctaataattagttgaatgcttatgtattcatttattttaggtctaagcatgtcaatattaataaaattgtgagaattatgacgattttattgttaattaatttaatctcatacaaggctaattttatttatttatttattattctataattatgttatatgtatgccttatgtaattttgtgagttttattattgtaaattctttttcggcatacactatgggtaacgtgtaacaaaatattaattatagttagtgcatattttatgaaatttattgtcaatgttaaattttttttaaaaatgcgggatggctttatttgataattatgagattaaaattgttcattgaatgtgttatacttacctgtcgtaagttttcacatcgaaaattgtgattcatgttgatattttcttcccgtactaatcacaattaatactaagatccatacatgcagtttaatcatcctgtcgatgattttaattgttagttaggatgcttagatgatgaaggaaacacattagatatcatgaaccacacaatcttttctacccaatcggtagtgaattagctgaatttggttatgatatttgaagttattgtccttactagcgtaagagtcatatgttttattataacgactttagcatgacatgatcgttttgttgagatatcattgagaaagctaagaaaacgaacagattgcataatccttgttttcacatagtggcactgctctaagatattttttctttagctttaagcaatcctaaaacctctactgcctagttatcagatgagactataatgtgttttgccatatcgatctcctattagaaaattagactagccctcaaattgataaatcttgaaatcacatttgaatttaaagatgtcaagttattgtatgctcagtgggagtattgcgacgggtgttagttttaattaggtatatatgtgttgatcgatccttattgataaatttttatgagagtggaatcgcttaggaatttttcttgagcatatgaagtgatattcctatgtttgttttgtaataatgagttcaggagactagtacgttggttttgtgcctagaaatagtttcagtggaacttgtgaatcttctcttactacattcttatgcttgaggatcaagataaggcatagatcataagtgggcaagttttagattaatattacaatggatgtatgatcacatctgtctattctattgtgatattatgttaattgtgaatgctcgtaaacacaatgtaatcaagatagtggattgatgtgtgtgtactctctatcatatcattgttgctaccaaatttgaagatgaccaatgtataattagacaatgttttttaattgactgaagtctaaataaaaattttcatgtagtaacattgatggcttagtatcaactttggataacaaatggaaagaatagaggaattaaagccttgtcttatctaaggatagcacacatgttgatcatgttaatctatttgtccacaaggttttcatgatctacaataccatgcataaaattttaagagatatcgaatactcgttactcttttgttaagatctctcttataggaatgtcttaaacatagtctctcaaaattttgactcatcaaagtttgaaagcttttatatgttttataaagctttaaagtgaaaaatacctaaaaagattaatacatgcatgtatagtaatatgcagtcactttttatgtgtattgtttttcaaagtgacaagtacacaataagactggtatatggtctttatgttgtactgcatgatcttggtttaatggttgttattacatttgagtgtttcccaggccaaattgtatgtatagtatacatatcctatcaatatgatatcatacataatttatttgact

SEQ ID NO: 31761 - DNA, 1761 bp, Cannabis sativa
aactgtttggaaacttgttcaccaataccaataaccggataactagttatcaggcaaaaaccctaactaatttttttttaaaattctagccttcaaaacctgattaaatcatcaccaatcttccccaaactttccacaatagtttagtgtactaaacaagactaatacaaaactttaaaaaagatttaacccgtaaatataaaatctaccattacagctcaagttttaaactataaagctctaaattcccattttcaaagtctatttcaataagttcaaataactctaacaaaaaattactcaaataactctaacaaaaaattactcaaataactctactctaacctcaatatataaaactataatttatttaaacacaaaatgcctaatcatataatagaaaactaaataaaatgttttctttcaccaacaagcttccaaacacctcaagaacaataccttttccaagagttgactccaagtgttcgacaaaataaggaaatgagggtgacattgattgttgtctaaaaatttctatcaaaattcttaaaggaataataaatgaaatctattttcattaattactcaaaaagtaccaaaatgtcgctcataacaaaactttaataaagccaaacctaaggataaagttgtaagtttcctgttccactaacaccaaaaattggttatttctaatgacccgcaatttattttttgtcctgtgtttttaaatgagactttattattatatttatccagtgcaacagtttcatacaccattgttgagagtgacagtgtcagatttatatgcagaaaaagtttctaagtcttatcttttttaaataaacttatgtaatccaagtgtgtgatcgtgtacaagactaaatgatctcatatttcagtcaattttcattttcaaagaagatgtcaaattagtggagatttctaagctaattaatctattttcctctgttgaatcttgtgctctcttttcaatttgttttgtttcatataactactatatatatacataaatgtgtgtgtgctcacatcatagaccaagctatatatattttttaacaaaaataaatggactcagtatatagaaaaatatagaaaattccttctggttcaaataagcatagacatccgcagcaaaattaaagtagatacaaaacttaacgaaaagaataatgtatttgcttgaaaaggtaaacaaaataaaataaaataaatgataagagtgggtgaagaagcccaattcaaatgactagttcaataacgttgtcattaataaatctcattttggaagaaacactttgtttaacacatataattaccaagtcactactaaaccaaatttaccaagtcttttatggagaaaacaagcaagtctaggtagctatgatatgctccctggattaagagagacttgttcagaaacttccatctataaatatgagaagtaggagtccatccataattatcaaatctcactcaagcaaaagaaagcaaaacttgatatatagatttataacatagcatttatagttgcaaattgatcaacaagtactccaacatgaaaggtattcattttcttctttcacttactgtgttggctttggcagccttcatagcctctgcctctgacccaagccctctccaagatttttgcgtggctgtagatgaaccccacaaagcttgtatgtatacatttctttcattactaacttatcataacatttttctctatcgttattctat

SEQ ID NO: 31762 - DNA, 1157 bp, Cannabis sativa
aaatttgaagtcttgttgtagtcattttgaaaaggcattgaaacataatgaacaatctgatattgatgggaatgaattatgtgtggagttgaaattattaagacaaatcttgccaagagaaaaaatgagagctattgacatattaaattttttgaaaggcatagattgttttccgaatacaattattgcatatagaattttgttgactattcctgtgacagttgcttctgcagaaagaagtttttcaaagttaaagttgttaaagtcctacttgcggtctaccatgttacaagaaaggcttaatggattagcattaatagcgattgaaaatgatgttttggagacggtaaaatttgaagagttggttgatgaatttgcttcaaagagtgttcgaaggatggccctttttaagtagaaggttgatatcagcttgaagttgtattaaaaataataacaattttaataaaaatatttgagtttatttgtgcttaattttgtaaaatatattatcttactataataatatttaaaaatattatttacaaattataattttttttttttataaggggcctaatttttataattaaaacagggcccccacaatgtttaagacggccctgttcattacgaacatctgtgtaaccgtaccttgcaacgcatcgaaacacgaagagattcttgggctctattcttcgaaacaagaatcgttcttcatgtggaaccttactaattggtaatgattttattgagacaaaaacgaggacagagtgcaatgcagggacgttctctgcatagtgcttaaaaatgggaggaattccttgaacaagttctgagtaaaacattgcaagtcctggtaatcgatgaaagttggtgtcgttagtaatttccttgactttttcaggggaaagtttgtggtcgagttcgtaatagtattttcttctatacacgtcgttccaaacaaacatgacagccattaatagccctgcgaaagccagaggaagatatcctccttggttgaacttgtaaaggactgagcttaggtaaagaaattcgactgagccaatcaccacaatgtatgtgatcaccaagaaaatgttggtcttccatatcattaccattattaggacaaggaaggaggatgtgagtgtcatcac

SEQ ID NO: 31763 - DNA, 1674 bp, Cannabis sativa
tccgtagaagacaggtatgcaaatagcgctatttacctgtggtttaagccaacactctatcccatcataatgctgaagatcagaccatgatgactcaatttgagttttttgagcgtactgccattgatcaagatagctcttagcagaagctactattgttgaaatattaaccgattcactttgccacactaaatcgtttcttgctccccaaatggcccagcatagtgcaacaactaggcattgaaaatatgttgtcaaagtcttaaaaatagtcacacaccaatccaaaaattctccactagcagtagccaccattgtaccaatgccgactctttcccatacttgctgaatcactctgcaagtgatcaaactgtggtttatagactcaagaaactcatcacacaaagggcagcgaggattaacagcaactagcttagtagcaagctgagctaaagttggtatgcagttggaacatgccctccacatcaaattttttacctttggtggcagtttaaaagacttcaatgtcttccaaaactcggacgcttccacctcattgcacaaacctttcgacgattgaattaactggtaggcacttctcacagagtacacatcagttctttataccagttcaacacatcacttgactagtttgaacacagagggatttgcataatcaacctattatccctatcttcaaacagattatttgaaatttcactatcccaggaacatctgtcaatgctcatcaagttgcacaccttagcttgttggagggcaggatgacacgaagccacatagggctgattttgaccaggctgtcactgctcatctaggacattaattgtagaaccatttccaacactccaacgaacacccgcacggataatagcttgagcttcccaaacactatgccacacaaagcttggattatttttaagagatgccgaaggatagcttccagtaaggaaataacgaactttaaagactcgagaaacaagtgactcacgtcttgtgagaaagcgccaatcttgttttcccaatagagccaaattaaaatcacgaagattacaaaaacccaggcccccattatttttattgtgacacatacgctcccaagacatccatgagattcttttattgtcccccaaagaacttttccactaaaatcttgccattgtgctttcaatatctctactaacctccataggtagtaagaacacattcatagcgtaactaggaagagcttgtgctactgacttgatcaacacttctttactagctcgtaataatactttcgaatcccaaccttgaagctttttccgaacccaatcctttaagaatcccagaacaactgacttgttccgacccatagtactagagagccccagatacatactcatgtcattttcttggggcatctgtagtagtgcattaatatcatccctaatgtgacccacagtattggtgctatagaaaataaatgattttcccaaattaactttctgacctgaagcactctcaaattgatggaggaggtctctaacatgtgtagcttcttgaagagttgctttacaatataagtaattgtcatctgcgaataacatgtgagacacttttggagcaccattcaccactttacaaccataaatcaatcccttctcttcatatctt

SEQ ID NO: 31764 - DNA, 2603 bp, Cannabis sativa
  modified_base (1016)..(1017): a, c, t, g, unknown or other
  modified_base (1705)..(1709): a, c, t, g, unknown or other
tatatagctttaagtctgggtctaggataaagtcccaagtctaggtctgggtccaggtctcggtccttgtctgggtacacaactgtgtctgggcctgagtttcattctgagtttggttatggggctaggttcgagttttgttctaggtttgagtccgggtcttggtcactatcctagtcttcttcgagggtcctagtctggcagttcttgtttacgttcccgttttaagtctcgagtctgggtcagggtcccggtttgggtcctggtccgattttgggtcctagtctgagtcccacatctagatccctgtcacgtgtcctggtctggttgtggttcaggtccccagtcctaggtccgagtttgggttcgggagcgagactgggagcagttctaggtccggccccatttctgtgtcccgagtctggttccatgttttgttctgacttcgggtccagggtcggcaccgagtccagatctgggttgtgatccaagtctggttctcggttcaggtctaggtctgggttggagtcttggtcttggtccgactatggttccgggtctaggtaaaagtctggtaatggttctaggtccaggtcgatgtcttggttccggtcccgttcttgggtcccggtctacttccgattttggttccaattttgagtcacagggtacaggttaaggtccaggtttggatttgggactgggtttgggtctgggtctgggttcgggtcttgatctaggttcgggtccggggctggttcccagatccagacactgactacagcttaggtccaagccctgggtccatattcagatcccgatctcgggtcccagtctagttccatttcgggtgccaggtcaggagctcggtcctaggttcaagtccgtgtctggggtcgggtcttaggtcacggtcatagtttcgttcccaggtccctatcctgattctggatacaggtcctggttctggtctagatttgggtcccagtctaggttcgggttgggtcctagtcccnntttgggtttgggtctcagtttgggtttttatttgggtttgggttcaagtcttcgtccttgtcctggtcctggtcctaaaccttgtccggttccagttctagttgtgattccaagttcgagtttgggttagggttcgagtcttggtccgagtttgggttcgggttcggatctcggtctaggtctagatcgggctctgggtgtgggttagggtcctgggtctagatcaaggttcgggtctgagtcccaggtttcgatctcgatctgagtctgggtttagtttcgggtgtaaatcctgggttttgagcccagtcttagttcgaggttgggtccgggtgcaggtctaggtttaggtttgattctgggtctgggtgtgagtttgagtcccgggcttgggtccaattttgggttcgggtctaggttcgggttttgacctattatgggttcgtgtctgggttcttatcctggtttaggtccagggtcgtgttcgggtcccgagtcttggttttagtccagttcctagtctaggttcgggtctaggtctcggtcccagtctttgtctgggttcaagtttgggtccttatcagggtctggaccctggtctcggtcgctggtctcaagtctcggtgagggtttagaattaggtcaggtctaggtcccggtcttggttcgggtcccaagtctcatgtcnnnnncctagtcaagatcttagtccaggtcctggtcttagtgggttatgctttgagttcggttttcgtctcaagtctgggtcctagtcacagttccaattccaattggggttccgggttttgttctcggtccaggttggggtcggggtccgactcttagtccgagtcttggtacgggtgttttggaacctgatttgggtccaggtctgagtctgggtccaggtcccatgtttcgattctgttttgggtctaggtcggtattggggtctgggtctgggttcgtgtccatgtccaggtccgaatcctagtttaggttaggggcttggtctgagtttaggatcgagttccgagttcgggtcggggttcaagttcgagtctcagtcctagtttgggtccaggaccgagttcgggactgggttcgagcccgagttccggggttgggttttggtcgagttctgggtcccggtccaggtccaggtcctgttctagggtcttggtcacgttttggttcaagttacggttttgggtcccaggtctaggtctgggtctgggtccaggccctggtccagcttcaggtccttgtccgagtcccaaatcaagacatctactatgggtctttaccaagccctggtttttcgattttgggacaagatctggatcccaaccacgggtccgagtctggtttcgattcatgtcctaggtcccggtttgggtttgggtctagatctaggaccaagactagggtccagttctgggtcacgatcccaattctaggtcccgagtcatgttcaatgtttgggtctgagttcaggtctgggtttgggtcccaagtcctggtttgggtttggattcaggttttggacccaatcctagcgtgggtttgtgtccgagttcgggtcc

SEQ ID NO: 31765 - DNA, 2485 bp, Cannabis sativa
ctcataatgaccatgttattttggtcaatgaaaattctgccagcttttcaaatgagaatttaattgagatagctgacttaaaaaggaaaagaatggagctgattgcttcaagtggggccgtgactctctcaacagcaataactgaagatgatgtggagaaaaaccaaaatacttctgcagaagtgaacaattcaaaaaacttgcaaaaggtgggtcttggattccaggcccacccaacattatgagtacaattagttggaattgccgtgggcttgggaacccacgggcccaacaattcctatttgacatttgtgtccaaaagaaacccaaatttgttttccttagtgaaactttatgtactaaagatgttgttgagaaagttaaaaataaattgggctttgaagggtgcttttcaattgatgtcattggtagaaaaggtggtatagctatgttatggcatgtttcttctgaagcccatctgctcaagtactcacacaaccatatcgacatggctgttcatcttcctggtatgaatccgtggaggctaacagggctttacggagagccaaatcgcaccttcagataccgaacgtggaatttgcttcgtgatatgagcaatgaatctaatcttccttggtgtattatcggcgacttcaataacattctgagtcatgaagacaagaaagggggtcggccatatccatcttcattaatttctggtttccaagaggctgttcgtgactgtcaccttattgatattgatctcaaaggctatccatatacatgggaacgaagtcgaggctctcctcaggcggttgaaatcagacttgacagagccatggtcactcaaagctggctggacgtgtacaatgaggtatcactcactaatctcgatttctcatcctctgatcactctcccatttatttactccctgaattgtctactggcactgcctattacactccctttcgatatgaaaatgcttggaatagagaaccattttgcaagcagattgtagctaatgtatgggaatcaaattcgaatgaaagcttagtgaagaagcttgagatatgtagcactcatctagctgactggggatgcaagctgacagggaatttcaaagcccgtttgtccaaaagcaagaagctgattgctgaattcaaaaattcgggtaatgattttgatgttgagaattttgctgtggaaaaaaataattactttgagatcttagcacaacaagaactctactggaaacagcgttcaaagcaatattggctgcactcgggggataaaaacaataaatactttcatgccactgctagcgctcgtaagagatcaaataatgttcagcaacttcaagatagcaatgggacttggcaaagttggaacaccggtcttgagactcttataaggcaatatttcgaagaattatatcagtccacagactcattctctccttcgattattgataatgtgaaagttgttgtcacggccttacacaatgaagctcttttgcaaccaatacaagatgaagaggttaagttggctgtattctccatgcaccctgataaggcacctgggcctgatggtatgggacctgggtttttccaacatcactgggacattattggtactgatgttatcaaaacagttaaggagtattttgatactgaagtcatgcctgataatcttaatgccaccaatctagttttgattccaaagaagaaaaattttactgttatgagtgatctcagaccaatagctctatgtaatgtcctttacaaggtcatatcgaaggttttggcgaatcgtatgagggatttgattgatagtattatttcagaaacacaaagtgcttttattcctggccgcctcatctcagacaacgtcatggtagcttttgaggtcatgcattatttaaaacggaaaaggaaaggcaaaaaaggcttcatggcactcaaactcgacatgagtaaagcctacgatcgagtagagtggagatttctaaaagcgattatgtctcgaatgggctttgctagtaaatggattgatctcattatgggttgtgtatctacagttcactacaaagttgttcacaatgggcatgcaattgaatctatcactccatccagaggaattcgtcagggagatccactatctacctatttgtttatcatctgtgctgaaggtctctcagctctcataaatttgaagcaaatagacttattcaaggttgtcgtgttgctcaacgggcgccatctataacacatatgttttttgcggatgacagctacttgttttgccaagccacacaaggtgcagctgatagtatatccactctcttgcagctcttcgaaaacgcatctggtcagaaagtcaactacacaaagtcttctatcttcttcagccccaataccaataccacaatgcgtaatctgatatgtgctactctttgtatggctgaagctcatgaaggtagtctct

SEQ ID NO: 31766 - DNA, 2118 bp, Cannabis sativa
agtggactgtaagtttctcctccccaatcaatatatgtagccaagtctttcaatccaccactaaatatgcttgatggccaatatccaatttgatcacgattctttccaagttgaagccaccaatttccagtaatttgatcctattatatcatgtcaaacaagtacaagataacccaaaattttaaatataagacacttttttttttcattttacgataaagatattcaacataagtttggtagggaaaaaattaaatgaaatatttaattttatttacccgataaatattgataccaatttcccatgtaggtaaagtaccaggatgagtttctcttagagtcatttcaatcataggttggggatcaaccaaaacgaaccctggacacactgtgttgaaacaagatacttcgccagcctaaaaaatattgatacttaaattatccacacctactcaccgaatgtataacataaaattattacctgaaaatatatgaagatccgagtttgattatccccgtatacactaggatttacctaataaataataggataacaaattagtaagtgaaaaaatattattctaaaaaattataatttatctgaaaaacttttttattatttttaacactaaagaatattcaaaagaaaataaaacttactccccaaccagcttgaatgatatctagtccattttgtaatttgattcgaccaaaagtatattgtgagccagtgacattatatagtgtgtaaaaacttgcaaatgttccacctccattgtatttcttggttgaatcagatgtgtaaacaagtgcatgctattgtaatcaaattcaaattgtaattatttttcaatgatggaatatattatttaatttgtcaaaataaaatgaaaatgtaaaaaattatatgcttacatgaaaagtaggaggagaattaattcttgaggtataagactttgtaaatagtttggctctgatcagatcttccttagtagttcttcttattggaacatacccagttggacatttttcaccctttattgatacttctttcacattctttggaggcttgtcttccctaaccatcaatttgggatgagaagaaggtcgcatctacaccataaatacatataaatatgttataatacaaattcactatggtttcgaaaaaataaagaataaagagctatattacataaataattatttaaaaaaaatatacctgaaaatcatatttgtgattcttcaataaaggatgatcaaatgctggttgttcgtaaaaataaatacaatcataaatatctccatattgtgtctgtacatgacacagaacaagttagataagtgggagaatgaagatgaaattaataataatgaaagaaaaaaaatacttttataatcttgattgatgatttgttcagtcgctcaagttgattctctatttctagaagttcatttcttgataattctactggttgttcttgagattcgcaataacataaaaatgtacacaacacaattacaaccatcgaaaatcccctcatacccatatttatgtcaaaaaattttatctgcaatacaaatatcgatataaattagccaaatatcaataataactatatttaattctctcacaaaatattccaaaaaaaatttatacaaatccaccaaaatattatgagatattgaaaaatgaaatcacataccagttaataggtagcgtaatatattatgagaggtttcaatagatgaattggataaatgagtttatatagagaatgattattatgtagctaggtcaattgaaaattaatcaaaaggaataaatatttaataataatttacgttatttagtctttggtaaaataaatattttcttttctttctctttcagtgtaatgtagataactacaaatttatttacattaaaaatggagaaatcaaaaaggtaaaactataatagtatatatgactgtgattttgatattttcaagaataaaatattacaaaaaaaattaatattattatctgtattattaaatccaattttacgacgttacaaaacttttatataagtcaaataaataataaatacactacgttacaattttttttttt

SEQ ID NO: 31767 - DNA, 1787 bp, Cannabis sativa
ttttaaatatataaaatttaaatatataaaatttaatttaattttaaatttatttataagaaaatatgtccaattaattttaatatacaattaataaaataaggaaacaattttagatattttaaacaacataactaatacatttgttataaactaaggttaattaattgaagtaaggtctaatttaaatacaaattaagatttatataaaaagtaattatttaattttgttgatacttttaaataattatctaagttatattttaataaataaatttaatttaaatatttaaaaccatttcttttttttttttttgttaaaacgaatataattaattgattgatttaacggtattagttttaactactaactttaacgaaaaaagaaacgtgaaactaacaatttctattaaataataacaattaatataaaatacatatattttcaatattttatatatatttaaaaaattaaaattgaaaaaaatttagttttaatttatatataggtagatagctaataaaattatattaaaaaaagtcaactttttaaagataatcactttggctttctttggttttgtgcatttactccctatattttttctttttcaaactccctatttattttttattttttttttgaataaggatgaattcattaaaaattaacaggccttagtcttaacaatgtcacacaagaaaaagagacagagagcatttagctcattatacgtacaacctaacgataaataagactccctagcaacacaatgtgcagccttatttccagatcgattaacaaaagaaacaaggacatcattcaaactagataaaataatacgacagtcctccaccaataatccaaaattggatggcatttgaattgagctattaattgcttgaacctaaagcatcagactcgacaaccaccttatcccaacctttacgctttatccaactcaaagcccccttgatgccaatgaccgctgctatttcaggaggaacacaaccccacctactcttagaaatagcttcaaagagcttaccatgattgttgcgagcaacacaaccgaacccaaatttttggtgagcctcaaaaatagcaccatcgacattcaccttgaccgtaaaagcatcaggttcacttcctatttattaacttggatagaaagtaaaacattgaaatgacatatatcatccatgagtattgttatttgtctaacattgtattgatctaacatttaataattgagttcaacttttcatattatttattaaattaaaatgtataaaattaaatattgaaatatattattacagtacactactttttatagtatatatttagaatcttaaagtatcatatggatattcattcaattaaatttacactatttttcttataatacatccaattcgcactaagtgcaaactttatattttagatctaatctaattcgtataatagctcaaatcaaattcaattcaatccgcaaaagtacggatggattaattattttaaatttgttacattttaatatattatgtaatatttatcaaaagaatatttctttcacataaatatcaacaaaataaatcaaattatcttaaaaaaaataaaaaataaactaaattactattattttatgtctccaacaatgaattaaaataaataaaataaaataacaaatttaaatgaaaaaaataaatgtatgtaaaagaaatatttatttaaattgtatataaaaaaataaattatgtatataagaatgtaatatatattt

SEQ ID NO: 31768 - DNA, 1346 bp, Cannabis sativa
attgccaaaaaaaaaaatcaaaaataggtcataaatcagttgttaacaaggctaaaggaaacacccagtcattgacgatgatgactccgattttgctcccccgtggctgaaggtggtcgtcgtccagtgaagaagaagtcgaaagtgtctttgcttgaaaaaaaaaatcaacttcgacggccagaaggaaaagaagatatcaacttcaaggcaattgtgatgaaattataatgcaactgttatatctattgcgagccaactaacataaaataataaaataactaataattccacatatttaatacaaacgaatattacaacaatcatgttttatctgttcaggtcacgtattcgataatttcgggccttgtttttataatactaagatattgtagtagcaaaatcattattcaactaacgtgcaacttaattgcaactaaaaatgttaaatgtgaatgtgtatctgtaagaaactattcgtcaatattttttttatcactgatcgataagtacttgtaacttaatagtaatatgcggagaaataattattatcaaaatatttatgcaactgttatgaaatattaaaaatcagatgagtgtttccacgtacataactctgtctacgtgtattcgtgatttaacatgaataaattcatcattagaaatttagaaaacaacgaacatacaccgagataatatatttaactatagtattgatgtaattttttttagattatacttgagttggattgtttgtgagcttcaattcaacttttttgagatttgcattttagggatctgaaaattgaagccaggacattagctgtatgcgaattaaatcggatttctggatggattttagtttcgtagtaatttttctacactattttttatgaattcgaaatagtctctgttttgattgattacggtcgtattctcatgtgaagtcaccccgaattaatggtggttctcgttcttcctgggtttcgtttcggttgtgttggattgctgggttggttgatcaaatgttgtgtgcgtgaggttgtttgtttctttcatcaatacgaatcaacatttgcttcgattgattcttgtctttttctctggtaaaattgtcggaattaatgttaatatttctcttgcttgggcttcttttcagttgtcttgatgggttgaacgatggttgctttcgttggtgatttttctgtttttgtgtggctgaagctttaaaagaggagatatttttgtaattttttgtttgaggctgtacaattgttgaaatgactaattcactgtattttaataaggctaattaggatttttacctcctgaactttaacatgtac

SEQ ID NO: 31769 - DNA, 1977 bp, Cannabis sativa
  modified_base (1169)..(1170): a, c, t, g, unknown or other
  modified_base (1671)..(1685): a, c, t, g, unknown or other
attcacgattaactctgaatcactaaagcattagatgttcttgacttttagtgttttggctattcttaatcctgctaacaaggcttcatattctacctcgttatttgaagtttaaaactaaaatctaagtgcataatgaaacttaaagttttctggcgacactactacccccgagccattctcgtttaaagctccatcaatgaacaatttccatgtttctattttatttcctattctagagtcttctcttgagttatctattgaaaaatcaatcaaagcttgacctttgattgaagtcctcgagtggtaggttatttcaaactgtcctaattcaatcgatcatttagtcaatctccctaattcattgagttttgacaatacttgtcgtaatggttaatttataaggactttaatagggtgtgcttgaaaataatgtcgtagtttttgagattcatgtatcaagcagagtgaaagttttttgagtggtggttatcttgattctgccctcagtaacacatagtagacagtttgttggttcctaccttattctcgcaccagtgctgcgcttatggcactttctgaaatggccaaataaaggaacaatgtttctccagtaattggtttggccaaaattggtgatgtagaaagatgtttctttatttccttgaatgcctttttgcactcttcattctactcatattttttattgcctcgcaagatattaaaaattggagatatttatcaagttatttcgagatgaatatattgagtgctactattcttccagttaaagtttgaacatcctttggttttgttggtgaaggcatctcgagtaggaatttccccaaagcttgaacttccattcaattcctcttgcatttgcaataatcatgccgacaatttttgctagtgcatttggccaaatgcatcggtaaaagtcacatttcttctagtgattccttattcatatatgaggttgtgacttgtagttgtacagagaactaagatcacttagctatgaataaaatagtcagtaacatattaaagttatataatctttaatcaacggttgctagtacggttcactgatgcccattcttcggtgcaagtaatcttggttcggatgactgatgtagtatgacatctaagtgaaggtgttgtatataatnnagattatatatgacaatgatcgatatgaataaaattatctttatcaaatatattttttactataaagacctaatttatatcataacgattagtttgactgaaattttaagtaatcatgaactcgtgttcatgttattaatttctttgattcactcgttaaagtttcttagagaagatgattcttacaacttctgttttaggaatctaataatgtggatagttggaacatgatctacaattatgaaatcttgatttttataacggatcgaatgttggtttactttaattgttaattctgaaattgaaaagttgtgcataaatttagatgagatctaaattatactttcactagtaaattaacagtactaaaggataaagaagtaattagaagggtaaaatgatattttgaccaaaactacttacgaacgaacacaaggagggctaaacattggaattgattatattgatggacattgcagtaaaactcagtaaatataattnnnnnnnnnnnnnnngttcaattccatatttatagtggagtaatcttaaaattaataaataaagattatttgattgatattgagactcaataaataacctagtttattggagttagaattattagttgtataatattgttcgaaaaaattaattttgagttggcaaaatagtaattatttatttttttgaatatggaacatcataacaacaaaaaggaatgaaacggctagagcgcctgtatgagctgataggaagatcatagcggccggtactgcaggaggttctcttcggatctcttcctcgtaa

SEQ ID NO: 31770 - DNA, 3539 bp, Cannabis sativa
aacggaaggttgaagcttctggaatacagagaagtaatagaaagtttttgggaaacagaggtagccgttaaggtcgcgggtctacattcagatcttacccgtagtgttctaaatgcaagaagcaccatcagggtgagtgccgggctaagacatgtttccagtgtgatatggtgggccattttatcagagactgtccgtaggctaagaaagaagaaccaaagaagaataacaatcagaatccgggctgtctgttcattatgacttaggctgacgctaatgctaatccgtcagtggtgacagatcagctgtccataaatggttgttcttattcaatattagttgatttgggagctactcattcttatgtatcgagtagagtaatagagagttttcataaatcgtgtgatgtatatgcttcaaggtttggtaccctattaccttctagagacctaattgtatctactcggtggattaggtctttatctttttggattgatggtgatgaattagctgccaacctaattgaactacaattgtctgattttgatataatcatgggaatggatttcttgtctaagtatagggcaacaattggctgcaagtggaagatggtggtgtttgaaccagatagtgctaatccgatagtgttagtgggtaaggtacaaggatcgcgcataccttgaataacactcctaaaagctaaagatctgatgcacagaggttgtctaagatttctagttactacagtggatactagccaacctatgtcatctggacctaaaaatacaagtttggtgtgcaaatttctagatgtatttcgagaggatttacatggattaccaccttccagagagattgagttcgtaagagagttagttctaagagcggaaccagtatcaaaggcaccttaccaaatggctctagcgaaattgaatgagttgaagatccaaatccaggaattacttaacttggaatttaccagaccaagttattctccgtggggtgctccagttttatttgtgaaaaagaaagatgggtcgctttgaatgtatatcgactatcaggaactgaaaaaactcactatcaagaataaatatcctctaccccgaatagatgacctgtttgattagctgaagggcaagacggtcttttcaaagatcgatcttcgctcaggttaccatcaactgaggattcaggaggaggatattccgaagactgtgttccgtacttggtatggacattatgagtttctggtgatgtcttttagactcactaatgccccgactgcatttatggatcttatgaactgggtatttaaggattacctggaaaagtttgtgatagtgtttattgataatatcttggtttattccaaatcagaggaagaacatgaactacatctcagattggtacttcagcgattgcaggatcacaagctttatgctaattttaagaaatatgaattctggttatcacgtctctttcttagggcacatagttgataaagatgggatcatggttgatctgaccatcattgaagttgttcgggattggccaacaccaaaatcaactactgaggttagaagctttttgggtttagctggttactatcgtcggttcgttgaaggtttctcaaaattagcaacacccctaacggagctgacctagaagattggaagtttgtttagactgatcgatgggagaaaagttttcaggagttaaaatagcacttgattaccgctccattattaattctaccttctgataagaaaaagtttgttgtttattgtgatgcctcaagataaggtctaggctgtgttcttatgaaaattggaaaggtaatagcttatgcttctcaacagttaaaagagtgcgggcagaggtatcctactcacgatctagagcttgcatcaatagtatttgcgctaaatatttggcagtattatttatatggcaagaaatgtgagatatacattgatcatcaaagtctgaaatacttctttacccaaaagacctgagcatgagacaaaggcattggcttgagctggtaaaggattatgactgtgaaatcctttatcatcctaggaaggcgaatggtgtagctgatgccctaagtaggaaaggtcattaccagatgaatatgatgaagcagatctccaagcaaatggtagaggaaatgacccgagctaacattgagttggttgtgggacagttggctaacattaccctataatatactcttctggaaagaattaaagaagtgcaatcgcaagttctggacttagtgaaatcccgagatagggtttcggctgggaagactagtgattatacagtggatagtactgggatgctacgttttatgaaccatgtatgtgttcctatggatgatgattttaagagggaaattctgaatgagtctcacacgactccttgttctgttcatctgggtacaacaaagatgtatcaagatcttaaggccatgttttggtggcctggaatgaagaacgatatagcagagtacgttgctaagtgtttaacttgtcagcaagtgaaagataaacatcaaagacctgtaggtttgctgcaaccattgaacctttcagaatggaaatgggaagacattgctatggactttgtagttggattacctaagactacgggacagtatgactttgtgtggctcatagctgacaaatttacaaagtcagtgcactttttacttgttcggacaaatttctccattgatcagtatgcaaaattgtatgttagagaaatagttcgtcttcacgatgtccttaagtccatagtttctgatagggatccgaagttcacatcaagattctaggagaacttacatcgagccatgagtactcaactaaaattcagtacaacattccatcctcaaacagatggacagtctgaaaggaccattcagatcttagaagacatgctacatgcatgtgttttagactttgaaggatcatgggtaaagtacctttccctaatcgagttcttgtacaacaatagctatcaggaaacaatagagatggctccttatgaactgctttatggaagaaaatgcagatcacctattcactgggatgaagtaggtgagagaaagttcttgggtcccaaagctattcagaggacaagtgtagtatttgataaaattagagcgtgaatgctcgttgctcagagtagacataagagttatgctgatccaaagcgacgggatattgatttccagatcagagatatggtttttctttgaatatcgcctatgaaaggtattaaatgctttggaaagaaaagaaaacttacctcgaggtccattggaccttttgaaatccttgagaggatagggtaagtagaatacatgttggctatgcctccagcgctggcagctgtacataatgtgtctcatgttttaatgctttagaagtatgtctcagacccatcccatatctgagttatgaagcattagaactttgctagatctttcatacgaagagcagccagtgcaagtgttagacagaaga

SEQ ID NO: 31771 - DNA, 2321 bp, Cannabis sativa
  modified_base (1516)..(1518): a, c, t, g, unknown or other
  modified_base (1772)..(1782): a, c, t, g, unknown or other
  modified_base (1871)..(1881): a, c, t, g, unknown or other
  modified_base (1999)..(2000): a, c, t, g, unknown or other
tcggatgtccccgaagggacaagtaatgtgactgaggtaaggatatataaacattctaaggaaatgttatattggcgatgtgggacaattagaatttgtactttgtacaaatcaaatctgtgggccgttatttacaaggtaacaaatttgttgttggtaaagtccggcccaatacaaacagagcctgctatgctttggatgagtgactgacttatgtgtcgttctcttatgttttctgtcgttttttgtaaagacttaaataaaagtttcaatattttatgagtgccaaaagcatatataattaaaataaatttgggtacggttgggttctccgtgattttggggccaagtcttgcaggcgagaacggggtcttgggatggttgtgttaatccggctcttgctgaggctcttggtgtgaaagaggtactaagctggataaaggaatcaaaactttctcgtatcactgtggaatcggatagcctcataacagttcaagcttttcggagctcggtgaatactaattctcctttcggttgttgcattgcagaatgcaagagaataatttcaaatttgaattatgtttgtttacgttttattaaacgttctgctaaccgtgtggctcatggtcttgcccgagtctcatggttatatgctgagcgtagtgattcggtggacactgttccgaataatattagtgatgtaattgcgcaagaattgttttaaataaagttatcagcttttattcaaaaaaaaataaatatgtatcattgcaaaatagtaaactaagccaaagagactcaacataaattcactaaagaaattagatatcatagtatattactggacccatctcgaagtatttttttgcattagtcacaatgaattcgtactactaagacgtgaatgtgaagattaatttcgtgggaggaagccaagattgttgtcaatcacttttctattagttacgttaagtgaaaacctagttttcaagcactaataatcatttttatcgaaatagtaaaaatctcacatttttgatagtggtactcctttgtgaaatgtcgcccggaccacctcagaatatttatccccactcgtcacaatgaattggtactactaagacgtgaataagaagattagttttgagttaaattttgttaaaatggcctcctaattaaataattgaaaacattcttcggataaattttaataagtttttttttcttattctttcacttgttagtgttctcttaaaatctcacattacacatctcgaaaaatcctaaaattttacggaacaaagccaagaccgttgtgaatcacttttctattagacacgtttgagataaaaagtagttttcatgcactaactagtcataatgaattcgtagaattaagacgtgaatatgaagattgagtttgcgttaaattttgttaaaatggccccctaattaaaaaatttaaaatattcttctttgtaggataaattttaataagttttttccttactcttannntcgttagtgttctcttaaaatctcacccttcacatctcgaaaaatcgtgaaatttcacgtagacaaagtcaagaccgttgtgtatcacttttctattggaaacattgagagaaaaattagctttcatgcactaacaatcatttaaatcgaaatagtcaaaatttcacaattttaatagtgttacccctttgtgaaatgtagcatggacctatcttggaatatttttttcccactagtcacaataaatttgtacnnnnnnnnnnngaatatgaagattggtttcgcgttaaattttgtcaaaatggcccctaattaaaatattgaaaattttcttcttttcagggtaaattttnnnnnnnnnnntccttactcttacactcgctagtgttcttttaaaatctcaacctacacatctcgaaaaatcatgaaattccacagggacaaagccaataccgctgtgcatcacttttctattggacannttgagagaaaaagtagttttcaaggactaacaatcattttaatcgaaattgtaaaaatccctcatttctgatcgtggtacccctatgagaaatgtggtccggacctatctcggaatatttttcgccactagtcacaatgaattcttactattaagacgtgaatatgaagattagttttgcgtaattttttttgttaaaatggcccctatttcaaaaattgaaaatattcttctttttagggtaaattttaacaagcttttttcttactcttacactcgttagtgttctcttaaaatctaaccctacacatctcgaaaaatc

SEQ ID NO: 31772 - DNA, 3758 bp, Cannabis sativa
  modified_base (1274)..(1276): a, c, t, g, unknown or other
agttaatgattagattagatcaaattaataattttgatgtaacttactacggtaacagatatattttcgatcaataaatgaataaagatgtttatttcaaaattcaaaattgagccgaatttactagcatgctgtcaatttaccatcaagtgcatataaaaggtttggtggaacccacagccccaaactgacaaaagagcacacttgcaaaaacgtataagtgaccaagagtaataagtctgctcggtcaattggggggaacctatacctgtaaaagcatttggtaaaaataaaacaaacacagttgcatgaaaattataaacacagaatgaaattcattaaagataacaaaagcatgtaaaactgggattaaaggctgcccaataaacccgttgtctgaaaaatgaaaaataattccaagtttaaagaccgcttggtcagtcactttgtcttggaaaaggccttatggccagacagataaaaaagagagataaagaaagtattcaaatggctagagtcacatgctctttatacgggtcttctgggtcagcttgaacttgaggatcgtttgtctgagcggggggcacgtcaacagtctggccaaaggtgaaagtggtcacctcgggttccctgtaggccacctgagaagcgcaatactagagaaacatgtctttggaattgcccaaataatcaaagtttgcctggggattagccttccaaaagtcatagaagatctcgagaccagctgtctctaaagcatttcctttccctccaagtctcgccacttcagctctccactgcttggcctctgatttatacttctcaacctgagcttcaagctccgcctccttaatcttcttctcttcttccaacccgtggaagacaactcgaagaacgtccctttcttcttgaaggctggtcacttcctttgacaaggaggcaatgggagtttcaagttggttggaagcctgtagatctttagtcagctcggccaccttcttctcagcaacaagaagtttcttgttaacctctcccagttccatccggacacccccaagttgaaccctggccatcggcatccttcctagccaggttcacttccgcccgcatagtattggaaatggcagcattcttagagggagccgatttagaccaagaataagtgtaagctatcttcagaccagtctataaagagaaagaatgctaaaatctgaactaaaggaaggaggacaaaaggaaactatcaggaaagacttacccttgcaaactccttnnnagctcctcccatcaccaactccagggaaaggtcattgtttgccccagccagatactcgtttgcctcagggagcgaccgagtcacatattgaatgagcatttctttgcctcttttggtctccaggtgtagtaccagaggtggggcaggtgccttgattagctaggattcgcccttcaattgctctggcctatccaagctacctcctcaagaatccttgaacttagtcattctagaggtaggagggtccacaacaatttgttcctcggagagatcaatgaccgcctcagctagtatcttctccctggacagggttgtctcaccgcccctgggctttttagccagaggagataaggccgagcttcctcccactctcttctttagagcttcgagcattttctgacacatgtctgcatgaaataaaagcaacatggttaggaaaaagcatgagaaatatgaaaacataataatcaagaaggttaaaagtaagatggagtatcctgaactttggcagaagcatctgtccgagctagacctgatgtggcatcatcatccgacgagtcttcttgctcctccaagatggctttcccctttcctactataggagtggatggctaagcaggtaaactgggctccctgatctgaatcgtatgttcgatgggcctgtgcgtggctagaagttttccttttcagtggtgtctcctactcttcctcagcctcatcctcctgctcagaatgctccaaagcatacttcctggctcctgcacctcccttcaacttagcctcacacttcagttgaatgggttcattctcttgatgagctctctcagcccggccagcactagacctcctcttcttctccctcacaagctaaggaacaaaatctgatagataaagcaagtactccacaaagttggcctccgaggtcaacaaagtgatattctgggcatcatctggcagctgagcgatcctttgagctttgtccctaagagctagcgtgaaggttggatggtaataaatagggatctgctggaaccgagtataggtggtgcccatgccttccaccatgtaatactcgtcaacaaaattctcaattttgctcacggcgttgtccacaatccttgtcaaccacttgaagtcaggctgagagaattagaaataccccgacctgccttgcttgggggtaaacttcaggttaaaaaaccaactaacctcatgcggagaattcacgccccacttctggacgacgtagagaacaaacagggcagacaaatacttaatgcccttgggagtaaactgggtcggataaagaatcgccaccttcctgaagtatgggtgcaaaggtagcattgcctcttgtttagagtgggcacccgaccaaaccacaccatccccttctttggggtttgaggctcggtgatttgaggaagggacataacactctagctcccccagatagccggactggtccagatcccttaggcgtgcctcaatgatcttggacagagggctcacccatctagcacctaaggcaccttgcctcctgtatggaactgcagcagtaagctcctcagtgacgtagtccactccttcaaccaggacatcaccgtccgtatctgctggctccccatccttgttgtatcccccaaaatttggaggtgcagcctcctcctcttcctccgcctcagaagggctatcaggacggacatcctcccgttcctcaatttcctggacttcagcgtccccttcatgatccccctcctccagaacgggtggatcctattcagcgctggataatgtggcgtgttgggccatgtgaaggttggacgcattgaccttacgcatcgtttgctttgttcgaggcatcatcctttggctggatggaaaacttgaagtggagagcccgtcacttgaagaggatggactggcacgaagacgatgatgatcctcgtataaaagttgaagcaaatcctagtcacttcggtgttcgcttccctaaaactcaccagggttcatctacaaaagaaaacacacgagatgagtatttggttcggatatcgaacaataaataggaaaatatgctgaccaggagtacccaacggattaaacaatggaaatattcaacaataagtcaaaacccaaaagtttgaaatttttgggtttagggcaaaatttcacgaaactttgaataagaaaggtgaaagacagacaatttatgatcagagacgagcatcatgaatcgtgaagtcttacagattattgtgaagaaaattgcaaagttttaaacgtaaattttctacctatcttctacaacaaagtcaagaacgcatccagaaattaagcatgcaaagtaaaagaggaaggaatcaaaaacttactcactgtttgatgtctgagttcagtcaaaacgaagctgctcggatggttcatatggaaatctcaagacagacttgaagtggaaatctctctttttgctctgattttg

SEQ ID NO: 31773 - DNA, 1737 bp, Cannabis sativa
  modified_base (723)..(726): a, c, t, g, unknown or other
tggaaccagaccgagatcttggaatggtaccgggacctaaacccgaacccgaactcgaaaccagacccagcctcggaccctaaccgagaccaaaactcagacctaaatctcgccccggacccaaatcaggactcgaaccaaaactcgacccgaagccataccccgttaccttaaactggaatcgaaactagaagcggatcaggacccaggaataggaccaggaccaggacttggacccagaccaaaaactataaccggacctggacccagactcggacatagacccaccccgggattgcgtccaaaacctgaacctgaacctaaaccgggactcgggacccgaacccagacctgaacttagactcgaacattgaacaggactcgggacccagacctgggattgagacccaaaactgtacccagtctctcggtcccacacctagacccatacccagagcgggacttggtgcatgaattgaaactcgactggaacccgtgattaggatctagatcttgtcccaggatccgagaaccagggcttggacaagacccatagtcaatgtcttgatctgggactcggaaaaagactcgaagctggaccaatatctggaaagaccttggacccgaaacaaaaacttgaatcagaatgtgaccaggaccctggaataggaccgggactgtgaccagtacctagacttgggcggggacccgaattacaccagnnnncaaccccagaactcggcctcggacccagtcctcgacccagtcccggaccaagactaggactgagacttgagcccgaaatcgagactcgatcccggaatcaaacaaagcccctgacctaaattgggattcggacctagacatggacacgaacccagacccagacccgaataccgacccaaacctagatcgggatcaaaacactggacctagacccggacccagacgtagacccagacacgaacctgggacccaaacccaggaatcgaacctggacccagactgggatccaaaaaacccgtacccaaactcggaggaagaccattacccaaccccaacctagacccatgcccagacccggacccaaacccagacccgcaatcataattggaactatgactaggacccaaacttgagaccagaattgaacccaaaccataacccacacttagaccagaacctggaccgagaccttgactaggacaggacctgagacttgggacctgaacctcaatcgagacccggaccgggacctagacctgaccaggtcctaaatcctcgccgagacttgagacccgcaacccaaaccaggatcaagaccccaacaaggacccaaacctgaacccggaccaagactgggatcgagacctggacccaaactcagaccgagacctagaataaaataagactcgggacctgaacccgaaccgggacctagaccaggacctaggaatcagacttggatgggggacctagactagggacctatgccccggaacccagacccagatctaaatacgggactcaaacctgaaccaggacctgacctagacccacgattctgaatttggacctagacccagacccgaaacctgcccccgaccaaaactaggacatgaacctcgacacgaacccatattaggacaaaacccaaactaggaaccgaacctaaaatcgatcccgaacctgggacccaaacctaaaatcagacccaaacctagacctgcacccgga

SEQ ID NO: 31774 - DNA, 1999 bp, Cannabis sativa
  modified_base (1941)..(1959): a, c, t, g, unknown or other
actacactaattagtcttaaattttggtttgctttgtggtgtggaaaagagatgattcatacaaattgataattatggtatttttccaaaagtttacaaaatgtggtttatatgttcgaagataaagttaggggattgagcctccgaaaatttattgtttagtcctattcctaaatcataaataataaagtttctattataataattattaaaattaagataaagttgatattttaagatttaattaaattaaattatatatctatctaaaacattattttgagcaaaattaaaacattttaactactgttgttgtatttcttttttaacttgtataataatataagtagcaacttatgttttcttcattcaacttatttttcttagataaaactttctctgtgtttatcaaatgtcaaatttttagtatgtttaatactagatttaacttttttttaataaataaatactacaattaacttgaacacaatatcactttgctattccatatttttgctttttatattttgctattacatatatttgctaatgtattagtgggtcttaccatttaaaatattattttagagatatttgtaacaaccactcaaattattatatttattacttaagtatctaagttatttttagcagcaaaaatatcaaaattattatatttgtagcacataaatatctaaattattttttttacaatcaaaaacacctaaatcattaacacttaagtacgtaagttgttagttttttattattaaagtacttaaattattaacagatttgacactacgtatgcaaagtacttaaaaaatagtagatttttttttttttacatttttccatatgtttttttacttacattttttttttttttgaaaaataacgttatatttaagttgcaggaacatagtattgtagcaacaatctgagaacaaccataaaacgattgttcatagttttataaagaaaaataaggaaattagtccttaaaaatatttaaaatactgtagatccgtaataattctagaaataatttagttctataaacatataaatttgaatatctttgatgctaatcaaataatttagtacaattattccattcaaaaaaaaaaattagtacaaatattacaagcattataatttaaatacttttgctgttaaaaaaataatttgagtatatacttaagtactacaaacctaatactttaggtattttttgctgtaaatgttccttatttagttttgatgatataactatctatgaaatagaaaatcttgtaaaaataaaaatattttgaaattaatttttttgtgaaataattttaattttttttaactcatatcctatttaataaaaatattatattataattatatatatacaaaaattaatatgcttatatcataaatatatatacaaaatatttatactttatttttagtgttataaataatttataattttctaaaaaatttataggttgactaatagtagtaatatcgtaaaaaacttttttggtgcaccgatgcacttccttaatattttggtattcaaaaagagaattttttagtcaattaatttttttcatagtcgtgtacattgtagttatttaagacatcttgcaaaattttaataacttataataatataaaaagtaatgttcaaataatccataatgcccataaaaagttgttccttacacttgtatttttaatataataataaaatatgtatttataatttgcacaataattaagatgcaaaaagaaaaatatataaattcttattacaattatttataaaagttaacaaaaatataaataaaattgaacctggagagttaggcacgtgcattgcacgtgtagcctcgcctagtatataaaaaaaatagctactcattttttttaagggtaaataccatnnnnnnnnnnnnnnnnnnnaaaagttacagattggaccctgtgttttgttaaatgacaa

SEQ ID NO: 31775 - DNA, 1955 bp, Cannabis sativa
ttcattcgaattcaatcaataaaactattctcctttttttctgttttctctgtctttagtctttacccactattaccatccttaagatcaactcttggagattcaagatcattattaaaattaagagattgtgtaaaacgagaaatagacttactactaagcttaatttccataagaaaaataatgtgggggacattgttgttgaatgtgcaatcaaaaatgtttgaacgcgaatttttaattaggatacaatttcttttctcttttataaattacacttaaattatatattttttattaaaaataatgatatttattgaataacatcaaaaaaaaaaaaaaaaaaactaatgatacaattaaaagtacaaattaaaaatataactaaatatttataggtaaaataaacttactatattttcaaatggtagtagtgtttgtcctaaacggtggtggtgatgctgtttttgtttctctctttttgtgaagagatgacacttttttttaatgttgctggtgaagttgtattaaactgggaaattataaattaaattggatattattaatatgttaaaacataataattatttttgttttttttttttaaaaaaaatatctcagtaaaggcattattattattattattattattattatggaaacgtgtgaacccaacactcaaataaaagttttaagccttctctctctctctctcccactcactttattttggttttaagatttgtaaaagccactctctggagccaactataccatgcccttagaatttcttccttcccagcttggaaaccaccatactatcagccattttcgtttctcaacaaccccattaatttgaatgtttcacacattatatcaatcttcttttgaagcccataaataatacatatatatatatatatttaaagaaatctgtactgactgtgtcaccaaccatccccttcaattacacaaatatgaaaactgtatttattataaaaatatcagctcttatcagtatataaaccagtcccagtttcaaagtcagattctaaagttgtttgtaggtactaagtctcagaataattattatatgatgtgggaaaggagaaaaggagaagcttccgtgactttaattgtggcttttggtttgttccaaacatgcttttccgaaattaacagagcaagttttcctaatggctttgtttttggtacggcttcctctgctttccaggttagtttttcttcatatagaaacttttggggctttcagatctttttcccttttggtttaaactaataatatatgtgcatgggctggtctacctctattccatgttatgagatatatcttttccgagatcttgtttgtttcctgagaaaaatacattaagacaaacatgctataaaagtaataaccacagccattggttactgtacctgtactgtctaatcctgttcacccgtgattagatttagatagaagctccaacaaataaaaaacgacatcaaactttaacataatctaaataaatagaagataaacacaagatttcgttcttatttaatttctgtatcgttttacagatacatcagaacataacagcatcgatctatatagaataaagaaaaaaattgttgagatagataaagtgaagtaggggagatgaaaagtggaactatttttcgttattaaaaatatatattatttgaaaataaaataaattataggccattaatatcatagcatggtggtgtgtgcatttcacataaaatcgacccgttcgataattggcgattttatggatcacgtatccgtgtttttagtaacccaaacgaactattctcttcgctcacttttcttatatttattatttttaatttcccaacctgattcattaattaattattatttcgccattcttctaataaatattatatttaacttcccaatt

SEQ ID NO: 31776 - DNA, 4657 bp, Cannabis sativa
tctttagggataaaatccatttccaagttgtagcttgtttacaatatttggtaaattgtcactgtttagcatactggaagattctctgtaaagagcaaagcataggaaatgtatgttgtacatacagaaagaatcatattccttccaaccatatctctaatcatcttgatatgtaacccaaagctgtcctgttcaaaaaaaaaataaaaaaaataaagaaatcccatcatcaacagctaatatcatgactatatcatatgaaaaatagataataagaacaatcatatatgggcaagaaatcagaaaaaccatatcaaaaaacctagtagcttaagaaaaatagatataaattcaattactcacgagtatatgttgaaaatcaaataaaaacaaatatattgtcatgtattgtatgattttcaatatagggactcacgttgaagagtataaatgtgagctcccatagatgaaatgcaccctctttaggacccgaaaagttacaaaaaccgaacgacggaagaggtcgtggtggtggtcggtgatgaatgtgttgacggaattccctggctgcttacaaaactacgacagtgagatgctacgattcctcgggtcttcggtttgtctccttaaacttccccaacgcttccctcaaactatttgatgccctgcttgtacacaacaagttcggttcccccctcaaggcctttctattctcttcaagacgattgatctcctctctctttgtacctcccaaaaccttatccctaattctattacctctgacatccccgaaagtctccctccaagcacttctttggttgatgatactgataaatccaaaagacaattacgacattgataatattgatttttcatctttcctttctccattaggtttacagttttaaggatttgagacgcaaaaggtgatgataagaccaatttatatgctaattgagttagagttttaatttaacgtgagagttaatagcagttttaatatataaagataaagatatatagattttatagcgagtgaaaaacaaagctggtaatccaattgcggatttacatttgtactctttgtcgactgtacaaaaaataaaaaatatatatcctttatgtgacaattctttctacggagtaaacttgtatagagtgaaaagtaattttctatctcaactataaattcaatgcaataaaattacttgtactttttccaatacattcaggttaagcacacaagaacctcaaaaggctgttctgttttcaatggcagacatggttttgctgataaaatcgtcaactgtcatggtgccaatatctccaacaaaccttgttcgtattgtaacagtacctgtatcaagctccttgcctcccacaactgccattaggggaattttctgagtttcagcatttcttatgagcttggggaggcgctcaccgtggcaaacttcagctcgaattccattttctttcagtttcttggctacttcattgcagtattcaagctgtgaaaaggcattcattacacagaatttaataatcaacactctccgcgatatgtaaaaaaggactaacctaaggtttgcatattaaataaatagaacaatccaccgactcccagattttgtgccaaattcacaatatacatatagagcattatggtattgataatcaccacgaataatgaatcagatttcacaaaagagaaccccattttaacaagaaaacttaaagaaaacccatagtttacatattactaattcttgccaattactcttaagtacttgcctgtttatcagtaactggcaaaattcgagcttggattggagaaagccacagtggaaaatccccagcataatgctctatgaggactccaaaaaatcgttctaaggaaccaagcactgccctgtgaatcatgataggccgcttcttttctgagttagaatcaacatatgtgatgtcaaatcgttgtggaaggttaaaatcaacctgtaaaattaaagaaaataaaactcagccaattgaacacaagaattagccaccatttcccccccaaaggagatattatgcatctagtaatcgaaaaggtaactataagtataaagaagacatgtaaaaagaggaaccgaaccaagatgatataaaagctatggagctatgcaaaattatgctgattaaatttccctcttatcttacaaaaacaaaaacaaaaacaaaaaattgattagaatagtaagttgatgaattacttgtatggttgagcactgccacttccttcccagagcatcctcaatcttaagatcaatcttaggtccataaaacgcaccaccaccttcatcgatttcatagctccaacccttgtcgtctaaagcatcttttagggcagatgttgctttatcccaaatatcatcgtctcccacggacttttctggccttgtagaaagattcacctcatacttactaaatccaaattgcagtagcatttcctctgtaagatccaggacacccctgatctcatctttgatttggtcacttaagcaaaatatatgtgcatcatcctgaaaattcaatctgagagttacactgacaagctgctaaattttatgcatttggttaaccattatagtcagtaaggaacccccagacactattacatggtaataatatgactaaaccaaaacctgcatactatttgagtaaaacatcctgttcaaaattcaaatagcccctacctcgttaattgactttagtaaggagaataaaaaatatcacagtaagttcaaggaaaaaaaaaagtgatgtgtatatacctgagtgaaccctcttactcgaaaaagaccatgcaaacttccagataattcatatctatatactgttcccaactcggcaactcgaataggaaaatcctgataagagtgttgctttcttttgtatatcaaaatatggtaagggcagttcattggtcgaagctgataaagttcatcttcaatgttcatctgatcatacatattctccttgtaaaaatctatatgcccactaatcttccaaagatctgcttttgctacatgtggagtgtagagcagatcataaccacgatctatatgtatttttctccacaagtcttcaataatgttccttacaacagcacctttgggatgccaaaacactaagccccctccagcatcattctgcaaagttcagcctataagctaaaaaaatttcaacacaaaatctattttgatagaatgcagaaaacacaatgtaatacagaagaaatctaacagaactcaaatagtgtacctgtatagagaacagatcaagatcttgaccaaggcgtctgtgatccctacgtttagcttcctctttgaagtgaaggtaagccttcaactgctcttcattttcccatgccgtgccataaattctctgaagcattggtttattttcatctcctcgccagtaagcaccagcaaccgattcaagttcaacagctcttctgttaattatcccagttgaggggacatgaggtccagcacaaaggtcccaccactcaccacctaataatatttagtccaggaaagaagatgacattagatatgcttaaatgaaatctcacaaaaagcaagtaaaattatacagaaaggaaataattaaatatgggaatgtgatgccaggaacacatacaaaagagcccacaaactgttttttaaaagacaaacaaaaaaaatttgaagaaccagcgaaggcataacttctttacaagtcatgggtttattgttatcaacattaccatcaagttctatcgttagtttgatagtaaagtattagagtgcataatatatccccaaaaagtactggaacactgtcttttgttgcatattgtaaacttgataagtagtagaaaagaacttggaatagtaagcagcgtgattagtagtccttaccaatgtggtagatggtaattggttcttctttaatactgtctaaaatttctaatttatatggttcattgagagcctttattctgctgtgtgcctcatccctggaaacttcttctctaacaagtggcaaatttctagcaataatgcgatcctacagataattgcaaataatttaagtctatatcctaaaaacataaactttttcagaacgttaaagcaaatgaagattaaaggaaaagtgagcttgtctaaccatctccttcttaattttcttcaagtctttgtcagttaatggttccatatcaaaatcataataaaaaccattatctatccatggcccaatcgtaacttttgcatttggaaaaagcttctggacagccatggccattacatgagcacactgcacgagtacacaagtttcaattagatggtagacccaataaaaataaaaccacacacagacaaaagtgataaatttaacagaccgtgtggcgaatcctgagcagcttctcagacgactcgttggtgggaagaacgagaggtttttcagcagaacccttttccagtgggtcgttctggtcagaaagtaaggtgtgggatgcggaatcggtagcgacagcggaagaagtggagaggccatttctggtcttgtaaagagccaaagccctgaactcgagcttgggccatgaaaagctgcgactgagattggagtg

SEQ ID NO: 31777 - DNA, 1856 bp, Cannabis sativa
cctcgttcccaggtgtaagggtggccgtggagatccatatcagtgaggttgcaattacaaagaacctcctggaagccttcgatcaagtgagaagggtacggacgccctccttttttctcaccttggcttccaatgttgttaatgtctcctatgatacaccaaggtaacagagattcggtggagagagtggtgatgagttgccatgtcttgaatcgcagactacggtttggctccccgtatagaccagttaaacgccaaacaggggagttgggcatagcaatttcaatatctatgtggttgtgagagaaaccgagaagacggaccccatcattgaatctccacaaaagagcaagcccacctttatgaccttgaacctctacacagtaggctccctcaaagcccaaacgaattcttagtctttcaataacatcacttttgcacaaagtttcacttaaaaaaatgaatttgggtttcttttgaacaacatagttctcaaggaattgacgggcccgtgggttcccaagcccacggcaattccagcttaacgtactcataacgattggtgggcctggacaccagaacccaccatattcaagttttttgaaacatcttcaacacggcccgaaccaacagcaggcccatttttgtttttagcagcaaaacgtttcctttttaactcagcttgagtcaattccacatcagcattctgactatcataaagcatgatccctttatttttggtttttgatcgagaaatatcaggggaggatattctcataaaaccaggatcagttggcatcccgtaattatcgcatggaggattcgtgttcacaccaggggaagaagttgcagtcgcagccttacctgaccgtaggaatggtgaaggtgtaaaattctggtgtcgacggggaagagctttcattcctattccataaggtttcacgatcagatggggaggtgtgtcaaatgtacgcggacagagcctctcggagtgtcccattaagccgcagataaaacagaaagttggaacactttcataacaaaatgtagcgtaaaacgagtcgccatctcgcttacgaaacttcattcttcgtttcagaggaagatcaagggaaagtgttacccgacccaaagatattctcgccataccccagtaaagttattcgggtctaatttgatgaaagtccctgcatagttcgcagcatccttagccaccttcatggtcatgaatccattttgcagatcatggatttgtaaccatagatcaagggtgttaagactaactgtacgggggttgtcaccattattgagacgagttataatcaattgtttgcgatcatatgtccaagggctgccttcaatgacccgcttgatgtctaactcatggtaaaattggaacagaaactggttttgatcaagttgcttggcatacattcccttgccaggtttccatagatcagccatcaaattctggaagatacggaagtctgaaaccttccctgtaagcatacgcccaacaagacaccatctagagtcaatagccagatcatcctcttcatcattttcttcattttcttcataaaaagtctcctctgattcttcctcttcaagttggatattcttccaaccttcctctatgttagccacattaatactgcttgaagccataacaagtcacaacgatactggccacaacagagattcacgaagcacacacgacagattgggacaaaatcagtaaaaacaaaaaagaactttaaacgtagcaggcacactcaaaagagggacagagcataactctcaaaaaagatagacacttttagattaatgattttactcaaaattacatagttgtt

SEQ ID NO: 31778 - DNA, 1706 bp, Cannabis sativa
gccccaagatcacataaagacttctcaaattttaaaccaccaatctcacaaggaattgaaaagctacctggatctttaagcttttgaggtagcttaattcttctgaattatggccctacattcctcaattaagctcacagtatcataatccccaaatttcttcttctttgtcaacacctccttcgtaagcttaacattattaggcatctgctctaatgcatcaatgaaaggaatgttgatgttgatttttttgaaaatttccaagaacttgacaaagtcctcatcaagtttcttcttcataaatctttaaggataaggaattggcggtttatacattggaagatcttctttcttcatagacttttcaataggcttgtcttcaggagtctcttctttggcttctactatgtgttcaacctcaggaccagttgacttggcttctacacccccatcaagtactttaccactcttcaatgagatggcattacattgttctttcagattgacaactgtatcactagggaaactactatttttctgcaaagcactcacaacattggccagttgtcccacttgcacctctatgttcttcatggaagcatctatgttagaaatatgagtttctatgttgtccaaccttgtttcattcttgttaaacctcctatttgattctatcataaaagtattcaaaatatcttctaatgatttcttttcaagttgttgttgggcattaaatctaggaggtggttgcaagacatttttagtattaccataagaaagattctcatggtttctcaaccccagatgatagtagttaggcattggatttcctgtagttgttattgtaaggtttattgaccatatattgtgcttgttttatactcatctcaatcccttgtgatgtagatgcaacagcaacattttctacagttgatgtattcttctgattaactaaggctgccacttgattaaataaagtagaaatttgagctgctatatttgtcataggatctacttcatataacccggccacctttcttggagtatttctttcattaggccaattatagctattagtggtcatctcctccactaaattaatggcttcatttgcaggtttagacaataacggtcctccagcagcaacatcaataatagtcctagttggcccattcaactctttgtagaaaattgaaacttgcttccagctctcatagccatgttgtgggcagcgacgtaataagtctttgaatcgctcccatgcttcataaagttgctctgaatcaagctgtctgaattgcccaatctcactccttgactgtgcagactttgatggagggaagaatttcaccatgaactttctggccatttcatcccatgtagttatagaccctggctgtagagattgtaaccaacttcttgctctatcccttaaagagaaaggaaagagtcatagtcctatggcgtcatcagtaacaccattcatcttcacagtagcacatacctccagaaatatggctagatggatattgggatcttaagtagccaagccaccaaactgattatgttgcgccatattgattaaagcagcttcaattcaaaattattagcagcaatgacttgattagcaataccagtcagaatttcattcaccacatgtaagcaataatcacgaacaaccggtggtagtgcatcagctgcagcag

SEQ ID NO: 31779 - DNA, 1624 bp, Cannabis sativa
  modified_base (145)..(148): a, c, t, g, unknown or other
  modified_base (1588)..(1598): a, c, t, g, unknown or other
ctaaattcgctaagtgttggttacactgtgcggatcgctgattgctttgcttcgagtatgcatatgaggtatcctgttcggactatattctgtgagcaggtactcgtagtcgagtgcacgtgtcaccatcatgtgatgccacgtnnnngtgcaaaaattgggataacaaggtacatcagcattaaatgaccatcttttccacttctattttgaattttgatccgtggggtcaaacatctctttgatctgaaaaaggaaccaccttttcattatttcctccattttagaaattctaaaaaactcaagcttccttgctaataaaccaacatcgagtttgctcgagaatttgcatgccatctctgtccttgacatattttctgcgagtttcctccgacttaaattctgactccacacgctcgaagagaccctcaccacatctaaagattcgcagatcgaagagttgtatttcgttccaaaccccaactttgaagagtaagtagcttttcttcttggtatcctttatggttattatgctgcatttttgggtttaattactgcagtatttgtttatatcattgtcgtctcatttggttttagcaacttttatggtcaaactgtatttgggtcaatagtaggggttaggcaatacgtaggtttttaagaaccttcaactcaccaccttcaggtttgataaaattctttctagggattgggattgctttcttcttgtagcaatgtcccaatttggttcagaaatttattgtccaaaagatttagaacttgaacttcctacagaatcagccatcccttataaacccaacccttcaaaacctacatccaaattagtgttaaacgatagtagggtaagggaacacttagtgaaagttcatcaagaagataatgctattcgccacaggcgcttcttgcaagaaatcatcaaaggcaaatgccgtttcttgcgagatgcagcttggccagaacatcccaaagtgtcttctattcctttggctaagcctttatttttacccaaagtcactattgcttttgaaccaggtgacttggactttgaaataatgtgtccccagccacgtacatcaaagactccccaggatcctaacgtcacctttgaggccgagtcaatcgaatcaaaggtgcaaactatctcaggctacacaggtgatatactgaggacctgcggaatcaagtatgggtgagtatgccaagttaggtcagtgcaagctattgagcttagttgctaccctcatgcgcatcttacaggtgaggcctctaaaggagctagtggcaagaccagcaccagtggctcgactagtataggttcatggagccttaaacatatcagggcaggggccataattcccctccgtgactatttcaaggattacgtaaactaccttagacttgccccattccaactaaaccctgtctcctacagaattctcgccaatttgaggtcttgtataaattctaaagtggtagtggcctacgcctatggaaatcgactatctttactctgttaagattgttcctgttgggatttatgcactaaataaaacctatttcaatatannnnnnnnnnntagttaataaagatcagaaatcacat

SEQ ID NO: 31780 - DNA, 1319 bp, Cannabis sativa
tattattgaaagaataataagttgttgaaataaaatggcaaaattataactagaaagtggtctcatttagtggtcgaccttaaagtgatttttgaccaataattttttttttaaaaatgcatataattcaaccctaagccctagttgaaatactatataaggaacatgatgctctcatctcatccaactgaacttgacttttcaacctaccaaacctagttttcattctctgacaactagtagacgagagacactttctatacatttttcaagcctccttcattgttcttcatattcgaacccttaatgatagagtgacatgcccacacatagcaagtcaagtactcaatgatagtgggtaagactgttgcaaccaaacccaaaagagagaaagagatccaggctcagaccttgataatactctgcgacaaaaaagaacaaggattagatatttgagcggaagaagtcattatattccgctgcaactaatgtaagattttctaaactctaatgtgtttaatttcattgttttagagatattcatttttaggatgttaattaacatacttgttagtaaatcaagatcctggtaaaatattcccaacatctttctccctttgtttgatactccccatatatttagtttaccacaagttgggaatcactgtaaacttcaatgttttgggccccaacttctttagccaatcgcaagctagctatcatagcttcgtgctctgcttcgttgttggaagctagaaatttgaaacaaatggcactttggagctggtgtccttacgaagaaactagaatgattcatgctctggctcccttttcatttgaggctccatcaacgtagactttctagagtggaagtttcggatctggctcgtccagatgatcattgatttaagagcactctaccacaaagtcagcttgggcttgtcctttaattgagactcagagctgatactcaatgtcaaattagttccatggcccactttaacaatcttccaaatgacttcaatttttgtaacacttagcggagagggtgatttgttaatacctttataacatgggcttgaaagtagggtcacaactttcgtgatgaaattagcaagcaaaatgatagtttttctatcatgggatacatggattttgcacctagcagtcttttgcttatgtaccggtagttgaactcttccttcttcttgcactagtggcacttactatgtgattgaacacagccaaatatttggatggtttgggcccgttgggtgataactctatgaaaatagagttatttatatctttttgggcat

SEQ ID NO: 31781 - DNA, 2582 bp, Cannabis sativa
caaacacaatgaagccagctgatacctcttcataagcttattttatattcatgtatttgttttgaatatgcgcttattactcactggtgtatgggactcaataagaaaccagctaagtgtctttatttttgtttttgcaacatttcttgggttttagataaacattgtggaagcgatttacatttacacatacacattttgaataaccgtatataatataaagaaaaaaaaaaaaaaaatcaaacagtatttggggtgggtgtgtatgactgaactaatgtatattaaataggcttctatcaaaaattgaaagaaaaaaaaaaaaagctggactgcaccaaaaaaactctcttatttatttaaagaggtagcttaaaaaattgacgcgacaattggttggagagacagtaattggtgggctcgtgcctggtggttgttatggaaatattactagatcagatctctgacgggcataataaagtaagacacaggatagggtgaagaaaaatgggtcagtactctacactgactgtgacacgcacacgacaacagtgaagaaacaagtaaagggtgtatctctcttttaagggttgaattgtataatcaccccataatttatatataaactattctaacattccaaagcacggtggatatcttttctccttttggccttttaggtggcggtttgtcgttctcttttggccgatttgtcgttagtctcaattaattttgttaaacgttctgtaaataaagctgcacattgtcttgctcgtagctcttgtttgtatccagatcgtatttttagcgaggatgatgctcccgctgattttctttctattgtaatggttgaatcttcttattaataaaattactattttcccttaaaaaaaaaaaacattccagtttcaaaaagaaaaactattcaaacattaactattgtattgattatattgcttaattttatttgcctgattaatatttttaaaaacaaaattatgtgcttctccaactagtatatgttataagagtcttattcacgtccagcttgtatctcttaaaatgtcctcatttatttgaaaccctttaatgtcttttcaccttaacatttctctatcacatcaaaaattgacacgcattcattgaatcttatcctccttcaattcctcaccgcctcactctctaaaatgcctaggaaataaagcgcctcagttctctgacgggcataatatagtgagacacaggatagggtgaagaaaaatgggtcagtactctccactcactgtgacacgcacacgacaacactgaagaaaaatctgttgaaacccacaacaataagagttaatgatctttattgctgtgaactacccaatcagataaatgtatatctgttttcttccattccattatgagtagggacattaattttgttaatatcccacctcaaaagtgaaaagaacatgttatgagcaatcatataaattcactctagtagtctcaccctctcatttcagaacaaacaaaaatggcacagaaggcatttggatgggcagctagagatacttctggcattctctcacccttccaattttccagaaggttactagttagttactacttattattacttgatattcctctgtttctttttcttttttgagtacatatatagctacgttttagtaagtgtatggttttgatgatgagctgagatgaactgaaatcatatcgttcttcttacatataaatattcaaatgaaatttgtttacatacattttgctagtttgttaagttaagcactccaaaatgtcaaaatttaattgaaaaatgtcttcaccagacttttgttaaaccactcatttaaaattctacatctgaaattaaaagggttgagtattctttattgttagtattgtgtgggttagtgcatcttttaatctcatccgtagaatattaaatgaacagtttacaaaaaatccccacttatgggatgttttccacactcccactaaaaaaataacttatgggtgtgtttggtacatgggacaactatgtggaattggacaatttagttcatatgtagtacatttttcatacttgggaattagacaaaattatttcatactctaatttagtccctttggttaggactattttaacccaacaagaagatagtttaaaataatttcaaagggactttattttttgtttttaatttttttaactaaatttaaaagaatatatatgtatacttagtgccatatttggtgggttgcaggggaaatggagagaaagatgtaacatttaaggtgttgtactgtggaatatgccacacagacttgcacatggtcaagaatgactggggcatctccgcttatcctgtcgtacctgggtactatacatatattccttttactataatttattataacaatccaaagcttcaaaattttacaacatattatcacaactacttcagaatggaacctcacttgttgatgagcatatgtacaatatgaatttctttttactaatagttgacttgacatcattccatccccaccaaaaaaaaaaaaaaaaa

SEQ ID NO: 31782 - DNA, 2759 bp, Cannabis sativa
ctaaccaaataaaatcccgcctctctcttattttcatctggcacctgatttctcttttttttttctcttgacataaacaaaacccaccagccctaaaaaaacccatcagcccccaatctcattctcatctcatcggaggcgtcgtccaacctcgaggcatcggagtcagcatcgaccaaccccaatttgttccctctccgaccatgacgacgaccacgaagcatctccgtccataaagtcgttttagctacgaagaggttagcatttgttcccaacttatctatgctgatttttctgagttttaaatttttcatagtatggaattcctttgatttttctgagttttgagatttttcatattcaaaaaaaatatattaaaagaaaatatttgaaatattacagaaaaaagattatcaacaaaaccaccctaagttacaagtggagactcttgtattacataaagaaaaggttgttaaaaaatgtttatacatgatgcaagtactgattttgtttttaattgtttttgaaaaaaaataataataagataagatgaatgggaattcgatatataaataaaaagaatatcatatatagtggtctaattgacgttccccagtgtaattggtctactgtagtagtacaagctagctaccaaaatagattctataaggtgtataaacaataatccaattcaagaaccaagttgattctttggttatcaaaagaatcttgaagatcttaaaccaaacaatcttgaagattttagcccttttagaaatgtatgtatatttgttctttgtatgcgcacgaatcttttcaagagttttgcatatttgtcctcatattgtcaaaagttggtgcataatgcattaaacttattgtactgggagtttggagttgtttctcagttttcatttcatttactagaatgaggaatatttgtattggttggttgttatgctctctgtttttaaagtccatttctcaaatttcctttccctgtttctagttatctatataccgaagatttccaaaatgcttataaaactcaatttggtaatgatgttaagttggacattgatcatatcattttgattatgaagctaagagatttgtcatatgctagctgcatgtgtttttttttctcttttggtgtgacatatgcacattagaattgatcttggtttaataacttacaatcgttattgatattgagtgatcggctatcctagttgttcttttcatctgatatatatatatatatatataaatatatatacatatatataagctgcccttctctagtttctcaataatgcttctttctagttagcttctcactagtgcttcagctggtttcaaggtatatgcaaatatggcattttgctttctgctactaataggccatgctttctcactacataaatatgggttattatatctgtctggtccatcccatttaataatgcaacattgtctctcaatcacgattagacttatcatctaatatgactcactatgtaaacctacaaatataggagactaaatatctcattatttcacacctaatttattattcttgcattctactaatttattcaagagctcatgactgtgccaaattcaacacgtcacttaggcactaaggtatatacaattatttggtaacttgttattttaagtacttttcattcatttataattataacttaaataattcttctctttcttttatagtataaccttgacacctcgtacacacccgatgaaattaatatacttcgagatgaatgggcggaattcattcagttcgagctcagtaaaccaacgcaacattgaagctttggaactttttttttgtgtaggacatacttttgttattgtaattagttctagtataaacataaacatagtactttgttatactaactggtttcagtataagtactttgtataagtattttagtatttaatttttgttgatattttgtcttaattttgaaatcttacaattaagatggagaatttgacaaataatagtaatttcaccctactaataatattgtgtcgttttaaaatcgacactaaaaaatctgaaaaatactaaaaaatcataaataagttttttggtgttattttatagccgacactaaagaaccttttaagtgtcggttataaaatgagaccaaaactctatgatgtcggtttaaaaccgacactaaaagaaaaaacataaatgtatactttaagtgtcagttataaaacgagaccaatactcaatggtgttgttttagaaccgacaccaataattgactttttgtcactgtagaataggtgtcggttttatgaaccgacactaaaagtataagtatcagtttaaaactgacaccaaaagtgtattttgtagtagtgttttaagatttgatttatctgtgtttttgtttgaccttagctgatttttttcaatgaaaaggatagtcaatttgacaatgaaactgtgagtttctttcttctccaacaatataatttttaagttcttgtattctttctctctttctcttctgagtttggtgaagagagagaagtggagtgtagtaagggttagtttgaggctttatatatgagtgagagaggaatataaatcgtgggaagaagcttcgtgtcaaggaataaaaaagcaatatgtgagtaaggtggtcataattacttgagcattcaaatatgactccttcctcacccttttctaattatatttttat

SEQ ID NO: 31783 - DNA, 1375 bp, Cannabis sativa
atgcgaggatccatgggcgtttttactagtggccatgtctgcttgtctcactaatccaaatgtcttccgtttcttttttaaggtggccttttttccaagtatgaataataaaacactaaacatttacttgtccttgagtataacactaaaacgaaaaataaaagttaaacaagtcagtttccagaacatgagtaattttcaagtagactcaataacatgattatgaaaaattttacttatgcataacaatctagaatttcagttcaattacgcccttgacacacttcaatttaatttcatccagcacatgaaacatagaacacaattaactaacaattgaaccactttattaatgccaattacaaccatcaatttactaacccaaaacttcatatgcttgcaatacttactattctccactaatataaatcaatgcacaaccaagaatcagaaggtctttctaggcttccagtgttacacttaagtaagggtagatgaaatagttatttaggtttgcctataccataagcttctctaatcatgtcacccaaaatatttttcacacaatctcaatactcctttttctaaatacaagagatttttttcacaagattgcaacaactttacattgattttttttttttttaatttgacacttgctgtcagatttttctttctttcttttttttttttttttttttcaagttgatgtcactctaaattttttgtcttcatattctctcaattttcacactttttccacacacacacacacaacaaacttctcatccaaatataggttaaggcttaaaaagggtaagtaagataaaattacaggggtggcttgaaaggcacaatcgatccaaaaaatacctaaatcacttttctactcatgcataatttattatttcacctcaaatagcaagcaagcaagtttgagaattttttaaacaactttccacatgtcccaattagcatacataaaccaattcaattgcgagaaaattacctaatatgattccacgatcttttaaagcacaaaactaaaatgagtcaagaatgtaatatcaccaagcacacggatttttttgaaaaataaataaacttttctaatcatgctatctacctactttcgaattgactcataataagaaaattgactcgaaacaaagaaacactaaaaactaaaataacaaaaatttacgttcacctccataaactaaatttttattatagataagggaaagggaacttatacgagcgccacatcagtatggcgatggtggtggttgttgaaaaatttaactaggatacagtccacctcttgcatctattataacgtccccgcttcaagcctccattgggtccttacacc

SEQ ID NO: 31784 - DNA, 1407 bp, Cannabis sativa
atgatcgaatgaagaaccaaaaaccgagaaatcatccataaagatctcaatgcaagattcaattaagtctgaaaagataaccatcatacacctttcaaatgtagcgggagcgttacataatccgaatggcattcttctaaaagcaaaagtaccataaggacatgtgaaagtagtcttttcctgatcctcaggtgctatggctatttgatgatatcaagagtagccatctagaaaacagtaatattcttgctccgccaaccggtctagcatctgatcaatgaagggcaagggaaaatgatcttttcgggttggtttgttgagttttctataatcaatacaaatcctccaaccagtaactgttcttgtgggaatcaattcatttttctcattttttattactgtcatcccttctttctttggaactacttgcaccggactaacccatttactatctgagatggggtaggccactccagtatctaaccacttgaccacttcctttctgacaacttccttcatatgtcgattgagtctacgttgtgcatctattgtcggtttggtgttttcttccatcagaattcgatgcatcacagttgagggactgattcccttgacatcacccagtgtccaagcaatggccttgttgtgcgcccgaagtagtctaagcaatctatccgtctccacatcacaaagttaagctgacactataacaggaagcttcttatcttctcccaaaaactcatatcgcagatgactagggagcaccttcaactcaagctctggaggtttctcagtgaatggcacaagctcttttggtactactcccagctcttcaaaatactttatgttcaatggcccataggaatcaagccatttaacatactccattacctcttttccctcttgctccatcaattcttcttcaattaagctcagttctagaggatcatcaatcaactttctctcattcataatgatatcaatcagatcaacaaataaacagttatcacttgcctttgggtatgtcatcgcctttaacacattgaaaaccacttcttctccttgtactcgcagctttaattcacccttctgaacatcgatcaaagcttggccagttgccaagaatggtctcccaaggatgattgggatgtttttatcttcttccatatccagaacaataaaatcaactggaaagatgaagttgtcaaccttgactaacacatcctcaatgactcccctaggatgagctagtgatcgatccgccaattgtagagttaccgtggttggctttgcttcccccaactgcaatcttttaaaacctgaggcatcaagttaatgctggctcctaaatcacatagtgcatttattccttcaattctcccaatggtacaaggaatagtgaaactc

SEQ ID NO: 31785 - DNA, 5659 bp, Cannabis sativa
  modified_base (5212)..(5220): a, c, t, g, unknown or other
gaaagaaagaaggcaaactagaagggcgaattgaagtttgcatgtttttcagaaagtctaaggagaataggggtggattattttacagtcgcaaggatgagaaagagttcatttctgcaaatgccacattccttgaagatggctacataaagaacttcaagccgcaaagtaaagtagcgttagaggaaatgctttcggaaataactccatctaatgttccatcatcttctactcaagtagagaatattcccactcccttggttgaaccaaagcaagttgatacaaccaagaaatctaccactaatgttcctgttcaaaaggtcacgacttctcatcttagtgggagggattccacaaaactagctcgttatggcttgatggtgaaatcaatatggtcgttggtgatggtattgatgatgatccattaaccataaataggcaatggcaagtccagaacgaaaacaatggtcagttatcatggattatcatccaattgaatgtaagtgggtctacaacctacaaagaaactactgaagtaattaccgaagcaactcaaaccgtaaatttttttaaaaaataataatatatagagtaatttttttcattattattttgattattttttatagatattattattgttattatttcacgtagatttgatatgtttttattttgtttggggacgaaaagggagtatttcctcatgcaagtgagaaaaatagagccgcaaagttcaccaaaaggctattgtggactactctggcttaaaaagttgctcatcgatccatgctcatagtaggccacatttatgtttacatatttcctatgtttttatatataccaaaaaagtaaaataaaggaaaagttaattggcatgttaacattatgatgatgtttgtttatgggtctccaagaaagcatgtgctatctcttcctacccagctcatttcttcactaaagcgtgaataaattgctggcttttaaattaccttttgataattagagtccattttagcttactaaaaatataattaaatagaatgggagaaaataggtctacacttgtaaggtaagattagatgtcggtgaaataattaatttgtttcggtatcaggagaacctttttattcaatatttttatactctacgttttaagacgtcttgaatttttttaagaaatttgaaaaaatttaacatacatgtttaaatagtctattgtactcacgactcttttattttctacgtgtgtaaaatagattatttgaacattactttttatattttaaattatttaaaatttctcaaattttgtaaaatattttggataactatcacgtacatgaacatgaaataaattaaaccaaaaaaaatttggaatgccaaaataataagaaatcctttttttagagagtgcattatagaactaccatatatatatataagatacttttataataagaatatttgttttatggttaagaatattttattatactttaattgatgattatgagaaatatgatagtagaagtaaaatttcctacacatttaacatatctcttcaaatttttaataatattttaacaattattcttctattttattaactttttcttttagtttatgcaactttttcatttcttgatttagatttcttttaaattaacaaaataaaaaacaattaaagactagtaatgttttttctttttgaatggttagtctaaattaattttctttgaaataaaaaatattttaatggaggtttgaagacacacaacctgatctcttttctattttgatttgtgaagctaatttattttgtggaggtacccttaactaggggtgggtatctaattcaatctaatatttttctcttcatccgatctaatccaattagtaattggatttggaaaatcatcatccgatccaattcaattagacctcaaaatccaatccaattagtaatttgattatattagttttttaattggatatctaattacacacctaaattttaatattaacattaaaatataaagaaaaatacttaaaaattaaatatgactctttatttaagtttaatattaatacttcataaacataccataattacaatataatataactaaaaatttcaaataaaaaaaataagtaaaacaacaatatttctaaataataaaatataacaaaacatcatgaaaataaatacgcaaaataaccatctattataaatttaacacaaaaaaatcaataaaaatataattaatatatattacatttttttattatataaataaacataaataattttttaatatatataaatgtaattagattggatcggtttttaattggattttgagattgacattcaattagaatccaacatttagcatccaatccaatcaaattgtaattagatatccaatttttgtaattggattggatcggttcggttcaattggataggattggatgttgtctacccctactcctaacaattctactccttcctcatgttgatgataccgggaatcattataaccttattaatttacaaatggagcaaattttatttttataccaatatttatagatacaaattccatgtcgcaaagtgtccctaaaatactatggatcttgttgaagtgaaaaactgaccaactcgctcatatatataaacaagatgaaagttagaaataactaagtaaaatagagagcacacacaattaaagaaatattttttcctgatggtcttaaacagttaggtaaagtattgccgtcaatttttataaccgtcgcatattcgactgttgcaaaacggatagaaaaggcaaccattcgaaaccgtcgcccaaaaagcattctcaacgatataaaattgttgcgtatattgtgaagtatatgggacaattcaaaactggcgcctatactataaggcaagatttaaaactgtcacctatagtataggcgatgattttaaatcgtgccttatagtattataagcgacgctattaaaccatcacctatagtataataacccattttttattattttaaaattttaataatcttaagtttattatatatttgttatatcataattataatcgtcaaacaactcgagcataagtaaaaatttattaataacacaaatataattacaatatatagtgtattattttaggcttacaaaattttatattcaattctaattctataatcagcaactatgaagcgaaaaagtgttaataaaataaaatacactctttaaatcttaagatctcaactttaaatatcatttagtattgcttcaaagaaagacttaacaatgtacctgcacattctaaaaaaaacattaatgaataagcatgttagacttttaaagaataatgtggaaaaattacggctaatagtaaagacttaacaatatacatgcaccttctaaaaaaatcatcaatgaataagcatgttagacttgtaaagaataatgtggaaaaattacgactaatagtgtaaaaccaattcaactaaactttaaacaatcaaacaattggcaatgataagattaagtaatcacaaacaataatcggagaaaaacaggggtgaatagattagtgaaaaccaaaaaacaacaaaggcagaaaactatataaaaaaaaaaaacaacaccaagatatatactggttcaagtctgatagattgatttatctattgctctactccagttctggaacaccactaaatcttctttattcattgagcaaaaacagatataatacaatcgagaatgcattctctgttgagttctctcaaagtgtttcaactctcacactcttatccaagaatcttcttcatctacagatgattcttcttacaaaacccaaacctaatctctctcttttctctgtacctctctttctctacctctcaatcttttctctctccaactctcaatcctactcaaaacccctattctaaaatgaccagtgatgtggtatttataggcttaagatcaaaattttgaagttggtggctataagaatcaaagttgttaagttagttagtcagcaactaatttaaccaactctcttttaagtgagatctccacgttatcgtaactctaagtgcatccgggaacgtatctaagcttatgggatcatggaccaaaggtactcacgaaacacccttcctagaagaaaaatgaagccttccaggactggcttctgtgagtgaacaacttttcaagaatgactattggagacttttttatttagatgaactatatcacaaataacctatcatatagcaaacacatcaacacaaaaaaaaaaataaagttttaattattccaatatcaaataaattttgtaaaatttaaaattaaatattacctaaattatactaaagttgtaataaactatactaataacaattaaactacattaaaaaatttatttacctaaactacattactttatattttctagtaacaaattaaacattaacattaaaattaaaatgctataaaaaaaaaattatgaatctttttaaatcaaaatttaaattcaaaatacactaagggcattttttaaaaaattttagctatacacactacaatatcactaaatactacctaactttatcaaaataaaattctaatacttagcgtatttaattaaactaacaaatatacctatattcaaataaaaatattcaaaaatatataaactttaaatataaagaaaaatacttatgcatttttactccaatctaacatttttcttctaatatttatgcatttttagtaaaaattttcttaattctatcaaaatttcaacaacaaacaactataatcgaacgtttctaaaaattttaaacatgcaaaaaataagaaacaaaacatacaaaaaataatataaaaccaacaaaataacattaacaatataaaaattatccacccatccgaccgtagtacatttaatcgtagaacatacttcactacagatgaagaactaagatattcaaactccactaaataaagaattttaaagttttagtcattatacttttctctaataaagctagctaattttacgttttttaattaacaccaagaactcgatacctaaaaaataataggaatattaatattaattaagttctaaattttacagctactataaacttatatctattctatataaannnnnnnnntataacagaattcttggtttatgaaaaattcatgggtaactttttatttatattaaaaataaaatagtttattattaaaaataaaatagtccatgagaaattcatgggtcactttttatttatatataataaaataaatcccataaaatccaaaataaactctattatcaatgttcatttaatttgaaaactctatcttaattttatttcagattgaatttattggatattaaaattaaaacttttatatatgttcttcactgaaatcttgtattatattttgaacaattttgggagccactggttgtttctccagattcaaaacaaaccctgcctaggtcctcaactcaatacttctgagatgaccatactcagctacatgtcttagtccttttatgctcgttgctaatcgcttaattattctcaggttgccaaggat

SEQ ID NO: 31786 - DNA, 3716 bp, Cannabis sativa
aggcaatgctgatgatctgatgatcggatgatcgaagatcgaaaaagtaaaaagtacaagtggaggttgtttctttcttggaaataatttactctcttcgtcatcaagaggtgtgttatccaagactcatcaacaaagtgagcataaatatacaattgtttgtaagttgctatcagacctatgtgacgaaggttgtcatcagtaaacaacatagttctatcactttctcgtatgttaatattagtgaccatgtcatcttctctacactatatgtctatcaatggagcaagtcttttgaaacagctagccttttgaaaggtttcatgtcatgaagggactattggagtataggattactcttcatggtaaatgctgtagttacttttagagatgttgtcaatgtacacactaatggggagtataaaagtattcagtacgagtggtacttctttttgcatcatagaaaaatgttatctaatggggagctagaaaaggccagtcccacaagtgataaaagatgaataatgttgacaaaatttggtacccattaaaatttatatgatatgggaggacctcaaagtaataagcaattaaaaagccatggttgtagaggataaaatgcacctgcattcatatgaaaccttgaccaagcactacaacaaggatttcaagaaccaaaaggacatccaattctgtatcttttgacaataagattaggtacggaatactcatctttgataagttcaacttggtgttgagtaatagaactaaagacaagaggtattagttcaaaggttccatctcttgggtcctcactttcaatagtcccagtgagcaactgagtggccaaaacttttccaccatgagccttgtctaaatccttaggctttggcactgtaagcgttgtaaatatgaattgggttgtgtgtcaatcatattctttaggttttctacacgttcttctcacatgaggaatttttgattttaactcagttctcatcgactttgaccagctgaatatcaatgtaattcagttcaaaatagatatttttaagaaaattatgaaaactgcaccttgcaggaatgaataatttcagctcaaacaactgacatgaaaatcttatttttttttttcaaagggcttcaaaggagtttaaggatctccaacaagatttagaatccttaaactaatctttacaagaggagaaggaaaagaaaattttgaaaaagaaatgaattgttttgaaaaattaccttaattggaagaacaattgaagaattgtggaaagcaaagttttcaaactccaaattgtttgctttagccatgtggaacagatgaggaaagagaatggaggagctctctatttaaaacaattgatctcctgtttttctaatccaacatggagctgatttataattaatttttttttttaaaaaaagtacaaattgcacccttgaacttaacccgggggcctagggttttcacacagtgcccaagttgacgtcctaaatagggttttagatttcgagtgcatattagtaaaagtgactcgaactttgtacttctacatgaataattactatcacaaaaatattttaggcattgaaattagaatcggaacactttcaattttgagcacccgaggcaccaggttcataggacacccaacgcctaggttgacgtattgtcaacatggggtgcttgtaaccagaatcttgaagaagcatctagagcattttattcatctcaatccgattatagaatcaagtgctttttggagagaaaaagatcgaataagaggctaaaatgaggaccaagcgccatggttgatacatgggccatttccaacagtagttcaaatgaagtctcctagccatattctttgttttcatcataaattaagatttgagtgctttcagggaacaaacagagtcatttgagagctagaactgggagcaagcagctaggttgacactggtgctgggcccaacaccaaggttgacattttgtcaatctaggccatttcaaatcactttttctaaaaaaagaattgggcacgttcataaatttcaaaaataactgagatacaagtgtttttgggaatcaaatggaaacatctgatggaaaaatctagacctagcgtctaacatgacattgtgcttggccaagtgcacaggtagagattttgtcaacatgagtatttctagtcatttttcccaaaaattgttcaaggcatatcttccatctttggaaataaggaagatacaagcgatcttaggcagcaaataagattttctaggggttaaaatagggacccaatgttattgttgacatgcaacatggtggtcatgtttctactcctctaacgcaaattctactctaggcattctacttattttgataaaaaatggggtaggagacatcgtttgcaatctcaattcccttagaagcgttgaccttagaaattggccaactgacagtagagtcatattaaactgatgcttgccacgtgttaaacaattagaactcgaaagtaaagaacacaaggatttttatagaggttcggcccccttagttagcgggtaatgatcttatccccttattgttgtattgatacttagagataacactattcagataactatgggtgggagctgatctagctctcttaagattacaaagtagcaattaaagattgaaaatcttaaatgttgaaagaagctaaagtgggcgtgtgagagagagagagatgaagtgagttatcagacttagagatttacggattaaatgagacttagttgtgacttagagttttaaggatgagttaaggctctttatataggagggcttcaaccctaattagcagttaaaataagaagtatttacatattaaatgggtaaaatacaaaagaataaaatgccctttcaaaataggtatattctatctactttcgtgggctattaaggcccaatttgtagtctagttttcaatccatgtgtaaggctatgtagtcattccatgtctaattctagccagccatgcaactcatagatgcaaactggtcagccttgtgttgtctagaagttggccaaccatagggccagccaccagcctctttgaggtggctggtctgtaagttttcgtcttgtttgtttaccgagaccccctgttggctagggtgctaagtagattacttgacctttgtatcagtgagttatagtacaacatgacactgatattggcaacatagacatggcatatcaagtggaactgttttagccttaattaaataaatgttgcagcaattttattttttgaaataccctctcttgactttcttatcttatttggtgcagtaaattaactgcattgtacttttacatgtcctttggttgagtattgtgtggcaagtgaaggagtggcccaaataatctatttaagccttttgtgggaaacttctcttccctttacacttttcattctctcattagaaatagaaactttgaagaagctcctcattctctctagaggtcgaacccacgttgctccatctttgaggatttttgtgccactttgacgatcaaagcttcccattttcttcatcaacgatctcttgttgtgggtagggtttctattcctactattctctagatttagttgattttttccatgaatgcatgaacttgttctttgcttttaatgtctttagatttc

SEQ ID NO: 31787 - DNA, 1867 bp, Cannabis sativa
taaaaggtcatgtggtgttctcttttaaagttctactttatctaatttatatttttttttgttttttgtatttaatatttactaataacaaaaattaattgataaaaaaatagaaatctaattgatattttatattaaattttttatagatagtgaaagtaataataatatttataaagagaaatatatataaatattggtgtaggtgggtatatataacacataaaataatatatatatattatttttttatttataattatttgtaatgataataattgttatattttaatagatatatacctattataataatatatattcatgtatgtacatatcaattatacataattataactaattattaataataatttagttttggttatttatttatagtatgtaaatgtatatttttatataacttttataattaataatatttattttatgttactgtacacttttataaatttaattttttttttaataaatacatataatatgatttacattagtttacaagtaaatcctttagttttcattaatttacaagtaaatcctttagttttcattaatttacaagctataaattacatatgattagaacatatttatctatttatttatatcaatatttaatctatatttaattgtatatataatcctaaaattaaacaagatgatgtggtagattatataatttgttttgcttaatttttttcactcaatttttctaatttaattagattattattcaatttttgtagaaaaaaactcgtaataatggctcattatcataaattatcataagtcatttataatatatatttacatataataaatatttaatgaaaacccaatatttaatgtacaaacgttttagatttatcatcatttcataattcattaacacataaatatatttaatagatatttaaaaaaccaatattttaaatttatattctctatgtacctctgctatttatttatttttttagtgaagcaataaaaatgtaataagttattaataattaactaatattaaatatagtaataatagaatacccaactaaaatgaaagtttctaattctttattagttagatttttatttataaagcaatagcactattctatttcttttatcatttactatatattaattataatatctatatctatctatatctatatattttttttttttgaaaggatctatatctatatatagaaatatagaaaagcacaaacaaatttatgtggcattttataacttcttcttttttatttttcttattttttttttgaggttttcatactttgtccaagaaaaaaaatacacatacacaagttacatattaattatgcgtatcttttcattttcataattctcatttcaataccattttattattatgattataattatatataacactgtttttgtattcccatcactaataacattaatttatattagtttatgtggcattttataattttttttctttccatttttcttattttttgaaattttcatatttattttatccaaaaaaaaaaaaaatacacatacacaagttacatattaaacgcttaaatcatagttgtaatatataaacgcttaaataaaaaaaaagttacatattattatgaatgtcttctcaattttataactcccatttcaataccattttattactataattataattataaaattctttttgtattcccatcactgtacaatatataatatccacaatttaaatctaaataagtatataagatttcacaaataaatggcttcacttgtgagttagtaatgagaatggagtttccaatttacttaatggttggtctaa

SEQ ID NO: 31788 - DNA, 4132 bp, Cannabis sativa
  modified_base (2642)..(2642): a, c, t, g, unknown or other
tgtctcttctatgcaggtgattttagtgatggtctggggaggtgacaactgctatgtcgtaggtctagtcagtcttacttttgatagatagcatatagtatgtccccttgctaccttctatgcaatctccggactgatagtaatatactatggccagaactaagtggtcatgtcgtagcacaccaccatatgatcttcatgttactaggatggcaatgatgggcaaagttggtatagtagacgaggttgcataaccccttgatggtagagatccaaaggtaggccaggtacaggtgcctaaagttgaccaggatgatgagagtctgaacattgagtccaaggtggaggaggttgcgcctgttaggaggatgacatacaagacctgtgctatcttctccaactgccctttgggatcatatgataatgagagacagtcattaaacaggcttggtcagccctcagtgataggtgtggatcatgtcttggtacagtcttaagagccccaagttattgatgctgggtcacacagagactggtgggtctctcctccatctgttatccccgtcgatgcttttgatacgatactggcaagtggaatagttaaaggcatccactgtgaggtgccctcgagggatcaaagagcacaacatatgtaatatcccagaaaatattatagtatttaattgggcatattttattaaatatgcaattattctgataatgaagtaagattatgatcttacttaggttaattaatgtgaatttaatgaatgattaaataaagcgtaatttattaattacaaagattttattggattatgtgggtatcgtggatactatctttgaaataaaatatttttgggcccggcgatggtggaatggtcagaaatgtcacaataataaaatatggatcagaatggaggttataccggactaggttagagtgttaggttgtcgatttggcagaatagaattactaaaatgcccctaggtttgatttttaaatttaagggttatgggggaaaaatggtcattttaagggtaggatttctagttttgtttttagttcttttgactgaatgaatattagataatttaagttatatttatatttaagttataagtgtaattttgagttagatttttatgaattcgggtatgtggtgtagatggagtttaaagcttgattttaggtctgaattaggtttgtttaagtgtgattgaatgatttttttttggggttgttaagcatgaattaggtaagttgagtttaagaactcaaagttcactcaagtatggtaattttattattttattgtatttctgagttttggatgtttggatatattttttttatggtatgagactgttctagaaggtttcattaggattggaggagatttggttcagttttggagcaaaaaccaaggtttcttctttctgcagtaggggaaaccggtaaaccggtttcacaagcacagtgaaatcggttaaccggttttgtcaggaggggaaaacctagttttaggcttcgaaatcaattttgttcgggttgtttcccagaacttagaatatggtattttaatgatgtttgagttattttgaaccactaaagagttagagtttgtccggttatggagctagggtttgtttggaatatggataagttatttaatggattttgttgtcgttacataggacccaggatcgtcgagctttattccactcaggtcagcccgcatgcctaatttcttaactgaggtaagaaaagtattaagcaccgtttatgataactatatgattgttatagtctcgattatgatcgagatcccaatatgtgtttattgtgtctcgatcttgatcgagattaatgatatttatttgttatgactcgactatgatcgaggtgatgataggggatgattattatcgtttgtgactcgattataatcgaggtaatgatgagaaatgattattgtcatttgtgactcgataatgattgagggaaaggcatggttattactgttattgtgaataaataaagatacggtcactaccgttatgagtaattagtcctgaaactgcggataggtttcttacttatcgttcgctatatcgggcaacgatagtgacatacgtagctcgtggttaacgagtggtaagggtactttatgaagtactgggattgtgtgattacaatcttgtgaaattaattaagcatattattatgtgatgagttgtaatcaaaaacattttgttataatgtgactaaatgaagtttatactacttatgaaattagtcacttttcttgcagagtctctatgactcaaggtgatgtaagaatacgtggttatagggatgtgaggttagagtgctttatgaagtactataattatgtggttatgtactgattaaatatccatttagtataacgatgaagttgttgactataagatgttgtggttttcctatattgcgtaatatgtatgtgattgtataaatgttaaaactatatagatatgcatgatggttatgcgtgagtcacaaatatatatatatatgtatatgttatattgagatgtgaatatctacgtttacaatgcttttgatttaatatcttttcttgctgagtcattgtgantcacgggtgcttcgtggtgcaggtaagaaagttaaagctatgttctcccagcaatgtacacatcagtcgtggtgtcttggctttcaagaagcaggatcgacccctttttctatgtttgaaaatataacattacttgtgtataagtggttttgtaatttattataaaaaaaattataaacaggggatccccacattatagtagtacttttggaagtttttattctaatttgaaacttttaagggttttaattatacacacttttcctaaactaatagatcatgaagaaataagtttgtaaaagcacacacgtggcgtccctaagggtcagggcgttacaccatatctagcaggggcagtgttgccattacacccatatttgaaagacatagatagaatattggccacccgcttaggatcaaggccattggctggctagggtcccaatgaaataatagggctagccagggtcccaaagaattaatagggcttgccagggtaccatgacccatgcacgaaccggccagggtcatcaattttaggcatgaatcggccaacatcctagggtgaaaccctagaactggcaaaccctcatgagaaaaccctagggctgatcaagtcttaaacaagaccccgaaggccagccagggtttgttctgcatcaaagtgtgttttttcaaaacttgaatgtgttctttgtgacttgaggagtcaagaattgcaacgaaacttttgacctcgacaagaatcccatcatggccttatgaacatgtacaacctttgtctcatatgttgttcccttaaaaactttatatgccacatggtgagtctattatagtctaattctcaacttacgactcaacatttgtccaagctataacacttgaaactctacttcgctgatacccagtcttgtatgatgaaattatctagcaagtacccttgggtatggttaaccaaagtcatgtctaaatctagccgctttgtcaggttgctcacttccctttttttttgtgtgcagatgatcccgagtgactattggggaggtgacacctatattgataaagatttacttagttttctctttaaggaccagtgtccaattgatccctctagcaaatccttgagtgatcttgaggttagtggtggttctctggaacccaaggtctagcatcaccgtcatttaaagtgaatacgcagtgagatttatagcggttcatctcagagttgagcctcgggtggaggcaatttcttcccagttcttagacttacatttgttaggactgtgtgcccgatactttgcctattggtagggaaatttcttcactgaaagattttcttgtcgcagagaccgcagttattgttgttaggcactcagggtccattatggataggaccaagcagacatgtcatagggcaccaccctatgaccatcatactattatgctctcaagtagagtgagagtaggcatttatgaggagactacacatc

SEQ ID NO: 31789 - DNA, 3851 bp, Cannabis sativa
  modified_base (1547)..(1548): a, c, t, g, unknown or other
  modified_base (3802)..(3802): a, c, t, g, unknown or other
gggggggggggggcgcatattgcaggagagagagaaataatgcacagaagaggtatgtgaaggaaataaaaaacgagcaatcagtatttgctccagaacctttcaataaggtaaaaattgaagaacctcgaattatatttttggaggaagatgagaagagcatgaggtaccctcacgtcaatccattggtgattaccatccaactcgccaataaaaggataaagagggtgatgataaataacgggagttcagtgaacatcctttacagggaaacactaaagaagatggggctcgaaaaggccaaattaaggccttgcctggtaaatcgatgcggattcactgacgacagtatcaccagtcaaggtataagagctcgcattgaccttgggtgcggtacctctatccgccacaattatgcaagactttttagttgtcaacctgccatcggcttacaatatattatttggtcgtccagcattgattggactaggggcagttagctcgatcaagcatttattcctgaagtttcaaacaccagagggtgtgggagtagtgcgagacgatcatatgctagctcgcaattgctatcgcatagagctacaacacagaaaagccggtgactagttaatggcagtcttggtagaggaaagcaaaaagaaggaggaagatcttgatcctcggattcaaggtgaaagaaacttaatgaaattaattgaagaattagaagaagttgttctcgacccagaaaatcccataaagtgtgtttacattgggaagaacttggacgggcagttgaaatagtagctaataagtttcttaagggcgaaccaggatcagttcgcctggagccatggagatatgatagggattgaccctaacattatctgccatcatttaaatgtcgatccaaactacccagcaaagagctagaaaaggagacccttagattctgagagacaaggggaactcaaataggaagtggataagttgttggtcaatgactttatgcacgaggtgttttaccccttgtggatagccaatcctgttctcgtcccaaaacctaacaatacttgaagaacttgtattgacttctctgatctaaataaggcgtgcccaaaagattgttttccactacctaggattgaccagttggtggatgtaactgcttggcacgagcttatgccattcatggatgcatattctggatataaccagataaaaatacatgtcccaaatcaggaatatacgagctttgtaactaacatgggactttactgttacaaagtcatgccatttaggctgaagaatgctggggcaacatatcaacgatttgtgaatgagatgtttgcgaatcagatcagacgaaacatggaggtttacgtcgatgatatgttagtaaaatcattgaaaagtgggagtcataccatgaacctcgcagaatgcttcgaaatattaaagaagtataatatgaaacttaacctgaaaaaaaaaatttcccttgaagtcaatgcgaggggcattgaagcaaatcctgagaaaatcaaggnnttgatagatatgccatcaccaacaaagcctaaggaagtccaagccctaataggaaggatgactacacttaatagatttattttgaagtcgactgatatgtgtttgccatttttcaatgtattgcgcggcaacaagaaatttgagtggacagaagaatgcaaagaggcctttcagaatattgaaaggcatttggcgatgcctccagttttggcaaaacaagtaactagagaaacgttactcctctatctggcagtctcgcaagatgccattagtgtagctataatgtgagaagagggaaagcaccagcaacctgtttactatgttagtagaaggttactaggggcagagtcgaggtatccccctcttgaaaaacttgctttatgcctcatccacacgtctcacaagttatggccttacttccagacaaacccaataaaagtcttaattgatcaactcttgagacaagttttatcaaaaccagacgcttctagaagattgataaaatggtcaattaaactggggcaatttgacataacttatcaccctcgaacatccatcaagggccaagcttaggcagacttcttaatagaaggaataactctaggggaaaatccacttgttcaccgagacgcggacacttggaagttattcgtggatggttcctataatgagcagggcttaggtgtaggggtaatattaattttgccagaaggctttaagtttcattatgctttgagatttcaatttgacgcatcaaacaacgaggccaaatctgaagccttgatcactgacttgaagatagccaaggcgttgaaggttaagaatctcttatgtcatagtgattcacaactgattgtaaattaggttgtcggagaataccaggctaagggcctgaaaatggctaagtacttagagaaggtttggaagaacttggaaaagtttgattactttaaaatcgagccaatcccaagagaacaaaactctaacgctcatgccttagccaaactggcctcgcaaagcgatttggatgaattaaacttagttcctccagaggtgctaaacgagcaaagtatatgtgaaaaggaagatgtcgagatgatagatagcttacctacttggatgactcctataatcaactatctacttgacggacaacttctaactgacaaggacaaggcacagaaactcctatatacagtaccttgctacacaataattgaaggaaaactgtacagaagaggttattccatacctctacttcggtgtgttcttcctacaaaagcaaacgagatcatcaaagaaattcatgagggcttttgcggggatcatgtaggttggcagagtctatccaaaaatatcattagacaaggatattatttgccaacaatcgcaaggacacccatgagtttgccaaaacatgtgataagtgtcaaagattttcacatacacctcgcgtaccaccaactgaactaaggatgatgacctcgccttacccattttctatatgggggtttgatctaattggggcacttcccaagggcaagggggagccaagtacgctgtggtagtcgttaatgtcttcactaaatagaccgaggctgagcctcttgtctccataacctgcaaaaaggtcttcgactttgttgtcaaaaatattgtctgcaggtttggaattcccatgaagatagtatctgataacggaactcaatttgatggtgacttgttcactgagttctgcaagagaacaaaataatttagagcttctcatcagtatccaggcctcagacgaatggacaagtggaagctgttaataaaaccttgaaggatactatcaagaaaaaggtagatgctgccaaacgcagatgggtcaacgagctacctcaagtactttaggctcacagaactactgagaaaacatcaacgggacacactcccttctcgttagcatttggctcgaaagcaatgttacttgtggaagtgaacatatcgactcatcgacgagagttttatgaacaagaggaaaaccaagaactcctaaaattatctttggatctgcttgatgaaaacaaactgagtcacaagtcactaatgtagcgtatcaacaccaatttacaagatacttcaacaaaagagtcaagaagaggctattcaacgttggagacttggtgctaaggcgagtatttgcaaatacaagagaagtgtctgtaagagtattcaacccgaactgggagggtccttatgtgattgaagcganagtaggaactggggtttacaaattggctcggctgaatggctcgctgata

SEQ ID NO: 31790 - DNA, 1805 bp, Cannabis sativa
tgataacttttgtttttaccatacaagccgaaagaagaaaagagaaatgatgaaagttcgcccaaaaaaagcgagtgagccaagaatcaagatatgccattactcttttctgatatattttatgtttagaattgttaccgtgggtttttgaaggaatttaataaaataaaatttaaaagttaattaactgtaagtctcatataagagagataatatagaggtttaaattatcttaattggatgagacaagataagacttcaaataaaaggtcaacaactcatgctaacttacgtgcgtatatacctaaagtagaattttccccttaattacaaactacttaaaggagtgaccaaatattagttagttgttttacaatcaaggaatatgtatgttcaaaaaaggaattaatatgtaaactagactcttcttaaaaaattacttttttttttaccttattcaattctaactcaatccctgccgtttatcttaaaccactttaacaatagagataaaaataactatcattcatcacgtatacttttttatcaaataataaaggtacataaaaatgttaagtaattttatatgtaagaaatattgttttaaatggattttaaatattataatttcagtaaaaagaagacgggataatagacgagaatatcgttaactaattgtgaggcattacatatagaaggtgttgggtaccactcatgctcaagattaatataaaagtgtcataaaattgtttttataccaaatatagtattgttattgggcaccagtggtgttcgatactttttataggtagcgctcacaattagttagtgatatttcctaaaaactattttttaagttatatgagactcgatacttaattacatcaatagcggtatgacactgaaaagaatactaagcactttcaataattttctactaaatataactcaacttttacatctctcagagatggtcttacattaatattatttttttgaatataatattatgaaaaatgctaaagggtacttatagtaactaacacttttatgaggtgtaatatattggtacaatttaatattaggtcccacttgttttactttaataaatattataaataattactaccaattagaagacaatacttaatcacaatactaggcacagtaactgtctcaagctctcctctaattaggcatatccagatccgatccaatcatatattggatgttagattttaccatccgatccgatccaattaatttccaccatccaatcgatcctattcattggatgtatttcatatatatttatttgtttaatttgagtttatccaatattttagacctagtattttttggatctgatcggatccatttaatattttaggtccaatatgtattggattggactggattcatccaatcccagaaaaaaacagtaaaattttaatgttaattttcatatatacatatagatttgacgtataacaatataaaatctaattactcatccaaactaaaagaaaatactaattagtttaattggattttagatgtattggatttttagacacttcatccaccattcgatccgatccaattagatattcaaaaataacatctaattcgatccaatcacaattggatatctaatgtttagcggtcggttataattgaatcgatcgactcttattggattagatcgatttatgcacacccctatctctaatattaaggtattagtgtggagctattttttcttggaaaaagacattaacaaaataaacgtcatcatataatta

SEQ ID NO: 31791 - DNA, 1879 bp, Cannabis sativa
  modified_base (346)..(348): a, c, t, g, unknown or other
gagggagtttcttttgcagaatggtgctacactcctcagctaatgccactgtttcatagtcttccatttttctcttcttggacaaaatctccttcatgaacttcataaatctgggcctctgttccaaagcttcagtgaaaggaatgttgatgtgtagccttttaaagacctcttgaaattttgagaactgcttgtctaggttggtctttcggagtctctgaggataaggtatcttcacatgatgatcaatactgactggtggagactgttgttgtggtgcaagattatcagtagccttctttttggttgatctttaatctcttcatccactggttgtatcatctcnnncccatcatatttctttccactcctcagggtaatttccttgcagttttctttaggattcacttcggttgtactaggcaagtttccctgaggccgagttgctatctgagttgccagttgccccacctgagtttttaagtctttaatggaatatctcgtctctgtcatgagctgcaataataaatctgtttggagaccagaatttccactagagttttgttgctgagtctgttgttggttctgtgactggttctgatttctctattgatagaaaccattgttccttcgttttcctccttgattaaacccatagttgttgttttgagaataattcccaatggcttttgcttcatccattggcaaatcattcacatcttcctggcactcagaaaagtgatgttgacctccacatagctcagagaccacttgagcttgtttggcttgcacagctattagctttgttagggcctctacctaagctgtcagctttgtaatggcatccacctctagcacaccagctatcttcttcgtttggcttctttcagttggccactgttgattgtttagggccatctcctccaacagatcataagcctcattcgcactcttcctcataaatgctccaccagctacagcatctataagagttcttgtgttacctaccagcccattgtagaagttgtgaaccagcatccacttctcaataccatgatgagggcactttctgatgagatccttgaacctctcccaagactcatggagagatgcattatcctgctgacagaagttgttgatttctcctcttaacttgggagactttgctggaggaaagaacttagacagaaattttgttgccaagtcattccatgtggctatggagtttggtggcaaggaattcaaccaactcttggctcgttctctcaacgagaatggaaaaaatctcagacgaatggcatcatcactaactccattgactttgaaagtctcacataattccatgaagttagataagtgcatattgggatcttcagaagggagtccaccaaactggactgaagactgcaccatttggagtatggcaggcttgatttcgaagttgttagcatccactgccggtggcctgatgcatgactggacccccgtaagagttgggaggatataatctcccaagctacgaccattagcttgatcttcaacggcacctccgttattaccgttgtttcctccattatttgcaacattagcgttgtcagccatgatttctagtatttcagcaggtgctgaaactctctcttgccttttgttccttctgtttctcatacaagtcttctcaatttcaggatcaacgggcaatatgactgcttgcctttgacggcgcatacactcaaaatacctgagatagataaaaacaatattgcaagaaacatactagaaatttagcaagagaaataaaccaaagtagaagtttgtataattttatgtaatattaatctttatacaattccccgaaaacggcgcaaaaaacttgttacaa

SEQ ID NO: 31792 - DNA, 2118 bp, Cannabis sativa
ttacagcaaactactagacactgtcttcttccttcttcatcactttctgttgactcatggcggacaacagtttgagccacttattcgagaatgctgttcaggtttctaccactgctctaaatgcagattggaccctagcgaagtagataatcaggaaccccaaggaaaagttttactggggaagcttatttgtaaaggaaagctcagccgcaatgttattgcaagcactctaaagagagcttgggcatcctttaagggatggagttggcgtgaggataatgaggaaatcattcacttctcttttgcgactaaggaggatgcttggaatgtgctacaacgacgcccctgactaatatgtggtgtgcttcttgttataatgccgtggccttcatggttagccccttcaaaaataaattttgacaaatcgcctgtatgggtaagattaagtggaattccccatttctattggaacaaaacaaacttagaggagttcgctgctaaagtctccccgaactataaactaccacggtatattgactttgagagaggctctttcgatatgggaacggttcgtttcagggctactgtggacgtcgacaaacccctattctctggttttttcctgaaaagagaagccatcaaagatctttggctacaatataagtatgaaaagcttccaaagctttgtctaaaatgcggaataatgtcacgtgaacagaaattttgttttaagccaccaacaatcaccaaagaccctaacggaaacttctttcccttgtttgggagttggatgaagcatgaagagtcagccagatggccgttttccccggacctaccaaagtggttccaagattggatcattcagaagaggcttgcggtggacccaaagttcaaagatcaaatgaagatggctaattccctccgcatagctgattcttgggaggctagagaatcacggagacaacttcccggtaaatggcgaatggtagaacaggtggtggaggagatgccggagacggaggaagtgagagtttgtcatttcccaatggtcacgctccccggtgtcggagatgtttgcccgtttgaggatactgcaaacctggtggttccaaaaggtcctgatgtaatgccccctttggatgtattaacaaacaaaattgatagtgacaatacccaaagcttgctggcatttaccaatgatgctcaatcgggagagacagtacctaccgccgtactgggcagtccttcacgtaggtagaactctgaaaatgattctaccaagtccagcgtgcataaccattctgagattgatagggactcttcaaaggagtcaaataagttgggccggccccattccttataaggccaaaggtcttattctcccttgctgggtagccaggcccaagtgataccttggccttctaatgatctgtggtccatgggcttcaaaactctttcgggcctgggaactattgacaaattcatgagggagccatctatctttaaccctataatggggattgaagattgtagatccttggaatatgattttgggccaaagaaaagaaaggccttggatggtatagttattgaaccaaaaaatgaggcttttcctgaaccaactcttaattctgaggagtcgggccaaccttctcgagcggttgtggacattatcaatactgagtcctcccctgcttcaagagacgaatgccatttctctcatggtctttcgcgtgatactaccccacggcggaagagagggagaccggttactcgagatcaaggcaaggcctgttgcagctctaatcctcaagagcagaaacctgcactcaaacgcaggggaaggccaccaaaggatgctcaaagccatggccccaagaccttctctctaaaacgacaagcaaggaatatagttaaaaagagacaagaatctatctgtgcgaattgggagaagaatgcattgatttaaagattgatctaaacaatcatttcgtggtagttgattgcatcccaaagcctaatcattcgtgcatcattgaggagatgaaggaatcgcatccagagaatgttacttcttcaagccaggttttttagtttggggctgtggagtcttgccca

SEQ ID NO: 31793 - DNA, 1518 bp, Cannabis sativa
tctcaaagtttattaaataaatagaccaaaccctctacaacgttccgaatgtattaattcttcccattttattatatttcaatgtttgtcaatagttgttttgttttattcttcatccttttattaacaagacacaaaattttcaggcaaatgcagcgatgtcatcgttgatgagcatggtacctcaaaaagcagtgatagctgaaacaggggaagttgtggaagctgacgaggtgaagctgaataccattttggcagtcaaagctggagaagttatccccattgatggaatcgttgtagaaggtaactgcgaagttgatgagaaaacactcactggggaatcattccctgtttccaaacaaaaggattccactctttgggcaggcaccattaatcttaacggtatttcattacagaaccccctaattaactttcaacagtctttttttttttcaataaattgcgttgtttcctttacattttgtacttatgtactactatttttgcttaataggctacgttacagtaaagaccacagccttagctgaagactgtgctgtagcaaaaatggcaaaacttgttgaagaagctcaaaacagcaagtcaaaaactcagagatttattgacaaatgtgccaagttttacacaccaggtttgtcaacttctttgtttttgtttatgtttttttttttttcctttctacaagtaatcattacaattttgttgtgttttttggtttctcttttcccagctgttctactcttatcaatttctgtagctgtgattccggctgcattaaggctccataatctcaaaaattggtttcgcttagctctggtcattttggtaagcgcatgtccttgtggtcttatcctctctacacctgtggctactttctgtgctctcacaaaggcagcaacttctggtcttttgatcaaaggaggagattaccttgagatcttggctgggattaagatcatggcttttgacaaaaccgggacaatcacgagaggtgaatttgtggtcacagattttcggtctctttgtgaagatataagcttggagactttgctttactggtatacagctttatacttgttagtttgttgaagtttcaattctattagtggtacattgtacataaagtgtttaaaaggttgcttattgtactttcttgtgaacatgaaagggtgtcaagcattgagagcaagtcaagtcatccaatggcagctgcactaattgaccatggcaaatcactgtcagttgagccaaagccagaaaatgtagaggaatttgaaaactttcctggtgaaggaatccatggcagaatcgacgggcaagatgtgtacattggaaacaagagaatttctgctagagcttcttgtgaaaccggtaaagattttgaatttgatatttctggtttttagctggatcagccaatggaatttatggttttactccaatacttttaattgttgagcgtattagttggagaattgaggttttaactttaaagat

SEQ ID NO: 31794 - DNA, 1754 bp, Cannabis sativa
  modified_base (47)..(53): a, c, t, g, unknown or other
  modified_base (109)..(123): a, c, t, g, unknown or other
gagacatattattccgctgcaatcactgtaaggtttctcatactttnnnnnnntttatttcatatcattttagaagtcaaaatttaagatgttaaacaacatacttgtnnnnnnnnnnnnnnncctggtaaaataattctaacagttctcataaataagtaatattcacatatttacatatatatatatatatatatttataatcatagtaccttcacatactcatcaaatacacttttctcacacactaacgtactacgtacttcatcccaattaaaaccacttaataataatagttctgccaaacaagaatatttttccttcaaagtcttaatacgtgattcaatatgaggtgatgtcttcaagttagaacctggtaatttttcctctagcatactcttcatttgttgcaaataaccatttttaaatccacaatcaggtcgccatataggatttcgcctcaactctagaaggcagtcgatcgatgcattgtcttgttctaggtccaataatatttatttttagggatttttctattttatgctaaaataacctaaaataaacatttatactattccaatcaaaaataaacatttatactttttactaatttcaaaaatactatttataaagttttttattacaaaaatactgtagagatatgaatcccatgtgcaaaaggggagagtgagatacacatatagacaatataggcgagtgagactcacacgcaagtgggacgcaagtgaaggccaaagtcattggctgactcacgcataactgtagcatcagaaatgcgacagcgactatgtcgctgccacgtgacagttttgatgaagtgaccttgagcgtgttggactgctttttctcaatacaatagttatgcaaaaataactaaatagcaacacaaaaacgacttgacaacaaccaaacttcaaaaaaaaaattattaaacattaacatattattttaacacaattaaaatttataaataaaacaacaacaccgttaaaaaagcaactaaatgaacatataaaaaaattagaaattctttgtaataaatataaaaaattatgaaacacataaactaaaaaaaggtatataaattacaccagaattaatattttaagaaaatttaaattgattaataaaaaaaatgcactcaagtagatagcaatcacaaacatatctcttttatattaaatgtggctatatcatgaaaattgttggtttaacggtttatttttacttttccattaaagtttaacgattaaaattaacaccgtttaaatcaatcaattaattattattattttttttaaaaaataaaatagttttaaatatctaaattcaatttatttattaaatataacttaaataattatttaaatttattaacaaaataagataattattttttatagaaatcttaatttaaattataaaggaaaaaaaaaacattaaccaccattgaaaatcgaggatgtcataaccctcatattttacatgcagttgaaaattagtatcaaataaaaaaaattgtttagtagttgttgtagagttgtaaacacgttgtatgcttttatttattttaaaaatatgttgctttcgtgttgtttttacgttgaattttagttgtcaaaattcaaaaatttcttaaatttaactattacataactattgttttgtcaatatatatataaatatggaagaggttttaatggttacatttttattgtaaccatcatggatac

SEQ ID NO: 31795 - DNA, 1846 bp, Cannabis sativa
acattctgtatttctgtagttaccaggaaaaatttagtatcaaaagctctatatgccgggacaatatagtgtagggtacaatttgtttgtaggatggagattatatgttctccaattccttttataagagtaacagggaaatcggaagtgcagataattggtgtaggtaaaatatttatgctgcccttggttgaggagtaataatatgtgcacacaaaatatctaccaaaagattacactaagtaacatggcattgcttttaaaacagtaggtattatcttaaatacacgtggttggttgaagactaatggtcatttgtaatagtgatcctaatgtctttgcatttcttaaaaattattactcattgatactattgttttttatcattctatccaaagaatatgaaacataaagggaaaaataagaagttgtactcaatgatattttatgacttacatctgatgatgtatatcatcgtaatcatcaaattaatgtcaccgtttacaatttttgagctacactacatattaattttgtgcttgtcttttgtttaggttgaacttggaaggaagaagtgaggtttttgcatcaggatattgcttggatgatgaatgttggcgagtttatgagcagaaggttcacgatgttctaagtgaaggattgagtgatagagtgaagcttgttcgtgttctttggagaaacataccatcaaaataccttgtggaaaacgtattggagctatcataatttttttatactgggattagttatcattttcaacattcagtgtaataaacttgtttacctgttttttaattggtttttacaattggcttatttctacagggcttatctaaattcagctcagagccactgcttataggaatctcattgaactctttagaaaaatcttcaagggtgattgatattggtccaaatcctgaaaataaagaacaggtagctcattgcgcatttaaatagaaataaaataatatttatcaagctgcttgtgcaaatatttgatttttaccattctctttgcattaggctctcaaatttcggaagttctggggagagaaagcagagcttaggagatttaaagatggtacaattgcagaaagcacatgtaagggatttttctttttagtgacttttaattgagcttagttatttgaatattgttttctcagtattagataaacagggttaactgtttgtgtttcctagtttgggaaagtaagcaatgggaaagacatctggttctgaaaaaaattaccgaatacgtgcttacacgtcacctttctctacctaaagaaaatatcacaaatattgtggaccaacttgatttctctttggttcacggtgctgcaggtgatagccaccaacttttgctttcatagtttcttcaaagtttttttgtttctcttggcatttttacacaatcaataatattttgttagatcctatatcacattccgctagtttgcttgaggcttttgaagttctatctaagcgattgcgtctcattcaagacattcccttgaaggtctcagctgtgcaacctttagactcaggtatttgcctttttcttcttttatttgcacagttatttgtctttttaaccaaaggagatacgatttatttatatcctgctatatattaagaggggtatatcacttctaagtttatcctttttctcttttttgatttgtagttacagaacttatcaaacaataatgatttctttttattatgaatatcagcaaagcctttataaattgttgatatatctgctgaactaatcaaagtatttttttttatcattaacttaattatatatatgtgt

SEQ ID NO: 31796 - DNA, 6757 bp, Cannabis sativa
cattattttcttgagtatcaatattttagtgaattttgggccatatgaaactcgtcaacatggtagaatgcaaagtttttatttatttattcgtggtgtaatttttattttagttattttatggaattaaattttttttcttagatttttaactagttgataaatataattgtttttttttatctcatattctaatgtccaactccagcatctaactccgatgatgatgaaaactttatttgtttttttttttaattataattggtttcttagatattgtgtgctatttgtttttagttattttattgtggaaccgattatattttaattcatgtcttggttggtttttgaattaactatttcaaaaacaattattgaatatttatttcaaaaattggttttacatttaattaattcttaatttagttattttggaaaccgattatttatttagttaatttaacgaactgatttttattttattttattttatttaactgttttcctgtgtaacttttattttagttgctttacgaaactaatttctttatctcagattttaaactagttgatcaatataaccagtttctttatcttatattttttagttattatgtgttatttatttttatttatttgttatggaaccagtttagtttaaatatatacctcaatatttttagaattgattcccacattttcttttaattataaatggtttatgaggtattatatgtttttcctttttacttaatttgttgtggaactaattttgtttttaatttatgtttcattgttttaggaattgatttcttcgttgttttttatttataaccggtttgagttattctgtgttatttgattgtattcattatgttatagaatcggttatattttaattataaccggtttgagttattctatgtaatttgtttttattcattatgtcatagttccgtttctattttaatatataactggtttgagttattgcgtgttacttatttttattcattctgttacagaattggttatattttaaattgagacatctaactccggtgacatttccgatgacgacacaactctgttgactttttcaataatttttctggtaattttttcaacgactgatttttttgatgagttttcggtactgatgacttttttttggcactgaagtcttcttcgacgactttctagtgatacttattattatcaaatttattcaaggtctttttttattcgaatattttagatttttattttttagtttcatattttttttattatttattcatgtcatatcattcatttttttcattttatgaagaaaaaaaaaattacaccccatactattttttcccttttttttttactaatacatcattatattttcttttatactatcttttatttattatcatatacagtcgtgttatgagcacctattgagtaattcttataattttttaagtgtgataaatgtatgatgtgactttgtgttgtcactttagtgacaattttttttttccttttaactaaaattgtattatattttagataatataaaattgtaatttgacttgtgttgtgacagattttttttatttgttttatttttcattaattaaaattgatgatgaaaaatttgataccctaaatattaatacatgttcattttactttaatctcacttcctcattattctcttttcttattcatcatctttttttttttcttcactctttgcttcctcaagttctctctatctttctccattaatatataagttttttttatttttttttcttgttaaattattcttcttcatcttcttttcatttttttatttaatttttgaaatttttagtcacgttttttggaaaagataagagttagtgtagtttttttattctgattttttagaattgactttgcaaatatagactctgttgcatttggtgttgaggctgtgcagaagatgattaattttttaattatttttttattctttatttgttttagtgttgttttacggttattttctataatttatttttttgacttcgatttcactgttcttgctccatctcgctagaattaatgattattttttgagtgttctcgtatttagtggtggttctatctgtgagtgtgaaagatggatgctataaaatacatttcttcttccttctctatgtatattttttggttttttttattctggttttcctataaatacatttgacgagctcactagaaatttttttttaaggtgtgtggttcttctatgtttttctaagtgattatatctgcttattgttttacatttatttttgtgttgtttagtagttttttttattctgattttctaaaattgggtttgcaaatatagctgttattgcatctggtacggatgctgtgtagaagattgctagttttttttaatcttttttcctttttttttttgtttaatttgttttagtgttgttttacagttattttgccatgattatttattcgacgttgattttactgttttttctcaatctcaccggaattaatggttgttttctgattgttctggtgttcctgtagtggttctatccgtgggtgtggaagatggagacctcatttttttttgtggtttatcgtataaaaggaaaaaaaaaaaataggtcaggacagtataaaagttatttctgccatgtgatagtatttttgtaaagattagaccaaaaatcagtatttttgtaagttgcccaaaagaaaactcagtctaaacgatgaggcgcacagttagagctttagcattgatccataggcctttagaagatttggagcccacaactcaagaccatggggcgctccatagggccatgagtttgggtaaatggaccacactccaatgtcaataatatataacaaaatgaattatttgagcagttagtgacaaaacctgatgagtatataatttaataaaatctctgaatgggtaggggacccaaaaatcaaaaataaaaaatcaaacacagtttctcactcgactcttctctgttccactctaggcccatctataatttatctatacaaagtaacaataaatatttaagacataattgtgtttgtgttttttctattacccctttaaatgaattaataaataatgtgatacgtggaaagttgcaatagctataaaaatgatgaaaatatttttatagatatggttatgtattttttttttctttttccatataatattgtttttagagataatataatatactacttaaatgtggatattatagtatttatttataaattataatacatctattgtttcttaaagagtcaccccttcttttcctgttattattataaaaggatattggtagtatagatattttatttttttagttttatatatttaaatattatatttttattaataataacaataataataattaatataaaaatttttacaccaaaaatataaaatgcacactttattactaaaataccaccacactgttagtattacttttatactcttcaactttattttattacaattttatcacttccacacacatttcatgcatcactatgttcttacacgtcaatagtctattatgacctctatcaattaaccattcatcatttctctctctttttctctctctcttttttttttattttatttttttattttcaatttcttttcagtttttatttttaaaaaccaaatcctccataactgaacttgtctccctccatgatcccaacccattttccctcttctttcttttcttttactttttttttttcaactcacattaaccgatttctataatcgttttccctctctttttattgatgtgaatttatatatgtataatcatgtctattactcgttcttcatctaccccttctccattgccaaaaaaaaaaaagttcgaaaatgggtgttaaatttgtagctgataggtccaaggggaaacgtccagttggtgaagatgatgactcggattttgctcctcagttattgaaacatgatcgtggtcctgctaaaaagaaatttatagttgctgctcctccaaaaatttcccatgcttttgataataaaaatgatatggttgatgatgatcttggattagaggtttgatttcggtttctttttagtttcctcccatttttgaaagttttttttatataacttttgtgggttttgtgtttatcgttttcattattttaggtttaggttttttaatttatttttggagttctgtttttttttttgggttttaatgcttctgttattgtaatttgatgtatgtttagtttattgtgtttttttttttgtttttttagttgtaaattttgttacttgttgtttttttttctttctatttttgatttctaaatgtgtttttgtttttatttatttttttattttttatttcagtttgtttatttgatcagttttcatttttttttttatagttttttcatagtttctttatagtttaaacactttttgtatgtgtgtttgtattgaaatattttttaaatagctactttggtgtctatttatatatcatcaatgggtaaaaattagaactatcatggatgttgatattaaagtagattaattcggttggtctactactttcttttatttttatgtttttattgtgtttctatatgttttgttgtttatattaggtttggttttatatctatgtttctgttattatttattttttttttctctgtgtgttggtttatttatagttgttttgtagttgtattagagtttgcaacttttgtatgcccaatcattttatttactttctttttaaaatgcgggattgggtaaataaattcagtcccagagatttttatagatccaaatgtgtatctactagcacttactctgttattcttaatataaagaatactatcttggggaatttgttaaaaatgttccgagatacgcaatttggtcattttttagatattcatgagtttgtcatccccaagttgttcacagccttttgttgagggaggttaaccagcccaatcctaaagaaatttggacaaagtttgctgaccgttgtatacggtttagtgttgaagagttttacttgatttctggtcttgattgttttggtgattgcaataaattatttttttcccaagaatcaaaccaattagttgatgtttgttttcctggaacaaaaactattgatcataagtctattgaggattttttttgggcactaggtggggacaagatgaatcactaggtttgaaattgactctggtgtatttcatccattgtttccttcttagtaatactcctgagaaggaatttgttaggtctgaattagatatcattgatagcggtcgttgggatgaatattgttggggtagggagtcctttgagttgacgattgattcattcaagggcagagttgaacatggtatcaaaatgaaaaataaaaaagagaaaaatggaggttagtcttatgatggttggtatagagcgttgggatgtccgtgggtgtagtatgattttatgaatgttatcatgcaatggtaaattgtttttgcaaaagagttgcatctacaattccaagaattctaaattggaccaatgatgtcggggctaaaaatccaactttgagggacttgaaaggcaagatttttgatttgctgttaaagcaagtgatttttcagtttctttactgttttatttttgttttgtctcattttattaatcttttctattttttatttttgttgttttatatttacaattttttttttcagttaaaagtgaataacattcgtccatctgatgaagaaagacagaatttgcatttggatggcttatttttagatgagtctatcgatgatcgtggtacaacaaagtaaacattcgagagtggttcatcttctagaaaatctgattcagatgatatagaaatgttaaaatctaagttggaattggttatttccagtcaagaatccttggccgaagattctatttctttgagatgttttgttgaccttaatttcaagtctgtcatgactgttattaaagatattcaggaaaaaattaatgtcatttataatcgactttctgttgaggtatatattttcatagtttttttctttttttttttcatattttatgttctgttattgttggttttttttcatattttattttagttgcaatattgttttcaactaggtaaagtcatctgatgaatttgttgaccaagattctgatgataatgatgatgatgaggatgatgatgataatgatgaccaagattcacttgcaatatttttttataaaatgtgattaataaaagaaaaatagtacaatatagattaagtgtgaataataaaaaaatataaaagatagaaaaggaaatataataatttttttaagaaaatattaaaatgaaattttgtagagagcaaaaatgtgtttgaaaataaaaataaaaaattgtatactatatataaaaataaaaataaattagtgtgaaaaaaatatataaagagaattgaaaaaaaaaagataaatagagtgagaataaaaataaaataaaaatcagctaagaaaaaaaaataaaaggaaaagatttaagaaataaagagaaaaaaaaaaaaagctcaagccctaatatataaaaaagagtaaaaataaaaataggtaaggaattataaatgt

SEQ ID NO: 31797 - DNA, 1980 bp, Cannabis sativa
ccgccaaaaattaaacttaagtatttatttacaactaggagttaaacttaggtatttatgccgcaaattacctatattaattgatgataaaaaaaagagataatactaatttttataaaatttttacaattttatattaaagttacatttttacagtattttataaaaatacaagaaaattatatgaaaataacaacaaaacaatattaaaatttatttatatacaattattatctattagtaaattaatttcttattattgttattttttaatgatggtgtgcagattatgttatccccaaggggtgctttgtggtaccatttctttgtgcagtacatttagatgaaaaagtgtacaatggagctcttgattttaatccatggagatggatggaacctgaaaaccaggttggttttttattttcaaaattttttaaaaagattataaactatagtaattaattcaatatttatgcatattataatccaatactaaccatgtctattgtaataattttatttatttttaggaaaagagaaattggagaagtagtccattttatgctccatttggagggggtgctagattttgcccgggagctgagttagctcgccttcaaatcgctttcttccttcgttattttgttactacatatcggtaattttacattaaattcttacattgaaataattaataaaattatttattgtcctaacgaataaaggtaatttgacaaaagactcattttagtcattttacacgataagttcatattaataattttttacttattaaatattatcgatattttatttgatttaaaaaattattttataattaatattatcgaagagtttatttaagcaattttttttaggtggacacaaatgaaagaagatagaatgtctttttttccttctgccagactcgtaaatggtttccaaattcgcttaatgagacgacatgtggaagatgaagaatgaagatgaaatatactacttatttttttttttttttttctttttacatttcattttgtttttcttttgatgtacaaaattgctttaatttttgtcaaacaacaaagatttcaaaagatgatgtaaaaagttcaactcttcccccttatgatcttatatcttgggaggtatttttgttttgtttttcttggttttgctcatgtggctttttccaagataaaagtatgataagtttatttttattgtgtcaaataataaataatagtagtctcatcatagcatcacaaatttatcttcttttgctaagttaatcattatgaagggctaattttaagggtaagtaagtgaggcatgcgcctcaagcttcaaaacgttaagggcccaaaaattatgaaaaaaaaatatattaatatgtagataaaatattaaataataagaaaatattacaaatacaagttggtgcagtggtaaataatcttactctaaaataaaagattaatggtcaattcacaatctctacttttctatttttttcaaaataaaaattaatgtgtagatgaaggattgaactttgaactcttaagagttttacaattttttaccattacaccaaagccctagtattattgttttgataataattaaatatatatagggattttaaaatttaattttatcttaagctccatatacttatgtgatagtgtatctgaagttaatagtagacccaaaacatctgcacactaaggactacatgtattaaataaaaataaaaattgtaaatgtgaaattttttatatgaaaatgatcacattaatacaagaatttacataaaatagactaagttgtaaggataataagagaataccttttgttttgatatgtgttcttttatgtattgtgacttttttaaaaatattgaatttttaatagctaaactcttttaattattatttcacttgtatttaattatccaaacacaaattttgacgataaaat

SEQ ID NO: 31798 - DNA, 1596 bp, Cannabis sativa
taacaagaatactgtttatcactcacacactcacactctgttacagttgtaacagtccggttttcatgggattgtatccctgattttatgggatttagttttccctttttggcagcctttataaggcctttattcattgtattttaattcattcattcaatatcaataaaactttttcttttcaatccgcaatatggtatcagagcaaggaagatatgcttcctttcatccatgatttttccgatcttctctcgccgtgcttcggtctttcttctccggcgacgtttgatgtccagacttgaagaattcatctcttcaatcaacaagtctatccctcctctattttctttcctgcaaagctcctttaatttcctgttttcctattttccgattgaatcatgtctaacaatcaagaaacagaaaatgaagatccaccagctcaattcaaccatggcgataatcaagttcatgttcctgaagtcagaacagatggacagataatgagatcaagaaatcccatagaagacccattccgatccctattacttacatccacggagacaaccctgggaatgttcttgtttcccagttgctcactggacaagaaaattatattgcctggagtcgtgcaatggaattggcaatctctgtcaaaaacaaattagggttcttgaatggcaccatacccaaaccccctgtttctgatcacattctctacaatgcttgggttcgcaacaataacatagttatttcttggatcatcaattcggtttcaaaggagatttcccctagcatcttgtatgacgagtctgcagcggcgatttggaacgatcttagagttagattccagcagagaaatggtgctcatatttacaacctcagaaagattttgatgaatctcaagcaagaaactcaaactgtaagtatgtacttcaccaaactcaaaactgtgtgggaacaactatctaatttcaggctaaattgcacatgtaatggatgcacatgtgggggagtaaagaaattgcaagagcatcacaatatggaatacatcatgtctttcctcatgggtctatccgatctatattcgcaagtgagaggtaatatacttgttatggatcctttgcctgagattaatagggtatttcatttagttacacaggaagaaaatcaaagaagtggacaaagtgtcaccatggatcccaactcgaacatggcctttgcatttcaaggagaaagaagctcgggaaaaccagaacctcccaagaatcaaggacaaaaacgtggcaggccattttgcacacattgcaatatacatggacacactattgagaagtgctacaagatacatgggtatcctcctggatacaacaagaatggaaaatccaaagaggcggctgcaaaccagtttcaaacttcagatgaaaccagtaccaacaacgacaacaccttgctgcctcagctgacatcaaatcagtaccaacaacttctcaatctccttgctgcccaaacaacaaatcagcctactgccgatcctggaacctcaacaaataattcaggtattatcttgtccaatagtaccttgttacctaaagataa

SEQ ID NO: 31799 - DNA, 2743 bp, Cannabis sativa
caattagattctatgcaatgataaagaactttcaaatcagaacgaagaggtccgaattgagggaatacatggttacatgtgttgacaaaaattgtaactggtttctgggcgcttcaaagttgaaacaaatacaaacattcaagattagaaaatatgtcaacaaccacaattgctcattggatgtcataatggaggatcatatgcaagaaacatacaatactattgctcaaatagtaaagaagaaatacgactcaataaacaggttgcatgcaccgaatgacattatgaaggacatgctacatgagttttgggttttgatttgatatcaaaaggcttggagaacaagagaaaatgctcttgaattgtcaagaggaaagccagaagactcatacaagcaactaccaatgtaccttcatatgctaaaaaaagaaaatctagggacagtaactgaattgtttatagacaagaagaaccggttcaagtacatgttcttagcattgtcaaattcaattagaggatggattcattgcagaccagtgattgcggtagatgacacattcttgaaaacaacatatggaaggacgttgtttacagtatcaacaatggatgctaataaccacatattcatattggtatttggaataggagactcggagaatgattcatcatgggagtggttttcgaacaagctaagagaaacatttgaagaaagagaatgtaagaaactggttcaagcaaaaatttacagcaaatacatcatctttagtgtaagagttttcctattattattagacttacttaacataaataaccggttccaaaaaaagtaacaaagaaaccagttaaaacaaacataaactgatatttgacaaatattgactcgcaggcatgacaatcaactcagaccggcacaaaagcatagagaaagcaatagcaacagtctacccaaacatattccatggagcatgcatattccacttgcttaacaacattaagatcaaatttggagtacacgagaaagatcttacaataaactttgttaaagcctctaaaacatactagatgaaatcatttgaaggttacatgtcagaacttgacaaaatagacaaaagaatcagaccttatcttcaaataatatgatacaaatattggagtagatgctactgcccgaccagaaggtgcacaataatgacatccaacatagctgagtcgataaattcaacaattcttgctacaagaatactgcccatcactacaatgatggagagtcatcgaagttaggtacaaaaatgggtttggacaaacgataataaaacacatggagcattcactaaagtttctacaatgacagacaaaatactcagagacaactatattcaagcaaaaatataagaggtaaaacactaagcatatatatatatacaaataatatatattaaaaatattcaatagctgtataaaataactggttataaaaaaaatcagtttaaaataacaggttacaccagtcacaacaatactcgaccaagtgaatgtgctagagaaagggaaattccttgtcaatttactggacaaaacatgtgaatgtaaccggttccagcaagatgaaatcccatgtgctcatacaatagttgtattctcaaaatgaagactggaagtttatgactatgttgctgactactacaaaacagacgaaatgaaagcaacgtatgacacaacagtgaacccattaccaaatgaaagtgaatggacattgcttgagagcttgaaaaatgatagtcctaccaccaaacacgaaaaaaaagagcagggagacctaggagaagaagaataaattcaaaaggagagccaaaggcacaaataaagtgtggacgtcgccgaaagacagggcacaatagaaagacatgcactaatccaactctaccaccaaagcaataagaactaaaacagccaaggcgcaagaaagcaaagacaacaacaataagaacattattgaatacaaagatacaattttaataaaaaaacactatattagattttgtatgttccaaaaataatttcaatattttcttaacatgaactatatcttcaaatagtattggttttgaataaaataaaaattttcaaaacatagaatttccttaaaaaataaaattacaacaataataaaaccggttatatttaacatgcaccaaaaaaaattaatcaatgaaaattgaaccggttatattaaagatgtaccaacaaacataatcaataaaaaaaattggttctatataatagatacaacgacaaacaagataataaacaaacaaaatacatataaaacaactaaaaatttaatcggttaagaaagaaacaacattagaaaaagaacatattaactgaaaataaatcggttaaataaacaaagaacctttggcaagagaaggaaacataaaaaaaccggttaaaattaaagaaaataatatataaaaaacacaatgtaacaaaaatacttcacatggaaaatataaaaaccattaaaatatgtattacaaaaggaaaaaaaaacactgtaaatatatataaacatataaaactggttccatagattgttataaaaacataaaaccaaaatataaacatatcattatgtattgttccaaaaaaaaaataacactaaacaaaactacaaaaactatatctgtccaaaaaataagtcaaatatttaacaagaatctaagttcttcttcttggactt

SEQ ID NO: 31800 - DNA, 4088 bp, Cannabis sativa
ttatattgaaatgagttttatatagggcataaaacccaacaaaatgttgcccttgcactcatatttcaagaaggtggcatattctttttgcctttgttcaacccaatttactcccaagggcattaagtatttctctgcgatgttcatcctctacaccattcagaaatggggtgtgccatctccgcacgaggtcagttggttctttgacctgaagtctacttctctcaactagatttcaagtggttgacatgcactgtggacaaggtctttagcaagctcgagggttttgttgacgagtattaattcgtggaaggcatggacaccacttatactcggtttcaacaaatcccaatatattaccgtccaccccttacactagctcttagggacagagctcagaggattgtccactgccggatgctgctcggaatatcactctgttgacctcggaagccatgtttgtggagtacgggctttatctagcagattttatacctcaacctgttaaggggagaaagaaaaagtccactattggccaggctgagggagccgcgaaagaagaggagctcattcaactaaagcgtgaggctaagttgaagggtgatgcaggagccaatcagtatgcaaatgagcaggagaaggagcttattcaagttaagcgtgaggctaagttgaatggagttgcaggagccaaacaatatgctcaagaatattttgagcagggggatgaggcccaggattcagagcaggagaggctgcttaaaaggaagaaaaccctcccgactgtgcaaagacccatcgaacatacaattcagattagagagcccagtctacgtgctcggccatccacccctgtagaaggaaaggggaaagccgtcctggaggagcaggaagattcgttgaacgacgatgccccatccgtgcttgttcggacaaaggctcatgcaagcgtgcagagtactccatcttgcatttaagtttcttgattatcattccttcataaatcttatgcttttttctgactatgttatttttgtttcgtgcagaaatgtctcagaaaatgatagaggttttgaagaagagagtagggggaatttcgggcttgtccctttggccaagaagtctaaaggcggtgagacgccgtccagagagaaggcaccagtcgaagtggtcattgacctctcagaagaataaacagtcgtggaccctcttgcctcaaaagtgactaagtccaaagattctcgaggaggtagttcggactggcctgaacatgcgaagggttgatccaagctgattagaagcggctctgaataggctaaggcccctgccccacctctagtattgtaccaggagactaaaagaggcagagttatgctcacttactttatgtgtcggtcggtccctgaggtgaacgagcagctagctggggcggacaacctccaatctctgaagttggttactggaggagtcttgaaagagctttcgagggtaagtctttcttgacattttccttttgttcttttgtaactagttcagattttaatgtcttctgtgcgcacagactggtctaaagatggtctatgcatattcccaagctaagtcggctgctgctaagaaccttgccatttccaacacaatgcgaatggaagtggacttggccaagaaggatgccgaggaggcccgggttcaacttgggattgtgcggatagagttgggagagatcaacaagaagctccttactgttgatgagaccaaagtggccgaactaacgaaggatctgcaggacatgccatccaccgagcagctcaaggttgatattgcttctttatctcaggaagtgatcagtctccgagaagaaagagagggcctccagagccttcttcgtaggctagaggatgaaaagaaagacaaggagggggagcttggggccgaggttgagaaacagaagttagaggttgagaaacaaaagtctgaagtggcaaggctcgggggaaaggtgaatgccctagagacagctggtctcgagattttttatgacttctggaaggccaatcccaaggcgaactttgattatctgggcaattccaaagacatgtttctcgactactgtgctgctcaggaggcctatggggaatcttaggcgatcacttccacctctcctactgatcaaagtgttgcagtgccttctgctaagactcacacaaggagcttgggaatcctgttgtttaagtgcttccttttactatcttttttttatcagtccggccataaggccttttttttaagacaagtcgattggccaagcagtctttaaactgggaatttgattttcatttttcaaacaactagctgaccgggcagcctttaatcttgggtttgaatgcttttgctatccttaatgaatttcatcctttgtatataatcattgtgcaattgtgtttgttttcttttttaccaaatgctttgtacaggtttaggtgctgcccaagtgagcgagcaaacttatgactcttggtcactttttatttattttttacaagtatgcttttttgtctttttggggttttaggttcgaccaaaccttttgtacacactggatggtaaagtaataacatgctaatgatctcgactcaatttgaatttaaataaacatctttattcatttaatggtcggaaatgtgtttgttaccgtagtaacttacatcaaagctattatgctgacctgattcgatctttagcttaacatgaaaaaaacaaattgcggaaaataaaaattgtactttcaatggtggtcatcagtcctgagtacatgaaaattttatccaaaccgttgggcgtggtgcgcccaaatggcgattcacttaagagcaaatgttcttttatttcatacttgatatggtcatccgatctggtacttctattggtagtattttcttcaatgttccccgttccaataacttgtactagaacgagttgcattttttcatgatacttacccaacttatatgcccctaattctagaacttcgaccacttgatatggtccttcccagtttggtccgagcacacctactgtactgtctttggtgttcaaaaatactcttcttacgactatatctcccactaagattttctatggtttcactatttttttaaaatactgagctactttttgctgatgggctatcagttttaagtttgctacggttctcttttctttaatttcatcaagtgattttgcaagcagtacatgattggcctcttggctatatgttaatcttatgtgggatggtggttcgagttctacggccagcatagcttcatatccatatgccatggaaaatggagtctgttcggttgctcttttctcagttgtgcggtacgactgtagaacttcaggaagtttctccagccaatttcctttagcgtcctcaagtttcttcaacttgaccttttgcttggggatgcgccactacagagaaacttttgatgatcccatggttcgcacagaaattagtgaaggtttgactgtcaaattgtttgccattttccgatataatcttgtatggtaattcgaaccggaaaatattgttcttcacaatgaactcttgcacttttttggacgtgatggttgccagtggctcagcgtctgtccacttggtaaagtaatcaactgcaatcactgcgtactgtactccgcctttgcctttgggtaactgtccgatcaggtcgattccccatacggcgaaaggccaaggactttacatttgagttagttcgctgggcggtgctcgaggtatctttgaaaatctctggcatttatcacattttttaacataggccttggaatcttcaatcattgtcggccaaaaataaccttgccttagaattttctaagataaactctgcccgacagcatggttgccacaaaatccatcatgtacttctgacaaaagtcgttcagcttcttcttgtgtgacacactattgttaaaaattatatacgcaagtatacacagtcaaacaagtaataaagtgataagtaagatcatctccacagggattgcaaacaaagtttgatgtaaaacca

SEQ ID NO: 31801 - DNA, 2069 bp, Cannabis sativa
taatgatactttcctttaagcttggtaaaataagttaaatggtggagtactcattttcagtaattatattagtttactgaaatatcatttacaaggagttaagtgtttaagggataaaatgcattgaaggataaaacagtaattttatccctattcaatatagattatctgtataggatcattgattagtttgattaaaataatagataatttgtagcgtgtttatattggatatatagagtgttctatgaaaattagagtgcgattctgaatctaaaatagagtttagaggaaataataagttaggaaatttactcggtaaatttcaaagctacttattgtgagcttgatttaagaggccaatggtccccacattatctggaataatatcattttaatgactcaattaattaatttaataagccaattggattttaaaaatagagtatgttttatttgagaattttcactaaggttgagttgttttgagaaaaaaaaaattatttgttaattaagatactttgtgagattaattaataaatatatttaaattgtatttttatttaataattataaattaaaagttaatatttaaagagtttagatttgataagtggtaaaattaaaaaaagacatattgtttcattaagttgaaataaaatggaaaaaatcaaaccatgggccacacattatgtatttcggccatggagtatttttttcagctcaaatgtcttttattttagcccatctaatctaactctaaccatatgacaagtctatataaggaatataatcgagctttttctaataagatgtgaaaacctaactctgacaaaagacaacaaaagctttagtccttaagccaatttcaaaattataaactctcctttctctcagtcctataatgagttgagcaccaacccactctaatcaaggtggtacttagatctttatggaagatcatatcgtttgtcgcttatcgatttaagaaaagcaatccaagttcattatttggcaatactgctggaatgaaaggagtcacttaattttgatggaatcaatgtaaaaaatttaaaactttatacatgtttattttaacgtttgataaatcatcttttagaatgttaaattattatgctaataatcaaacatacataataataaatagattctggtaaaataagttctaacaattagtctttgtgcctaggcaacatttattttcatgttaaatatgttttaaaatgattattccatgttttgaatgggatcatgtttattgtttatgatttggtaaattttatgtgaaattgtatgtaattctatgaaaaatattttattttgccttattagtgattaaagatattattggttgaaaattatacatgcatgaattttacggaattgatttcgggtcaaaattgacctgaaaccccttttgaggggtgcttcctatgcaagctcgaggctggcagacaaaactcaccttggaagcctatcgcgcgcacgtatcagcctcgaagcccccaggcctcattcctctcacgcgcacatcactagggatgtgacagagagatctcagtctcttgggagatgcacaccttcaattctcgggccttccatgcccatccgcacacacacaaggctgttactagcagccttgacaaggtgacttgtgaccagcccagctggttactaattagtcaccattctgaatgttacatgattttttattaaaaattgatttttaattaaaataaaagtagaaaattctaaaaattagtgaaaaatcataattattcatttttgaacctaaatataagctcttaattagtaatatttattttttaatagattattaataatgaattttattattttaatgattttataatatggtttgaatttgaaattggttaatctatatatttttatttttcatataatttatatggtcagatatcaaaatattagtatattttgattaatttgtaattttagccttttatttaaaatattatattcttattatcttatatgctatataaatattaataaaattaaaatta

SEQ ID NO: 31802 - DNA, 2243 bp, Cannabis sativa
atttaacagaatattctttttatttttaagtatattctgttaaaccaaaaaataccgttagatatatataaagatatagtaattgaaaacactatttaatgattttctaaaataattagacgattacttaacatgctttgtaaaaatggtcaaaattattaagtgatggaaggaaatgaataggcacatgcatgttcctattaatgttactatattaaatatcgagttctatctaataatttttaaagagtattattaaagcgacacgtttagaaaatactaaatatcactgatctacaataacaaaacttattattgcagttatgtatttgagttgtttcgaattattagccgacaaaatttaaagaaattaatatgtggcctcaaaaccaaccaaaggacgaatactcctctaacttgcttacctaccaaccttataacaacatttattccattatcatccatcaactttattttaccttaattatataaaaccctatctttattactattacaaagaatattattgtgtatattaatatatatatatgttacattagtttttgaagtgtaaagtggtactctctttatttatatatatgtacgagttgatgagtcatgcaaacttttttttaaaaaaaaattaattgtaaaagaatatgattgattgacattacaccattacctttagttttcttttcctaacaattctaaaattaatattaatattgtacgtaagtaaggtaagtaattgttaatcaccagattataaatataccctacttaaaatccaaacagtaaacaaataataattaatatatgagaaaactagaagggttatcttataaatatctcttaattatcaatctctttttttggaagattttcactcctaatcatatgaaaatgaaaatgatttttatggaaaaatacaaaaataaaaaataaaaaaaatatatgaataagtttttattactagtatgaaatcgtctcttgtgagctattttagtcgttaaaattcctttcaaactattattaccacattcctattaaattattatgactctaaaattatatctctgaattatgattacattgtaaaattatgcacctaaattattactataatcgcaaattgtgtcaccagattttcagacatggatctatgtatttatgatagatttaatagttctaaaaaaattaattaattattaagagggacgatatataaataagcaaaaattatataaatatataatattttaattagggggctagcaagtagtagtgctacattgtgtagtagtaaaattcgttatttccattgaatgtggtcacattgtttaatgattgtttatgtcaacccataataaccaccatttcatttcatttacatttatgtgtaattatattcttttttattcttcctacttttgtgaataactcaataaaatatcacagttttttgttgctccaaccatatataatatgattttcttccaaaaaaaaataaaaaaccatacataatataactcagctttattattattctttcgagtattatgaggcctagtacttacatacaaagatttttaatgcatgtttttttagagttgctatatggaggtatctataaatgctgtctaacaccaccactatgagatgtcttagcgatttttttataatatttattaaaataaatcaagtgaaattcaattttaagctgaacattgctatgaattactaaggtacctagtattactatgaggtgacgtcttataattagttagcagttttgtataattttcaattaagtaaaataagtctgacttgatattgaattatagcaataacaatattacactttataagagtgctagatagcatgagttcgctttattatttttttattaagttataccaatagtgatattacacctcaaaactgtgctaagcactataaatgttctttaacatttctcaatttatttaacttccttacgaaatatacccaaaattacatgtctcaactttttatggagactaaagcaaaatttaaaaatacacataaaaaatgttgatgttgcttcgtttgctagtcgtaatatttttgaatatgcattgtagggagatctgatttaggtgtgctcttattaaagctaaaactatctgtcatcgtggctcttttcctctgaaaataatcagaaagcaaagaatgacaacatgttgagattgaatctggt

SEQ ID NO: 31803 - DNA, 2060 bp, Cannabis sativa
taaattattcgaaatttcttaaaattttgtagattatcttaaatagttataacgtatataaatatgaaaaaaaattagattaaaaaaattttctctaagccaaaacaaattaagagtgtatccgtacattcttttcaagagactacattgtagaatcaacttaaatgaatgtttatgtatagttgttaggtattttcatgtttttatgttaatattaaaattgtgcgtgtaattggggaggctccgactcaaagctcaggcgactaagaagcagaaatcgacgatgaagaagacaagataagcaactaaatctttgattcataaggagaataaagagaacgagattcaaaagaaaagagaaccaacttcttttggctgtgcgaaaaagacaaaaggggttgaagcaacttagttctccgaatctgagtttgaagaagcaattggggattcttttcccgatggaacgactgatgtagtgcaatcaataattggagatgttggagttgggatttgtcctcctaaatgatctgaaatagaattgctccaaaaattagacttgagagtcactttctctgaagttatgagtggtcctgcgaaatcaaaatcaggtgagtctcatccctaattctctattctacattttaaaaaagaaacattgggtgaaataggcaaatgtgctaagatctgtgatgaagatatagttgatgaaatacattactagaactcctttgttgtgtgccatgttctgggttcaaatccgccaattaatgtaatggatggtttcttcaaacatatttgggagaaataaggaatagatagagtgagtttgctaactcatgagggtttttctggttcgatttcacatagttaaggcaagagatgccattctaaatggaggatatcaattctttgatagaaaacctttgattatgaaggcttgggaccccgattcaaagtttactagagaaagtatgaaaatttcctttatgagttcaattgagacatcttgaactgaagtattgggcagaatggactatggtgaaaatagtcagtatgattggcaaaatgctaaagcaagatcaagcaactatgaatctatataggctccaattcactcgggtcttggttgaaatggacatctctaaggctttcctaataatcttagctttgataataaaaaaggaaagttggtgtacattgatgttgcttatgagtggaaacctaataaatgtgaaacttgcaaaggaatagagcacataacagaggtttgcaggaaaaagaaaaatagaaaatctgaaaaaactttggcacctaaagctttggttactaatgcaaacaaggagaaaatgaaagtagatgaacaaggtttccaaacaattaaaggaagaaagttagcattgaagctccttctaaagtgaaaactaacaatgtgtttgaagcttcagaggagataatagtgaaagaggtacaagttgggaagatgttatgtaacacactactaaaaaattggattttttcggcagttttaaatagtcggctaatgtattgtcaccgatctctatgattgtcgtctatttgactgtcgcaaaattggtagaataggcaacaatggaaaaccctcgcctatactataggctatgattgaaagttgttgcctatagtataggcgacaatttaaatcgtagggtgacttttttctctcatcagagttgaagactgcgaagttatgtttatcaactttctctatcatgggaattgatgattatctatacctaagatttgtggtggagaatagattgatctactaataacattaagttattcaaattcaaagtgaattcgaaggtttcgatcacatataaacaatttttaacccaaaacaaaagttcaagagagcaaagggtaaaccaccaaataatagtagaaattttgtcaatacaagacatacaataaactataaatgtaaaccctaattgaagccccaaaacagaatacataaactctttaaataaaatccatagcaaaatacaagaaactagaactactaatcattctatagt

SEQ ID NO: 31804 - DNA, 2456 bp, Cannabis sativa
ccagtaatggcatgagcaccaatgaactgagcaaacttaagaactgctctttgaccataaggccttgtagactgaacaattatgtcccttaagtcattacacttagttattataatatatattatacgctaagtgttctaataaccactccatttcgtcaatacttctttagatacagtgaggtagatgcctcactaggcgttttctatgtctccctcgggattatgccttctgatgcaaaatggtttctcatcaatacgtgaatcaatagtttgttcattctgatcgcgcttaagactgtgtggtcagcgagttttaaatatactctattaattctgtatttaatgagttattccattttgtatttaatgatataattaccattatatttgttgattcatattctctgagactgacatgtgtcactttctgaagtacagtcgaatttcgggtataacaaccaacatgaggattgaatccttaaaaaggagggatattggcgtggttaccaacatgaggattggctccttgaaaaggagggatgttagcatggttacaaacatgaggatgtgtttaatggagatcttctctttggagatgccccctgtatatattttcacttgatctttcctcgtgatattgaggattaatggaatgttcttgataaggccaaggttgaatatcatcataaatacttatggagttatttagcgaattggtgttgtcgctatcttcgaggaaggtttgttgaagatttttgcgtgcccctagttgggaatatgtggtggtagcttgtgaccttgaaggattactcgcctcttgagtaggtttttgtctttctcagtgagagttctccccttttttcttaacatcgacccctatattccttggaacatgaggtggtcgtgtagatgagtcaggaccgccatgtgtggcacaattttgatttcccaatgcatgatttgcatcattattggcatgaactcccatgtaacctctaagggggttgttatattccatatttcattgggatgcacgcataggaggaaaattatgtggatatggtcctctttgattcctcatggggtcatatgtggcacaactacccatgggacgtcatctctttctctttgaattagagggttgtcttctttcttctctgtcaacgcccatgtctctaaggagtggccttggagacaaattttgtttatcatgtgggccatctccatgcaatggtgcatgagtggcatgagtgtgttgggcacgtactccaatgttaggtattgacaaatcggtattgcgaagagtattgttggcttggtttgcttggttatgggtacctccgtggtgggccagagcaccatggccatctttattcaacgctgcatgggttatatgtgcatgtttggcacataccacaatgtttggcaaagcttggtggtcccctctcattggtggattagtacttttagggacatcatggagttggatccctaggtgtgccatggttgcaggatcttttgatgggcgagctcttattctgctagggggagaaggctctcttggtggaggagtttagtccccacacctttgcgattgctcttggagttctttgttgtggcataagctttctaccaactcgacacgtagggcctcattttcttggagcgcatcatgcacagtcatggatctgattggtgggcgctctctagattatgatgaagaactttcacattcttggacctattcctcatcttctggcataggcaacatgggaagcttttctcagtgcctagaagttccctctccatgtggttgtggagggacaaaggttccttcactaaggggttgattaacttccccccttaagacttcaacatcttcttcaaaatttgtcctcctggtactcaacaccattgttgtgagaaaggtaaattaatgagttttccaaagtgaaaatagttaaactttaaccacaacactctcaatgaaagccccaaactgttttgagagcgctctctaatcctctcaatgaaagcaccaaactattgacgcaatttttcgtcaacttatctaaaaagatcgtaaaaatatagaggattgcgatgaattaaacttgaccaataaaactgcaataaattaaattgacactagggatttatagtagttcactccccatgttgcgatggtaatggggctatgtctacttttatctttattgattagatccaacacactagagctatgttatcaagagtgtgtggataaaggtacaacaaaggatttctaggtacaatcttaatcgagatttatgaatataagactcatgggagacttgatactcataaatttgatctaaattactggttgtaggttcttgggaatattcaactaataaagtgtaaagaaaggtttgtatcaatggtgttttgaggtctggtgtcgactgagtatgg

SEQ ID NO: 31805 - DNA, 2866 bp, Cannabis sativa
  modified_base (670)..(672): a, c, t, g, unknown or other
  modified_base (2549)..(2556): a, c, t, g, unknown or other
aaagtctaagcttgaatttttattcaatttcagccttcctttgcggaagccgaagcttgcttcataaaaattcagcatggctcttgcatgcacgatattaatcttgcaagatagatcactaggggtacgatacgtcttcaaccctcttttccagaagggaagtattgcttgaagtctatcttacacctcgtgatgctttccctttgatcttttcaagagaagtctatgcttgaatttttatccaactttagccttcctctgcggaagtcgaagctttcttcataaaaattcaacatggaacttgcgtgaacaatgttttttgagcaagaaagatcactgggggtatgacacgtattcaaccctttttcttggaagggaaggattgcttgaagtctatcttagtcactgtaatgctttccctttgatcttttcaagcaaagtctaagcttgaatatttatgcaactttagccttccctcgcggaagtggaagcttgcttcataaaaatttgacatggctctcgcactcatgatgtttttcatgcaagaaacatcactgcggttacgatacgtctttaaccctttttcccggaaaggaaggattgcttgaagtcttactccacgttatgctttccttttgatcttttcaagtgaagtctaagcttgaatttnnntgcaacttcagccttccttcgcggaagtcaaagcttgcttcataaaaattcaacatgggtctcgcatgcatgatatttttcgttcaagaaagatcattgaaagtacgatacgtctccaaccctctttttcggaagggaaagatttcttgaagtctatcttactcctggtgatgctttccctttgatcttctcaagcgaagtccaagcttgaattttgatgtaacttcagccttctttcgcagaagccgaagccttcttcataaaaattcaacatggctctcgcgtgcatgatgtttttcaagcaagaaagattactgggggtatgatacgtcttcaaccctctttcctgaagggaaggattgcttgaagtccgtcttattccccgtgatgctttccctttcatcttttcaaccgaagtctaagcttgaatttttatgcaactttagccttccttcgcggaagccaaagcttgtttcataaaaattcaacatggctctcacatgcatgatgtttttcatgcaataaagatcacttggggtacgagacgtcttcaaccgtctttctcggaagggaaggattgcttgaagtctatttttatcaccgtgatgctttccctttgatcttttcaaacaaagtctaagcttgaatttttaagcaacttcaaccttcctttacagaagctgaagcttgcttcataaaaattcaacatggctcttgcatgctcgatgttttcatgcaagaaagatcattgggggtacgatacgccttcaaccctctttcatggaagggaaggattgctctaagtctattttactcgccctgatgctttccctttgatcttttcaagagaattctaagcttgaacttttatgcaacttcagccttcctttgcggaagccgaagcttgcttcataaaaattcaaaatggttctcgcatgtaggatgtttttcttgaaagaaagatcactgggtgtacgatacgtcttcaaccctctttctcggaaaggattgattgcttgaagtctatcttactgcctgtgatgctttccctttgatcttttcaagaaaagtctaagattgaatttttatgcaacttcagccttccttcgcggaagccgaagcttgcttcataaaaatttaacatggcactcgcatgcacgatgttttttgtgcaagaaagatcactgggggtaatatacatcttcaaccctctttcctagaagggaaggattgcttgaagtctatcttactcgctgtgatgctttccctttaatcttttcaagcgaagtctaagcttaaatttttatgcaacttcaactttcctttgcgaaagtcgatgcttgcttcataaaaattcaacatggctctcgcatgcatgataatttttcgtgcaagaaagatcactgggggtatgatacgtcttcaaccatctttctcggaaaggattgcttgaagtctatcttactcatcgtgatgctttccttttgatcttttcaagtgaagtctaagcttgaatttttatgcaacttcacccttccttcgccgaagccgaagcttgcttcataaaaattcatggctctcgcatgcacattgttttttgtgcaagaaagatcattcggggtgtgatatgtcttcaactctctttctcggaaggaaaatattgcttgaagtctatcttactcaccgcgatgctttccctttgatattttcaagcaaagtctaaacttgaatatcatacaaacaacaaaaaatcaacaacaaattgacaagagtacaacatcgaaatacgtcaaaatactatatttcttgtaaataaaatcatgaaaatcataaaaatacttaaaatttcgtgcaatcatatttttataatttttttnnnnnnnntgtgtatttgtaaaataatctcttaataaaaactattaatgacattagaaaaattgcaatgtagaaaatacactcaattatattacaatcatttgttttttcctctcgaataaaggaagagcaatttgattttttatgcattaattggactaaaattggtccactaattccaaactattcaaaatttgtaaaataggttatttttttcaaaaaccccattttacccctctcattctaaaaactgactctctctcttcctcccctttctctctttctctcgaactctgtcgaacccaccgaacccaccacc

SEQ ID NO: 31806 - DNA, 1829 bp, Cannabis sativa
cgccagggtaaggatagatgggtttggactaaagattcaaagggagtgttctcaactaaatcagcttacctggtccaagccttggaaagggcccccttgggaaatgttgctcctgccatgtgaaacaagttgtggaattcaaaagttctagagcaccacaaagtcctttggtggagcattctctctaatgctctacccttgagggtactgcttgctaaaagaatgaccattgatgagatctcctgccccatttgtggggatggagatgagactatggaacacctctttctctattgcaattttgcttcccacctctagcggtcttcccagtggggtattatgctgattagggattcaggagctcgcatgtgggattgggttagttttatctggaatcttaaatccagaggggtggacactgagttgttcctctatgcttcgatagtggttgacacgatatggagagctcgtaatgacaaagtccataacaacattatgggtagcctaatgcattatattgactctatctcttgttgctacgcagattataggtcatgtttgtccaggccgctccaggatgctggtactcctgtttggtcccctccaccggaagattggattaaaatcaactgcgacgtcagggtcggaggtgattctatgtgtgttgtggcgattgcgagagatcacacgaagtctatcttgtgggtggcgactaaggaacttcggtttgctgactctcttattggggaagcggcggcttgtttattagctttggagatggcggtctcaagacatcatccttttgttatagtggagagcgattctgaaaatgtaatcaacaacctaaaaggtggtgacaccttgtgggggattgagaactatacaagacaatgtaaaattctctctgcttctatgtcttgctgtaattttttttttatcactagaaactgtaattttgtggcccataatgtggctaaatgggcatttgccaacaacattaacggaatggtagaaatatctactatcccgaatgctatcctttgtaacgaccatgaagtctaactctttcttttaatatataaaagcttttattcaaaaaaaaaaaaagtttcaatgtcataaaaaaagaagcaacttctaacggcaataactttgtgccagcctataacaccttcccaacatgatctcaaactaccacggttagcctcattgtcccttccctaaccgccacataatttataatacataacagtaaatattctgtatattataaattggagataaaagtttctgtaaaaatacacattatcattgattataccacaatttatatacatgtatttttatatagttatgattgttcactccattagattttatatgcattttgagaaacaaaaattctaccaggaatcagagaaaaaaaattctaactgaaatatttttcctaatccggttcaaaagaaaaagtaaaaagaaaaaaaaaagaaatatttttcctaataacaaatgaagagagtcatataaataaataaaaaaaagagcaaaaagttcacgcgctatggaaagcgtgttcaattgtagcgcttggaagcacgtcggataggctaattgattggggtggtctggtcagcatgtgaactgggcccaaattgtattcatgtttggttttgttggtggccaactggcacttaacgttttacattcaatttatttttattttagttattaaattgaaatttgcatttccatcatttttttatagttaaatatagtataaattaattatggaatctccccttcaaaataaatattatggtatatctcca

SEQ ID NO: 31807 - DNA, 2873 bp, Cannabis sativa
tcaattaatactaatatatatttatttgtatgtgtgtaccttttgttgccccatagatagcacaatctgaaattgccatggccccagcgatagaagaaatgaagacaatgcttccattgccagaagctttgaaaagaggatgactcaattgtgaaatatgaaaaccagacacaaagttggttcccaatagggttgaaatatcttcatcattgaactctatggacttctttcgtattaataccccagcattattcacctgaaacatggtgtaaccatatatataatactgaattcaaaggattacaattatatcgctacgactagttacaacaagtaactggtaccaataacagaaacacaacaaaaaagtttaacagttgttattcaaaagtagcttagtcttaacagttagctaacacatggaaacactagaatatacacactaacatacaatattatactctttaattttagctaatattaaacatatttgatttatgttttttattgtatggatttaatttatgctcttaattaattatattaaacacccacaatctataaaaacagtatagtatgtagaaccatatttatgaacttgaaattctcattctagaactttcaaagggtactttggagttctaactaatattctaactttaaattaaacaaaaatatgggcacttctccaaaatatatattgtttataatttattgaactcggttttagctaataacattacgtctttaacgtctttaaagcgatcaaattgaatgaatattaaataataataataaagtaataagaacacaagaaatttataaagattcaacctagtgataataggaatagcctacccccccttttagttgtattacttaaaaaattattaagatcacaacggtccggccaagtgagtttcttatcagtctcaagaaagcttacaaatattttaataacataataactctttagaaagttcaaaaaatgatcccactccactatagggaaaatacaaggtggaatgtctcgtgaatataaatgaagaattcgggaaactaaatattaaatgtcacgattctctcaatgagataaaatcagtaccattaaaatagaaattctaattaagctataattgaggaaatatttaaaggaaatatctttggagatcttcaattactgcattttttttgcatgaagaatggaactcaaataggtgtatgtgatttgcttggagaagtgcaaggcgttgaacctgctcggataatacctgttgaagaactaaacttaatcggtttggctctgaattgttcttgatggaaccttaaactagtatatcgtgtccaggtaaaaacatacttaatatatgttaccttgttgagtgccacatcacattgtgcgaagattagaataacatttttctcccaagtatgcgtgggaactgatggtcgcattgttagtaacacgttttagggttcacatgccttattggagttgatttttgccctacccgagacgtgtgtatcttcttaaatctctttaaatctctacatttaatgcttattaaaagaccgagaaatgggaaaacgtcttttgacggtcgcacaccccagacgtttaatgattctacattttggcattttttgagggtaaaacctaatttcaatcgcataccgagactaccctttttttggtctacaagaggaatttccaaattccaaactttcaccagttcttcactcttcaaagcttcaaaaaggaaaagttgttcttcaagctacgtgagattcgttcttcgtccagaccttctaccaagaaaaatttattctagacacatcagtaagtaagttattttcttttgaattcttctttttttactttgcttttgcatgcctagaattactggaatatatgagtattcgttgttgcttgctagattctaagttttatttgaatttatttttataaaaaaagaaaagaaaaaacaaacccaagaatcgtgcgccttgactcaaaaatgtttggtgaggaatttttgcaagaataattgtctctttttccctttttatactcttcagagattctgggttttaaaaccctaagatcaatttttgcactagagtggatttccttattttaatttgttttttttttccttctgtttgaagtacctgggatgttcttcttttggaaggacaatccaaacctgttcggatactaacctattcttcttttttatagatgaacccaggtgacttctgtgaggaggtgaattctgaatagacaaactgctccaacttcttcataagaattaacctagactttgagcagacatcctcatctctgagaaattcttcctatacttcatgtttctgtgagtggtaagttagcagtgatttcccagaatcaaaaacataacaccaccactactttaaccaaatcagtggagacgtgtacatgcgtttaatgtgggagtggaaaagatgttagaggaaatttcttcactcttgtggatgtacagagtttgggaagatgtacaagatacactgcatgttggtcaactaggacctttaaggagaagatctgtgcaggctgaagtagcagtcacggttgctcgtcatagtcaaagattatttttgaggacaagtcaaaactggcccgtacaaaaaaaactttttatattgtatcaattaacgacccccataccaccaggtatatggaagttgttaggcaagccgcagtacccgtggagcttgaggagcaggaggagcacacggagcaggaggaatatgagaacccagaggctcctgagagggaactagagcttgatgttgatgaattaatcagtcgttggttcaattaattaattata

SEQ ID NO: 31808 - DNA, 1484 bp, Cannabis sativa
  modified_base (262)..(262): a, c, t, g, unknown or other
gggtaaaatgacatttttaaaatgtttaaaagtattttttatatatattgttgaaactaaaagtggtcaacactcacttgttagattaggagataaaattaaaggataaatttcttttggactttatgtcttggaaaactttctgttttgttaaatgataaaatggatattgtatttttcaatttggtacaaataatattatgaattaattttttcttaaaataaaatttaataataatctaatctaaaagtgttatgacanaactgtttacattttctgtatttgttcgtattaggaattgccttcaaattggttatattaaaaaaagttatcaaaaattaagttcatggtcttatttttactattttgaaaaatacaaggtctattttatcatttaacaaaagagggttcaattagtaatgtttgccagacacagggtccaaaatagtatttaccctaaaataaaatatgagtagagtaaatagagagatacacaacagaatttatagtatttatttcccgtgtcgcaatggttttggagttacatctacttcgaatttttatttctcacgagcattataagaaaattgactaagtgtgaaagctctaatttttagaaagagaaattagagagaggtgctctcaccttattacttttataaatgtgtcaaataagctagaggagctctttgaaggagatcctattataataataataaaatattcaaaaacatgtgaaagaatacagttaagttatttttgacataacggtgaaattgactctagaggttggtcgtcgatttctgggaacttgaatcatgtctgcgggacctttttcgcataagttatagttgaaatttgtaaatcctagagaatgaaattcggacctaatatctttagaattgcgattagagtgtgagacatgacttgatagattattgaaatttatttaaaacacaagttgaatctcgtcaatcgaatcaatattgagtgagctgtcgttttattgaaggttgcccttataccaacacccaggttgacatatgatgtcaacctcaacattgggtcaaggaaaaacgagttgattgtgtattttttgatgcttaagtttattttggtgaagatgttcactacttcttggagatgttgtttcacgaaatcgggagactcgaaacaccccaatttgcaactaagtcactttgctaaaaaagtgaaattatgaagttgtgaatttgacttgcatgagttcatagctctcatttactatgaaaaactagatggacgctcaagacaaaatcaaaattggtaaatagaacccagcgcaccaggtcatacgttaacctaggcgatgggagcccttttcagggcgtctaggatgtagttttggtgcttccagggtcttcaaaattgaggataaggtctcctactttgtttttgaccatgtcagagagaatgccttgagcaaaatttgcatctgagtgac

SEQ ID NO: 31809 - DNA, 1842 bp, Cannabis sativa
cgggataagcgtggttccattgaaccccgtgagttgggaactgcttggtgataaatcccagtccgtgaggcctattgctgtgaaggcttctttaagtaataagttcacgaaacttccattgtcaatcaatattctacccacaattttgttggcaatgggagtctctatgaccagggggtcatgatgagggaaacgcaccagtttcgcatcttcctccgtgaaagtaatttgttgatccatgagtcggggcctttgagcaagaagctgggtgacttcccatacttcgtcatgtttgatggccccggcgtagcgctttaattctttttgggtggtccccccaatatggggcccaccagagatcatggccactcttctgttgggtctaggtggtaggccaggggtctgctgagggatcgatcccccggagggtacagctggtgccaatgctccgggcgtacctcctggcatcccttgaggcactggaccccctgctggaaccgggttgagatgatgcagctggtttttgatccactcatataggtgacccaatcagataaagtttttgatctcatccttcagattcttgcactcgttggtactgtgtccaatgtcgttgtggtattcgcatctcttgctgggatctcttcgagaactgtgcttgtacagaggagggggccttcggtagtgcgtattttccttgtgacgaaatacactcgctcttgcgtgttcgtcaactctatgtacttggtgtattggggagtataccccctttttttgcgcttgtcctctgtccggttgctgccttttaaggacctcttagtctgggagctttgaggaggtccggttaggctcgcagcaggagtagagtgagacgggacttgtccactcatccctgatgggttcttatgtgaagaagcgggagccaaggctgggctatggttgtatccgggggtagcagagaactgtatgccgctcattggtggattaaccagaggaagggctcctgagagctaaactccgggtgcatatccggccactccggttggatagtatcctccgtaagccactatttgggcctcttccaaattaatgtacttttgaaccctcttctggaaatcctggaggttagcagctccttcttgttgcaattcgttccagaatggggttcctgtacggattccggcctgaagaagtgcaagctactgtccgtcatcaactttcttagtttttgaggcttcttccttgaacctctttataaaattcttcaaggtctctgtgggtagttgcttgacgttagttaaggcgctgactttgaggctgatctttcttgtcgcaacaaactgtctctggaaactaacttgtaacttgttccagcaatccacagatcttgttccaactttttgaactattcttccgaggaaccactcaatgttagcggaaatcataaacatttagcatcattgctaaccctcataaccgtcattactcggttgaatcgagataaatgatcgctggggtctgagtccctgatgtatgctgccatctcgggcatcttaaaatttttggggagttctgcttccaatatgtgtcgggcgcatggctcccgatcctcacagtcggagtctgaatcatcccatttttacctccaggagacccgagcgatgtctctgctcagtgtcgccaactctgctaaaattccttcgttcagcgttcctgcggagatagctggtatatgtttctttttatccaggtgatcccgcaagtcactgtgcttttttgttgatttggtgtcttaagtcaactggagggtatctctgactccctcttcctctttctctgggt

SEQ ID NO: 31810 - DNA, 1818 bp, Cannabis sativa
gaaatagcgatgtagtgaccatggtcaaagtgctcaatcaaagttctgaggcaaccacaacaggggtgacgaaaggaagaagtgaacgagttcgaattggaatttttatcagcagcattgtgttttcatgttttggccttatggccttggcaatttcaattgcgcttatattcaagtttcgaatgtgggaatacagaaggattgcagatcagtggcaccatgattttcttgaggatgttgccattcgtccatacacatttggtgagctagaaaaggcaacagaaggtttcaaacatcaagtgggaaaaggagcttatggagcagttttcaaaggtgtcataccaacaaacagtttcaggagagttgtggctataaagagactagagaaaatggttgcagataacgaaagagaattcaggaatgagatgaaagtaattggaaaaactcatcataagaaccttgttaagcttcttggttactgttatgaaggagctaacaggcttttggtttatgagttcatgaaaaacggttctttagcagatttcttgttccaacccggaaccaagccaacatgggaagaaagagctgaaatagctttgaacatagctagaggaatggcctatctacatgaagagtgtgaaacacagataatccactgtgacatcaaacccgaaaacattcttatggatgaacaagcatgcgcgaaaatagctgatttcggtctctcaaagcttctgatgcctgatcaaaccagaacatacactggtttgagaggaacaagagggtattgggcaccagagtggcataggaacatgccaataacagtgaaagtagatgtttacagctatggaattatgttgttggagattgtgtgctgtagaaggagtgtggatatggatgttcctgagaatgaagttgttcttgctaattgggtttatgactgttttgtgggtggtgaaatgggaaaactagttcatgaagaagatgtggagagtaatgagctgaagaagatgattaagttgggactttggtgtattcaagatgaaccatctttgagaccttcaatgaagaaagtttgtatgatgttggaagggattgttgacattccaacacctccaattccttcttcctctattagtgtagttagtattgtttgataaattgtaatggatacaaattttgtatagaaaccaaattagtgttcctctcaaatctcaacaatagacttatcactttcttgttagaacagtcttagccccatatctctagctacctcaacacagagtttgcctttataaaagttctttgagccacctactaagtgttgattgataaacaatgactgagaaagtcctgttgaaacagttacaacttgagacttgaagttaaattatatatatataggatgtctagggacattgattttgtccctacgatagtgatgtttttaaagccataaatatttgatctaatgatgaaaaatgaatatgtgtataataatagttcacatttgggtgcatttagattattattttattttttttaataatatttttaaaattcatatacttttacaaatcaattaaataatatttaaaatttcaaaaaaaaaatggtattgaggtggataaagcctaggtatcgacaattgaaaacttacctcctctagtgtgagttaagggagttcgaagtttcttgggggatgttggattctatagaaaatttatcaaagacttctccaagatttccaaatccttatctaatttacttgttaagagcactcacaacagtttctttactctattcttcaaaatacat

SEQ ID NO: 31811 - DNA, 1246 bp, Cannabis sativa
tgaagaaactagtttattgatgaagaaaccaatttcttgaaaagaaatgagtttcttaataaaaaaaactagtttcttgatgaaaaaccaattttttgatgaaggatctttggtgagttttgttctgaccgattatcgtcggatgggtaaaaaaactttaaaattcgtgtataaattttacttttatataatcaatatcagttttttgatgaagaaacatgtttcttggtaaaaaaaaattaatttcttgatgaaagatctttggtgagtttcgctctgaccgatcatcgccagttgccatttttcagatgtagagctggtgaacaaaggtggataggtggagtagttgagggttggtggaggtagggtttgacataggagaaaaagtaattttttttatttttctaaaattaatttatttaaagattaaatacgagttttaaaaattaaatttacatatacatgacatagtaaatataaaatagtttaaaaataaaaacagatatcataaaaatagctaaatttaaagctatcatatttaagtaaaaaaaaaatccataaattctttatttttaaaatgatgaacaccctattagtggggaaaaagaagaagttaaattattttatgtttttcaaaattaacacttttgtttatctctctttctagtgttatttccaacaattttctttgtgatgttttcctaaacttataaaagaattcaactttaaaaagtggatgcacatacccggacttttgagtttgtaattgatatcaatttaataatttttgaataattaacatttttttccacaacttttgacactatttgattttgtaccctaaaatatgcagcttgttataaatttcccttaaaatataataattacataattataccatttctgttaagttctatttattttaccgttaaaagttagtattttttacctcttgaactttgaccaatacaaacttttaccctcttttattattaattttaaaaattataatattctattaattttgagaaaattaataaaaattattaaaaaaaacctgataaaaataataaatttacttttttttctttttgaaagtataataaatttacttaaaaaaacttaaattattcctaataaaaatatttttaaactttattttatttcaaactaaaactattgaaatccaataaataatttaaacaaattaagattttttgaagaaaaaatcaaacttatttatatt

SEQ ID NO: 31812 - DNA, 1781 bp, Cannabis sativa
ctattcaagaacgtttggatcgaggttttgttaattcaacttggagtattagttttcctgaagcaaggctgtctcacttagatttttttagttcatatcaccgagtacttagtattgatctaggtttatgcccaacttcttcttctaaacaccattataaacgaaagaggtttcgttatgaagcattgtggaaggaagatcacgaatgttaccaattaatatctaactcataggtgccttcatttgaatttttcaccgtagatactgtggtcaccaacatagcttcttgatctaaaaagtttggcttttttgtgttcgttatcccaaaatatttgaaatactacgcaaaaattatgatcagctcaaaatatggatcaccatatgtataatagggaggaagtttcacagttagaaacttatttgtccaacctattagaaaagaaagaaattgtttggcaacaaagatcaagaatccaatgattacaaagtggtgaccaaaacatcaagctttttcattgccatgctagtgttagatttcaaaacaatcttgttcgaggtagttaagatttgagttatgaccgttagtgttatccatagtgccttctccatgcctcttccaaattatgataattactttagtagtatgatatttcttatatatggtttcgtattttgtaaatgttcctaaatttctataattactgttattaatgatagattctaatattttgttgcatttttgaatgtcatatgattcaggtctcttaaatacagatggggtatggtgtatttatcctgtggatactgagaatatcataaaaagctattacatactattttatgtcttcttatccttctgcgaaagacattggagatattctttctactgtgtcgtcttgagttactaaaactatgaatcattctctgttgttcccttttactgccaaggaagtgagagaaacaattttctttatgccaactgattaaagtccaaatgaagatggtataaatagtttattttaccaaaattattagagtgatataggggatttaattattaaagttgttttaaaattcttgcatggtcatggagatttatctgttattaattctactattgttactttagtttctaagactaaaaatgccaaaaatatgagtgattttagaccaatgatttgtgtaatgtcctacataaaattatctcaatagttctcgtctgccgtttacaactatggttggatgatatatacactcatctcaaagcgcttttatcagtgggcaacgtattactgataatggtatggttgcatatgagttattgcataatttactggatgttacttctgggaagaggttttactcggtgatgaagttggatatgagcaaagcatgaaatagagttgagtggaattttttggagtaaataatgttgaaacttggctttgggagttcatgggtcagttttcttatgaagtgtgttcatacggtagactataatataaatagaaatattaaaggtcaagttattcctactagaggattacatcaaggtgatcctctttcaacttacctatttcttttttgtgcggaaggcttctcttctcttctatgtcaggcaaaaaatacttacaacatttttggctataaagttgctcgaactactacatcaatctcccatctattctttgcagatgacaacattctcttttgtcatgcaacctctcgagctttttattctttgctagacgtctttatttttattctttgctagacgtctt

SEQ ID NO: 31813 - DNA, 3249 bp, Cannabis sativa
ttttcaccattccaacagtagcaattgtaagatgaggatcccttgcatccgatatacaggatttacccactttctgctatccatccaaccaagcaggggcagattccaccaggagtctagaattgatagactcgttgcactcgcccataatcggaagtgcatcacgcccttccaaaatggactctccatcaagccgcaactttttagatggggagattatctcttcctcctccccttcattcccacaagcgtcaatggcgctgccttcaccaaacacatcattaaccctatgattatccacaatagcaatacaatcattcccagtgctttcacctgtgaactcttcccccatcgatttcttacgtttacccccgacacaaggctcaaggtcccggttagagaatctaaacaccggtttcttgtggataccattaggacccaccatcttcgatttcttcaagtgataagccaatttagggagcttccctatatcctcaccttcacgggtagcaccgaaccagaccggccctagtttttcttggaaaatcttggccacatgagatacatgttgagcggggaacggaatcttcacataatcgttatacgccaccgagcatgtcgtatcagatctttgacgaggcaccccttccatccccccagcgagtaaatccttactaacaagatccaacgtaggggttccatccccaccgttggagacgtccaactggggagtatgatcaacaggaggacagcaagaagcagcatcagccccattatccatcccctgaggacgcgagccatctgatttctccaatataactctatcctgaatatcctccacctctagtaaggcaaatccattttcaagacgagacccatcacgtatccaaggtccaaaaaggggaacactgcgaccatcatccaccaataccactctgttacgcccagaacacatgttctccaaatggccaatcacaccacacttaaaacagaaaactggtaagcgttcatatttaaaaaaagcccaatgtttcttcttactattaccttccaaggagacgccaggaaccaatggtaggcggatactaattcgagacctgaaccggatgaacgagtttattagaacccctttcttcctgactttattcgccgagatatattttcccactctgttcgcgagcagaaccgccgcatcgtcagtcataagctctaggggtataccgtgagccttcaccaaaacatcaagggaatcaaggtcccccgacgtccacagcccgtcctccggcattgcagcaaccatcatgaatccatcgcaaggggaccacggtccattagagaggacaaaccgagcctccccctcagagttaagacaaaagacaaaggtcttggttttgcagtcgagaacttggaagcgccagcccctttgtaatctccacataccagtcagagcacctctcattgtagcagtggagaaatccctctaagagaagaaacgccccaccactgaagaagcaatagtgctcttagccgcctctgtatcaggaacgatttggatcgagaaatcatcctaagaaaaattttccacttcctccacagagtcttccacagtcacgatcctagagctatccatattagctgatgaagtaaaaaccccactcaatcgactctagtagcagcaatcgcacaaaatcttttcgcaagcttgaaaagggaaaaggatgatgtaatatcgcagaacaaaatgagggataatacaccctaggaccacttgggaatggtcagggggtagtcggccacgacccctatccgccgtaccggccataacgggcaaatcgtacacacggcacactctattcgtacactgcgtacgccatcgcagaaagaatttcaaaaatgtacggagagaatttcaaaaatgaaagtttggtaaataattttaggtactattattgatatgtggcaccttaaggtgctcaataccataccgatgtggtatctaatagtttgttagcagttttttaaattatttatcaaattaaaatttgtgggaactgatattgaaattcacttataaccatatgctacattttgtggtgcttgacacattaatgtgtctcttaacacttttgttattaatatgtacgcatctttattaactttgattagaattttttttttaattatatataagtgtgcaagaacatctctaatgagatatgtaaaaaaatgtgatataattggcaacaaaaatattttgtaatatatttgcatcaatttttagtattatactccaatacacaattgcaaaacttgatgcaaaatttatttattttttgtttctttttttgttatatgaattgtctttgtactattttttcggtaaataatttttttactattattgctatatgacaccttaaggtgctcaatacataccgattgaagtggtatccaataattagttagcagttttctaaattatttatttaaattaaaaaatttgggagttggtattaaaatgcaccaataattttatggtgtcttttgtggtgtttgccatcttaatgtgtctcttatcatttttgttattaatatgtacatatctttataactacgattaaaatttcaattttttttattaatatagtccatgctttttttatatttttctcaatgtgaataagattatatattagtaatttttatgtctttagatatgtatttaattttatttgtaccaattataattacattttaaattaattatatatttttcgtgatctttttcctcttcttccttcatatatttttttttatttttttattattttttttatttctaatgaattaatacattctaattaaaatatactattgatgaaaataatagagaaaaataggtgataggtgtcaatggcactactccttcactagtatatatatataggacacggatgaagtcacgcatgcgtgactggtcttgtatttttttttttaagtggtgaggaattgagctaaatataatattttttgtgcccaacttaatagtcattcttctttaagatgaattagttatattttcataaaaacaaaaaacaagaaagaaagagaggaataagttgaaagaggtattttttttttagtattttcaatttttttttttttttgataattcaagtgttgtattgctcataaatctcatatgtacaaacaaataggaaccttattggataaggacctatatgaatc

SEQ ID NO: 31814 - DNA, 1610 bp, Cannabis sativa
ataaaacaagaaaacaaccaacaataacaggagaaaaatatgaaacaaaaattgtgaaaataaataccttaacagaaggtcgatcataaatgacattaactttttcttgtatatccttaattacagtcatgacaaacgtgaaattaaggtcaacaaaacacctcaaagatataaaatctttggacaaggattgttgactagaaaggaccaattccaacttagattttaacatttgtatgtcatctgaatcagattttctagaagatgaaccactctcgaatttttgcttagttgtaccatgatcatctatagattcatctaaaaataagccatacaattgcaacttctgcctctcttcatcagatggacgaatgttcttaacccttaactgaaaaacagaaacaaaaatagaaaatatgaaacaaaaaaaataacaaagattaataatcatgcacaaaacaaagataaaatagtaaagaaactgtgaatcaccttgttcaacggcaaataaaaaatattgcctttcaagtcccgaaaagttggatttttggtcctaacctcattgatccaattcagaattcttggaatcctggatgcaattcttttgcaaaaagtgtttaccatcgcaggacaacattcataaaaccaaactatgaacacccaaggacagcccaacgctttataccaaccatcgtaggactgacctccctttttctcttttttatttttcatttctcttttttatttttcattttaattttttatttttcattttaataccatgctctattctgcctttgaaagaacaatagtcaactcaaatgactccataccccaacaatactcatctcatcgaccgttgtcaatgacatctaaatcaaacctaaaaacttccttaccacgagtattgctaagaaggaaacattggatgaaatacaacacagtgagtttcaatcctagggattcctcctgtcccctcctactgcccaagaaagcgtcctctatagacttatgatcaatcatttttaggccagggaaacagactttaattaactcgtttgattcctaggaagcgaatagtttattgttatcttcaaaacaatccagaccagctatcaagtaaaattcttcggcactgaaccgtatacaacgaccaacaacattagcctaattctttgggattgggctggtaaacctccctcaaaagaagttgtgaactagttggggatgaaaaacaaaatcagggatatctaagaaatgcccaaactgcatgtctcataacatttttaacaaattcacagataaagtattcttaatattagcaataacaaagaaattgctagtacatacgcacttggatctatagaaatcactgggactgaatttgttaacccaatcctgcattttacaaagaaagtaaatataatgaatgggcatatgcaagttgcaaaattataatacaactacaaaacaactataaacaaaccaacgaacataaaaaaactccttcaatatcaacatccatgatagttctaatttttacccattgatgatatatatttggacagcaaaccaactagataacaactatttcaatacaaacacacata

SEQ ID NO: 31815 - DNA, 2353 bp, Cannabis sativa
tatagcccatttcacagtatagaggtactaattttctatcacgtcataactcatctgtgctcaatactcaactggctactgctgcttgcatgttaccagacaaagatcagctttgagcttttaagtatttgttagtttggttctgtttattcatgtagatctttctctactaggtatttgtattcctccctcaaattaatacaagctagaggttgtgtttcgaaataaataacaagactacttaaagaagcaacagctaataaggcaatcaatcgttttagttacagaagatttaacctatgtactataagaaaagaaaagagaaataggcataccgatactcagactcctcgactccataatcaaaatgaagaaaacgaatgtgcaaagcagccttattcacatttccctccttagcacactctttgatagcatctaagtgagctaattgaacagtcctttgtatagaacaaagaacctccatgtcctcgtcctcagcctcagacttagtcgcattctcttcagtctgtgttgtaatagctaaatcagaagggtcataaccttcccagcctcctcttatttgcctctgtatattcaagcacagggcatcaaaaacatctgcatactcccaaatcaccttcctcaaacacaccaaatctccatcctcaataatagtagcggccgccggattttgaatccgattatcacgatcagcatcatcatcatccaccttcaacctcttcactcccaactcaaaaattctatccaaaacaccaacagaattctcccattcaccgctggaagctctcaaatcgtcaattttatcctcgctcttctttagaaattcagctcgcttttcaaaactctcactctcactctcacctaaaccatcattctctctctccttagtaccaatgctctccaaatcaaaattcctcctcatatactccgagacccgatcgatcaagagctgaaccaacaacaaaaactcggctcgcaaacgcaatgactcgggatcgaagctccaaacagatgtcgcattatcaaactgtaagagctcgagagtggccaagaacgtaagtagcgacggagacggacaagacgaagaccatagaacgttttcaaaacgtccagagtgagaaactatcgtctgaagcacagcaagagcaagctctggatttcggtctctgagcgcgatgattactgccctgagaggctcgaattgggcaagatggatgtggttggcggcaaggcgagagaggatttcagtttctttgtccattaagcagcaaaaggaagacgatatgccaagggttatggatttcgaaacatggagaaattggtttttcttggtgattggtaatctaatggtgtcttgacttggattgatgatcggttggtctgtttggctgtcgagaaaatattaatgagtagaaataacggtttgtaaaaatattaaggtgtctttcggttcgagataatgaaaggtaactgtatctattatatatgctaattagtattttttttttctacaaagttaacattaacataaatcatgcttatgaattttttttgactattaaaaattcttgattaactattgacaataattatttatgtactaaatcatgatctcaaactttaatattaatcaaattatacttctcgaacttttatttatgttaaatcatacttctgaaactttcatacatgttacaattttttattaaaattgaacaaaaattcttaaatataacaatctcaataattcaataaaaaaaaattagtctaatttatacatcacgcctaaaattacactttttttttttttacttttacagatttttttttttcttttacatttctttttagggaaaacttgattttatttatacatgaaatataattgtgtttgttttgtgtttttatacagttcagttctatatttaagaaattttagagatagagtaattgattaagctaaaagacactctacctatataccagtactaaactaattgtttcaattcaaattttattgtttttattaaggttatttttcccagcctgatgttaagacgagttgagaaaatttaaagaacataatttacatgtaaaaattaaaaaaaacctaaatatctcttaatctatatatatatatatatatatggaacatttcttaatggataatactattgatgggaactaaaaaaaattaataaagtaacaatctaataaccttttatgtcaagtttctaaacattatttttaaaaaaaaaaattatatttatttttataaaattggaaataataattacaactaatagtctaaaaaaaaattataaattatttt

SEQ ID NO: 31816 - DNA, 2453 bp, Cannabis sativa
aagtatgcagacattgacacaaggctctaatgatgttacagcctactatacacgactcaaaggactttgggatttacttcaggaatacagaccacaaccggtctgtacatgtggagctttgaagatcattcaggaatatcaggatgaagacaaggtgcttaagtttttgattggcctgaatgaatcatatttgaatgctagatcccaaatccttcttcaagatcctcttccaaatgtcaataaggctttttcttgtataatccaagaagagaaacaaagaggaatcatcattcctcaatctgaaagcagtcaatccacaaatgagaattctaatcagtttcctggaagcactcaaggaaatcaaagcaacaatagatctgatagcagatctgataatcgacctatctgctcacactgtggagttcctggacatactacagaaaaatgttatagaattcatggctatccacctggccatcgtctatatggcaggttccctaaggaaacgcccaatcagtctagcaatcagtagggaaaatcgaatgcaaatttcacagctgccaatgacaacaaagagaatatcagtggagagatggaccttgctgctcaatgccagaagcttatgagtttgttgactcagaagttgcaggaaacaagcataccagctgcacaaactgatcaacctgttgtttcaaacatttcaggtaatttcatctctattcctaatctcagctggatcttagatactggtgcaacacatcatgtatgttctaatccctctctatttcattcggttaaatttaatagtaggattagatctgttggtttgccaaatggttctagtaccagagtatcttttgttggaaatgttaaattattcaatatcatgcttactgatgtgttatgtgttcttgattttcatcacaatctcatatctgcttgtgctttgtccaactcatctaactacttttttctatttcttccccaaaaatgcattattcaggatatccccaagagtcaagtgattgggatgggtgaaagagttggaaatctttattataattctgagcataaagatcccattgtttgtattgtttcctattctagaataaatgatgacaatctatggcattatagacttggtcatgcttcttgtgtaaagaaacatcctttgaataaaaatttacaatttcaatattcttactgtcatgatttccattgttctatatgtcctcttgccaagcagagaaaattacctttcattagcaaccataatctgtctaaacactgttttgacctcattcacattgatatttggagaccatacaatactcccactgttgaaggttttaggtatttcataaccatagttgattattgttctaggttcacttagattcatcttattaagaacaaattcgatgcccaatttgttatacctgccttcataaagctgattaaaacccaatacaatgtgcaagtcaaaggtgttaggcctgataatgccaaagagttgcaatttccagccttattctcctcattaggcattatacattatcactcttgtgtccaatgacctcaacagaattctattatggaaagaaaacatcagcacttattgcatgttgctagagctattcttttccaatctcagattcctctagcttattagggagattgcataaccactgctccctatcttataaatagaactcccactcctaatctcaaacacaaatctccttttgagattctaaactctaaagctcctagttatgcacatctaaaaacttttgggactttagcttatgcctcaaccttaggagctgggagatttaagttctccccaagggctactgcctgtgttttcttgggatatccacctggaatgaaggtatacaaatttcttgaccttagcacaaacaaaattttttgctctagagatgtcatatttcatgagcacatttttcctttctcaaataacagcagtttgtcatcaaatttttctaatttttttgctgctgatgcttctcaaaagcatattgatatgtcaaattctcatccctgtgttccagcagcttgtgcccctaattctcaccatcaaaattatcatgacacaccagaaactaatacaccagcaccagattttcacacatcagaacctgatcccagttttttccttccttccacacctaattctattcacggttctgatgtgattaacattccaacaccggcttttcataccagacctataagaaacatttaaagacctacttatttacaagattatcattgttttttatcaactaacaatgttcaatctcaggtctcaaaagtttctacagatcaccctatttctgcaatggttgattacagcaagctttctcctaagtttcgtgccctggtgcttgctatttccagccactttgagcctcagttttatcatcaag

SEQ ID NO: 31817 - DNA, 2562 bp, Cannabis sativa
ccaatctcttccttcttatgttctgtgtataagtcttctctatttcaaggttaacaggcactcttagaattggtccttgacgtcgcataaactagttgttcctgagaaaagagaaaaagaattgatacaaatagaattagtaaaaaaaattaaaaagaaaaccaaattagaacaaaatttaatttttattaatattaactaaataatctacagtaacggcgccaaaaactagttgttgatttttctctacgcaagtgtatgtatcgatttcaagcatatactcacacgagtgaggtcgcacctacatggattatagttaagtattaaaacattaaattttagttctattaggtgataacaaatttagaagagagaattaaaattgaaagtaataaaaaaacaattagattagaataaaaattgacaatgattagagtttaaggttattgattttaattgtatctatcttatatgtcataatataatttaatttataattgccaatttctatgtaatagcaggtttactcaagtaatttatagtcggctaagatatataaatctaacttacatgcaattcttttactctcgcgataaatttaaacatgtaaaaggcatcaagcatagaaaccctaattgttatctaaaccacataggtactctcgtcctttgtcaaaatttattcttatttcactatagcatagtcgacactagcttctcagattttgtatcgaaatcataaaaaattaattgatggtcaggcaattaaaagaaagaacgaatgaaatagaacacataaaaaattggaagaagaatcaaatcatattaaaactataaaaagatgtcaaacaatctccatcaatactctaataatagtttagctactcatgttcatagtaacaatttgacacaaattaattaagaacataagaagaaaatggaagagaagaaattgttgaaaaagtctgttgaaaagcctctcggccacttcttttctctaatttttgtactctctaatttcttgcttaaaagtgtgaaatccactcttttaaatagccgaaaaaatataaaaaagatagaaaaaaaatgtgattttcgaatttcccttgggagagccgcgacactacaggcctagtgtcgcggcccgtgtcttgtacacaagattcactagatatttttcagcacacggacctcgacactaccccttagtgtcgcaaccctcaaacggtgagttttggcagcaagctttcctcgtttctttgcctcaacactaaaccccagtgttgaggcgtgcccatgtattggtcaaaagcgaccttctttgccaaattctggtcattttgcgccctgacatggaattgtaatgttgaggcactactctattattttcaatttcttcgcattcaaagctccaaacgcactgaaacatttggattttttttcttggatgaatttcctggttctctagcattgagagtttatttatttgaccttttttcatatttttccaaaatttctttatttttcttcaacactaaacctgcaaaattacaaacgtaaaattacacaaaaaaaaaactatttaaaaacactttaaaattgacctaaaaataacactaattaaaatctaatacacactcaattaaattctcaccaatagggccaatattgaaatccccacactagacttatcctatatatatttgagaattgttaaaaggcaccactagtacctagcaccctcctcggtgtcatacagttattggtgtaattaagtatcaagtcccatataacttaagaaaaataacttttagggaatatcgctaaccaatcatggggcgccacctatagaaggtgttgggcactactggtgcccaatatcaatgatctatatatgttttaccgaaaattgtatgggaccaaagcccttgcagaacacaatatagttccgccaatagaaaggacattctatttttcaatttattattgttatttgaaatgaaaaatttgattttctatgcatttattagattaaaattattttcctaaacttaagtcaacacatattagtagaatagactaacattacataaaaacccaattctacccctcccatttcgaacacttgaccctctctcttcctcccttctctccctcactctctgaactcaccccaaggactcgacctacaacctcagtcctttctcttcatgaccattgcgaccacagacccaacgatccatgaacccaacgacttgtctatcgataatggcttatccatcaacaatgttgcaaaggtaagtattatttttttttgcatgatttagggttaaaatatatgaaattattgatatatttatttagatttagggttaatggtctgcaattttgagtttgggttagatttagagttggaatggtcggatatgtgttttgggaaaaatttggttttaggcctgatctgatgcaagcccaatataggctcgatgtatttttattgttggaaagggataaaggttgaagattatagcctgatgatgggcctgatatagggtctgatagt

SEQ ID NO: 31818 - DNA, 3975 bp, Cannabis sativa
  modified_base (1265)..(1272): a, c, t, g, unknown or other
  modified_base (1790)..(1793): a, c, t, g, unknown or other
  modified_base (2119)..(2125): a, c, t, g, unknown or other
  modified_base (2283)..(2288): a, c, t, g, unknown or other
  modified_base (2599)..(2600): a, c, t, g, unknown or other
  modified_base (3520)..(3520): a, c, t, g, unknown or other
atatgtatttattttattgttttaagaaattcatgtttaggatgttagattatagaatataatcaaacatacacattagtaaatctagatcctggtaaaataagttccaacagttaattaaagtgataccagttagcaagttcaaggatacattagacttgcttggtatcaagacctgaatcctataaaaataatagaaaaataaaatattcctaaatcaactctaaataaactacaaaacgtccaaaaaagtatactacttttattaatcatgtaatagatagaaatgttagagaatacaataacccaagatacaaaattatatacaatatagaacactataatatatataataattagatatacatacttgattgatatataatatttaccacaatttgataatgcaatattatcaactaaatcttcctctctagatctttaaatcaaaattaatttttatttatctaattatcaaaagtatacaattgtgatgagacaatatatatttatagagtcagggaggggacttagctacataaccctagttgcactacgcctgctcatcaaaggcttcattcaactagaaaagcccacacctctacttcaactagacgttacacacatagatgcatgctaagctcattaactattgatcactaacaatatgggttaacacagaaagaattatccaatcaacttaagttttaataaaactaagttaatgtaagcccacataaaaagtttaacaagaaaaacataagcggagttctctaatttttttttttttttttgtaagagagagaaagagtgttaaaaaatatgagaaacaagatgaaagtaaaataatcatattttagtaaaggttaaaataaattaattaagattttttataaaatataattagttaaagaaaaatagtttgaagtagttagagtgagaatagtaataaaatgaaaaggagagaaaaataaaaagaataagtgtttgtatattatttttttttaaaaaaaaaaagaataataaaataaaatttgtgagagtgaaaaagggttaaaaatgagatataaaaatgtatacttattatatacgtatacaaagattgaaaaaaatagtttaagataaaaaatataaaaagagagagaattgaaaaataaaataaaaaagagaaatatggtcaatgctgacttggacaatcatatgccttccagcaatggcatgagcactagtgtattaagcaaacttaagaactgctctttgaccannnnnnnncgcagactggacaatcatgtcctgcatatttctaagttattacacttagttattgtaatgtataaaatacgctaagtatttaataactgatttacctcgtcaatatttcttatgaatagcaaggtggatgtctcgctatatactctttgtggatacttcgagtaacttcacttattcttttaaaacgaatcttgtccttggatctatgtcttttgagtcaggatggtgtctcatcaatacagatattaatagttttgtatccttgcctcgcctaagactatacagccagcgagttatgaatatactctattaattatatatttaatgagtttattcctttttgcataaaatgatatattattattatatcaggtggctcatattccactaattgacatgtgtcatcttttgaagtatagctgaatttcgggtataacacatatattctttaaaaatatttttaagttgaaaattaattaattttagatcaacttaaatagggatattttttcaaattnnnntgattagttcaagatacttaatttattatttaattaaattctgaaaaatgatttaagttgaaaatttagttattttagaatagcttgaattagatattttaggatttattttattatatttcaaaattatatatatacttctatatatatttagatttttgaaattaaattgaagttgaaaattattttttttaattaattttaaatcaacttaaattaagtaattttcatcattaaaatatatagtttaaaataagtgattaatcaaaaatatattatttcaaataatgagctttaatcaaagagatattcgatctccattgttnnnnnnncatagttcttgttttagtgagatttatccctaacagatgtttgttcattaggaatttaatgtcatagaatcctgaaagataagtattattgtaagtcttttattcttagtaacgtccatcctaatagtgactattaagagtagggcttacaaagtatnnnnnnatggtagaagctcatgaaataggaatgaccttgactctcgcctaaaacgggacaacatcggattctctttttgatcgaataaatggttgctagaatggtttctattctagatgagttgactactctattcaatggatgatatctttgactctcccctaatacgggacactgtatcagtttgttagaaaccttggaaaataattaaatattttttattttggtattttttcaaacatgtttccatacttgttattttctgaacttgtgtatgaatttaattgaaccaagtaatttatttctatttattgatnnttgtagtgtcaaaatgaacaacctacaccccgatcctaataggttacatgcctttgcaaataaactctatagtgtgaaaatgtctcttggtcagagcatcaattcacactttctcatgttgaacttaaaatccaaaaagcaaatctgctggaattgatctatcaaaagagcaatgggttcaattcactctcaacaaccttccacctaactataatggatttgttgtatcatacatgatcaacaattttaacttatccaacatagacaagctggaggctgaactgtgtgcttttgaatggactttgccacttgcaaggagggttccctccagtgttgcagataagggtaaaaggaaatctaaagatattgaggatgacacctcaagcaatgctgcttcttcaagtttaattttgagagctagaatcaaaattgaactagcaattgaaacaattaaagaacaattgagcacacatactcttctgtgttctcactgtggagagaagggacatttgaaatccagatatcctagacttctgaaccactggaacgaaggcaatgcttttgtttttgaatcatgtgttttagagaatgacaaatccatttgaattgttgattctgaatctactaaccatgtttgttcttacttgcagctgcttgaaacttgggattacttaaatcaaggggagttgaagctcaaagttaggaatggagaattagtatcggtccaagctaggggaaaagcttgcctcaagtttcagaaaaaaaaaattcttttagacaatgttttgtttattccgaactttagtagaaacttgattagtgtttcatgtttataaacacaattttatcaattgaatttttcgagctctatttgcactattttttgtaatggcattcaattatgtgttgctcacatggancaagggctttatgttttaagatcggatataccaattgcgcttaataacgaacttttcaacatagctaaacctagaaaccataaaaggaaagagattgataatgatgatgaaacatatctatggcatttacgactaagtcatataggctatgatagacttcacaggttaaccaaagatggtctattgaaaaaagtaaccttaggtgaattacctgtttgtgaatcttgcctagaaggtaaaatgactaagcgttctttctctgtaaagggagagcatgtcaaagaacctttagggttagttcattcagatgtttgtggacctctaaatgtaaaatccagaggatgttataagtactttgtcactttccttgatgattactctagatatagtttcctttacctaatgcaaaagaaatctgaaacgtttgagaagtttcaggaatttcatgctttggc

SEQ ID NO: 31819 - DNA, 3785 bp, Cannabis sativa
  modified_base (134)..(138): a, c, t, g, unknown or other
tattttggccgaccatattgaaagacgactccaaggcctacgttaagaaatgtgataagtgtgaaagattttcaacgatacctcgtgcaccgcccaacaaactaactcggatgcaaagtccttggccttttgcnnnnnggggaattgacctgatcggacagttactcaagggcaaggtggggtacagtacgcagtggttacaattaacttttttaccaaatgggaggaggcagagccactggccaccattacatccaaaaaagtccaagacttcattgtaaagaacataatttgtcggtttggaataccatataagatagtctcgaacaatggcaaacactttgacagtcagtccttcacggattactgtgtgaaccatgtgatcataaaaagtttctctgcagtggcacatccccaagcaaatggtcaagttgaagcagtcaacaagacactcaaggataccctaaataaatgacttgaagatgctaaaggaaactggctgaatgaacttcctgaagtactatggtcataccgcacaacggagaaaatagcgaccgaacagactccatttgccatggcatatggttatgaagctatgttgcctgtagaactcgaaccgccccccatagaagattgacatacagccaggaagttaatcgtgcactccttgcagaatcactgatgaagttgaagaaaaatgaaccacagcaaacttgaaattgataggtcatcaacaaaaggtagctcggtattttaacaaacaagtgagagcatggaaattctttatgggagatatggtcttaagaagagtatttttgaacaccaaagacagtatgaccagtgtgctcggaccaaactgggaagggccatatcaggtggtcgaagttatagaatcaggagcatacaaattgggtaagtatgacaaaaaaatgcaactcgttctagtaccaaggtattggaatggggaagatttaagaaaatactaccagtaaaagtaccaggttggctgaccacgttaagtacgaaacaaaagaacatttactcttaagtgaatggccttctgggcggaccccgcctaaaggttcagataaaattacaaagtactcaggtcgaatgaccacttatgaaaaaacaatttttattttctgcaatttgttttgtttatgctaagctaaagatcagattagatcaacataatagcttcaatgtaagttactatggtaacagacatatctccgaccaataaatgaataaaaatgtttatttcaattcgaattgagtcaagttcattagcatgtcatatatttattattaaatgtgtacaaaaggtttggtcgtacccaaagccccgaacagacaaaaagcatacttgtgaaaacaagtgaccaggagtcaaaagtccgcttgatcacttggggggcacctatacctgtacaaaacatttggtaaagaacaaaacaaacacagttgcacaatgattataaacaagggatgaaattgattaagaataacaatgcattaaaacttgggattaaaggattcctggtcagccagttgttcaaaaaatgaaaaatattccaagtttaaagactgcttggccggtcaccttatctcaaaagaaggtctattggccgaacaaacatataaaaattagtaaaaagaaggcaactaaacagtgggagtcccaggctctttgtacaggtcggctggatctaaaggagctggaggatcatctaagtgtgaagaggctggacgatcatcagtctggacagaaggagccttgacattctactcggttggagaggtagaagtagtcgcctcaggattcttgttggatgcctgagccagtagtcgagaaacatgtctttgtaagtcccaatgtattcaaagttttccttgggatttgccttccaaaagtcataaaaaatctcgagaccagctgtctctaaggcatccactttcttcccgagcttctccacctaggacttttggctcttaacctcaatctcaagctccttttccctagtctttgtgtccttaagctcatcttccaacctgcgaagaagagttcggagaccctccctttcatcttggagactggcaatgtcccgagacaaagaagcattatctgcctcaagttgctaagttgacggcatctcctccagttccctagtcagctcggcaactctagtctcaacaacgaggagtttcttattaacctcaccaagttccctccgtgcatctttggcgtcctttttggccaagtccatttccctccgcattgtgttggaagtggcaaggttcttgacagcagccgatttagctcgggaataggcacaggccatcttcacactagtctgtacgaaaataagcattaaaatctgaactagtcaaagagaaatgaaagaaaagtgttagaaaggacttactcgtgaaagctccttcaagactcctcccatgaccagctccaaagacaagtaattatctgccccagccaactgttctttcacctccagaattgaccgggacacatagtggttaagcatgtctttacctctcttggtcttcgtgcacaataacaaaggtggggcaggggccctaacttgttcagatccgcgccttaccagctcagatccagacttagcttactcaggtccatccgaactccctcctcgagaacctttggacttggcgaccttcaaggtggaagggtccacagcaggtagctcctcagagagatcaatgacctcttcaaccggtgccttctccttggacgaagtctcactgcctttagacttcttggtgggaggggacaagcccgagctcccccccactctcttcttcaaagccttgataatcttctgagacatctctgcacggaaaaaacaatacagtcagaagaagacattaaagatatgaaggcataaaaatcaagaaaagtaagtgcaagttgaagtactctgcacgctggcaggagcatctgcccaaacaagtacagatggagcattgtcatccgaggaatcttcttgctcctccaggacgacttttccctttcattctatagggggagatggccgagtaggcaagccaggctccctgatccggatagtatgttctattggcctatgctcggtcgggagggttttcttcttctttagcggcctctcctgctctgaatattctttagcctccttttgtagctcagaatattgctgagcatactgcttggctccagcatcacccttcaacttagcctcacgcttaagttgaatgagctctttctcttgctcaactccctcagcccggccagacctggacttctttttcctccccttcacaagctggggtataaagtttgctagataaagcttatacttcagaaagttgtccttcgaggtcaacaaagtgatatttcgagcagcatccgacagttggagaattttctgggccctttccgtaagtgccaatgtgaagggtggacggcaatacaaagggatatgttgaaactgagtatcggtaacctccatgccctctacaaagtaatactcatcaacaaaacccccaatcttgctaacctcggtgtccacggtgcccgtcagccacttgtagtccagctgagagaaatggaagtaccccgacttgctctgcttaggggtagacttcagatcaaaaagactattgatgtcgtgcggggacagcacaccccatccttgagtggagtaaaggatgaacagggcagataagtacttgatgcccttgggtgtgaactgttgggttttatgccc

SEQ ID NO: 31820 - DNA, 4478 bp, Cannabis sativa
  modified_base (29)..(29): a, c, t, g, unknown or other
  modified_base (471)..(472): a, c, t, g, unknown or other
cgtgaaaccgtatttttgttttttttttnttttgttatttttgtgcatttgtgaaattatcccaaaatattatcccattttttgcaccatgacgcgacagcacatgctggtgacacatggacctgattccccatatctggccgagagagatgttccgaacagggcacaacatacacttgcacgaataatgtcttcccagccgagcagtgaataatccgagcaacacatcaacacttagcaattccagaatttgcatcgtgaagataagaacaatccctataaatctgggatcgtatcacagagatatagcaagctgtccaaatcccacaatctgtgtattctaaatatgtaatatatattcttaccaattatagatattgtaagcaaaagggaaaccttccctcaagcatttagccctataaatagtgatccattatcactagtagggggtcgaaagaattactttagagnnatctaagagagcatactcaaagatttcattgtgagagcttcaagagaagaaatattgtattctttgttcttgagttaatacaaatcaaggagcgtaggctattaccgaactgaacggggccgaacctctttataaaccttgtgttctttactatttattcatttatactatacgtaaatcatatttcttatcgcttattcttagactcattgtagttggctaaaagcgaggtcaacaaggtcatacacttatgatttttttttaaaaaaaattcaaatagcaaaggattcctaaaagtggtcatctactggaatccttatattgaaattctaaaataccgtattttgaactacaagtggcttgatccttcataaagaaggtatgtaggcaactcggttaattaaattgactgagttcagctgcaattctaaatcccccaatttttccaaaatttacctcaaagtttaatatcatcgtaattggaatcaaagggtgtttcttttaaacaaaaggattgtaattaagagattattcttataaccttagattgatcgaacttaaattaataaactcttgtgctatgaattcaacataggtgaaattgtgttttgcatttatttttaatattttaaatgtgaaattttcgcttaacaatggtcatcaccagtaagagctaattttcaccattagatcatcatctagggtcaaaaaaatctaatttttatttttctcctattttgtgagcctcctttacctataaaaggagagcttccttagctcatttttcacattcagaaaattacccacaatgttagaaaatctctctctagtttctctctctagaaaaattggagcttttgacacgtagtagtgaactactataagtttattgtgtcttttccttctcgtcaatttagcaaacatgtgtgacttagaagtctaatctaaatttttgagtgaacaatatatacaaataaattttggttatatttcaaattataccatataaagatatattttttaaagtaaatgtaataaattggtttcttggtaatactactaagttacttttaaaaacacattaaaaaaaaaattggccgaagggagcaagtgagttgccaaaacccagaggaagaggccctaaaccctagcacctgttcaaaattcatcatctctcaccgaaaagtttcaggcattttcttcttcttcgtcctcatatttctgtgtgcaaatgaacaagtaatagcagctgcagctatgaataaatcacagccattttcgtgggctcgtctccttctcaaccaatctcttaagaagctaccaaagccgggattcccattttcccgagattcttccactttccgacgttttcctcactcccagacccccaaattttcatttcctgggaagacccattactccactgcatcgtccagggctgccgaggaccttttggctgaggttgaaaaggagaggcagagagagagggagcagaggaagagagctggtcttgacactaaagacattgacgaagaagataatgaagattacattggtgtgatgccttcgattgtaaaactcgagaaggagaagctcaagaacgagggagacttgaacaggttcgaagagaacaccgattccgatagtgaagaagacgatgagaggttcactcccgacgccatgcagaagaagtcggatgagtttcagaggaagttcaagcgtcacaaggagttgctcaagtgcttcactcaggctggtatctgatgccccttttgcatatctttcttgctcttggtttttcgatttcaggtcaaagaacattacatttcagatcatatgacacttttaggcaatttaaaaaatttgggagaaaaattgaagcagcatttggttcttagtatagcatttgattctctctataatatatttttgcaatgcgaattaaatggattttggtaagattctctctataaaatatgttttttgattatgtgtattgttccctttgcatttcctgacagagacccttgatgaggcttttaagtggatgaataaaattgacaagtttgagcaaaaacatttcccacttcgccctgaatatagggtcattggcgagttgatgaaccgtctcaaagttgcagagggcaaggataagttcattcttcagcataaattaaacagggctatgaggttagttgattggaaggaagcttatgatccaaatactcctgccaattatggtataattcagcatcaacaaggtggggtctatgctgacttggaaaaggaggaacagcagaaggagcaaaacttggaaacggttgccgctgatgatgatagtgatgatgaagaggagttcgatgacatgaaggagaaagatgacattttgttagagaaactgaatgatgttgataagaagcttgaagagaagcttgcagagttggaccatacatttgggaagaaaggtaaacgtttggaggaagaaattagaaatcttgcagaagaaagaaatgctttgacagagaagaagagaaaacctctctacaggaaggtaaataattatattattacattggaaataatgttgcaaatgcaatcatgtctgaaatttattgcactagtaatcatttttgtattcattgtttggggaaatgtttgttgaaatgtgattaaaatagttgttcaactatttagtattctttagtgtttcttaatttaattgttttatagaattttcagctatttttgtaattagtttttgctataatcaaaaactggcagggttttgatgtgaagttgattgacgtgaaccgaacctgcaaggttaccaaggtattcgccagacacacacatacatgtatatgtattatatttctttggtagcaaagagtgttattacaactttaatatgttctgatctctgtggtttagggtggccaagtaattaagtatgctgctattttagcttgtggaaactatcatggtgttgttggttacgctaaagccaaaggccctgcaattcctattgctctccagaaggtattagtttgtgcattgaattgttcagggttatatttgcttataactttttggtagcttaatgcttttttgtttctttttgtttattcttttagctcaagtaatccatagatatgattgtttcttctcatagggccttgctattaacaaagtaggctcgttctctttaatatcagttcaaataagggtgtattttttcctttgatgtcctacataattatgtcgaagcatttaagtttggcctctttaatacttgtggcgtgccgtagttgtacaagatttttggttccacagggatggaatgagttatactaggcttagtggtatcccatgtcttgcagttcctgtgttaagtgtctcgatagaaggcatgtgaaacaaccataatatcataacttattttatttggtgtcagcattgtttctttcattttagacttaattagagattggagagctttgttgtaagcttctctgctatagcctcataggtacttctactgtgagggatttaatttttgtttttgttccctaggaaaacaaaggtaaattgtttattcagggtagcgagtttgttcctaggtttcctagttttggttacatgtatctggaactcggtttatctttgtaaccacagtcttccaccgccacaagtgagggtttttatccatattggggatggggctagtctaagacaaaggtctcattttcaaaaaaaaaaaaaaattgaggattgcaatagagtttatttgatcggatagggaatcagttagtggacatgaatcattagaaaggcaacctgagatttatagtgtgatatctagtcttcatttaagtcatcttagtgagctgtgtactgcacaaggtacataaactcttgccataattctagattttaaatttctttatttataataaaaagaagggtaaatagcggtataagcacccaaagttttgagtttgtaagt

SEQ ID NO: 31821 - DNA, 1972 bp, Cannabis sativa
aaaaacacagtatttttgaaaatatttccgtgtgacagtatttttgtaaaagttaactcaaattccagtatttttgtaagtttcccaaaaaaaaatgataaatttggatcatcaaccggcccaagcccaacccacatccaaaatagttgagcccaaaacaaagcatctggtcccaatatatatttcttggattaatatactattatcatttttatatatttttcttgagtgaaaaaaatatgacatgatttctaaaaatgtcgattttttttacattcttgtaagaaagatacacattatacacattcacaccaaaactaacagcaccaggcctgaatgatactctagttacatgtataaagaattgaatcaatctcttgcttctatggtattttttgtatctaataatccattgattctatacttcacattctctttcacttggtgaacacacctgtgcacagtttgcattttactattccataaacagtcattttggttgcttcagatttgataaatcaaagcagccaccactgctccataaactttccttctgaacttggatgttttaacccgagaaatccacctgatcatggttgttagaggataatctgatttttgccaattcaaccatgttttgatctcttgtagacacctgttactgaaatagcattcaaaaaataaatgatctattgtttcaagctcaatgccgcataaaaggcaactgccttcttgacagacattaaatttcagcaatcggctcgtggtaaggagcctcttttgaacagccagccacattataaagctatgtttaggcatgttatatctattccaaactttcctatgccatgaaactctattttgatcaacatttagcagcttgtaaacttggtggatactataacttcttaccatgattggctacaagtgagagagatttttatgtttttctttaagctttactacttgtctccaataccagctgccatcattggtttgatagtcccaccaatttgaactttttatgtatacatgatgtacttattttacccacaagttatcttatttggtggctacagcccacacatacttccctagtgcaacattgtattcctcaatccaagccctccttcatttttgggtttgcataaccgatcccatgcaacataaccgatcccatacattgtattcctcaatagtaattttttgaaaaacataaatattttttctattttattatttagaaaaaaaaaaacaataatgaaaagatattttttttagatatgtagattgggtaaaaaataataatagaaaaatatcttctaaatatgtacaatatgtttaaatttgtattgctatgttaaaaaatattttatgtgatataattacatttaatataagataaaagataggagatatgtgtagtgagtttaaatttaaattattatattttaaaaatgaacaacaattaatttttgttatatcatattgagtataactatattcttttgccttctatcatatttttttggattggtatactcaataagtagtattagagtatagtgcattctgtatgacaaatgtaaaattacaagcatttatatgggtataagtaactcatcattattattaattgattttgaaatgaaatatcataattcttgttatagtatcatgagttatttctagcaagtatttgattttcacacgatggcagtcagatgacgaagtaaggaggggccaaataaaaatatattttcacctaatttttttttttaatatatagtattttataaattaatataagaagttaattagccttatacaatgtatataaaataataagaaatgctaagagcaccataaaaatacatgtaaatatatatcatataaatatactcttcaaaaataaattatattatttattttttttgtcactttttactataaaatagataactaatttaaa

SEQ ID NO: 31822 - DNA, 1692 bp, Cannabis sativa
gacattttgcgatacttttcacgatatatagtgacattagagcatactgaatgttcaggatgacatttattaatatttggcgacatgttttacgatatgtggcgatattagagcatactgattgtgaggaatgacttttaactttggcgacaagttgcgactatatttacgacatgtttatcttatgttttcaaactacgatggtcgcgatgtatatcgacattatttgcgatatttgtcgatattattcgagttatatattagtgaatttgggaatgatatttatcgatatgttgcaatatgtggcgatgaacttatcgacatttcacgatgtcactttgtgatatttctcgacatatttttctcaactaaggttttttcttctttttttgcagattcaagtgtatttgtggtcatactttatgatggagcttgggcagatgaatgtttcaacttgatattcaataacacaaaaagcaagatgttaatatttgaggttgatactactttacagaagatacaataaattttgtatgaagagttggatatagaccttcttgtgtatgaactgaaagtagatgtgtgttacatatacatgaaaggcaatatgatactgccggaggttttagtgaaagatagtcgattaagattcttcttaagaatgaagacaaaaatgagtgtggaaaactttcttccactatttgtgattaaggttaagagacatgcaattttggggcctactccgccaactgtccccccaagaagtgttgttgggagttttatcctagaaataaatccagcgataagtttgaatgagtaacccctactaatatagatgaggacaagtttgataatgcatgtgaccggtttgatgagtttgatactcccttttacaacaataatcatgtggtagatttgaacgaggatggtaatgtggagttgcaagttgatgaagctgtagaggtacctgctttgaggttagaactacatccactaccactaaggaaccagaggacagggcaagaaaaaagaacccctcgtagtgaaaatcaccaaataccaggcactagtagcagctggctaggtcctactcatagtactgtaccatctaattttgaagtttgtacaaaatttaaacctattgtatggacaaggaaagacatagaggaaaataatatttataaaacttctcttagtggtacacctttagggaaagtacatattggcaagttgtacacaaacaagactgaattgaaaaatatagtgggaaggtttgcattaaaaatgaattttgagttcatggtgaggaagtttggcaccgatgtattttacgcaacttgcaaggattcaaattgttaatggagagtgatggggaggaagaaggcacattgtgacttgtttgaggtcattatgtatcacaatgaacacacatgtaacccaaattctagacatgatgataaccgtcaagcagcactatgggtcgttggccaccttattaagaacaggtttaaatcagatggaactaaatacattccctaatttaaattagttagatattcaaactttttcttggtaaattttatatttcaataaatctcatttattgaaattagttctattacaaattatggcaaatctaagcccataaaaaagctcaaaaataataaaatgtcataaaaaataggcaaagtt

SEQ ID NO: 31823 - DNA, 3642 bp, Cannabis sativa
  modified_base (150)..(156): a, c, t, g, unknown or other
ttcccttttgcttacaatatctataattggtaagaacatacattacatatttagaatacataaattgagggattcggacaacttgccatatccttttaatacgatcccatgattgtagagattgtttgtgtgcttcacgatatcaatctnnnnnnngctaagtcttgatacattgctcagagagatgacttagtttgttgtccggatcatctgcccttgccgtgcttggtcagtcagactttgtccatgtagacgcaaggctaaggtctgttcggaatatctctctagccaaatgtagattatagcagacacgtgtcaccagtatgcgttaccacgtcatagtgcgaaaaataagataacaaaaataattttttatccaatatgaaccataagcccaaggatctcaacataatatatagattaaatctagagtaatgaaagaaagacaatacatcttgaagcctatcaaggtatccttgctatcttttagtacagttaacgatcctccaatctaagaactatcattgaagaattcacaccttaatcttccaagttagcctcaacactcaggaagagagttggctattagatcttaattgatgaatcaatttaggtattacactgtgtactcaactcatgagacactgcaattgagatagagttttttagtctcacacacaccttaattgttgtaggcgtgtgagacctagagagagagagagaataggagagtgtgttatcccactttttgcactatgatgtggcaatacatactagtaacacgtgtcagttattccttacacttggttagagaaatgttccgaacagactccaagcaagatatatgcacgcacaaagtcttcttgaccgagcagagcaagggtagatgacccgagcaaagagtcatctgagccgtgtatcaagacttcattattctaggactgatatcgtgaagctcaagcatacaagtagtccctataatcatgggatcgtatcaaagggatatagtaagttgtctcaatatgtaatatatattcttaccaattatagatattgttagcaaaagggaaaccttcactcatgcattgagccctataaatagtgatctatcctcttgtgaaggggatcaaaagaattgctttagagatagatctaagagaaaataatcagagatttcatcgtgagagctttgagagaggagacattgttttctttgttctcaagtcaatacaatctaaggggagtaggctattaccaaaccaaaggggctgaacctctttaaaatcttgtgttctttattgcttactgatttctactctgtcttaattacatttctaattgtttattaattactgtcgttggctaaaagcgaggtcaatatttttgtgctttcaatgagagcaaaaatccaagtttgctctttgccttaagttttagaaaacacatagaatggtggtgcaaactcgcagaggcgtggttgaccagagtgactcactattgacagatcctgccttgcaaactcctggaattacaagggtcccaccaggaaccaaccctggacagccaaacacgcagccacctactatgggccaaggtgtgacatctcctctggctgggatcacaccaggtgtgcactagactgggaataccacttcgacaaccgatcaaagcactcccagcactggaatcccatccacaaccaatgctcagacaataataggagatgacactgagatttagaacctccgtaatgcccttggagtcatgcaaggtcacactaataccttgcatcatgaccaggaggatcatcgtactgcaatgaaccttgcgttcgaagagtagaggcgtcagttcattgagtggagggatagggatatggaaacattgaaggctcagcaggcagccatcgatgaccgaacaagacaggccaccgtattgatacggaaagcctatcaacttgttaatcaacaaccagctgctacgtccagtatcccactgggcggcacagaagagatccctgctaggcatactgcccaaactcataatggtcagtcgtgcaatccccagtcacaggttccacctgtgggtcaagtagtaggtggccagaccctatctgataattctttaggtagaattatacctaataactccatccaaactgacagttctggccaataaactggccaaaccaatcaatcactgaggcaaccttgtgtttcggtattcaacagattgggtacgacccatgatctcaggaatgatttgaatagaagaagaagtctagacgaacaatacgtccaaccggccactcagtcaagtatccgcatccaggattcagctgtaagagatcctgacatgacacaggtcggccaagaggctgaaccagttcacccatctgtgcaagcacaattagatgaactaaaaaatatgttccaatgcctagccgaccaaaaactcactgatctcgagcaagatcgagcatgcaaatcaccctttactcccgagatcaatgtcctagaactaccctttaagttcaaaatgcacacctggaagatgtatactgggaaggaggatcccttattacatcttaaatattttgaaatgcaaatggatctacaagaggtacgacgcgatgtgcggtgtagcttattccctgccacattttcagaggccgcacaatagtggtattttaagttaccacaaggaaggattaattcatggaaagatttctcttcagagttccatgcgaaattatcatcctctcgtcaactcccatcacatttagaagacctggtcgaagtgaaacaaagactaggagaacctcttagagcctacataagcaggttcatgacagaagctacgaaagtagcaaggttaattaaagagggcatgttggccgccatacttggggcattgaagtagttggagaactgtggaaagacattaaaaaaaagtggccctgtaggatctatggctgagtttttagactgagcagatggatttctcaagctcgaagaggctttttagcgagcatatgtcgaacctaggtcgggccaagcacaggtcccctcggtaggagcacctgctcagagcccacaatatcctagtacctcaactctgagcagtaaaagatccaataacaatagcaggcaaggcaatgggaagaaaggaaagttcgtaggcaaagccgaacaaacccctagagaagatgcctctaaagtcactgccttctttgtcctaactgacgacctagagacaatctacatggcaacctagtctattgtcccatacaaaaaacctgctcccctgaaaaaggacataagcaagcgggacatgcctaaattttttcgttttcatggagattatggccacgacacaaatgagtgcaacaacctgaagagcaaaattgaattcttgataagaaaaaataacccgcacgtgcagaaatatgtcaaggtcgatcagaatcaacgggccacctaagtagccaacaaataagacctgctaatgcctccaccagtagacgggcatttacaagtcattattggggcccacacattgctagagattcagccaaagctcgggagaggtatgcccgtgttgtgttttgtgccttaaataaaacccattacaatctaatct

SEQ ID NO: 31824 - DNA, 1494 bp, Cannabis sativa
ggcataaaacccaacacttagctgtgcaccaaatggatgttaatactgtgttcctcaatggtgaattagaagaggacatctacatggatcaacccaaagggttcgtgatccctgaccaggagcataaggtctacaagttggataaatctctatgtggtttaaaacaagcacctaagcagtggcatgaagaatttgacactttagtcatttcaaatagctttaaagttaatgaaagtgacaagtgcatctattacaaatctgaaaatgacatatgcacaatcatatgtctatatgtggatgacttgctcatttttggctctaacattcatgccatgaatattgtaaaatcaatgttgtgttccatttttgatatgaaagacctctgagaagaatccttggaataaagattactaggtctgacaagggaatttctgtagatcaatctcattacattgagaaaattctaaagaaatataattactttaactgtaaacgtgcttgtaccccatatgatccaagtgtaaaattatttaagaacactggagatagagtaagacagttagattatgctagcataatcaataacttttgatatgctattgactgtactagacccgacattgcctatgtcgtgggattattatgcaggtttaccagtagacctagtatagagcattgacgtgctattgagagggtcatgagataccttaaaagaactataaatcttggattgcattatcaaaagtttccagctgtccttgaaggatatagcgatgttgattagaatactttatcaaatgattccaaagcaactagtggctatatttttagtatagctggtggagttgtttcttggaaatcaaagaaacaaaaagtccaccatggagtctgaaatgatagcactagcaactgctagtgaagaagcaggtcagttgagaagcctgctagctgagatccctttatagaaaagactgataccagctgtgttgatccactgcgatagtaccacggctattgcaaaagttcaaaactgttattataatgttaagagaagatagatacttcgtaaacatagtattgttagagagttcctctctatagaagcagtaagagtggattatgtacgcactaatgaaaacttagatgatccttcgacgaaaggattagctagagagaaagttcttaaaacctcgaaaggtatgggactactgcccttagaataatgagtcactcataatggtaacccgacctatagattggagatcccaaaaaataggcttaatgggtaataacaagttatgatgtgataggaacgagatcatactattgttataagaaatgtgaagcatgaatttctaaagtgatataaggttgatataatagaaactcttaatgagatctatactctatgtggagtagagtaccgagctacaggagtactcttgatagactcacctacgtgaatgtggaagtggggccgcttcctataaaatt

SEQ ID NO: 31825 - DNA, 1443 bp, Cannabis sativa
ggtaaaatatattccaacagaatattgtgtggattaatgcaactttttattttaagttttatccatattttaaaaaaaaaaaaagttgtatagagaaatgataatgaagtaatttatatatggagcttgaaattaaaagaaaatatctattaaaacaaactaatttggggccaagcttaataatataaatagaaacaaatgtctcatttacatagttcaaattaaaggtaacgtataacagaacgttagggagaatagtggtatcactaaggcaaagaagattatttgaattattcatagtgatatggtaatgatggagaatgcttttatacttgactggatggtcaatctagtatacgaggtgactattgaaattacaagaaaagattgtaagtaatgatgaaaaggtatgctcatccagaatggaaaaagcttataaaccgggatgcaatttaatgggcatgcattcaagtggttggtgaatgaatgttagaccacacacaaagtaagtagattatttattaaacaacgaactatataattgagtgtaaaataagttttagaggggttaaccaagtatgatgatgtgataattgcaagggaacaatggtggtgtatgaattagagagtaaaaccttagtagtaatgatggaaaaagtatacgagggtcttagatattgatgaaaattagcatcatcaaagggactcactataagttggcatagtagttcatgccaagagattttcaatgaaatagagaatatacttaaggtacgtacatctctgaatgtgtttgaaaagatttttaagacttctaccaattacagaaacgaaacttcgaggtcaaggaataatctctgatttggatttcatcttatgaacaatgcgtgttagtttgaatctcattgtgaataaatgataatattcgaattataaactatatgattattattattgcttttcttgctgagtccttgtgactcacgggtgttatatgatgcaggtaagggcaaggaaaagttcgagcgtccgtgaggtgactatcttctccgtaatgtacatattgacatcaccggcctgtgtaccggatttccaggagttatcttgagctgtatctactttgtattttggttttatatttttgaggcgtcatcgtatatagttcttctataaaactctttataatagggattcccagaacacgctttttatgccgttataatgtctattttttgtatttcattttagttaagtttttaatattatcacggtttctaataattaattaatcaattagtattaaactagtttataaaatcatacatgcggcgtctcaataaattagggcgttacagattcactcgttaaagtttctcagagaagatgattcttataacttctattttgggagcttaataccatgagtggatgggaacatgttat

SEQ ID NO: 31826 - DNA, 2755 bp, Cannabis sativa
ctcaatgtgtctatcatttattctataggaaaatctaatgcacgagaacctattgaatgaaggttcgtctttaaaatttgaagtgtggcaacctcaagtgagtatagaccactttcaaatgattacaaaatttagaagaagcttatgctcaagcatatggattactcccaacaccttctaccaatataccaaatgcaacaacttcgtagatgacaactctatcaatttgccccccaccaactacttttaccactcctacggtatatgaaccaagtacttccgtgcagcgagctgcacaggctagtttttccatatttggagctatacaaactagatacagtgccgctcctagacaaacgaacctaaaagcagaagttccagagtccaatataacctagtcacagagtgaaaggagttcaaagggtccaaatcgaaatgattctgtgaagaaggaaagctcaagaataaagatacactgagtagacaagtcttatagatactcgagagaatgtgtagaaggcaacttgtaacatggtttattacaagaagccttcgccaatgtacaagggcagaaaacaaagaagagatcaaaataagaagtgcgaatatcgcggtgatattgggcacaccataaataaatgtgactatctaaaggatgaaattgagaaactacaacggaatggacacttatccaattgggtaaggattctagttatatattctggacagacagttgtacacagacaacttttcattttaggacagcatggatccataaatcctcctcagggagtaaatcctccacaagctcttggaatacaagctccaaacgcacaagcccttcagggggcatagaacactccaacatcagcattagctgtagcccccattcccataaatccgtaccctcaaagagctgctttgctaatcttagatggttatgtagcaactatttctggtggacctcacatttccagaagcactcaaaatgtacagaaaaattatttgaatgagttaaaccaaaacaaagcttgccaccgggtacaatcacctgcccaacgtctaaggttgatgaatttaccaataactttcacagaagatgacaccaagcatgtgcattttcctcacaacgacccactgatgataaaggctctgatagcaaataaaagagtttctagaattcttgtggataacggaagctctgtaaatattattttcaaatgagcctttaaagccattggtctggtggaagccaacctattgccatgtccgattcaattgcaaggcttcaatggagacacactaattcccatgggaaaaatacaactttcgatgataataaatggggaagttcccggaagcaatgcaatgtcatcattcaagtacaacacatttgtaatagttaattatgctatcgtgggagccctaattatgtcatcattcaagtactgatcaaatcctccttgattgacattttttaaatatgctatcgtgggagccctaattatgtggaagggggtctcaccactaccgaaagtgcttgctcttggagcaccctaattggggagtacatccttgaatcagatagtgagctcctcaacctcactcagaatttttgggaatcgtctcctccagtcggtcaaccattgttcatcagctttcaccgcctttaaaggttcctcagctattatggcagcaatggcctctttaacctcatccagatccccacaaagagattcctagacaatctcattcaaaaagagatggtccacgtccttatggggagaaatgaggcccacctctcggagattcttatcagtcaccagtttttccacttgtaaatccttcgacggtaaggacctgtagaaattgatcctctcctccagttttagagtcagaggggattgaggaagataatctaactgataaaaggcttatcaaaacacaacaatcagaaggcaggtaatatgctaaatttaaaggatggagaaatactcacttgctatattgaagtccaaatgcagtgtgggaattcttctcaatgggaagtcgagatgtagaaacaatagtcccaaaagtcgtgcgtgtatttcgtggaactggttgggcaaacaacattcttggaatgatgctccaacctatagaaaccaactttctccttatggcctctcattggttgaaatttgatcttgtagaaatataagatctttttcggcatcggtgcagatttattgtgctgagcacaaagaatataccaccctgacaataggcgatacacctggggtataaactagaaaggcgttactccggccacatcacataattttgaaaaataacattttaggggcagatgtgcacccatctctatgtgagcccagctctagatgccaaagcctccttttgcacacttactgggcatttctccatgaacggagagtttgttctagatagccttggaacactttcaagcccccgctgcgtttcatatttcgtcaaattattgtaaattcagaacttgttaacatgttgttccatctcccatggactatcgttcaaaacaagcttgggagaattttcttgctccaagatttcctcctccaagtcaacccctcgtcttgatggacccatttaggcatgctttctatgcaaaagaagaaaattcaagcagttagccaccataactacctaacatagaaagggtgcaaggggtcctcccccataaactgcttggagaggtcccaattagactaactat

SEQ ID NO: 31827 - DNA, 1518 bp, Cannabis sativa
tctgtgagaacagcacatttattattatacaggcagataaaaggaccttggaggagacaagtgaggaaagagacgagtaattttgtgaagaacagcaagatgatgcaaatgagaagagtgttgaggaactagaaaaactttgtcggggtttccattaaccaatgactatctttgtctaattgaaaatcaaaatcagtatatccagtaggatttaactctccaccgaaatatacaagcatgagatctctcattctccgaagatacttgagaatgtgctttacagctatctagtgtaccaaacttggattagattgataatgactaataatctctacagcgtagcatatgttaggccttgtacacaacattccatacattaagcttccaactgttgatgcataagggtactttctcatgtcctcttccttttgagaaatttttggacattgatccttacatagagtaattttatgtctagatggtaattgtcctttcttagaattctccatcgagaatctttctagcaccttatctatataagttacttgaaaaagggctaatgttatcctctttctatctttataactttgatccagagaatatagcttgcttctcccaaatccttcatttagaatttatcggctaaccacttcattacatttgataacctttctacattattctcaataagtagaatgtcatcaacataaagaactagaaataccactacattacccttaatgtatttgtatacacaggcttcttcttcatttttttcgaagccatactctttaatagttttattaaagatgatattctatgatctagaggcttgcttcaatccataaatagatttaagaaacttacacaccttttgagcatcccctggtaacacatacccctctggttgttctatatatatggttttatcaagatcgccatttagaaaagcggtcttgacatccattttccatatctcataatcatatgcggcagttatagaaagaagaatacgaatggatttaagcattgccataggagagaatgtatcttcatagtcgatgtcttctcattgtgtgtagcctttggccacatgccaagcttcaaaggtctctaccttccctttagtatttttcttcttcttaaaaatccagttgcacccaatggaggtaatatccttaggtggaatttcatataccttgaccttgttggtgcgcttggagtccatctttaaatctatggcattattccatttgtctaaatcagagtcatccattgcttctttgttagtcaatggatcatccttgtctgtattagaaacaataatatgtgattcatatttgtagaggacaggttgtctcacaaccctcccactacgacaatgtactgggattttttttcaagaactgtggtaaccgttgttgatcatcattcaactaatggtgctgaaattgttggttcagaaatctcatttctcattttctcgataaccacttgatttcgtggcttgtgactttt

SEQ ID NO: 31828 - DNA, 1300 bp, Cannabis sativa
aatatgtataaatattatatataggtgcactcggtattactcaagtgaattttagtttttaagtttaatttttcaatctaattagtttttaaaaactgaaaaaaggttttaagttatgaagtcaaagtagcatcacaaatttctcattccaattccattttgttttcttcaatggctgaatcagtggaaaagtcatccactttcatcgttggaaacagagcctggtcattgagaccaccataacagatgtgaacgtttctcaacctcggccatgaccccatctggtggcagagtaaggtcatacatatgggccaaaattgtcttaaagccaattattttaacgggtttttacattatatattgaatttttttattttttcacttttttactgagacagaattattttcaaaaatattgtataacttttatactgtgtattgtattaagtttttacggttatttattagttgttccactattgttttgattgttctgttttgtttttttcagttgttttataaaaagattatttttgtaaaaacaaattgtgtgacagtaaaattacaaatttttgctcaaaatccagtatttttataaaaatttcttattttaagtccaccactgattggacttccaagttaagcccacgtcaagtccatcactgatcggtgacttcaatcaggcccacataattttagacccaaaccaaaaccattcaatttttattaaataaaacgagatgaacaaaggaaaatattttgagataatttcaaaagaaacataaaaacaataaaaaaaaagaatttgttgtggttaaacttttttaatctgttgtttcacttgcattaaatttttaagttcaaattttgacagtaaaactttctaaattactgaacaggtagaaaatttaaggcatcgtctggttaactatcattatggactgtttatgtgtatacttttgtatacaaaacacgtttatattggtacatctaatattattattttagaataaatattataataataaaaaataatatatttaaaaaataaaaaatatattatagattttgaaatatttttatatttttaaataataatattaggtgtgccaatataaatgtgacacctatataaaagtgtacacataagcagtctatattgactgttaaatatggaaaatagatgacaccttaaatttactagcagttcagtagtttggagtagggctgtacatcggtcggtttgggcggtttatcctatatattttctaacacaatctaaagttcgggttgctaaaat

SEQ ID NO: 31829 - DNA, 961 bp, Cannabis sativa
attatttttcataattaatctatgcattaacacaataatttcataaaaaatacaaaaacgatcgaaaatccaatataataattttagaacagtttataaccaatataaaatcagataaaattaatttataatttctgggtattctagctattttctataattatttgtaggaataacttgataaattcatgaaaattaccgaaacaaactgaaactcaataaaatcagtcaataaccatttaaaatcaatactaaatcacataaaattaatttaaaatttgctgagaaacctagatattttttataattaatttgtgaaataaattaaataattcacaataattttaaataaatttaaaaaattatgaaacttcatcaagcaccttagaataaaataaggaatcgaaatctacaaaaatatgtgagaaaaacacctcagaacttcccataacacggtcgccagcgttcacgtcggtttcgtcgccgacaaagtgtaactttgtccctgattgctcttgacgcgtcttttcgaatgggaaaactttccacagtgcttaggacctcaaaacgatcaagaactacccatgataacaaccccaatgcatctgatcggagtcgccttctccaactccggtgtactgttgttaatgttgtaaaaaacgacaaatttcgtttaagaccttaaagctctgattcttcaagctgaatctgatctttggggtcccataatcataaacacaacctcctttgatctctgaaataatttaaactcgtttaaatctggatccatttcaagaacggtattttcaaacgtaaacaatggtgtctgtcgaaaagtgtgattacagaccttctaatcgcatctaaaactcctcttagatgaaataaaactcaaagaaataatctagagcaattcaatttatctcaaactcaacaaacctaaaatctctctctctctctc

SEQ ID NO: 31830 - DNA, 1862 bp, Cannabis sativa
ttgtcagtgttgcctggaatgttgattcctgagaagaagaagtcctctgccttcaccagctcgggattcttgcagaatctcccgttcacgaatactgctcaattattaattcatacgataaaataaaataaaaagtgataaccaaatgaactaattaatatggaaaatacgtacgcatatttttgggatcatcgattgctacgcaaaagtcctgaagagggctggggtcgtatgcactagcaatatgagttgccacagctaaaacaatcgccgaaaggaataaagtagaagtcttcgtcatatcttaatattatattaatttattgaaggtagaaaatatatagtcaattaatgtaagtttgttctaatgtgtaattccttattgaaatctctttggctgaacaggtatttatagatggatgtgcaggacttacgtaattaagcttttcttttattggtcattctccttttggtttactttatttttaatttttatgattttttttcctgaaaaagatggtgggaaggattataatgatttgatatatataaatatatatatatatatatatttacgttaaatattataaacattgcttttatatattcataatatcaaacaaattggacaaatttgtgtcaagttctggcctttttcgtttagcgtgtttcatcaaatttgtgcgtagatatcatctacaagtatattattggcgtaaaatgtagacttaatttacaaattatggacttcttttatttaattaatcgccctagtatatgtatctcagggagtatatgtataactcttgttataattaatacaaaatgtcttgttagatgcatctggtctgattgaattcttacagattttcatctaatgtcttgttagatgcatatgttttctggattcattttataccttggtaggtcatcttcttgatttagtgttaacaatatttgtaacagctcaaaggcaactgtaataagttggtttctggttgcttaagtcggttattaaactgttagtacataacttgcttagctttttctaacctcttcttcatctttgttagaatatatattcttgatttttgctctctagggcattttctttcattccactttgtgttgcagtttatgtggaaaagaagaatttcttgagcaaagtgaatttttttgtcctgcatgcgctttgtttgaaggtatttcagattgtgttgctgaagggatttcgacacatgaagaagcaaggggatcttagctttgagagatctaaggggacttagatttgtggtcttgaattcatcaagagttagggtaaatttgtgtataaatctttaaattaatactagtttgttttgtgtggatttgtactaaagtggatattgtatattttgagattcaaattggaattatttacctaattttagggaacctaagcactacctgatggaaatctatttttgatgctgtaaattgtgattattttctgttttactttcaattttatattgtgtgatttaatcgataattatatcaattagtagcatcctattaatattaaaccgattattcacaaaataatatatttcacgtaccctaactaaattaattctttttgatgagagaacattggttactttttttattcaatttctgattttacatatagttaacatttttaggtattcttgaaaagttattaggcacactttaaagtttccaatacccatacctaaatctctcatatcatttatttaataaaaataaatgacactcaatattaaattaaactaataataatatgtcaccttgctaaacaccttaaggtgatgcctcttagcatttatcattctttatct

SEQ ID NO: 31831 - DNA, 2879 bp, Cannabis sativa
gggttgctgcagccactgaatctttcggaatggaaatgggaagacattgccatggacttcgtggttggattgcctaagactacggacagtacgactctgtgtggatcattgttgatagctttacaaagtcaagacactttttacctattcggacgaatttctccattgatcagtatgcagaactatatgttagagaaatagtttgtctccacggtgttccaaagtccattgtctctgatagggatccaaagttcacatcaatattttgggagagcctacatcgagccatgggtactcaattgaaattcaacacaacatttcatccttagacggatggacagtttgaaagggctattcaggttttagaagacatgctacaggcatgtgtgttagactttgaaggatcgtggataaagtactttcccctgatcgagttctcgtataacaacagctattaggcaacaatcgggatggctccttatgaattattatatggaaggaaatgtagatcacctattcactgggatgaagtaggtgaaaggaggttttaggacccgaagctattcagagaacaagtgaggtagttgataaaattagagtgtgaatgcttgcagatcagagtagacagaagagttatgcagatccaaagtaatgggatattgattttcaaatcggagacattgtatttctctgagtatcgcctatgaagggcattaaatgctttggtaagaaaggaaaacttagcctgaggttcattggaccttttgaaatccttgagagggtacaggttggctatgtcatcagcattggcagctgtacatgatgtgttccacgtttcgatgctttgaaagtatgtctcatacccatcccgtattctgagttatgaagcattggaacttcagccagatttttcttacgaggaacaaccagtgcaaatactggacagaagagaaaaagtcttaagaaacaatacaattgcgcagataaaaatattatggaggaacaataaagtaaaagaagtaacctgggaactcgagacagatatgcagcagaaatatccgaagttgttcaggtaaatttcgagacgaaatttttatcaggaggggatagttgtaataccctaagattaaggaattagattagcaaaccctaactagttaaatgtgtattaatatggaattatattattatatgatttaatatgtatgaattatactgataaatgacatgttaagaccttgttggtgagtcatggagattttcgtaatttcgacatgagaagggtaaaactatagttttaatgttatagcgtgcttatggactatattattatatagtatataggttttgtccttctgcatatattttctgacaaatcggcgcggtatagtcacaattgggtatttcgagccgaaccgggttcgaggctaaaatacattttcgggattttattttggcattttataattagttgaataatttgaaatttattggagtgtggaatatgatgaaatgataattttgcccatgattatatacatatgtggtgtattggacctaagggcattttggtcttttgaccaactaattaattatcaacaaaaggatttttacaaaaattagaaactaattttttggttatttccagccctggccgaaccctctctatttctttctcaacttctcattttaccaattctcttcaaattggacttgattgatttgtgcttggtgatttggaattgtgaagcttgtgttgtgaagaacttgaggtagttttttacctctttactttgtgttttatggctgaacattttggtggtatttgttggtatttagtgttgttggcaattggatgcatgttgtatgaattgaggtaaatggatgatttctatgttgataaagcttggaagttgtgagttttgtattttgtttatcttgtatgtttattaggttgattaattagagttttaacttctgtaattgggtttgatttctttggagttcatgctgaaattttgggttatatataagactttggtgtttaaaccttgagcatgtgattatgataattttagctcaagtttggagcttagtatggattgttggtgttttgactttaatgctcatattggtgttgaaaagagtttgatttatgtgttttagttctcagttgtgatggttataatctgtgatagttgaatttggggtttgtgcatgttttggttgtatgtggtgtgcatttgagcttgaattcgttgctgaaaatggggttttctaagtttggaacccaggcgccccagtcccactcttagagcgccgcagcccgcccctaggaaaaatcttgggttttcaacccaagtgtcgcgaccccctccttgtgtgctgcggcccgccttgtggtatctgggcagatttgaatgccatttttgattgttcataactttttgatccggacttcgatttaggtgttccgtatattgttggaaagctcgtttcgagctctatatgtttatctatatttgaatcccaattttataattatgtgaaagtgaatttagggattaaccctatttgtgaatcccaaaaattgtgactagaattactggcacttggtcaggagcacctggagatatagaatctccatattttcaggacatcaggtaagacagtagttagcactagagataagcgcggtggtgctcatgattgatattatagttgtgaataattagaaaccaggagtagggttattaccctaatatgagcgattatatggccttggattattaccttggtgcttatatgattttgaaatgctatgccatgatttgtatatgttgatttaaaggattatgcattcaaggcataatttggtt

SEQ ID NO: 31832 - DNA, 1181 bp, Cannabis sativa
aaaaataaaagaatattctattaataaataggatatatgttattttcaagaagttaaatgataaatcaaaaagggtggacagagataggagcaaaatagtgtttcttaccgattatactacaattctcttccttccttccttgaattctcaaagtcgctccaatagtgaatctcatcatttacctttatttctttgtttgaaaggtatcgttttatatacatacaatatatttactgtatttgatcattttattttttctagatgttactgtaatgtatttccactctcacgccgctcctctatgtctttaaagcctgaaactgaaaaaacttgagccattgttcatatcccaagtataaatcatccgttttggtcatttctgcaacatgaaaacccaatattcaaagagaaggaaaaagaaaagactcctattcataaacaaggaacagcttagtgaaaacccaattaccatatccataatcaaattcaaaatctgattctagcttagagtggaaaataataatataacgatgctcttaaaacccaaagagaacccctaaaaccctacttgacgcagcaaataaaaacgaaactagctgtaaaaattcagcatcctccgaaggctaagaaaaaacattcctcggcaatttttgaagtgaccaaacagagttacaagcatgaaagttaagaaaaagcataaactttgctaaagcgaagtgggttcataaaagaagaagtacatttgagaaaaaaaaagctgatactttaagtgttttttttttttttttgattaaggatacttaaagagttttacttggttcaaactatcactgaagtctattccatgagtcattccattacaagagagcatccaagttgatttggggatacaatttgactacttagagctttatttataagcggcaaagaatgatcggagaaggtaatttatatattgctaatctctcattgcgtgtttttttcttcaataaaagatatataagactttattaataagaatcgttcattaatacagtcttcactcattgtattgacagcctccagattagtgccattgggtttatctatttccagtagagacttgtaacgcttttacttacgtaaaataagatgccataaataaattggcgttaaaatactaatgttgcctttattaaaa

SEQ ID NO: 31833 - DNA, 8165 bp, Cannabis sativa
aataaaaattagtgctaattactaatctactagagcggtcattacagaaactgcccataagctcgtcaagaaggcttcgcagcgaccaccaaatcctttgtcgtggcggctgggacatcttgaaatcctcattctttcttccaatctctgcgatgaggggtaatgcctgccgcggcgagctttgtcagagaacgatttatttctttactcaactctttcctcttttgtccactctaattctcgtgaatacttcctttaaacttctcggggacctaaaacaaagagaatcaagtataaaacaatcctaaaattagaaacaaatattgaaaactacactaaaaagtgacccaaaacttagactaaaaatagtctaacaccttcgcgggtcttttgcttcgtgcgattggcgcaacgctcacagctggagatgccacgagagctggtgttgtacaaaggctctaggagccacatttattgttgtaggcattccttatttagaataagctggtgtttcaattagattttgtgaataagttggggggacttgaaattgtacgcttggagcaggtgtcgaagatcccgtgggtatccctaagggatactgtacttcgtaggtgtaatttggtcctcaagattgaaaatatccaccaaatgtcgtgatctgtgcttcttcaagattaatgtatttttgagccctcttttgaaaatcttacgggctggttgcaccttcttgttgaagcccattccaaaaaagagtttccactctaatgccaactgttgttcgtcaattactttcttaattttggacgcttcttttttaaatctctttataaaggtcttcaaagtttccgtggacagttacttgatgttagtcagagcgctaacttcgaggtttatttttctagcagctacaaactgtctctgaaagttagtttggaacttgttctagtagctcacgaaacctagttctaacttcttgaaccattcttctgtagatcctcccaatgttaacgggaagcacatgcactttgcatcattactcaatctcagcaccatcattaccctgttaaatcgtgacaaatggttgttgggatccgtgtcccctgtgtactgagtcatctttggcattttgaagttcttagggagcttaacctctaggatgttcctagcacatggctctctatcctcacaaccagattcagaatcgtctcctttctatctttaggactttttagtaatgtttcttctaaggatggccagttctgccaggatgccttcattcaaaatttctttagcattcaccgagtcattctttcgagagttaatacgtgccctaaggtcctttgtttttctttgatcttctctcttaaatccatcgtcaggtctcgcttgcttttcccgccccttcctttttgtccttgatgtacaaatgtactttgacgtccccttctctcctgggatctgtgtttcctacgaggaaacacattcccttgcggaagatccaaacgaaccttgcgagggccacgatgggttctgctccccctaggtactggcgtagggctatcttttgtgacgggaggatcttcggaagggtatcggatgggactaggcactttttccttttgttttttatttcctcgaggttgtgaggggccttcttcgtaatcgtcgagtgttggtggaacaggggctagattgacacggaagcttgcctgagccaaagcttgtttcatggcagttaacgcctcttgcattttcctattcatttctttttcctctgccaacttgacattgtgctttgtggcatgttttctgagtgaaacaaattctgcatactcgtcttgttcaccctcttcgtaggtttttccttctaatgaatattcaggattgtcagtatcgcctccttcatcatccactcgggaggctaccccctcttctagacgtgctggatcatcaggcggttgtggaggccactaattatttcttgttaccaccattcatatactagtttgtttgatttgattttgttttatgaaagcttcctacaactctcaatgaaagcaccaaaatattgaccgagattttcggcaaccactaattacgtattagctaagatgattaagaaaaatggaggaaagatttttacatggttccagtattaatgaattgtagtccatgagtcaattttatttatggtgggatttttttatcagagaatattcaagttacagtataagggctcactttagtgcgtgagtttgaaaattcccttttccattacagttccaagtatttatggggaaaaagaaggttcaaaggagggaaagggtacatctctccttggtctctaggtgctacctagcctccgtggtagaagtttggtgagacaagatttgtcccatgtgcggctgatgtgacggtgcatagccatcactttacctagcctaggtgtaggggtggcaaaacgtgtcatcgtgtcgtgttcgtgtcatatgttatgtgacccgcttttatatttcgtgtcaagcgtgtcgacccattttttgactcatgtctaattatatcaaccctaactcgacccgtaagagatcgtgtcgcgttcgtgttgacccactatgacccgttttgctattattgaagctgaaattgtagagaaaaataatagatttaagctccattagaaaatttatatacatttatatataatttgttatagataataaaaattaaaaaaaattaaaatatttttaattccattttaaagaaaattaaatttaaaattttttaacttaacattaaatcactaaatatatatttttatataattatattattattattaattttttattttattatattttaaaaaatcgtgtcaaacgtgtcacatttgtgttaagcgggtcgtgtcgtgtttgacctgtttttatttcgtgtcgacccgtttttgacccgcatctaattttctcaaccctaacccgtaaaattcgtatcgtgttcgtgttcgtgtgccgtgtcgaaacccgttttgctacccctacttaggtgaatgggtcgtcaaaacagtatggcttcgtaatgatgttaatcatgtgctacattagtcatatatagtgatttgattcagaatccgtgttaggcgaatagttgagtcctgaaggacctctaatccgggagcgtggcccttcagaatggctgaagtaatctgttcattatgtatttccttggccgcttcgccagtcagatctttaactttctgctcgaggtctttattcttttgctcgagattctaaagaagtgtacggaggttgatcctttcctcaatcaactcgttggctcattttgtttcagtctccaagtcctcttgcagttttttcgtggaaggtgtctcagacagctttttttccaagtccttagcctttttcttggattaataaagctggttgttgatttcacccagggcagtctctttgttcttgacctcgtcctaaactttcttcaactcggctttgtccccaatggcttgagcaactaaggtcttagtacgagagtaaacgtacccggcctgacagtttcgtacacttaaatactacatgttttttttcgacggattaaatactttaagttacatttttgttactttaattactattattctattaaatcctattcaaatataggggtatttgaggcataactacctgatgttttaaatttcatacacttatataccgcttgtgttttcttttggtgaattaaatacttaatgttacatttatattactttcgtcactaccagtctgttaaatcttattaaaatagactaagttgacacgtgtcaatatattagttgtccattcatattttcaatatgaaaacttattaaataattttaaaatttttaaaattgtacataaaacataataaaaaatgtatatttttgttaagtatttttcaataaaaagccttattaaataatattaaaatttaaaaaataactatataatatttatttaattaataaaataataaaaaaaaaatactatttacaagtatatctctgtccgtgtttcttattcttcttctcttagaatgtgattgccattttctaattttattattatttagttactttttaattttagaattatttaataattaattttattgaaaataaaaataaaccactaatatattaacacatttcaacataatttatttttaataggatttaatggaccaatagcgatgaaagtaatataaatgtaatttttgatatttaatccgttagaataaaaaatgtggtatataagtgtataaaatctaaaacatcaagtacttatgctacaaatactctaaatactctttaaatctaatttaacaaaatagtaatgatggaagtaacaaaaatataacttaagatactgatgcaccctctatttgtttcagcatccagaaaatttttttaatctaatttttttttttcatattcatgtacataatagctatttaagatatcttacaaaattttgaaaaattcgaaataatttataatataaaaaataatgttcaaacaatctattttagacgcgcataaaataaaagtcacgcgtgcaacacactgcttgaacgcaattttcggcatgttaaatttttccgaatttcttaaaattttacaggatgacttaaatatgaccatgaaaaaaaaattaactaaaaaattatttcagatactaaagcaaatagagatgtatcggtatatccattttaagggagtacattataaaatttaatattaaactggaaagtttgacggaagaaataataaaataataccaaacactaattaatcgaggtttttcagtatacatttgaatatcaaacctagagaagagaaattccatcaaattgaaaaaattggtaaaatcaaccaatattgggcggtgcttcttttccctcgttctcttggcttcgacagttgtttttaaagggagtgtatgtggtgcctaatatgttggtaattatcagttgtataattgattatgtaagtatgccctcgttcttatgaaagtgcataattaaaacacaaccctgtttaacttttcaaggcagcatagcctggttagtgcacatagttatgtactgcaacactaaaatgacatgatatgattatatacgtaaagcttatttttgtgctggaaagaactattttagattcataaacttcttatagcctgttaagcaggcagcatgaaactagttttttcatgcaatataaaggggaaaatgtgtaagtgagagaaattcagaaatcaacagttattttccagttaaacttctatgagaaagtaaaaagcaatttcacaaagtcacaaaaatatagtcccaagtacctataaataaaggaaacaataccttctgccagggcatattttccagtatccaatagctcataaacctgccaaagaagatgataagaaaggtattgattagttctttaaataataataagaacatgttgagcaggagtgagaagtatgtttctctatatcagcagttcatgagagtcctttattgtgcaatatcactaaattctccaatgtctctccccgtttgaaacaatttaatagctcaacagtacaatatctccttgtttgctataaaatataagaaaaagaaaaattcagtacccctgtagttttcagatacatttaacatagcactgagccaatctaatattaggagagttgtacataaaatctacaatcccagcattccccaactccaattagtagttgccaaaataactatgcttaaatgaatggtgcaagagtttgagagccagatgtgagtcgccacccaaggtaacaggtcatagggacaaacgatgcttatcctgctactagattttttctggactactgcctttctcatatcagtccctgacgttgaagatcagtgtaagtcttcttgttgtagatgttaccctctttgtcttcatactcttcttcaagatctggtcgccacttattcactccttgtctttcttgtatcctcttccatagttctttcgcttcctgcatcatagaacgattcattacttcaataaattacagtaaaactaatcaggggttgctgccaatatgaatgcatatgaaatcctcttccaactctcatcagataatattacaaagactttcactacgaaccaaaagaaaattaacgaatatctctccaagtagttcatgcattcaataaactgcttagaattattttcagtaaattgtacattgactttttcatagtccaccattacatctataagataaggtggccactacagcttttaatctcattcgagtcaaatccctcactgcagtatcactttaaatttatcaaaataaatttgaaaacaccaccttattttcttatctaccacccccaaacaagagatagacatattgcaaccaacattttaaagaactagaacatcccattgcgaatcattatttcaaaatatcttgttagcatcataaggtaatgcaccaactccactagttttgataaatataatgaattgacctaataaaatcatcaactagaacactcttatctcaagtaaagtgggtctttctgtagattttaaaatcttaataatccaacacacccaaggtataacaagaaaaatcgccacaacaaaatatcaagaaattgatacctcaatagatgtgatttcattgaaattcttggtgtttggtatgcctaggcaacgcattccatgttgatgacgccattccttgaaatgccgctcaaaggcacgacggccccaataactgtagtttccacatatctcacacttgaactcctggatgcatagatagttagaattgcatgaacttaaaatgagttataaaaatatatactgcatgcacaaactaactctaaagataaaatgactgactgtccaaaccccttatttataatccatattacctggccaaggccatgaagtttatacagccaataaggtataggctttccatcccaacccattggcaatttgagaggattataaatctgctgatcgtcgtcatcactttcagtgtcagcctgtgtatcttcctgcaagagattggcgtgcaaattttgaaattagaaatcagagcaacctcattgacaagcttatattaatgtgttcgccatggaaattcaaccatttacaaagtagctgcttaagaattctatgtgtgataccctcttaactttagatctcattttatcctcaaaagttgtaaaagtactcacctcttctcgttctgcttcaatttcctcataggtcagagcctgcttcttcacaatattgtcttttgttcgatcaactgtctgcataatgacacagaaaacattaaaatagggattttaaaaaaagtgggcaagggaatggaaggaaacaggacagaaagttatgttatagaggctaacctcttccagtaactcgcaaagtttatttattttcgcctccatcagagcaatttctttgaaactattaactgcactaaccccattttgctcttgaccacgtgaacctttagcaaaatgtttcttatctaacttttcaagaggtgtatcctgcatgaaaggggaaaacgacaatctatattattaaaagagtattggttatcatctgaatgacagtttagtcagccacaagaagctgctccaatctaagacattgtacagtgtgcaaacataaaacttgtaacaagagcaaacaggttctagtcacagagcatgaaacagctttaggaaatcggaagaaaaagaactgaacagaactctgttgaactcgggagaaagggcttgctcccaaatttaataaatgggctggaaaagtgatcccaaacaaatgtacaaactaatggacaataatcaatagtaggatcacagaaattaagaaagtttttgagacacacaacaagtaaccagaaagttttaaagtttcttgtgaataatcataatatcatcccagtcaaatagcttgggatggtaaaatatttataagttccaagagcacacacatgcacaaaaggagcgaacaaactagcataaacaatgagggtagcaatagcacaagcagggcacaagagaaagagagagagagagag

SEQ ID NO: 31834 - DNA, 2086 bp, Cannabis sativa
  modified_base (686)..(706): a, c, t, g, unknown or other
aaattttctcaaaactgttacacattctcagcaatcttcacatccctctagcataagaaagtgatccaaatccctaaaatctttataaataacatgaccagatgttagctgatgaaaagaaaaacctattgctgatcacgaagtgctcttgaaaagatgacatctgatgtatgtatgagccaatcaagttcaaaattccctagtggcacctgtcccaaatatttgaggaattaatatctaaaatatcatgcaaacttaatccataaatttcaatattaatccataaatttcgcaatcttgaatcggaccattactgataaagattatagaacaatataatttcataaaatagcttattaccttgttgagcctcttaatatctcaagcacatatatattcattgttttctctcaataaattgtttacatcatatatttacaagaagacctaccgcaaaatttgttgcataataaaaaactgtggtaaagttatagctttgtctacgtggtccaaagatacactaatatttatatagtagttttttttaacaaatttttaatgatatagtcagtaatttatagggtaatctaaaaatacactagttttttagttgataaaacataaactagttgagtagtgagaatgcaaatgtaatataatgttagtttattattattattattatnnnnnnnnnnnnnnnnnnnnntattattattattattatttaacacttgttcagagctcataatttaatgaggaaaaatagacggattttcttttttcttttttattattattattttggagaatttagaattatcacaccgtttctattctaatgaaagtagtaggaaatgtgttttttctttttcacttaaagatttccttcactgttttttttccccctctaatttatccatagtccaaaccagacaaaagtatagagaaaaagtcccaattagttttgcaatgtcaaaacattcacaacaatatcaacacatcactattagccaaggaaatccatattcttgatttaataatattaaaagaaagttgctgatataatattgcatcagttaaaatcctaccaaatagcacaaaactaatgattttatggccaaaggaaaagggaaaatatataacaaatacaataagtctttaagatctatttttatcaaagagaaagggaaaaaaaggaaagagctagagctacttcatgagattcccatattgaataatgaaataacataaaataaaatattgatagattcttaaccaatttcttcatttttcatgcccataattttaatgaaaaagtgcactgtgctgaaatttttattctctcaagagtatgaaattcatggttcttcccaactctatactttgtaggagtaaaatataagtctcaccaccaaactagcccaccaaaacactcacaagttattgtaccagcccaacaactctaacttgagattttagttctagaaaatctataccttaaatagtcttccttttctggtacctataaagatcggtatcatcatgtgtaactgtgtcaacactatgaaacttactattcaatgtggtatacaaagattaacggctcccaaataaactaattgagcaacacctttaaatttgaaattgagaaggctaatatttggtacactttgttaaactaagtcttaagaattcatccagtgttcatagttcaagtttatttaaacacacgaaaaaaaacataaaaaaaaaggaaagagatactcaagaacatatgttatcaaacatctttcttgaataagacccattagaacaagagtacctacatacatgtgcaccctccacgacaccatgtgaactcagtaaattgtcattaatgattacaataacaataacaaagcaggaagcatcaaagactatatcagaatataaataaaataaagcatggcatagaaaaagctcgtgagcactgcatcgacaacaaccacaaaaaataataagcatattaataagacccaagaaactaaaattaggatgagatcgaataatgtggaattaacactattattaagcatttaaccttgat

SEQ ID NO: 31835 - DNA, 3657 bp, Cannabis sativa
attaaactaagtggtctttacaggactccaactcaaagatctgatcccatgtacccaatcggtgtatggtttctctggcaaaagtgttgcacctttgggccaaattcgcctaccctcacaattagacaagctctgaggagcataattgtgatggcacaattcctgataattgatgttccatcagcatttaatgttatgtcaggtcgaccaaccttatatgacctaaaggctatcacattaatcttccactcgtgcatcaagtttccaactaagaatggggtagggtgcctaaagggaaatcaacaagttgcacgtgaatgttataaccttccttgaaccaaggcctaaaaggaagaatcctctagccagagttcggacaaggggaaaagcattgtcaaatagggagccacccaaggcggggacaaagatgtggatcctcgccttagggaaccaaaaacaaatgttgggccaatggaagaattggaagagatagaaaacaatgtccagaattcggtctactacatcagtaaaaggctcgttgaagcttaaggacgataccgctgatagaaaagctcactgactgcctactcttagcaacaaggaagttgagccctactttcaagctcatcatgtttgggtatacactgaccaaccattacgccaaatattacaaaaacttgatgcttctggacgattactcaaatgggtcgtggaattcggtcaatatgaaataatctttcaaccctaaacaacaatcaaaggacaggctttagtagacttcgtagttgagtgtacaagcaaagaagaaagcatttcgaaaggaaccccagagcctgtacaagagcctcagccgagcaacaatgaagacaaacttacttagaaattacacgtagatgggttggctacagatcaactgtctggtgcaggggttgcccttgtcatgcctcgggggcaacacctgcacagggggatcaaatttgggttcaaagcctccaataatgaagcagagtatgaagccctcattcttggtctaaaacttgctcgaaaactacatgttgaacgcagcagtgactcatagttggtagtaaatcatgtatctggagagtaagaggcccaaggggaaaaatgatagcctatctcagcaaaatacatgatctgcttgcacaattcaagagctacgatcttaagcaaattccaagagaagaaaatacaattgctgatgccttagcccgacttgcaagcagcaatatagctaacaaagctaatataatcctaattcaattccttgaagaacctagcatatcctgtgtagaagaaattgaaatgattgacacatctccgaactggatgacaccaatcacagcttacctcaatactagagaagttccatataacaaaaatgaaactcagaagattaggagaaaggttgcacggtactatatcatagaaggagtcatgtatagaagggggttctctatcccactatttagatgtgttacacaagaagaagctgcacgacttttgtctgaagtacatgatggattctgtggcaacaacgcagctaggcaaatcctattaaagaaaatactaaggcaagggtatttctggccgacaatgattgaggattcaaaggcctatgttaagaaatgtgataaatgccaaagattttcaaatataccctatgcaccgccaacgaactaactcagatgcaaagtccttggccttttgctatttagggaatggatctagtcggacaattacctaaaggtaaagggggagtacagtatgcagtagttgcagtggattattttactgaatggacggaagtcgagccattggcaacaattacatccaagaaagtgctagactttatggtgaaaaacataatatgtcagttcagactccctcacaagatagtctcaaacaatggttcatagtttgatagtcagttgttcactgatttctgtgcaaaccatggaatcgaaaacagtttctccgcaatagcacaccctcaggcaaatggtcaagtcgaagcaatcaacaagacacttaaagatactttaaggaaatgacttgaaaatgctaagggaaatcggccgaaagaacttccagaagtactatggtcttactgcacaactgagaaaacaacaactagacagactccatttgctatgccatatggttatgaagttatgctgcccgtagaattagaacctccatcccacataatattgacttatgatcaagaaactaaccatgcactcctaggagaatcacttgacaaaatcgaagaaaaacaagctgcatgaaacctaaaaattggtggcccatcaacaaaaagtggctcgatacttcaataagaaaataaaggcatagaagttttaagtgtgagatatggtcctcagaagagtatttctggacaccaaagacatcacagtaggtgtgctcgggcaaattttggagggaccatataaggtggttgaaattctagaatcaggatcatacaaactgggcagtatgacgaaaacatgaaactcattctggtaccaaggtattgaaatagggaacatttaagaaaatactaccagtaaaagtacaaggtcagatgaccctccaagtacaaaatctgagaatattaactcttaagtaaatggccttctgggcagaccacgctcaaaggttcgggtgaaatgacaaagtactcacgtcggatgaccacttctgaaagtacaatttctttttaatgcaatgtgttttgtttaaattttgctaaagatcgaattagatcaatatagtagcttttatgtagcttactacagtaacaaaagagtttagaccaataaatgattaaagatgtatatttaaattcagattgtgttaattctattagcaagttatgaatttaccactgaatgtgtacaaaggtctgctcgaatccaaagaattgaacagacaaaaaccatacttgtgaaatgcaagtgactatgagtcaaaagtctgctcggtcacttgggggcaactagactcgtacaaagcattggtacaagtaaataacaagctcaaaaaaaaaaaaaaacaaaaaaaaaaatagttgcacaaataattatcataacaaggaatgatagtcattagaaaaagattacaaagcacgataaatccggaataaaaggctacctgatcgccagttgtcttaaaaatgaaaacatattccaagtttaaaatctgcttggtcggtcattttgtctcaaaagaaggcctatgggccgaacagacatatacataaaaaagagaaaaatatttagacagcaagagtcctagactcttggtacggatcgtttttgtctaaaggggctggaggatcattagtctgagcggcagggagttcagtgttctggttgactagaattgtggaggtagttgcctcaaggttttctttggccacctaagctgcgcataaatcaagatacatgctcttggaatcaccaaggtaatcaaagtttccttcaggataggccttcaaaaaatcatagaaaacctcaagagcagctgtctctaggacgtccacctccctctcgagctcctcctcccacgactacttatgtaataccccagaattaagaaatggattagcaaaaccctaactagataattatgtat

SEQ ID NO: 31836 - DNA, 1104 bp, Cannabis sativa
  modified_base (942)..(958): a, c, t, g, unknown or other
taattaaaagagaaagagtaagaatgacacaaatagtttttacgtggttggggcgttaataagccttagtctacgagtcaatattattatgcaactttaagctaaaaaatcctttgggaatacaatgagcataagttctcaggtttgcttgagcaaatattgcaagataattcaatccttaatctgaaggattcattggatatttatagtattcagagaattacacttagtttccatttttcctctattggagagtttacattgaattacataacttggactgtcttgtgaagtccaacccacgaaggagatgatatgctgactaggcagattagatatgactgaattggtcaaaaccgtgtcctataattgtggacagctaattgtgaattaattgcttaatctttttttatgaagtttctccttttagtttgatacgaacttctgtcgagatttgggaagtatttttttttccttatttatgcataggaataaaaagagaaactagacaggccttctagaaacacgttgtttgactcttctggtatcacggtactggagcttcttctggatatgagctattactagcggaagatcatctgatcacgtacctgaggtacgttcttggaaggtcctatataacttgggctcatcttctttcagacctactggtgggcttttgatgctgacctaaattctaggtgtcctttactggaaacacggataacaagaacaattaggttttagttttatttaattaattagttgttttttaaaatatatacatatatatatatatataaaaaatctataatgtttattttttatttttctaactttaatttttttaattttaaaatgaattttttctataattttttataattatattaattgtattaatatctattttatataaaatatggctatataacagaattnnnnnnnnnnnnnnnnntattgggtgacttttttttttaaataaaaaaaacaacaaattattagatgttgacacgtaaaggatcaacatccatatagttagttaaacttaaatataattaatccacctaaagtgttgcaattaataataaatttgttcatatt

SEQ ID NO: 31837 - DNA, 1326 bp, Cannabis sativa
tcatattatactggtttttaaataccaattgtctacgaatttagacaatacatttgattcaccgccttatatatcattctttttcttttcaaatcatataatatagtgatccgagagagagagatgcaataatatatatattaaggccgttcactttgggttgtatacactatgagggcaaaaaagatgtatacttataacatatatttataattattaacaaaatattaattttaattcaaggtatctcatgcatatctcatgcatatataatttttttttaaaaaaaaaactcttatttgcatatttagtgccttaattattaaaactaataattttattgttactttttttttatttcaaattatttaatattataaaaatataagtttggattaatttttaatatattatattatgtaaaaaattaaattatacctcacctaatttacgggaaaaaaaaaattgtcaccctcaacttcaattttgggtctaccagtggtataggtcatttgttactggcggacctagaatttaaagtgagggagacataattttttttagtaagtgagggagcaaaaataaacttaaaaaaaaaataaaatattctgtgagattaaaacccttgtcttctaatctatatcttaagtagcttaaccattacactaaaattgatattaagtttataaatattttattattaatatttgttgtaactaattaaaatgcatatgtatttcttttttgattttttttttcaggagacggctgccccacctcacttatatatgggtccgctctattactacgtatttttcctagagatgtttatttaattatctgggtcacatagtgtgggtcacgtgttaatagagcagagacgtaaaattaatttattttttaagttttgcaaaatgaaaaggaagagacgtggggcagttaattaacttaattttctctttgacggcagttactatgttcttcagtttccaaattcttcatcttcaaccattttcttggatggaaaaattgttgtttgagggaaagttgggccaataaagagcacgcaaagacagaaaatgagaaaggcccactaagcaaatatcatggaagcccaccaaggattggaagctaagggaatgagacgttaagatcaggaccaaaagaaaatcgaaatataattaagaggatcatctcaaggcagggtcgaggtagtatatatctcggatcaagttgagataaatccgattccgaatcttaccaagataaatactatctctctcaccaggaagcactcactacagtcaaaccctggacacgtcctca

SEQ ID NO: 31838 - DNA, 2667 bp, Cannabis sativa
aggctctcgtcgctggatctcctaaggttttgcgccctcagctcaatgtcgtccttgtcgtggctcgattcctttcaaaatgcccagattacaccgatctccgtcctaaagcagtggtcttggagttctttcgttctattttggcttcattcaatcgatcgttttggccgcaagcattcagaactgatgcgataatacttaactactttccagtttttttaggctgtagataaattgtataatatttttttattcaaataatttataaaataatatcaaattaattatggatattctgttaaagaatggtatattctgtttaaacaaacagataaaccaaaaagaatcgttaaaccaaaaattgctgttagataggcacttttaatttataaagataaagatataaatgatctttttaccagagaaaataattaataaataagaatatgaaaagatcattggtttaattattataaactattttaataaaaaaatttattaataagatttttcccgttacacttagagtaaaaatggtattgacattgtcatctaaaaaacttttgcgatgtattaaagaactcgtacataaaatttatgcatataaaattcattacaatacagattaaaaaaaaatcgttacaaaaatatacaatatcttttttttttttgctaaattcatattaaaaaaaatatttatctttttggaatctttaccatggttcgtcatatgatattgactttaaattactcacaaactatatattgtaaaacaaatacttcaattttgttttgcacaaactctcttaattcttttatttatttatttatttatttatttaaatcttctttttttgatgtcaagttttgtcttgttggtatttaacaatacttaaaataaaaagaaacaaaatattatcaaagttggattgattcccatatttccatggatacaacataatttgtacccacacacaatatgcaaatatataaaaaaaaatacatgttaatatattgttgggatgatataactaaactcacatacatttaatattgcgtcgtctggaaaattaaaaatatctagattctaccactttgaagctattgtaacaattacactcacaagagcttttattttgatatacatatgttattcgaaagctcttatcttcgtcttgttggagaagaggatgacatttaataaatcagagacttatccaatacatttttctataaatataatttaactttagtttttttatttttgtcagcccctgtagataaagacacgataagttaattaatagtaacgaatatatatatactaaaataaaagccaataacagacattgtggtaaaaaaaattagctcttttttttttatttcaactaataaattaaataattttaatactatctcaggttcgatagaaataatttattttaatgatagaaaaactacaaacctcaataatcatcaatttagtagaaaactaaacaaattgatacaaagccaaatatgatttaaactaaatactttctaaaaactcgaaacactctgaaaataagtatcataattgcataaaccaattaccaaataatgaaaaaaaaattataaaaataaaataaaagacaaacaaataagcaaataatgaaaattgcacagtaaaataaataagaacaacaaataaatctcttactcatgtcacttttttgaaagtttgagcagcataatattaaataatgcattcaacatatggatactaaattgtgagaacaactctgagtggcaaacaccaaaagcaatgtggcaaacaccaaaagcaatatctctacaatttcatttgtgttcctctttataaagctctagtgccatcaactttggacattcttctgtttcacaaattgatggattccaaaagaaaaagaaaaagaaataataattcataatttttggtaatgagtatctcaaatctatacatacatatctatatatagatattctttgtaattacttttatgtttgatttaataataataattcttttcacattcttgtaacttttcacattcttataacatatctatataaatattaaagagtaattagtattgtaataaaattgaaacataaataaatattaatgtgtaggaataggaataaaataataaatgattaaataaaaaactaagaaaaattaagaaaaatgagaaagaatgagagagcaaataaattgaaagaaatgccatataagatgccatgtcacctctttaaagttttcctatatatattgatgatattgatgatattgatatagatattgatagtaatatagaaataataatagtgtaagttatagaaagtagtataataatagagactacacaatagtgtaagttatagaaatgagaagacacattaattatttgataatatataaaaattaaaaaattgagaaatcaaagaagagggtgaaaaactcatacaaattgccacctgaactccttaatgctttcctttatatatatactagagaacgaacctcgctttgcgcggtctttagacatatatttacataatgatttatattattataaaaatcgttaattaaaataatatttatatttatctaataaatatcatttttgtagtatgtacaatgtttat

SEQ ID NO: 31839 - DNA, 4377 bp, Cannabis sativa
  modified_base (4308)..(4333): a, c, t, g, unknown or other
ggagccttatacttgaatgtgtttgtaaattggtgtttttcatctaatatagcatggcatgcaggtggtaagattgtcattgcttggaatccagatagatttaccattgacatccttaaatgcactagtcaactaatgcatttaaagttgacaacaactgaaggatttaatagtcttttgactgtggtttatgcatcaaacaatagagatgaaaggaaagtcctatggaaggatttatgtgagctgaaaacaaatgagaattggttattagtgggggattttaatgatattcttgccaaagaggagagaatagggcatcgggttaaaactcatccggacacagagttcttgcaatgtgtcaatgcttgtcaagtggaagatgtcaaagcaagtggtaatttctttacttggtcaaacaagcaacatggggaagatagaattttttgaagatagatagaattatggccaaccaatcatggatcaataagtatgatcttgctgaagcggtatttctcaatgaaggtatattcgaccatacacttggaattttaactctttatcctaatgtggttagtgggaagaagccttttaaatacttcaagatgtggaaatcacatccgaagtatgaatctgaattaaaggaagtgtgggggcagcctggagaaggctcaaaaatgttccaagcagtgtctaagatgaaacagtttaaaatgaggcttaaagagatcaacaaggagggtttctcggaactccaggcctcagttataagagctaaggcagagttggaattgctacaaaaccagattcagatgcatcccttggatagtgctttgcatttgcaggagaaggaagctcaggaaaaactgatcaaaatacagggtgattatacctcctttttgcagcagaaatctaaagcagattgggttcaacaaggtgattgtaacacagctctcttccatgcttgcattaagcaaaggcagaggcaaaaccgtatcctttccattgaaatatttgatggtagaagagtccatgaaccagagctaatcactaaggcattcttggattactacaaagggttgcttgggtcaaaaatggagcagagaaggaaagtagatgctaaaataatagccaggggaccggttctaacaaaggagcagataattggccttactcaaagatttactagtgaagaagtgaagaaggcagccttcatcatacctggaaataaatctcccaaaccagatgggttctcaagtagcttttttcaagataattgggagctcattggagaagatatcagtggtgcagtgatagcatttttggaatcatgtaacattcttaaagagattaattctacgatcattactctggttcctaaatgtaaatctcctaactctgttaaagattttaggccaattgcttgttgcaatgttatctataagcttgcaacaaagcttttgagctctagaatcagcaatattcttcctgaaataatttcccattcacaaggaggatttattaaaggaagattcataggacataatatcatgatttgccaagacttggtgagacactactacaggaaagccaataagccaagttgtatgatcaaacttgaccttcaaaaagcctatgacacagttgagtgggagttcccggaggaggttctaattgggctcaatttccccagcacatttattcaactcataatgaattgtgtatctactccaaagttctctcttatgttcaatgggaccttacatggtttctttgaatctaggagaggacttagacaaggagacgccatgtctcccctgttgtttgtactgggtatggaatacttttctagattaatggggaagattggagagaaggaagattttcactttcatgacagatgctcgagcctcaaattaaatcatttggctttgcagatgatgttctattattcagtcatggtgacctcaagagtgtgctatacatgctacaagccttaaagctcttttcattaacatcaggtttgcaaccaaatgccactaaaactgctatatactgttgtaatatgcagcaagattgtgtggataggattttgcaactttcaggctttcagagacatgagctccctttcacatatttgggaataccaatttgtgctaagaagatatccaggaaagaaagtgaggttttggttgagaaaatgacatcaagaatcagaacctggagttcaaggaacctctcatttgctgggagaacaagccttatcaattcagttttgattaccatacaggcttattggagtcaaatcataatcatgcccaaaagaatccctgaattccattgaagctatctgttgagctttcttatggaaaggtcaagcgatgttttatggagcaggtgttgtggcctgggacaatgtatgtcaacctaaatctactgggggattaggtatcacaaagcttgaaacttggaacaaggctgccatgtccaaatatatttgggcaatctcgaacaaccaagagagcttatggctaaggtgggtgaacagtgtatacatcaaaggacaaagctggtggagttacaatgcctctatccgctccagttggtattggaagaggcttgttgctctcaaaaaccagatcctttcattgaatgttagtgctgatttccagagaaatagatatgctattaaggcaggatacaaactgttcagcaccccaaaaccgaaaactcattagagcaaagaggtatggtcaagactgaatacacttaagcactgtatgattctctggcttgtgatgctgaacaagctaaagaccaaagatcggctgatcaaaataggtatcaaggtgcaagagaaacgcaatctgtgtggtgactgcaatgagaatatacagcatctattctttgaatgtaggaaaaccaaccaatgcttggtagagatcaagtcttgactgggttggaaagctatcaccttcaacgtacaatagcttgccaaatggattgggagggcaaaaatctcaaaattcaggaaagccgtatatagtgttgcggttgctgccatggtgtacactgcttggaaaccgaggaatgctgtcctatggcagggtgcacaagtagacaccaatcaaatgattgaagaggttaaatggagtctaaggactcgggttcagagttccttccaaagaaactctcaagtgtagataaagagtggttttttgctttatagttaacatagaattcatttgtaagcaaatgtgaatgaaaaaaaaaaacagagaattgtatagattgaggcccttgctttgggtgctcttagcttgtaagtttgtttgtgcaatacaactcattaatttatataaaaaaaaaaaacaataattaatatttagagtgtattagattatttgtaatttttgttttttaataatatcttggtacatgtgtgtgaattattgtagacttgcttcttccagcaacaaaaaaataaaaatctgcagaaagaaattgggtcttgcttcttccagccaaaaaaaaaaatctctcagtttttacaagagtgtctagtgttatgatcactggtttggaaaagattaatattagattttgggagatgataaagcttcaaacaatctctcccaattcccttactaaaacaacaaaatccacgccccaattctgtaatttcacaagaagaatataacattttttcgtttccttagtctaaaagaaagtctctagaattggatttgagttgatttcgtttaagataaaatttttattaaactcttcaataaacccattcataaagatctgagattgatgaagtttctctctcaaaaacactaaaatcatcagatctaaaatatcaatgctcaattaggcaatcacggtgaccaatcggacccaattcaccttctttcttacgattataatggctttctcactttgtttgttgaaattcgattcttcgacatacaaaatgacgtacagttgactgtccctttagacaaatttggattcacaaacaagggtcgtctcgggctcaatatttcgaagatctcgattactggtaagaatttagagcctaatattgctaatgtctatttcttcctctgtatatgggaatagttgattcatatcttttagcagcttgaggatggtgagatcgattgtgctcatagatctgatattttgtataatgagaccgatgcggatcaagacatgcttcttttcgctaattgcaatgctgggtcaacagtctcgatgaatgtaaaatcggtgatgtacaatctattgggttttatgccctannnnnnnnnnnnnnnnnnnnnnnnnnagattattcaatatcaataaaataacagaagtatttttcattca

SEQ ID NO: 31840 - DNA, 1073 bp, Cannabis sativa
gagcccctcgatgtaaaatgtccaggcgataatccagacgacaatggttatcttaaggatcataatgatgatgacaattttatcgataaatggttttaccttagtgttggattgggatttgcagcaggacttttagttcctttcttcataatggcaatgaaaaaatcttggagcgaaacttatttcaactttgtggagattgtggtagaaagaattccattcttcgagcaaagaatgagagcaaaacaacaatggcctaggggacttcatcagtgagtatgatacattcatgttgcagctattttatttttagcaagtttgtgtgttgtgtaacaataatgcaattatatatctttgattttctgtttttctttttctttgttttagttcagagttcttatgtattcaagtgaaagtgtaacatatctttcttagctgcaataaaagtgatgatttgtgtgtggtgtgtgtattttggtaaaaggtatagggtcaggggatatgcataatagtaagatgtgagaaatcatcccattacaggctgccctgctgtgctcattttcctaacagaatatattaaagtaattacaccaaacttgaatatttttaactaaaccacaatacactagccactaattactttaattttaccactatacacttacttttgaaatactttatttttatgttgggagactttagaacacaccctcactcttttgaaaacactcttgttggatgcacaacttgaggaccaaaggtccctatttatactactcaaaagaaaccaactttgacattttagacaattctagctaattgtgttactaaaatatttttgaagcttccataaaactcaacaatctctaattacttttattgtaatggcttggcctaaaatgatggatttatctaattaatctctaaaaaaaattagagagttggtgatgattcttcatattatcgcagccatgttggcaaaaattacataataataagtggtcctgtaatttgctgcacttcagttctaattccaatcattatttaaacaggacaaatttaagggaacaaaa

SEQ ID NO: 31841 - DNA, 1358 bp, Cannabis sativa
  modified_base (1319)..(1333): a, c, t, g, unknown or other
aaaatgtaaccattgagtagtcactcatagaaactaaataaaaaatagtataccatacaataaaaaatacatataccattcaacataaaaatataccagtaatattaataaaagataatattacaaatataatatatatactatgctaacaaaattaccaccgttgtatgtaataatataaaaactaaatatcatattaactaaataataaacatgctaattaaagtataatatttaaattgaaatatatatattatgttagcaaaattatatattaatattatacataacaaaataaaaaataaataaatattattttaggatactacttatataccttataacaaaaattatatagcatacaacaaaatatatattatttccaaaaaaaattgacacaacttttaaataaaagtaattttaacaaatagatgtacaatatttaaatatgcttctaaatctaaaatatattatatgtattatataattttgtttgtcaagtaaaaaaaaaatataaattagtcaataaaaatatgagaaatatgaaaatggtgtgtagcaaaagataatttaggtaatcaataatatcaaaggttcatttccccattaattttaagatgaggacatttaactccattctaccatgtttatggcaccttgtattttccatagataccccactggtatgaaggcatacaagcgccttgatctaaacacaaacaacaatttcatttcaatagatttttatttttatgagcagatttttctttttgttaagacaggaggaatacctgctgcatatgagaattttttctcaaatattcataatcatactgatgctcagccattacataatgaacaacttgtttcttctaatgaatctctacctgtgtctacccttgatcctatacatatgccttcccctactcaatgtaaatcaggtagacacatcaacaagccctcatatttaaatgcttacattgttatttggtaattaaccctactgctttgtcttctcatggttctttgatagctccttatcctttgtctcaagttattaattacaacagattgtcaccagcttttcgagcagttttcttggccatttcaagtcactttgaacctgagtttttcagtcaagctcatgacattcctaaatgggacaatgccatggatattgaaattgatgtacttgagaaaaaccacaccaggattgttgtttctctgcctgtagatcagcatgttattggctcaaggtggatttataagataaaattgaatgttgaaggtgttggaaatatattttaccaggaacttannnnnnnnnnnnnnnatgttgatttaacaacctaatattg

SEQ ID NO: 31842 - DNA, 1363 bp, Cannabis sativa
tataatcacatagtaggcagttaacttacaaagtttatcgtaatttttacaacgattattccctgaaatcatgggatctgattacagatcatgttaagcaaatacagtttttatttaaatttcacaaaactgtgaatatcccacttttactgggtcaaaatgaacgtgtatcaaatatattgtaggccatattgtcgctgggaatagagtagaggtaatcttgatagcgagttggagctcgtcatatgtctttctaaggtggataatgcttttactttaaatctgacaactgcagtttctggtggcgagaagatctttttcgcgtgcttggcttcctacagcgaggtggacgcctcgctagctctcgctttggttcacctatctgttatacttagtttgtatatcgtacattattcgctaagtgtctccattgtcattatatctcctccatgtaacggggttagtgcctcatcttgtacacctgaagttacatggtttctcatcgaggcacaagacaacagtttgtatatttttatctcgcattagacgattcagtcagtcgagttgtaaacatactctgttaattatgcttttaatgagttattccatttcaagtgcaattatgattccgtgtatgagttcttattcttcctagcttgacacgtatcttcctttgatgtgatagctgaatttcaggtataacaattgctcctaaaaagttcttcttaatgattacaaagggtattttcgtcatgatccatttcgaaaagatgcatgtcctctgatttttgtcgttgttcattttcgaggtacataagcattaaatgacaatcttttccacttctactttgaattatgtccgtgggatcaaacattttcctgatccaacgaagccgatatcatgagtataaagtaagaaaaaggaaccacctttgaatcatttcctccattttagaaagtttgagaaattcttaagcttcttcgctaagagtcaccatcgagttttcctgacgatttgcatgccatccgtgtccttgacattttttctacgagtttcctccgacttcatcttctcaaagcggtccttactacatttgaagatttgcagaccgagcaaccgttcattgccccaagccctaacttcaaacattaagttgctttcttcctttacatgcttgttacattgtgtttaattgctgcttaatttctttgtatcgttgccatctcatttggttttggtagtttttaggcttaaactgtacttaggtcgatactagggttcaggcaatacgtaggttttttcaaatctcctactcacaaccttcgagtttgataaaattctctccaaggattgagactgctt

SEQ ID NO: 31843 - DNA, 3091 bp, Cannabis sativa
gacatagttgataatcctcctcagtttattgggtttttaaatgagtatgggcaactggtcgagcaagcaattgactatgagtggctccccgtcaaatgtaaaacatgttcgggttatggccatctaatggtggattgtcagaaagtggagaagagtcaatagagtaagaagctggaatagagtaaggtagctacagtgattcttgaagaaaaggatgtctctattgatatagtgcagcaggcagtcaagtcagtggataaatcagtagccccgattgctgttcaaaacaaaaaagaagtgaaggataaatagattacctcgaagaaaacagcaaacaaacagagagaagtggcagttccgagcttcaaatggataaagataatcaaaactcgtttgacatccttgatattcaagcaaaaaagttggaagcagacactgaagaatggatggaaggtaaaaaattagatactagccctttacataactgttaatggattgttgcaatatattaagctagaatgtgagagggttaaataaattgaataaacaggttgatgttttaaatttttgtaatctgaataaagttggtgttggggcatttttggagactaaattgaaggggaacaaaataaaagacatgatggagaagaggtttcaaaactgggactcctattccagctcagttactgaagacattctagttatgtggaggagtacatttgctcgtgttattataaccaaggagacaaatcaacttgttcactgttatgtcaaagtggcaggttttcctactgctattagtatcacatttgtatatggtctgaatacaataatagaaaggaaaataatgtggaatgatcttgctggtctgactttaccggctaagtcgtggcttatgcttggtgatttcaattctgtctttcatgttaatgatagacaaggtgggaacccgatttctcctagggagcttttagactccaataactaattatctcttcagttaatggatgctttgaaaagttcaagttcagcttatacctggaccaataaacaggaaggagggaagcgaatttattcgaagatagatcatgtgtttgctaatgaagattgggttgatatttttcctaactcggctgctctgttcaaatgggataccctgtctgatcattgttcgtgtttggtgtctaatggaaaacttgaaaacattggttacaaaccatttcggtactacaacttttggtctgagcatgctgagttcaagaatgttgtcatggacaattggaggaagccttgtgcgagcacgaagttacatagtattttactaaaatgatgaggctaaaacacaatctaaatagattcaataaagagactgttggtgatattggaaagtcttattctttggcaaaggagacataccatgaggctttatttgatgatcaagccaatcatgggaatttttcttttcaagaagctgagaaaaaggcagctgaggcatatgaaactcaaggtaaaatgtatcatagcttccttagacatcgtagtaaaatcacttggctaaggaaatgtgatgataataatgcctatttttatgcttttcttaagaaaaggaagataaataatagaattgtttcctttgttaataaggaaggaaagcaaatggattgtttccctgaggtggtggaccatttttttaaagcatttaaaaggtttatggggagtttgagtattgcccagtctttgcttaatcgagagtgtatggacagggggagaaagctttctttagaccagcaagttgggcttttaaagccctttaccagaaaagaaataaagaaagcttttttcagcatcctcaatactaagtctccaggtcctgatggctatggttcaggtttctacagggagttatggccagaaattggaggggaaatatgcacagacgtgttgcaattctttaagaatggtaagtctcctgctggtcttcatgaaactaaaattttattagtgccaaaaatagactgtccttctcgtgtgatagactatcgtccaattgcctaatgtaccaccatctataagggtatctctaagcttttatgcatgcagttagctactgtgttgtcgtggttgttgaccaaaatcaaggggctttcaacaagtcgttccattgctcataatataatgattcttcaggatcttatcaaaaactatggaaggaaatctatcacccctcggtgtgctatcaaagttgacttgagtaaagcttatgatacagttgattgggggttcttggaagacattcaggaagctctttgttttctgactaagttcattggctggatcatgaactgtttgagaagcacaagctaccttttgatgattaatggcaggattcaaggaaagtttttgggaaagaaaggtgttcgctaagaagatctagtatcacctctcttgtttttcctagtaatggagtatctcaccagaagacttcatcttgcggctttagacaacaagtttagctatcactcgatgtgtagaagccttaagataatttccctctattttgtagatgatcttattatcttttgctaaggagatgctcagtccacccaaattattaaatctgttcttgatgattttagtgcttcttcaagtctgaaagcaaatcttgaaaaatcacaagtgttctttggaggtgtttttggagaggaaaaaaaggtgttgcttcatactctctgtttgaaagaaggatcttttcccctaagtaccttggggttcccatgaggcctacgaaatggaggaaagaagattgtggtcttatcataaagaaaataaagatgaggctttctacttgggctagtaaacatctttcgtttgcaaggagagttcagcttatacactctattctgctaggtctctggaactattggatgagtatattcatcttaccacagagtgttattaaacaagttgaaaggctttgtcgagggtttctttggggagttgaaggtaatagatgcaaaatccatatcccttcctgggaaaaagtttgcctccctaaaaaatatgaaggccttggttttcttgatggtcctac

SEQ ID NO: 31844 - DNA, 1883 bp, Cannabis sativa
  modified_base (649)..(649): a, c, t, g, unknown or other
gttcgacctcacttgcgtgagctactacttgatggcgtatacttgcatagtttttataattttcgtaacagtgtgttgatttgtttatcatattatattgtttaattttattttcttattctatattttagtattttattgtctatgttttatattttgttgtacttttattttcttttcaaagcttatgtatatgtctaataatttacactttatattgatatagtttttttttatggcaaaccctgcaaaacttcactttgtggaacttgatattttcggaagaaattatttatcatgaattcttgatactgaaatctatttagatgatatgggtcttggagacaccgtcaatgatcaaaatactgaaacaaaacaaaataaggccaagactatgattttccttcaccatcatctccatgaggggttaaaatctgaatatttaaccgtaaaagatcctcttatgctttgaaaaaaattgaaaaaaggatacgactctcagaaaactgtcatattgccgaagactaaaaatgattagttgcaccagaagttgcaagattttaaatcagtaagtgattataattctacaatgtttaatatcacttctaaattaatgttgtgtggagaaaaaattactgactatgaaatnttagaaaaaatatatactattttttatgcctttaatgtgctcctgcaagagcaatatagaaagaaaaaaaaaatatttagaattaatttcatgtcttctagtagctgaacagaataatgaacttttgatttcatgtaaattattaatttatttaatagacttaaaagtaatataaatattgttacaaaagagaaataacaaagataaaactatttaaaacaataaaatattgtaatataatctaaaaataaaacacatagattttatatataaaataattggtatatgaaaatgaatttttattatattacatgacaacttattagttttgaaaattaattttatgactactcaaaatgtattttaaataatatgatatcacaatataattttaaaataactattttattttaagatgtttacaaataaatttttgacgtagctaaattgtatctcaaattatattcataatgaatgatttttttttttttttaatatgtaaaagtaatttcttagtttcttatcaacatcataagaaaccaaaatgctacttttaaaaacgtaaaaaaaagaaggcaaaattcgagattaattttttagtcataatagtttggaattgatgtattttttgatgacgtagaaatatattattgtaattgagatttgttaaggtatttttgtaattaatttttattttaagtatattatttaataaattctaattttaaacttttttttgtagaacttttcaattttactaataaataagttttattttttgttaaatataattaattaattattataataaataattaaataatataatctcaatagtttatatagtggaataattatttttttaaaaaattattatttattatattaataaataattataaatttattaaatactaaaactacatggagtacatatacattatacgggataagtgtatacacatgtctatatataactgaaagctaattaagatttttactccaatattacatgtataaaatcatgtcccctttgtaaggttgttaaaaatgctctcagaactatttagattgttggagtcaaggacttttatctaattttagtaaaaaatgtctaaaatggatgaaagtttagagggtataatttagtacatgtcaaaattcgagggcaggatttagtagattttaaagtctggggaacatgattagtacataaacaatcactgaaatagta

SEQ ID NO: 31845 - DNA, 3342 bp, Cannabis sativa
aattgttgtagttgtcctcccaaacatggtcattgtttggacaattacaacaccattcgctgtactccgccatgtcttcgaacatctaatagacttcatcgattgaaagttggtagaaattggtggtaccatatcctctttctacctattctcgtgtgcttagattaaacccatttaggaatatttctaattgacactctttggacaacccatgatatggaaacctcattagaaatgccttgtatttccaccgtgcttcatacaagggctccaagtcatgttgaacaaaattcataaggatttgtcaatgagacatctcaagcaccttgcaaaagaaaccaaaacaagacaaacaaagcgtaaaatagaacaaaaaaataaaattaaacaaatgaaaacaaaaaaccaaattgatagcaattaagttccacaaataaaatttcactaagtcaatccctagcaatgacgccaaaagcttgttgtgaaaattatatatgcaagtgcacacaatcgtcaacaagtaataaagtgataaattgagtatcgtctccacagggattgaaaactaaaaattaatttacaaaactaattactcacaaattggtttcaacaaaataaaaataaagtgatgaaaatatgtaaaaagttaacaaaaacaaactataagaaaacaagccaaaattattaaattggcctaaaaatgtaaagtgatgagaatatttggcctctttttttgtcaattcacgcctgcttgctcttttatcatatatatcaaatgccaataagcccatcaattatgccaaacccttttgccaaagaaaaataatgatcagcccattcttttcatttgtcttttttttttttttttttttgactttttaactagtaaagtaaggcccaataaacataacaaatcaattagtgagttaagtgtaggatatttgggctttagtgagtttatggactttaacatcattgctctccattttgacaataagtccaaaatatacatttaatctttttacaaaaatacacaacttagattagcacttataaaatgggaaactaaataaaataattcaaaattatgaaaattaatatataaggaactaaaattaatattttattcaaaactaaataaaaagactactaaaataaactaaaaatacttgagaacaaaactaatttaatgtacaaaaagagctaaataactctatttttatagagttgtcagtagctaattaaatgaatttgattatgacatttgaagtagttctcctatcctgcataagagtcatatattttatttgaacgactctagcatgacatatcttttctcttgatggatcatcaagaaacttaaggaaatgagcagattgtgtaatcctcaaaatctaaaaattatgacattacatttgaatttaaaagatagtcaagttattgcatgctcagtaagagtattgcgatgggtgtcagctggttataatgaggtatatatctatccatcaatccttatatgacaacttttatgaggataaattcgtttaggaaattccctaagtatcaaagtgatattcctatgtctgcttcgcaatgatgagttcaagagacaagtacattggttttgtggctagaaatagcagttttggtggagcttgtgaatcttttattacgatattcttatggttaaggttcaagataagacataaatcataagtggatatattttgaataaattgacgatggatgtatgattatcgttgtctatcccaaagagataattgtgttaattgtgcatgtctataaatatagtgaattcaagataattggttaatgaatgtgtactcgatatcatatcattgttgctagtaagtttgaggataattaacctatatttaggcaacaattatggatcgattcaagtttaaacaaagtttttcatattgtgactttgatagcttaattataatcttggatgagaaatggaaagaatagaggatatacgtcttttgatttattcaattttagtacacatggtcatcgctaatgactattataattatagagaatagttttacaacccgattgttcacaaggattaatttatattgcatgcaagttttgagagatatcgagtatttattactcttttgttaagatctctcatgtattattatcttgagcacattcttctcaaatttttgactcatcaaagtataaaagcttttatgctttaaaatgctttaatagtagaaaatacctaaagtgactaatctaaacatgcataatgatatgcagtcaattcttatgtgtattgtttctcaaagtgacaaggatacaacaagactgatagatagtcgtaattgttgtactacattcatcttggtttaattgttgttattatatttgaatgtctcccaagctaaattatgtgtaatatacatatcttatcgatatgatatcatacataatttattttaactgcatattgtatgatagagattaatatggtgtttgttgattatatttgtccaagtgagaaagatattaaaatcttgtatggactaatataatcacaaacataattctatattcacaactatgttagatatatcatatgagctaagtctttttgtagtgactctcagaatattgaggttcaatatatcatattattttattctgaatatgcttattaatgttgtgattagataataatttgtatttatcaactctaatataggcaatagaattgcatttgacattcttgcattttaatcgtctaagaaaagatgatcatctcaaagattttattgacaatacaaagttgtatacgtctgtctcttctagatattattgttgataagtaaataaatgtattcatgttagagttttatgctgacattagtcaaatgtcaaaagattatttaggaaataattagatttatctcttgttttattttcactgagatttttgtcgaccctataattagccagaacatagtaagaaactctatatgtgaataaataaagttaaaggattgagaaaattttatgacttgtaattctatacacgagataagtttaattacatatacctctaaatttctaagcgatagccatcaacagttcttaatctttacttagagaattgatatggttatatcacgattttcaagctatgatcaagcgtgaaagtttatgcttaatcacatgacaattgatagatttttcttgatgatggttcatgtgaagaacaaactgtttgatgatcaaattaaggtgaattaaaacctatagctagtctccactccaacaatggatttgttttttttttttttt

SEQ ID NO: 31846 - DNA, 1350 bp, Cannabis sativa
gagaattacattcttaccatcttgtgagtgcttgaagaatagagtataatctgactggccttgtctgtagccatgctttttaatcacttgagtaaacctctcaaaccatgctcgtggtgattgcttcaagccatagagagatttcattaagtgacacactttcttttccaaattttccttcaaagcctggaggaatttttataagacctcttcttctaaagttccattgcgttcttggtatcaagttgctgcaatggccaatcaagattagcagctattgataggagaattcttactacgtttagtttcgccactggtgcgaacatttttgtgaagtccaccctgtaagtttaagtgaaccttttagcaacaagcctcgtcttgtatctttcaagagtgctatgaggtttatatttggctataaataaccacttgcatcccactaaattattttgtggttgagcaactatttttcaagttatatttttctacaacgcacttagtcttcttcaaccgatttcttccactcaggaatggacaaggcttcacaaatgtaattagatatagcaaacgtacttagatataggatataaagtgcgacccctcactcccttcctttaggattagaaacaaatgaaattgggttcaaagaatcactgacattgggatttatgactagttcggactcatgggaggcatgatctggagctggcggtattacttgatgtttgtttcgacgtctagtataaatcaacaattctttttctacatttatttggcccctcttttccttttcaggagtgttatggtctatattttgcacaaaattaggctcgatgggcagattagacccaataggtggagactcaatgggaataagcagattagaatcaggacttaccataggtaaacaagtatctcaacaatgagtatcactactatgccttccctgaagcgaaatattgggataaaaaggttgttcttcatttaatgtgacatctaatgagacattaaggcgacacgtgagaggattgtagcatttgtattcctttatggtggaagaatacccaagaaaaatacatttctgagaacgaggatctagtttggtatgtgtaaacaatagtgaagagaattgtgtatagtatatatttatatacaaagctagaacactaaatgtgaaactactaaatacaaacaagaatctactaaatacaagttaccttaattatctaattatcgatagaattccgaatttgaaggaacaagcgagcatcctcacagagccatattctccttaaatcgtctttttctttggaagatcatcaatcaagtgatcatctttgtcaatac

SEQ ID NO: 31847 - DNA, 1392 bp, Cannabis sativa
tctccatcaattttgctaaatctccagtgtactttggtggaatttctcaaccgattcctctcgctcaaaagataaatctttctatcggtgagttccctcttaagtatcttgggatccctctaagaccaactatgtgaagatttgatgattgcggtttgattcggaagaaaatgaaacttaagcttcactctttggctaataagcattcatcctatgccggtcaagttcaattaatccaatctacattgattggattaaggaattattggatgagagtctttcttcttcctcaaagtgtgattaaagagattgagaaattatgtcgggggtttcctttgggggttgaaagataatcgaactagagcccacttgataagttgggagaggatgtgcctcccaaaagcctatggaggtcctgggtttaaggatggaacaaagtggaacaaagcttccttagcaagatttttatgggacttgatgaataagaaagatttgctatgggttaagtggattaactcgatttatctcaaagggagtgatgtttggtcttataagttgagcatggatacgagttggtattggaggaagctttgtaggcttcgtaaaacttacaacaaagctaaaattattgctgcaggtggagaaaaatttaatgttagcaggttgtaccgaagcatgctgcaccaggaagagttctcggctacttgtgcaatctggtgcagagttaatgtgccaaaacatgctttccaattatggcaagctgctcaatctaagcttctaacgagggatatgttgtgttgattgaacattcctatccgaaaaaaagttgtgtggtttgcgacattgaaacagagagccaccgccacatttttttcaactgtatcttttcacaacaggtgctgtctttgatctttatttggctgtggtttgatggttggtctaagaactttgaaagctggactgtttggttgggcaatacaaggccgaacatcatggacagagtgagaacgctgatgttagcagccgcgatctaccacttatggagcaaccgaaacacttgcttgttttccttaattctaactctgtttattgtatattgaacaaaattaaaagtgctgtgaaatatagactcttgttgattgaagataggaaaggttctagagaggagaagaacttactacaaagatggatatgtaattattaggtttgtgtggttgttgcttctcctttgagaagtttagtttgtttgtatttggcgagttgattaatgaagttttcttcttcttaatcaataaaaatatatctagaaaaataccaaaaagtttacctagaaaatatctatctagataattcataaactaattattgattttgtaattaaaatataacata

SEQ ID NO: 31848 - DNA, 1448 bp, Cannabis sativa
  modified_base (1232)..(1233): a, c, t, g, unknown or other
tgaacactaaaattagtttgtatacagttgcataatagtttctctatagttggacgactttaaaaaaatataattaattgaaaaaacataacattgatgctgatacaaaaacattaaaaaaaaaacatattataatggttaatgtcaaatatcctaaaagtttataactagttcctaaattgaccttactttttcaatttagaagccttggaagacttgctttgcttctcattctcgctattaatactttcatcattttcctttgaacgtacgagaagaagagggcagtaagtcgagtacgataaacttcaatgtcaaaatcagcaggaacatcttttccatggatgaagaactcggcaaatgcagccgccacaaatgctctgcaatcactaataactagaaaggaaaacaaaacagttaaacaactataatacaacataaaataaaattataaacaacaactcactttttctgctgagatggaagaccagcaatctccacaactcttagaggagctttagggtcagaagctaaatcatgaacgtgggacatattcttccaaaatccaagcagatcaaaaaacaaagggagtaaaacataataagccttcattgcattcctagctgcagaattcattttggcaatcctcaaataattataaagaaatataatcccctcattcaaatcaagacgaccaaaaccccaatgactttccttcctaagatttatgatgaataggacatgatcggcttaacaccaaggcttagaacatggaattcgcaaatctcgtatataatgcgctatttggtgagcagcatgaatgtgcgacatctttgttttcattgacttggctttgttgaacttgtggtataatgcttgaatggaatcatcaaaaaggcagtcagttgttgcgaaattaagtgtaacagcagaagaatatttacctttttcctaaggtaatagaagatagtgttcatatgctgaaacaaaacaacaaagaaacacaaaatagaaagttaaaaaatattaaaaaaaacttaattacagtaactaaactgaaaaataatgataaaatagctgtaaaacaactatcaaaagttttaaaagaaaacagaaattttaccgagtcattaataaacatgtcacaggtagccaaatgataaaaccaagttttatcttgaacataatcaacacctaatctaaacccaggggaaaatttcttcgcaccatcnncataacaattgtaatgcctaaaataacaaaaaaaacaatattgaaatcaaataattgcaaaaataaaaacagaattcaaacaaataacaaaatacaaaataaaatgaataaaatagtcacatatgatgttttagcaaaccttcaccaatccaagcatcaaactttgcctcaatttcaggagagacgggatcagcaaatgtatcgttaagagcgta

SEQ ID NO: 31849 - DNA, 4170 bp, Cannabis sativa
  modified_base (137)..(140): a, c, t, g, unknown or other
agaaatctgaataagattgactcatggactatgcagaattttaactacaaaaccacgtaaaaaatcctgtgttcatactattatttttatagctattattttttctatgtgaaatcattactgtgaggctcaaattnnnntaacgaaaatctacgttaacattacccatcaacaacatgtgctaaaataggctttgatctccatcctccttaaagttttatcttacccaaatttctctattttttgctaatcttgcctgaaaggaacatatttgtgttacaattaattatttattgttgactataatgtaaagtattactaaaataaataatttcattaattaccttttttttctgcattccagtaagcaatgtaatcaccccacacctcctaagttactttgtctggaggtaatatgtctgccttctcctgtccaaactccttaatattttcgatccattttttcttagaattggcccgccagtcacgcaaatcccacacattctgagaaatcccatcatcgtccgagaaatcccacacattctacgggatgtactcgttcacaatcaatctttacagttctcaagatcagtgatgtaatatatcaattttgcttgagatgcaagtatgaacatttcattttagtaccactcccagttgacgtaaatgctagtgaaaacaccatcaaatactatttgttgttatcacattggtacgaatagagtactaagaataggcagatattatggtcaatagtattgtcgcacgaatgttctaaacttagtacagcgtaggacgcggggatagggttatggttgggtgtatgggcccctaattgtaatctgggttatatttatgattatgcttttctttttgagtctgtcgactcacagttattgtttgcatgtgtaggtaaggacaaggctaagggtgaacaaaagtgagtttgagtagacaaagattgtacatgtcgggacggttaggcttggagcatacgatctttgggacaacaggctgcattttaaatggtttctaagcgacaacttttgtatcgaatgtttttttattacgattgtaaatattttaaattcaggatcctggttatgtaaatgatatttattttcatttaaagagtaattaaatataagttttaataaatcacaattttcaataaacctggtgattagcaacgaatggcgcaattaatataaaatcatgataacacgcctaaattagtagggtgttacagatttcctcttgaaaatctaggcttgcaatttctcttggtgtaactgtcctgatcactagcgaaggaagatgtggatattcacgagcccaaattctcagcaataggcgaaggcagtaatccatcacgtcttcaagtgtgattcttcttgaatgtgattcgaagctcttggatagcaacaagtctggtgcaatttgagagtttgaaaatttgaaaaagaaagtaaaagtggcaactgatggttgccaagggtatttatatcccaggacaacgatccatgtgaggaaggagtggatggccatgatcttttcggaacaaagtacaatccccatccaatggctagggagatcaaagatttatgtgtatctttgcatttaatgctcttcagaataaaggtgtgaagtaatgatgaagatactcttttttgcttttcgtgtcagtcaacaaatagccgtcaaaatatagctgttcctagacaacgactcatcaataaccacgtcctaacacacgctcgtctgccacatggacgcaccatcatcacaggcagaagccaacttccaccgtcaagtaacttgtgagaaatcaattatttctttctccaatctccacttatccagaacaaagggatcagagcaagcttccaccatgtgcagcttcctgaaagcttagggtaaatgttattcatgtttccagaattggacacgtggcccccaagttagcatttaagacttatcaatgggaccctcaacagggatatggtgggccaagcccacctggatagaacttttcgggtgttattttagttgtgtgctcacagtatcttttgcccttgataggttgaagctgcaagatagctttggtatcatgagcccggagggaaaatgagttgcattcttggaagactcttttggtttccctattagttccctcctataaataagggagttccagctgttagattctgccataatatcatatcgcgattaaagagaaaacttttcataacaagcgcagggtagttatttcaaaatattctcccattataattagatacggttttgacctgatcaactcaagcctgattcacctagttagtagattgtattctccatgggctggacttcatgagtaagccaaaagacattgttcagttgtaagctccctagtagagggaaaaaggaaaaccctaatgtaattctccaattactataaatacccaactaatctcatggattagggttgaattctctcacgtacttttacttaggcaaacttacgatcatacatcctgtatacctttgagaatctttacaagtaaacacattactaaataaaattaactcgtggactaaggctagttaacgccccaaccacaaaagaaaattgtttgtctcttattatactttctctcaatgattttttttcagttcttattattttattccatttatgaaaatcttaggaaacaatactatttggagggtccaaaatgataaggtacacaataataatctggataatgtgaagcgttttattgactatattcatcactcttataccgactatagagcttccctcctccctactcctactctgatcttggtggaagcttggcctcctccacctcatgattggattaaactgaattgtgacgtaaaagtgggtttgaaaagaatgtgtattgcggtggtagctagaaaccatgaaggcgaggtggcttgggtaagtagggcaaagttggatttttctgatgccttttgtggcgaggtggttgcgtattgtttggccttagacaaggtaaggcgaaaggatgcaaatttattattgaggagagcgactcaagggtagtgatcaattctctcaatggcaaggagactcgatgtggcttgggtaagcagggcaaggcaaggtggcttgggtaagcagggcaaagttggatttttctgatgccctttgtggcaaggtggttgcatgttgtttggccctagataaggccaaggcaaaaggatgcatattcattattgtggagagcgactcaagggtaatgattaattctctcaacaacaaggagactcgatgggaagttaagaattactcttcattttgtaatagtccttctcctcattttgtgggttgtttattttcgtcatgtaatttaatttattgattataatgtgtcgaagtggacctttacccacaatcaataaggttgcttatctctatcctctatcccggtaaacatcttttgtaatgatcacgaaatttaactttttaagaaaaagtaaaatatatatataatttgttttcccttgacctctatgtgtatgtgggtctgccttgcacgggcgtaccctaaactcccaggtgcatgtattcggtcgtcattctgtggttcatattcgtaaatgtccaatcaaattacccgtgttgagatctaccatatatgcctaaattattatatgtctcttgctgattttgatattattctccatttctccaacatggtgcatagacaaaaagtagaaataaataaataaaaaaaaaaactgtagaattataaagtgtttatttctttctctttggaaaaagactatcactatggattacttgtcattttaatattgggttgattctattttgactaaccgaaagctataaagtttttttgaatcggacgattcatcacgtgtagtgatgagatggtagataaaaatgaattttcattggtaatagtatactctaatagttttttttttttttttttctgtagggtgtaatagattataggtttttttttctcaaggtgttatgggttattgttagttacgtgtttttcatttcttttaactaattatattataaagaataattatcttttttaccccctgtacttatgacactatactattatgccccttaatcta

SEQ ID NO: 31850 - DNA, 3169 bp, Cannabis sativa
ttttttttttttttgtaaggaaatggccttagagccgagacaatagtttgccccttgtggaactctttgtaaagagaaatttgcgaagttggatggccaactttgctttttctttatttaatcttttaatgcttcatacttttatgtttgaacttcaatatgtagttgtttgcttgcgtttcattcacaatttaaacaatcatattttgatcatgcacaaagtactttaggggtttccatttctcatatatctctttgacgttaagtagttaatagcctactttacgcgcgagcaatttatcatctgcgcaacactcgattcacgagcagtcattgattccgcctcgcaataatcagtagtaatctgtttcaagcaaacttgaatatatttttaatgaccttgtcactttgtatatatttttattgcttacatgaatagttagatcttctaaccacacgttaggtttaagtacttttttcaagacacattgatgtctcgtttaatactttcctttagtgcaagccgttagtattcagctttaaatgcgagttatgagctagttatatctcatttataacttttaattttcctttcctgttaaataggtttttaatcaaaaattatagttgtttgatccctttctcaccggaaaggtttgattaggaagttataacgttcaacccatctctcgtcaaaaagatttggtaaggaatttataacagttcgacccctttttcgtcaaaagggtttggtcgagaacctttaaaaaatttcaaaaatttttatttttgaagtggtggatttgcattatatcatgtattttcaaataaatttcggttaatcatacatatatgcccctcaagtaattttaaagggtcatgctttataattacttatcgaaaaaaattattactttatccataactgaagttcaaaatattacatcagtgatgcggtttacaatcattaatttaccatcgatttaatctcataagaactcttccagtttaattgcttattttatcaatcttctagaagcatctagttttgatagaatgggttttgatgctcagggtcaatccctagcatattcccataattattttgatatccagggtaaatccctgccatatccccaggttccaggtgaatttatcctggtttcagttgtttgtcctaactgccactagttgacgaccagcttttctgcgttggaactccatacggcagccattgtgagccggtatttaattacttcgcaatacttttacgtaatttcttgaccgaactcactgccccttgtccaatttttcttataacatgttctcctcccgagatagctgaggtatcctttcctcctacaaaggaaggttatggtctttggtcgcttgggttactaggtagatcgggctagtcatggacattgtcctgcccctttacatattgctggaagtgtcctcgcgctatgaggccttctatctcatctttaaattgacgacactcttctgttgtatgcccaatatatctccatggtattcacatcatcgtctggttgggtcccttttacgtctcgtgaatttcatgggctttggtttattgaaagcgatcttctgttcatgcgtgaggtagatacttttctgagtttcattaagctcggtatagacagtataaatgggtacatatttgtcgtgtttcttttgtttcttatctttggacgacctcttagagtcgtctttcctctttggccctaaagcttccaactcaaattcttcaacagaatcacatcccaattgtcttcctggatccccgacctgatgtctcctgtacttattctccaactcgtctattcccaaatatattgaatccccttgctttggaccaagttattgatgaagatcaagttttttctggttcaagcgttctcataggtccgattggccatgacggccgggggatcttgctccacccgtaaaccgtattctgccttcttgatcattgttgcaacgagtattctcccctctttgcattgatcgactatgagttactgtgcactagcggtaacacacgcctcttcacgccctgctcttctcccttgggtttgatttgtctcgttccccctcttgggatttgtgcgagctcctttcctatgagcttggagagaatgttggcgatcccttaacgatgacccatgtaccacaggttgtgtccatagatttcccttattcctacgaggaacttctggttccttggttcctggttgatcatatggcatctcgccttcaaggtatcccccagtttccccaggttgtctttcttgagcgttatggggattcctttgggctgcctcatgccccctggtttgtgagtctcgaggtctgcctcctcgtggttctctcttttccaaggtggtcaggttgattttgggagctatttccatgtaccgccgtggctgcagctacctcacactctaattcagcattgccccggtttgcttcctctaatcgactcttgggatggcggttttctaattcaacgattggtatgtactttgttggatcataggcgccatcgtcatcaactagattaggaagagaccagccattgctcatcttaggccgttcaagtctggttcccaaattctgggttttctcggagcttgtggtccattcaaatgataagtcgaattatccttggggactcattggctcttttccaggacgatgagtggtttcttcataaggattattttcttcgttgtcagccataagaggaatattattttttatatgaggatttttttttcgagctttttcaaggaggctctcaatgaaagcaccaaactgttaacgcagattttcgttaaccagatatgagcctaaatgataaacttgcacaaaaatataaaaacagtaaagaaaagaaaatgaacacaaaggttttttacgtggttttgcagtgaaaattctgcatagtccacgagtcaatcttattagatttctgatggtttttcagggccttttttccttatgaatctttttgtctccttttcaggataacttaactctatttataattacataatcaggcagttaattacagagttgactatgatctttacaacgtttatcccctgaaatcgtggggtttgattacatatcacgtagaata

SEQ ID NO: 31851 - DNA, 4809 bp, Cannabis sativa
  modified_base (1845)..(1863): a, c, t, g, unknown or other
tttaaatatttttacgatttttctgattttatttacaaaaaatacggtttgttgttaattttttgttatctgcacgttatttttattgttattttgatgtaatttcttgttgttttcatgttgtttctatgaaaaactgtaaaaatatatatataaaaaatttaaacgtaaaaatataatttttttacaaaaaatggtgccttatgtaattatcttttttatttatgagatatatctcgctctagcatttatgttggaaaattaaaaagtttaaaacaaataacaaataattagtaatgacaaggtcacaaactttataactaagaattagagataaaatagcttagaatagagtaattaaaaccagaaaagattaaagcaagaaaatagtaaaaacaacacaaagatatatactggttcaagtcttatatcgatgtgatctatgactctactccagttttgacacatcgccaaaatatctttattgattgagcaagaacaaatgtacattacagtaaagatcgatcctctattagaattctctcaaaaattttatctctcacactcttacccaagaagctccttcatctacagatgcttcttcgtacaaatccctaaacttaatctctcttttctctgtacctctcaatttcactctcgatctttgctctcaaaatcatctactgtgtttttctttctaatgatgaggatggtggtatttatagatttaggaaatgaatcccaaagtcggtggttgcaacaactaagttgttaagtcagttactacttcatagactttagtagaagaagtttctaatttttgtgttgagttcaatattaatgtgataaatatggatggtatgtattgtgctcaagggaaatcacgatgtagagctccaaagcttacaaatttttacaattttcgtattgattttttcaacagtgtgatagatttacaactacaagagctaaataattgttttaatgaggctaacattgagttgttactttgtttggcgtgtttgtctcccaataattctttctatgcttttgacaaggaaaagctactccgtcttgctcaactctatccacatgatttttctatagtgtatttgagggtactagaatttcaacttcgaacttatgctgatgatttgcgttcccatgctgaattttcaaaattgaaaggaactgttgatctttcaataagattagtggagacaagaaaacatgaggtatattcattggtatgtttacttattaaattggcattaacattgccagttgcaacaacttcaattgaaagggcattttcagctatgaacattgtgaaaaatcaaatgcgcaacaaaatggaagattaatggctaaatgatagcttgactgtgtatctcgaaaaagatgtattcaatactattaccaatgtatctatcattcatcgctttcaaaatatgaaaactcgaactttaaatatatgagtttgatttattttgttaaatattttgggatattgagtatattttattttttaaatatcaaattgaatgagttggtgtttaatatttatattttttcaatacacaatttttttttggcattgtgatattttttattagaattttttttatgcccccctacaatcaaagtctgggttcgccactgatgggatccgatacttagttggactaatagcgatattaacacgtaggagtatactaaacactactggtgccctttagcatttctcagaaagagcattgctattaggcaccagtggtgcctagcacattctcgacatgtcgcgttgcgattggttagcgacactccctaaaaactattatattnnnnnnnnnnnnnnnnnnnacttagttgaaccaatagcgatattaacacgtaggaggatgctagacacaactggtgccctttagcattactctataagaaaagatcaaagttcatctaattttgactaattaactagtacatttataattaatgtagatagagagtttgttttataccaagttgaatattaaaatattgcaacagtgtggttgctgtttttgaaaatgtccttaatcattttttttaaaaaataataataataaataaacaaacaaacaatcaattaaatttgtttatattaagccgtcagatcttaccctttttgaccccaaaagtattttattatatgaactagcaaaagttctttagatcacacgtgcttccgatgccgaaataagccaagtttttatttttatttttttattggaggttaattaggaagaagttgtatatttttattacaaaagttctatatgtaattctttttcaaaaaaaaaaaaaaagagttctatatgtaattattgatcatactttttattttattaaacaataaattaaattattatattttttataatggtataaaatagtatctcgtaattttagtaaatttatattttaatttttctaacacaaatatatacaaatatataatgattatattattattaagatttcttatgacaagtaattagcttaagatatttttattttatattatttaaaaaaataaaagttctaattaacaaactcgacaaacataaaagtttagaatagtatcttctcaaaaccatcctttaataagtaataataatataacagcattgcttgcgcattatagtgcccaccagaccaccgctattgtaaaataaaaccttgtaatagttagtgattttatataattattattaaaataaaataagtgagatgggatacaaaattacattagtaataagcatttttaataactatgctctctaaatgcatttttttagttgaaataggaagtgagacttaaaaaaataaattctaattaaccatataaaaaattactctctataatgaaaaataaataacagaacaagtaactctctagttttttaataatatttaatcaaaattattattactattttttgttgttttatgatattaatttatatgtgataattaatttaaattataaaatattattaaaataattaaatactagttatagaagagagcgattgaagcaacaataataaaaataattctttattttaaagctaaaaaatgagtactattggagatgagatctaatgtcttgttgtttaaacattcaagtaagatgttcaaaatgaaagagtcaattggggtaaagccaaatatattcattattggaggcaaaccaaactggcggctggtttgactagctatgacgtagaagaccgtacctgactaattaatttagtgcatttgtgaatcttaaccttataaatactttgatacaaatcatgtcaaggatcactttccattatcatttttcattacacattagtattacatcaaaatcaaaaatcatctaatctcattatattagacgtttctttcttaattagggagagattatatacaacatggcaactggaattatggaggtctttttggtgaatgctaagggtcttggagacactgatttttttggtacatacttttatatatatatatttcttactctattgaccttaatttatattttgaaattattgtatagatgatgatcaatgtgttaatttataagagtacttatactttgtaggtgatatggatccctatgtactgattcaatacaaagatcaagagcgcaagagtcttgtagcccgaggtaattagtttagtcaattattattatttacaaaaaaaaatgaaataatcaataattaatctaaaaatggtgggaatgcaggacaagggagtagcccatcatggaaccaaaaattgagctttagagcagattatccaggttctggagataactacaagatcaccttcaaaattctagacaaggacactttttctactgatgatttcatcggccatgctacgtacgtataggagatcactgtaatttattattagtacctaatttaatttgattattattatgtaattaaatatgatttgaatgaataataatgcaggatctatgtgaaggatttattggctataggagttgagaaaggaagtgctcaactacaaacgagtaaataccgtgtagttggcgctgaccaaaaatatcgaggagagattcaagttggtgtaactttcactcgcaaggtatacaattttttttttttttttgagaagatagaacacttatttcttcttcatatgaccaaaaaagaaaattttgctataagaatgatcaagtaaataatgtttggtgtatctgataactttctgacaatgttttgttgttgtatatattttgcaggtggaacaaaaatgggagaaatttggaggatggaaagagagcaatttctagattttcttatgctattccaaagtcccaaatagctagaaagactcgaagttcttttattgatttatttttcattgtattaatatatttatgtttgaaatctctttgtatatagtgagtaattgctgtaatgaatttaacaaaatgttatttatttatttttatttttgaaagaacaacaagttcattaagaagaagaaggatggagagaaaccacatggattccctccccttgataaacaccagccatttgacaagaaaatctagctctttttgctagtccacctgtaacagaattaaaacgagaatttataaagaaaaacttacaatccgaaatttgcttaactaaatctaaaacttgttagactatatatatagtatatgtaatatagcatatagaaatgatatgaaatgcggaaaaataaactgtaatcatatca

SEQ ID NO: 31852 - DNA, 1685 bp, Cannabis sativa
tgaatacatcagaaaatagcattacatggataacatcttatattcataggtcaatttggataagccactagatggttgaaaaaagggattttgttaattgttcagttgccaacttgccatagaaatgatagacctccaatttgttatacctacactaggcagggtaaatcaggcaattgagatgcttgcagctagagtcagttttgtactagtgtgaggtaatgggtgctaacataattccttatggtgtcgttgtgcatgtgaattggggaatttatattcagagtatagggaattaatagagcatgcagaaattcgacttgttgagagtttttctctaagggagagcccaagtctcttgaattcctggtgttattgtcattttccttgaataacaactcccgatttcagtccatcatattgcgttaggatcccacattggtcaagtataggattggttagtacttacttgggcaccctcctctcttaggctagcttttgggagtgagttctacccaagtggttgtatcaagtggtatcagagtcatgcaccctcaagtgggaccgacatcgcggaaggggcgacttgcggattaggcccagagtaggccactatagagtgggccgttgtgaacatcgactccaaggggtgtaatgttagagcactcacatcagctcttttaaaatacctttatatgtaataattgaactaaaaatagtcaaatggctcctacatcatatgagctactttaaagttattttgaagaatggtactatagtttctcaatgtaactacaactattcgagctatacttattttattattatttgactctctcactcctctctcataccatctctttatttattttactgatttttctccattatttaatataaatgtgtattgaaaataataatgtttaaatgatgtggagataaaaatagagaaattgatgtatgatgtaatataaaagtttgaggtaaaatagaaaaaatagaattttggtgaggtattataaagagtagaatagaaaagttgttgggagtactcttaggatcccacattggccaagtatgggattggttagtacttagtagcatataactacttggacaccctcctctcttacttagattcctttgtgagacaacaaattttttagctcggtagaaacaaaatgctttcttaaatctcaatttaaaaagatattatggcagcaagttgttagaaagaaaatattgtatcaaaagaaatatttggctatgttatgtacataagtaatggaaaaagatacagatttttgggaagattgttggcttggagaaaaactataaggaaaggtttgaagcatccttagtcagatcacaataacataatgagtcaattttaatcttttctaaatcagattctttgtggtctgagtactaattgttagggatcttcagtttttttttatgaaaaacttttaagttattaatgtccttgtagcttcagattagagtgtgttgtacaattgtaaaaataattggatcatttgttgatttttaaaattatttcggacaagaattgtcaccatccttataaaataaataaagatacaatattccattttttattttcattttttttttacaaagatttattagtaattacaagtacaaacatgaccttggagagttct

SEQ ID NO: 31853 - DNA, 2068 bp, Cannabis sativa
  modified_base (1774)..(1788): a, c, t, g, unknown or other
  modified_base (1855)..(1855): a, c, t, g, unknown or other
cagcctatgtatggtcagatttttagtgcgcagagtcagcaacaacagcaacctactttggttcgcccgcagactcgacaatttgtggagatcttacctacagtgtagactggacaaccttattaccctaccccaccagctcttcaatctcgtgataatcccgacggttcaagacttagctcgaatgcagatgaatttctagaatttactgatttgaacaatggtaattaggttttttaattatgtcactttttatgttttaaagtttatttgaagacaattttctaattttatttaagataatagtttatattgtaatggacaaattaatattaatatttgatttcttaataataatgtttgatttctaattaataattattatacatataattataattaattttattacataaatattaaaaataataattttttatatataaaaaatattaataccggcggaacactaaatgtggtccgccggtattaatgtgtctgtgtgtaaaagtgcagacactaatgccggcggaccccactgctattaatccgtcggtattaatattattaccggcggaagtccattttggctgctaatagtcattaatagcgaccaattaatagcgcgacagataattaccggcagattccgccgatattacttatttccggcagttttgataattaataccggcggatgtctccgccggtactatagaaaattcttgtagtgttttaagtgtaaaatgaaggtagagatagtgattgtggtagttacacctcttgccaccgatttcagtagagaaaacgttgaatctcaacgttcattaaagtataaatctaatttctactaattttaataataatgtatattgttttattttttttattttataattaagttttgcgagtttttctatattattaagattgtgttattgtggttgtacgtggtggttaaattttggtcagtattggtagtcagattgcggtaataaggtaaaaatttaaattttaatagtatatatgtatgtattttgtattgtattgaatatgcattatgtttatgtattgtgaatgagaatgtgatataagagagtattgtatgtattatatatatatatatatattgaatattttaaactaacatttttattaaatattgtgaatgagaatgagataagagagtattaaaacaaaaatttaaaaattaatttttaaaaaattagtttagaaataaaagtccagaaattaattctatttttttttattttgaataaatcagccatttatattgctcactaataacaaattactctcctttacaaatattctcaaaccaatttcgatatatatatcccccaccttttcaatatcatgggctatatattctatttacaaccatctttttaactattttgacaaaatttaacacaatgggcacttcatgataccaaagacacatactctttgttttccacactgagtaaacacaagcattaaaaatcaaagtataaatctctttaattccggtaacttcacctgagatgacaaccagaatcaatcaagaaatgagctgtttcgaattcattaaaaaaatgtagaaaaactactacaaaattaaaattcaaccagaaattcaatttaatttgcataaaactaatatcctgacttcaatttttaaatccataaaaagcatatctcaaaaagttgatgtggagttcacaaacaatccaactcaagtataatctaaaaaaaattacatcaatactannnnnnnnnnnnnnncctagtgtattttcgttgttttttaatttctaatggtaaatttgttcatattaaatcataaagaganatgtagatagagttacgtacgtgaaaacattgttctgatttttaatgtttcacaacagttgcataaacattttgctaatagttttttcgtctgattgaaacctccgtcggatgcaaccttcggccaaccatcgagcaaccacccaaaaatttttatcttattgaaaccttcatctgatgcaaccttcggccaaccaccctgcaaccatcgtct

SEQ ID NO: 31854 - DNA, 1329 bp, Cannabis sativa
  modified_base (551)..(552): a, c, t, g, unknown or other
tcctagttctgctaagacataaataaactcttctcatgaatcaaataggatgatcacctaaggatcgcatcgagcattagagtgagggaatagctatagcgtcagcctcagtttgttgatcttaagagctttgttggaaaagaaaggaacccaatgacacaatcattcttttgccaacaattttttaatctaattacatcaatgcattttatgatttttatcgttaacaatccacctaaaacacaaaaaattatgatttcattactcactgaataagtgagcatggtgatttgttgtattatttatatttgttttatacgcgtaagaaatatatttgtttcaggccaatttaattattctaattaaatgttaattatcatatatatgaggatatttatttgcaccccataaaatgacagatacactttattattaaaaaaatataaatttaaataattattagaaattactcttactttttcctcacattattttatgctaattttaatagagataagttaaaaaatatatcttttttgtatccattaatnnaaaatactctcatattattttttaattaaaatatacccactttttttttagtgaattgcctaatatactctcattctctacttaagtctaacatataatttaccctcacttttttgttatttttgaatatttatgaaaatatccttaactaattttatttgaatttctaaattgagaattgttgagaattggttaaattaaagatgagagaatgaatgacactagattttctcttttaagactgatgagtaaactctcacatgtttgcgtaagaataatttaatttagcactcctaaaaaattttaatatagaatctgtcataaactttcaaagaatggagtttttctgcctaggattgggcaactatatgggcaagggcaacatcttatatataaatgagattataatttattcatgtgcacaaaaaaaaagaaaataatggtattagtgcgtaaaaaaatataataatggcaattatacctaagggtttgggtacccgcccctaatggagcgaagcgagtacgggggttgactttcgggggtaggggcgggtatgggcataaagattcatacctgagtcagaaacggagcgggggcgggaaatagatacccgccccaatatgatatatgtatatgtttaagtgttaaaatcataattactacaattaaaataacttcatgcttagtttttttattgattatactatttttttttactatacatactattccacttaaatttattgttttactaattttttatgattatttttttt

SEQ ID NO: 31855 - DNA, 2419 bp, Cannabis sativa
gtttttatttttgcttcctgtttgtttaccatggttttccttcaccttaagtgaggctttcataagagtgttaggcacaacgacaccaaaaacttgttgtgaaaattattatacgcaggtatacgcagtcatacaagtaataaagtgataagtaaaatcgtctccgcagggattgcaaacagaatatgatgtaaacttaaagtaaaagggaaaaatatgagaatggttgagtaatgattcaaatttaaaatgactgtaattaaacctgcctaaaataacgctgatgttgctagaaaattgcttgcaagaaatgtaatatattaaaaagtagcttgaataactaatcccccctagtcaggatattcccagttactacaacattacttcagcattttcgcacaaagataacagaattttcttgtgtttatgagaatttttcaaaactcacaaattaagttctatcatttagatcaatatattcctatatcaaaccagattgcaaaacctaaatctaagaattcacttgtttcattcaagttgaactactaaatctaggctttccaaaaccagatctagcttagtaaattgtcactcatggcaaaaaaaataacaattaataacagcaagcttacttgaatgaacaatggcaaagatgctaaaatatgcttaaaattaatcataccaaacatcatagccatcattcaagcctccctcaaaaaaaaagtttagctcatattcaaatcagaaaataaaattcaaattaagagttgttcatccatggttgctgccttttttttttttttacaatttaaaaataaaacttcaagtatttaaaggaaggaagaaaatagaagaaagagaatagaaattcaaacaaatggagcttgtgtcatcctctttatcttttttaggtaatttcctcttttaggctctccctttttggtactttcttttctgcaattacttttctccaaaaatggcagctgagctcatgtgtagaagaatggtgattgtgcttggtttttgttaggtaaatagggaacaatacaataccctaaaaatagaagcccaattcatttccaatcttggcccactaggttttgtctcctccctccacaacagtcaactatcgtaactttgagtggctgatacgtgtgtgctgatgtagacgaatgaaatttgttctgcaacttttttccacgtcattgcccagaatgttgaattcgttgttttaacaatttggcccagtttcagcttttatgcccactttgtccttgcatccttttcttttccctaacaatttaattttcctttctcaacagcaaacaagtaacatttaactaaataaacacaactaaaataacaatttttacaagacttaaaagctagcttactaaatagaaaataaagataaaaactagatgaagttaagcaacaaacacactttcattactcttttatcatgatagtttcagtttaaaagcactaaaaataactctataccatagggttatcaacatgcatttttcaacatatatatttgtgggagattttagtaacttgggttctgctactattgtcagtctcatctgatgacctgttagatgttgcaagtctgtacagtcagcccacaagttaattatttcagtttattagtaacttgggtacccctcttattgagttgcatatataaggctttgagtacttctttagctgacgatctaaagaggaatttagatgattattacatttgtaatgagtgatgaggattgttaaagaaaatgtgtgtgtgtttgatcacatctctctcaagtgagttgatttgtaaggtgcaagacacacttgttaatgagattaaactttgtattctcctatgtatttctttattgttgaagattgaataaagcttggccaaagggcagttcctcccgtggattagtcaccacaaaaagggtgatgaaccttgttaaactttgtctctatttcatttagttgattccacatttatttctagtttatgtcattgtttgattcagccattcacagttagatcgagatttcaagaatcaagttttagagtttcaagaactcatcaagaatggctataaccagataaaagtaaacaagtttacaggtctgaatgtgggctatggaggattaagatgaagacactccttgtgcatcaaggatttgcggatgcgatcatggtgactagttctaaggaagatgtgaagaaggtttttcaagagatcgaggtgaaagcacatagtgctattgttttgagtttaggagatgaagtccttagagaagttgctgataaagaatctgccctgaaattgtagaacaagagtggatcgatttacatgaaaaaatcactttgactaggaataacaaggttcgagcctagtgtgattcccta

SEQ ID NO: 31856 - DNA, 2609 bp, Cannabis sativa
  modified_base (1496)..(1496): a, c, t, g, unknown or other
ctgaatctttatattctatataatattgatagtatatacagttgtgatcttaatttattattattatttttttctttgtatttcaaatgatttttaaacattttttatacaatggtaagacaaaaaaattaacatgtacatccgctttcaaatgtatttttatacatcaaccaatttctatatgttttaatagtttatgactttaattttgccattctatgaaattcaaaactaaacccttcattatcaaatcaattcagttaaaatgtatttcagagttcatttattcaatagaaaccaaattcaaagttaatcatctcaatagcaattattatttaaaattccttatttttttcctttttgtatctgtaaaaatgttgtatttatgttgctgtaatgttcagtagctgctgttgttttttagtctatacttgggttgttgcatgtcctcctattgtgtcattttcttccacattttgtgcatttgatttgtgtctttgtctcccaactaggtcttgttcttttcttctttggccttcccgctttcacactttcaagtggtggcaatatttcattatccttgatttcttgtggaatgtcccaactgctttgatttcttactggatatacagttgcttcataggtttccagccagttctttgtgttgtaataatctgaacagtaattttgtgggtcaagatacatctctttcatcactgctaaggcatgcgcacatgacatttcatttatttgaaacctattgcatgtactggttgttctcatcccaatgtccattgctttgaactagtacaagtattgatgccattttgcctgcaattcaacaatatgcccattaaattgtatttttcatgtaggaaaacatttaaacaacaataattaaacaataaatcaacttttttttttaaaaatgaaatattttttttttcaaaccaggttttaaaattactaaaaggctcttaagataaacatttttttttttttttgtattattaacattaaaccaacaatttctatttatttgaatatatatgaaactttattttttatttgttgtttaattcatgaataatggaaacattaaagaatcatttaccaaattatgggtttttttttatgtatttttattgtttttttcatataaaaaaatatctaaattatatgttttaaccaataaatgaacaataatttttagtcatttttttaaatgcaatattatgtttttattaaaatagaatttatcataacaaacaggtagtgaagaaaataattttcattccaaattattaacaataaatcaacattttacttttaatttcaagataaatgtaactatttattttcattttttgttttattcttcaacattttgattatttaaatgatttacataaattaaacaaaaaaataacaataattattcactgttatttattttgattttttaaaatttttttgaatcaaatgtttcaatcatnaacatgcaatcatcagaagtaatgcaataccttgttattgtatgtttggatttgattgggagctccaatcaacaattttaaactcatccttatatgatctgcaacaatttaaaaacaagtttatgttttttagtataaagatttgtctgttaatagtgtgtttcattactctgttttttcatatctcttggatttaatatggagctgcgatcatcaatttgtcatctcatttgtactacgaattgcaacaatcaaacaacaattatatgttttgttatgcgaatacatctatttttaattttgtggattggttgtttaatagttgtttcaatttgaatttgaattcagtagggagctccgatcaacaatgtctcgtatatttattgaatgatctgcaacattcaaattacaattttagaagaaggagtgatgatacctaagttctttatgagattatagtatagaatcgttcatacctctctgtaagcaaatttgatcaatgagtaattgctcttgatgaattcacctctattgatgtttgttttttgcttctgtgagtctgattgttagagtaggtaagttctgtgttgatttttcattgaaatgttgttggattgttgtttcagcaagcttagtcgagcatcagtggctgctttgttttttttttttcagtcggacgagcatcaatggtgttaaagaaactaaaaccgtattttatgtaatttaaattacacttactgtatataagttgtattttggggtgtaaccgtatttttgttaagtttttcctcttttagtgtaattgtgaaaatttcccttaaaaatatgatgtatatttatgtatactctcattttttctgaaaacatatttatatataaaaatataaattaatttaaagtaatttaaaaattttaagaaaaacattatatgatagtcactattttaaattaatttattatttactttcaaagagccaagtatttatatttttgtgtccaactatctgggatctcaccttttcaatgaaaatctggtcccattttactaattttaaataattttatatatagtattgctattaagtactagtggtatttttttttttttttttt

SEQ ID NO: 31857 - DNA, 2022 bp, Cannabis sativa
atattgacagatgagtttggacaacatgtgcgtgctttgtacaaagaatcttgagaggaaaacaataatgtacataataccaatgaagagctaatgatgtttgttgaagtgccagaccaatcaggcaaagaatttggtcgaatgtcaattacttctatgtgccttggaatgatgatacacactggatgttagtggtagttgacagacatagctggacaatattgatttatgactcgaaaaaatctatggagccacttgcaacatattttccttttttacttaaaaatagttgccatattgggagcctccattatcagtgtagtcatctcatgagtataaaagtaactcctacaaatattgttcctttgaacaagagaacgtaagttttatttaatatattcgcctttaaatctaaattgttaatattaatgctaacgtagttaaatttgtctttatagtagagattatggtatattcatgcttaagacaatagaaatgcacattgatggtaagtgcaacgagtcagctacaatatttctcaacgacgacaacatagtaacattcaggaaggtagatgcagttcaattatatgtgggtagtgcagatccttaattaaccatgtccttgttcataattttaatttttgtaattttgtggataaacttgaatttgctctgaacaaccataaatgaccttgaatttacactatgcgaccatcatggtcttttatattcttcaacaaactttaaagaacttgactctactctgaacgaccataaacgaccttgaatttataccatgcaaccatcatggtcttttatgttcttcagcaaactttaaaaaaaatgaattttctctgaacgaccataaacgaccttgaatttacactatcatcatggtcttttatgttcttcgataagaacttaactttgctctaccttgaatttatacttatatatattctgtactctaattttttaaatagttaaaaattgacttataccatgtaattcaatgattgagttatttaaaatgtataattaaatagtcaccaagacttatacaatgtactttaatggtaaaattcctttacaattataaaatatactttaattataatctatagattatattaaaatggttatacatacatattttataaaataatttgatttatatattgaatctcatatatataatgttattgaatagtcacctagacttatataatatactttaacggtgaattactatacaattataaaatgtactttaattataatttatagattatatttaaatggttatacatacatattttataaaataatttgatttatatattgaatctcatatatatataatataattaaataatcacttggaattatacaattatataatatactttaattataatttataaattatactaaatggttatacacatacatactttatgaaataacatagaaaatatagttaaataatttattgtcatctatacaatgtatttaaattattatattgaaatatactatggtagcacatagtcgcacatgatcgcacatggtcatatagaccaatattaagatatactttaaaatatacaatggttgcatagaccaatattagaataaatttttaaatatactatgatcgcacatggtcacatagtctaatattaggatatactttaaaatatactatggtcgcatatagtcgcacatggtcgcatagatcaacattagaataaagttttaaatatactatggtcgcacagggtcacatagaccaatattaagatatactttaaaatatactatggtcgcatatagttgcacatggttgcatagtcacacagagtggcatagaaacatattaggataaacttgaaatatacttggtcgtacatgatcgcacaaagttacacaagatccataataagtactttaattagcataaatttcccaaatagatataaataaaagtttgcatatatcaaacacaagaaacattaaa

SEQ ID NO: 31858 - DNA, 1118 bp, Cannabis sativa
  modified_base (265)..(268): a, c, t, g, unknown or other
gaaccacctcgatgtcttctggccgaacagagtcaggccgagtggtatctaataccacagccaaaaaccctagacatccttctcgtaataatttcgtggtcgttaataccaaaattattgggatttgagatccctgaacaaatccaccaaagataaacggttcttcgccttcttgttggaagattaccatcttcctcttacaatcaatactggatgaatactttgacaggaaatcaattcccagtataatatcaaaatctgctannnncatttctattaagtcagcacttaactctctatcctcagttctgatcggcatagaattaatccaccttttggagataactaactccccgccaggcagtagggttccaaaccctgattcataactatcatacagtctatccaatttactaaaaattcttgctgccacataagaatgagtggccacagagtcaaacaacatagagaaataagaattgttgaccgagagctgaactgttaccacagaagggctgacttctgcatcagcctgcgctattgcgaacacccttgctggagtgggtttcgctgcagtcttcggtgcttcagtcttgagttggggacaacctattttgtaatgcccttgcataccatactgaaagcacccccctttacactctggtgctttttacaactggggcactctgggtaagtgtatcgggtttcagagctaccctgacgattgccttgaccttggttcccttaaagcctcttattttgacctgagccgctggatccggcaggtgcttttattttttgatcagtggtcgagccagtacctcccctactaaagcctaatgtaggaggagtaggagcccagccaacaactagagtccctcgagactctaaggtgcactctagtgcgccctcagcttgtagtgccttatccaccatatcagcataggtggtgctgtcgttagtagtgatcattaggtcatgtctgatctttgcattcaacccatccaggtacttctatttcttactgaaatcgattggcacgagtcttgagtccaaccttgccaagtgatcaaactgagtcgtgtattcagtaacactcatattctctttctgagtca

SEQ ID NO: 31859 - DNA, 4266 bp, Cannabis sativa
  modified_base (74)..(77): a, c, t, g, unknown or other
taaatgtgtaatttcagttttttcccaatttttctgttttttttttcttcataattttctgtttagatcattgnnnntcttcttttccagttgatttcgctagaattaaggattgtatttctctcgttttggtttcattctagttgtgttactgatttgaatgatcgaggtatgttcatcttcatcgttcgttccgtgcggctgaaggtttagagcatgtggtatttttgtaagaatttatgtgtgggttgtataaatgtttaatgggctggctcatagtatatttgtaattttttttcttttttatattttcctattttttttccctttaaaattattgtcatttttatttaattagagatcattaattaattatttttattctactttatttaattaaagatcattaatttttgtcaaaaaaataaaaattatcaattaattaaaaattatgtacaaaatatataactgtatatgataactaatgattcatgttatgtataaaaataaatatttaccgacgatcattgtttgatttatgtacagagcaaacctacaagaaagaatattaatggaaactataagtgaggtacggtgatgatattgattttaaatgtagtatgtattggattagactgtatcaatccaatcttgaaaaaaaaaattattgttaatttttatatatacatataaattttacgtataacaatataaaatttaattaatcatccaaactaaatgaaaatactaattagttcgattggatgtattagatttttggacacctcatccaccatctgattcgatccaattggatatttaaaaatgacatccaatcttttgtaattggattttatgcacatcgaaaataatttaattagtttgttaatattttatttttgattttatttatttatttatttttgcttagttttcaaatttgagtgtctaatcctctgtccatgtgctgatgtgcatcttcatcttttatgggggtcgtcttccttcctattcctgagtcctaaccatgattgatctctcacgatcattttcaaatattaatcatctaaacaaaagtcatactaaatcaacggttacgatcaacttttccccaaaactcagctttattaaaatattaataataaataaataaatcagaagcagaaggttgaagtgtctggcccgttttaggctccactgcatagcactgtgtctattggtatttggccttttcacgggaaagctctctccttttgcttcactcactcactccctccctcccattctcttctcagatctcattccctgtttgtttcgatttacctttcaaatgattgttttatagagagccttgactcttactccatctccaacctctctctcactgttccttcaatctcaaagagttcaaaggagccactgattcagagattacccatctgcattttttattttatctgcattttcactcaagcattgtgataaagtgaactgcccatttgcctaaatatgagttttgcgcccagaacttcaaaacccacgaaaccccctaaccagtcaagctcaactccacagcaatcttcttccatgagatcttctacttcgtcttctctctcaacccatctcgccatggttgagctcaagcaaagaattcttacttctctctctaagctttccgaccgtgacacttaccaaatcgcagttgaagacctcgagaagatcatccaaactctctcccctgagggtatcccgatgcttcttaattgtctatacgaagcctcctccgacccaaaacccgccgtcaagaaagagtccctgaggctcctcgccgttgtttgtgcctcccatggtgattccacatcagcccacttgaccaaaatcattgcccacattgtcaaaaggctcaaggactcagattcgtccgtcaaggaagcgtgtcgcgagactatcggtgcattgtcggctcagtatctgaagggtgaaaatggcaatggtgataatgggggtctggggtcagtggtagctttgtttgtgaagcctttgtttgaaacaatgggggagcagaacaaaggggtgcaagctggtgcggcaatgtgcttggctaagatggtggagtgcgcttcggacccacctgtggtgtcgtttcagaagctgtgctctaggatctgcaaaatgcttaacagtcccaactttcaggccaaagcggcacttttgcctgttgtgtcgagtttgtctcaggtttgttgttgttcaaagtgatttatggacttatagtcacgctccttgtccaagtcttgagcttgttcatatagtttggatttgatagaatagccgggtgccaaatccaaatattgaaactgttgattcatttttcatcttaacattataatacatataatggatcacgcattagaaagtttctccaattcagatatacccatccaaatttcccccttacaattaatttccttagctttatgcatatatgcccatgccttttgactttcgtattgccttagtttgacaaggcttttctgtttgataattgagaattatactctatgcacgttctataacttttacaatgagtatggatatagtaatagaacaatatattagaaatatttcatgatatgggcacgttctaaagagataactgtttcaggtaagagcaatttctccacagagcttggataatctgttacaatgtatccatgaatgcctagggagttcagattgggcaacgcgtaaagcagcagccgaggcattgattgctttaggattgcactcaagcaacttagttgcagatggcgctgtttccacactgaccatgcttgaggcttgtcgttttgacaaggtatttatttttatagggcgtgtgtgatattttgcccaattttaaattcttttcagttgcttttgcaattgataatattcagaaatctatggtttctttggagaccaaggactgacaaaaaaattctgttgctgcttatatttctgaagtgtgacaaaactagttatcagaatttaaactgctggaagaataaggtttaaaggccccctttctataggttatagatgaatgtttctatcatgttttattgggctagcaggtcatcgatactttttgacgagctggtcattttgagtattttgtaatctagactctataatcaaggtatgatcttttttaaaagcagaatggccctgcacattcctaaatgagatggctgaacacgactggtatagtatctgttggaagtgtcatttgcatgtctggctctcatgagctttagtagttcatcaaattcatttttttcctttcctgtttttagttattgtctgtttgcagatgttttgaataactgtgaatgcttaagaaaatttggaagccaaacagttttatgcaacgactaaatctcctaccatccgataaaaagctaataattctaatggttcgcttcacagataaaacctgtcagagatagcatgacagaggcattgcaattgtggaaaaagattgcagggaaaggagaagatggagctccagaggacaagaaatcttcaaattctggtaggcacattgtattttatttatttattcattatgtacttcgaaccatctgatccttgtatctaattgtattatttcttttctgcttgtattggacataaagaaaatcatcagcccactgaagcagcagaaaaagacgagaaaaatttgaagggtgagcggaaagacccattggtaaaggattcatctaatagttcatcccctaattctaaagggggtagtattccagacaaggcagttgtaatattaaagaagaaagcacctgtcttaactgacaaggatttaaacccagaattctttcataaactagaaactcgatgtggagatttgcctgttgaagtggttgttcctcgtaggtatcccaactcttcgaactcaaataacgaggaagaatcagagcaaaataatacagatgcgaagggtagacttaatcgcattggaaatgttcattctgatgattttcatggatcattcaatagtaaatatcgtaacatagaaagagttaatgatttaaatcaaagagaatcatctggtaatcatgtgggcttctctaagactgagggtcaatctgaagcttcattcataaacaataaaggaaattggttggcgatccaaaggcagttactacaactggagaggcaacaatcccatctgatgaatatgctgcaggttctctctctctctctctc

SEQ ID NO: 31860 - DNA, 1370 bp, Cannabis sativa
ccatggtgtgtgtcatggagcattaagtctccaaatccaagtgctaactttttttagcattcaaacatattatttgggtgtatgtatagcattatttaaacatgaaagctagaattaccaagttgttcattgataaatgactgtggtggacaccattttttggcatatgcttgagaacatgtgacagcatattgcccttttcataaggggcattcacataaccaaacaaagaaaacaaagtttcagatttctcatcctggccaatacccgcacagcacgctcaggttggtcctgcatttaagcaacaacattagatggatagcaatacgaaacggctgcaaaagtgagtgaaacatgcatgaacaagtgtagatatatgggtgtacacgtcgggaaatttgtggattttaaaacagttcaaagatcccaacactttacaaagttttgtacatattgatattgatactataacttcctttcgtagagaccttcacataataaaatagggttgaaccttttgagaaaaactcgaattttgctctgaaaaaaaatcataattcagatggtcttttgctctaatatagaaggagctctcagctattcatctataaaagacaaccaaaattgatcttcaaggaatctgcaattgtagattttgtattgaaaatacttaacaaatgctaaaattaaatatatattaacttgtattataatatttaaaataattaaaggtcgggttgggggtgggggtcaggtcgaagttgaattcggggtgggggtcgaagttgagttcggggctagggtccaagttcaagatccaaggttactatcatgtaatttgtatggtcataaaaaaattagattactatcatattatattttaataaaaattaaacttaatatcatttcgtaccattaaaatgaaaaataatatctgaattattatttaataaaataggaggctctatcatttttgaatatgttaaaaaaagatttagaagtaattattgatactggcatgtttactaataactaataagtaatagaaatcaatggtaaggtttgtttacttacattattaaaattagaaagagataactttattaaataagggagtccccaccaattttgtaaagaatgtcattaaagataatggattttaattatttttattttattttttaatattaaatctataatgacaactttatcctttaaaatatatcttacaaaataactaccatgtaatataatttaactcaaaaagataacttagttaattttagtattccgattacgtttcttaataaagtaaacaatataaatcaaaactattctattttcaaaaaaatttagtaaacaatatatta

SEQ ID NO: 31861 - DNA, 1595 bp, Cannabis sativa
gagtggaacaatctgctcggcgaattacaggctcctaaatcataataatcacaacactgttaagtgacacgctaactcacttccctggaacttaaattcaaaactagaagtttccctatcgataaacgacatggcaataccctaaataacacaaaaatgagaaaaactagggttcccaaattttccccgaactgatagaccggttcctcaaccggaattccggttctgggaggaaatcttggaagccaaccggaattccggttcctaaaggcctctctgaaccggaattccggttcagtgcaggaaaccataaaaattccatatctcaaccaattcaacctcaaatcacaccaaactttccagacctgctgattagaccccaaagattatttccaaagcaataaaacaaagcttcatgcacaaatacaaaaattgccattaatgagtcaagcttgagttcaaaactcaaagcttgctcatccaactaattggtaatcaaaacctgcctaaatcacttcaattaactataatataacaccagaaaacaaatccaagcacagcaacaactacagcaactaattcatcaatttaccataaaaactaagattttgagttcaaagctttacgtaaggttaaatccaactatctaccaacaaaatcagtttaaattcactcaaataaacatatataaacctctgaatgcaacaacaactaacaacagccattaaaacaacaaagacaccaagcatgcaactatttttactaacttacaaaccaagaaactcaagaacacaaagtcaagagcttacctagagctcaagcagtccaaatccttgaggaatcttgctggaaaagcagaaaaaacccccaaaccctagctgttctaagggtggtcgaaagagagagaatgcaattctcttgaattttctaagttttaatttttttgaacaaatgagcaaaaatgcataaatcttacctttatttcagctaacatatattaaataaatcaaataattacataacattaagtcaaaaagcgcagttgcccctcccacactaaaaggattaaaaggcacttaagggtatttttgggaaattctaaattcccgaccaatcccaacattcccaatgtctaaataaatcgtcccactatactaaaatattagattgcaaatctactgagccatacaccgcgttccgtgttgccgggcaccgaaaaagcaaaattatgaaattccactatattacataaaaatacattctgaattcaaataaatcaacataaataattatttaaatagcaataaataattttcataattaaaccctatttatctgctaatttccgaatttaaattaaggggtctttacaaaatagatatgagtttgtattaaggttcatatcagttataatttgagtgtaaaattgtgtgtaaagattgtattattttagttaataatcttaataaatataaatattttcagctttgtatttttttttaggtttttagttatattattttaattgaaatttagtattgtttatatttagttaatttaaattattatttatattgttatcccaaaattggcac

SEQ ID NO: 31862 - DNA, 2334 bp, Cannabis sativa
cttctctacccttgtcactattgatgccaaagacatgatagattggctatcaccataacaatcaattacaggcctaggaagcttgcttgaatccatattcattattatggttgtttggagttgagactaaaataaagtgaaacaaaaggaatctcccttttcaagaatctaatcgaatgataatataaaataaaccactcccaaataatagctcaattgttatagaataaaatatatgagagtaaaaatgggaatgaaccaatggaaaaacgataaatcaactgaatcgttttcaataggttttgatttgaaatattttaaaagcgttaaaaaataacaaaattggttaaacaagaattctgttatattatataatcataatcacattttatatagaatagatatataacccacattaaaacgcgtgaaggactaaaattatattatttagagttcgtttagtatgtcgtataagaatcgtattatactaaataacaaaggatactatacttggaataaaatgtattttattaattattacgactataaattttaatacaaggtaaatcatattatttaatatataacaaataatctgtattagtttgtatgagtctaaagtaggggtcgaggtcaggttcagagtatgagtctagggtttggcatttgaggttcgggtcaggtctagaatccaggattgggtttgggtctgagtttggggatgaggtctatagtaagggtagggggttgggatcggggtcgggtttgagtttagggtccgacatctgagatttgaggtttgcgtttggggtccaaggttgagtccgaggccagggacgagcttgggcctggtccagggtatagggctggttcctggtcgggggttggggtcgggtccaaggtctgggtatggagtttgtagtctaggaccaaagtcagagtctaggtgtggggtcgggccgcatttatggtaaatagtataattttacatagcttgttaatacaagtcaattgcaaagatactattgttttaaatcaatactacacaatacaacaacccaatacaattgtaccaaacaatcctttagtgttttagttctgtatggattgagcttgcaccttgagaaaattaccttcccctgctcatacctattttatccgaaagtcatttatatcctttcttttttatatgttctaaagcaattgcaatatgatctaataaaagttcgtatcaattttcatgtgtattcgttaggattgtacataaatttttgtaaaccgtccaaactaaataattcgcccaaaccaaatcgagataacccgacaaaaaatacaaattaaaaaacccaataaaatataagaattttttttaattatatacgtaacattataattattaacatatataccgctgctaaaattaaatcgtaccattctcgttagtgttgcccaatatatcaaacaaaatatccaatttttcctaattagtcatagcgcatcttttaattagttttgttttgtttttttttatttattatttttttttgtgtgagtgaccactaacattttttttttatttttaattttttaatattttttttctacaatcttaaaaaaaaataacaactacagtactatttttattaaaaaaaataatattattgtgacatattcatttaaacatgtgggaaccacactttatacactattaccaagatgtttgaaattataattcacactttaagttcttttataaattgttaaagaaataaacaaactatgatactaaaattattttttattgtatatttattttattaaaaaaaaaatttaattttacatttaagatttattagatgttattaaaaaataaagcactaactagttgatttatcaacttatattttaatttgattattttaatatatgagaagcatatgttttttttttaccgttattagataagttatccgaaatcaaaaataatcttttagtttattttatatttagttaataaaaattatgtaataaaaattatgtaataaaaattatgtatttttgttacctattcgggttggctaactttaaaattatagtttcattttcaagttatataatgttgttgatcaaaatacatttacgttacttttttttttattttatagcaacttttacgttactttcaaatataattaatgagctacaataaaatataaaaaaaattaccaaatagtttagcataagaaatataaatatagttttgtctttttttttttttccgtagtataatcattacatgatatttaagatatcacttggtgtttaaaaaaaaaa

SEQ ID NO: 31863 - DNA, 1099 bp, Cannabis sativa
caaactccaaatgagttgattcaagatgcgttggaaagaagaaaaagaaatctaaaactattatggtttgactttttccaaaatccgatcaaaacatagtcaaattaaggcttgaagtttcagctttatattcttgcagaattttctctattctatagattgttgttttccaaaatttgatcaattgatgtattccaagtgtgaaacctaaaaccaaagaaaacaagcgtaattctattccaaatataataataaagaaggaaaacaactataaaaagtgccccaaaacgtaggctaaaaatagcctaataggcttcatcctatcactctttgttttaagaagaaaaaaaaataaaactactcgttgtgagcttttaaaacgggatatgttgagaaatactctttttttgtacccatcaatcaaaaatactttcatattatattttattaattaataccgtgttgcctaatatactctcaccctacacttcagtctagcagataatttatattaactggtataatggagacatcatctataaaagttggtatatcttaaagaatatgaaaataaagataaaaatttaaacaaataaaataaagtagatatacagtgtaattttctcttttaaaactgatagtaaaggcccattagaaataaaaaataaataaaattgctccttgtgaactaaaaggaaaatttctatataatttataatttaaaataggggtgtttacatggtatactgtattttggcattttattatttttatacagcgataagatagaaattacaaaaataatgtacatttatactgcccatgctgccacttgtcattttgtatgtctttctctatttttttattaattaattttttaaaaaagttgttgatgtgatgctcatggtcaaatcatggcagctcacatttttttttttttaaaaaaaagtgacaaataaaaaaaattatatattatatttgttttataatcaaatgttaccccattttatttcatatatattttttatcatcttaagcttttcatctctctcccatgttcatcttcttcttcatgttcttctttatttttttttttttt

SEQ ID NO: 31864 - DNA, 1447 bp, Cannabis sativa
  modified_base (812)..(814): a, c, t, g, unknown or other
tgtactaagagtgacgtaccacgaggtaaagcaatatggaattttgagagtctgaattttttcttggaattctgtatgaaagaggttgatgatggacatcgtcctactatttatttagataaagttggatatctgaacttgattataaatatgaagaaagcaactgaaagagattacactagacaacaactgaaaaataagtgggatggattaaaaaatgaatggaagctttagaaacaactcaagggaaaagaaactgggttaggatggaataaacaaaagaatacaattgatgcaactgaagattggtaaaatagtaaattacaggtacattataatcttgttaagtattcatatgtaactaaaatattttttttgtaaatgttacatttaattaacaaaattccttttgtagagtcatccagatgctgcaaagtttcgcattcggagaattgaaccagaggtagagaaaaaattagataggattttcatgaacactgttgctacagggagtacgcttggacacattcttctggaataattccatctgagtttgaaaagccttctaacgagattgaaaacttacatacacaacttgagagtagtgatgatgatctagagacgcctaatattgatggattttctagagagaaaaataataagagatcaaccgagccacttgagaaacaaaataaaagtaaaaatagaaaaggaaaaatgaagaagacagggcctgtagtgatatttgaacaaattggtcgcctcgctgatgccgtagagacagaaatattgaaatagctagaaaggagaannntattgccgaagttatgaaaatgttaaattatttgcctggaattgagaaagggagcaacttgtatttatttgcaactcgcttgtttatcatgaaagagaagagagagatattttcttcattgaaagaaccagagttgatgcttacttggcttaagcatgagcatactctggaataattataatgcttaaatggcttatgatagtagtatttattttctaaactttgttttatgactttaatgtatatttgttatgttattttttttattactttgtatttgctctcaagacttttttctttattgaaaatttctctgaagagttagtgttatcactatttaaaataaatatgctttattattttttacttgtatttttggctatttgatatctatttcatatatattttttaatatttactggtttattttaaactaaaaataatgacagacactgatgaggagatcgagttacaatcgatgtatgtagctacataccttgttcaacattattatacaacatacattgaaaagactactagtatgaattcttctcaaacttgtaatttatttcaaaattaattatgttgctaattcaattttaattaagttaaactagtataattagcctaata

SEQ ID NO: 31865 - DNA, 6007 bp, Cannabis sativa
  modified_base (4046)..(4049): a, c, t, g, unknown or other
gccatgtcttggggaaactctcccttagtcaagtaattgacaatcaggtccatccaactaggctcttgataagctaatccaacctctaccttggccaagataattggctccgaaagatacttgatgggaactacccccagtctctctacttcattgttcaaagctaattttctagaaaattcgtgtgtgcatttttctcccttgggatctactcaattttttagttcttgaattcctagagccattcccttgcggccgagatgtaagagaccatcttctctctgtgagtcagatattctcccaatacttggttaaaaaccaactgggagtcactgataatttctatcttgtcggctcccacaaccctggataatctcaattctactagcaaggtctcatactctgcctcattattggaggctgggaatttaaaccatagggcattttgaagccttaaaccttcgggagatgtcttcactactcttgctcccaatccacttttgtttgaggccccatttacatacactttccaagtgggtgcaattacttcaagagtattggcagtttcctcagttttattgcactccataatgaagtatgctagggcctctcccatgattgagatatgcaggatgtattgaatgtcaaatttaccgagctccatggaaaatttaagcaatcttcttgaggcttctagcttctataaaacttgtcaaagcagatgattagtaaaggctttgattgaatgtgcttggaagtagggtcgcaccttctaaatgctattagcagatagaaggccagtttctctatcaaagggtactcaacttctgcttttatcatcgtcttgccgaagtagtaaacggggtgttgggtcttttcttcctcatagaccagggcctcgctaactgaattctcaaaaaatagccaaataaaggtagaggtcgtttccttgcactggtttggacaaaatcgaaggcttagccatatgctctctcagttttttgaatggttccttgcattcattggtccactcaaatctctaatattttttgatatattaaagaatgagatgcatttgtcagtagatttaaagatgaaacggcacaaggcagccatctttctagtcaagatttgcacatcttatgtttgttaggggagggaagatctagcaaagcttgtattttctcggggttagcctctatcccttgctggctgactatgaacaccagaattattcatcaccttacttcaaaagtgcattttttgggattgagcttcatcctgtactttcttacaacttcaaaacactctttgaggttgtcaaaatggttcttactggttttaaacttgaccatcatgtcgtctacatagacctccatgtttcttcccaactaatttttgaacatccagctgaccaacagttagtaagttgttcctacattctttagcccaaagggcatgaccaagtagcaatacacccatttatttgtccaaaagctagtacattcttggtcagcaatgtgcatcttaatttggttgtaactagattcagcgtccatgaaggataaaaacacataactggacctagcatttaccattttgtcaattcagggtagaaggaagcaatctttgggataagccttgttcaaatccatgaagtcaatgcatactcaccacatcacattgggtttttgtactagaacaaggttagccaaccactctgggtaatagacgtcacgtatgtagatgtttgacatcatcgggtccacctcttattttagtgcctctaatttgacgaggtcaaggggatgcctttttttatgcatagctggcatattcttgtcaacatttagaacatgactaatcacatttggactgatgccaatcatgaccccatgattccatgcaaagatatctactgattctttaatggtgtctcctatctcgctcctttttttgggatcaatccccaacacgaattacttttgtcaggtactgttcacaaatttaaatttcttccacttcctccgtgggtttcagcattgtcttggctcctatttggggatctagctcaacctgcacccctactaggtttctctcttcggtttgttgaacaattaagagagcctgcttggtggtcaaattataacactttctggcctctccttggtttcctcgaatgatacccactcctgtagcatgggtagggaacttgaggcacaagttcctaatcaaagttatggctcaaaaatcaaccaaagttagacatcccattatagagttataagctgttgggaaatccaccataacaaaggtaaaatatttgaatgtgctctgaggtgtgtcagggaaaaaattcatagggagtcgtatttttccaataggaatgatgaaattttcattgaacctcgtgagctaggaaccactcagagataggtctaggtctgttaggccaatggaaagaaaagcttctttgaacagaatgttaacaaaacaccgttgtccaccaggatttgagaaactaccttgttggcaatgaaagtttcaatcaatagtgggttatggtgttgaaaatgtaccgtccaggtatcttctttagtgaatgttataagctgatccatgagacgaggtctttactttggtaactagcctacttccaatacctattcattatgatacaaggctctgacatagtgttttaactcattgtgggttgaagctactgtacagggtcttccggagatcatagccactctcttgttctgtctgggtggttgtgaaggtggtaccctttaatttggtgggagttctcttagaagagttggcacatctgttgcgtgagctccaggaggtgcttgagcttcgaattgcccctctctcatatgtagcaaacgatttctcatccactcatacaagtggcccaaccatatcaggctctcaattttatcttttaaatctttgcattcattggttgtatgctcaatatctttatgataatcgcatcttttgttgggatctctcagtgaactacctcctaataaaggaggtggcctccaatagtgactgttctgtcttgtagccaagtctacacgttcctgtgagtccaccaaatcagtatactcagtattctggggctatattcggatactctcttttgattcttgttctcactttgggtgattcctttaaatgagcttttgctctgggaggcttggggatttgtagtcgtacttgctgcaagtgaagcagatgagcaaggtattgttccaaggcttgaatcaataagattattgttatctattacttgtttaattggttttaggttgtacaaatggatgtcaaatttacatttctcaattggatctttaatgaagaggtatatgttgtgttatctcaaaattcccactgatgacgtataacaccagtttgtactgatcgagccaactaatattgagaccttcgaagactactacaaattatacttgtggtgtcagttttaagctaacacttaagtcaattaattatttacttctatctgataaataagaattgttggatagaaagtaaataaaataagataatgatttataattttaaagaagtaataataataaagacaaagattactatgatccccaactatcttttattttactttctaatgcaattacctaatttctcttctttctattcaaatgacaagttgaattaagtagtttataatctggttaagacttacaaactcaatctatatgaaaacttcctatattcctatggtgaagtttaatcatacaaaaagcattaagcgaagcaactcataaaattataaaaataatctagatactttcgttctaaatcaattttcatccataacaattgtagcagattcaaatctcacctctcggaattttcattcaaattcattgaacaattattgatggccagtaaataattgcaagttttaaaaaaaattgtatagaattgaattaaaagaagaaaaaaaattgaacaattacattaatccataaaataaattcaagtggttnnnntaataatccttaaaagaaaattagctactagaagtcattctaaaattatataaattcaattaaaaacataaaagatagagataaaggagatagaacattgtttggagtcctccaatggtgtcttttgctcctacccttccttctatgctcagaattttttaaatttgcgaatttccctcaaagcttgccatcaaacctatttttgtaatgcaaaaatcaggtttcctcttttccttcaaggtcctggccttgcttaaaaagtcgcggccttccaagaaagtttccattttcacaccttaatttgttgattctggtagtttctcattttagttttcttcaagagccttttcgggtatacaccatggttgaagcgtgatgagaattactaaactttcttagctttcaataaaagtacccaaatgtttactgagatcttcggaaactgattaagtagagcttaagaaattaaaagatattaaacaatacaaaaaaataaattttttaaatgattcgggcgtcaatgatcctagtccatgagttcatagtattagcatcactgggcaagtaagtattacaagtgtttacaataatgaactctgtattcctcttatttccttttttttaggagaaagctctctaggaattttagcagagtatctgtaaaaataaaaattattcacccctgttcatcaaaaataaagagtatttataggcacacacgggataaagggcataccctttatcgacctagggttttgtactctacacgctgataaggccgatattatcataggacaatctgaccattggttgataataacattcttcatcgtgtggcgtacaactatattaagggattttgtacaaaccaggacacgtgtcgtgcaaagttctctcctttgcgaaatactctttaactaggccgttgggcaaaaatcatgtccagaggtgcgtacgcgcactaccatggcctggcatggggcacacgatctaattttgcatttgaaaaaggtgtaaccatctatagagtaatttttatatgatgctgacgtggtcattgcctgtgagactgttattaccctttgggtccatcacttaaaggatttacctcaactactctccaggttcgggagatattacttgtccgcaaatggcttattccatcaggtttctagtgcacacttctaggattgctgagatatcccctccatgataccttaggagtgatttttgactaatcctttcagctaattcactttgtctcttaatcgtgtgccacgtgtcttacgcataagaatacagataacaccctttgattagctagggttaggatagaaattaaaaaaataccgcaacgtgccttagttagtggggtgttgcacttttgattgtggtgaaacatcgacagtgttagctgagatatcaaggaacaccatcaggtgtttgggagagagagaaaaaactttctttcaagcctttgtgttggtggtcctcccttctggtatcatcggtgccaagataggtggtggtgttgcttaagcagatgaaggaggcgaaaatgaattctgagcagcgagctgttggatttgagcgacagggctaagagctttttaggctagctcatttagttctctcatccatcagtccaatggactgggcttatttcatggagggaatggcggcccttttaattttcaccaagcttcttctctaaaaaattcaaaacctcaaggaagaatttaagggaaatagtgaagaagaagaagaatagtgaagtcctgtaagagggagaagttgaataatccttttagggctcatttggtacgctgcattgtattggattgtattgtattatgttgaattgtattgtataatattagtattatttaatacaatactatatttggtattggcttttttttataaattatgtaaaattataatatatttttaataaa

SEQ ID NO: 31866 - DNA, 1167 bp, Cannabis sativa
acatgaatcacttctaatttcttagattgataactaatcagattgtaatggattttatttagggaacaaaacccaacaacatacacattcaaaatgttacatggtgtaatcataatataatattattatatacacaactataaatataatatcaactatttttattttaaaaaaaatcacaccatcaataaattgtctatcttttgtatcccgatcttttggcttgatgccttttaatgaaatttctcagtttaaaaaaataaatagaataaatctcacttatgaacttgaataaaatttaatgtgtaatataaaattatatatatcaatataaattataaaacacaattaactatttgattcaatatgtacaatattaataacttttcatttctttaaacattctcaacatttgcaaataaagaaatagttaattttaagatggacagttggcttcataaatagttttaataatatttcataatttatgaacaaaattattgttgagaagttttataaaacacaaatgtttgtatctttggtataataaattataatttaattggttgattgattacattaaattaaaataatgtgaaaaagtagaaaaaaactataaagtaaaaaaatagaaaattagatatagctataaaaaaaattagatatagagaatgtcacaccaccttttaatattttacagttacataaatataatataaatagatataaattatatgatttaaattactaaaaataaaagccactttaaatcttttcaaacaaaaagaagatcactataaatatgtaatgattattaaatgtgtgatcaataaaaaaataatagttataatattattattatataattaatatatatttatatataaatatatatgaaagcattagagatattttgtggcaattgttgaggcggagttttccttttataataaaaataaaaataataataatgttaactatatatcaatatatatatatatattccatatgcatagagtaaggaaaataataagagcatcctaattgagtttatgatgagagttatgtttttaaagtgaatgacctctaatcaagtcaaatacgtatgaagtaaaaaaaaaataataaactaaaataaaaacttattaataatattattagaaacaa

SEQ ID NO: 31867 - DNA, 1460 bp, Cannabis sativa
ctctttaaacaagaataatacaagcaaataactggaagaggaaaggaagaacactcaatgctatgccgaatttgactcaaatgtctataactgaatttggatacaagtaggccagaatactttgaatatgttttatatatgtagtgcattcaaaactagctgtaagaatgcacaataaagtcacttttaaaagttttttcattttttattatttccttatttttgatattttatcttcaacttgacaattaagttctacattttcaacatgtctattaagttctaaatgatatactgaacgagtttacacagggtcatcaataaacagtattggtatacctaaacattgagtatattttgtggcgtattcattagtttttttttttggagagaaaagaggctgttagactaaaagattcgaagagtaacaacaagcttcatcaccaatccaacaagtaccttcttcagtcccaagcgcattcttagccaggttatgggcaacagtgtttgctatccttcgaatgtggttgagatgaacatttgaaaagagtgatagaaatgacctcagctgggaaatgagatgatctccaactactgacttgatgttcgtggtgtttgccattgcatctactaaagatttgcaatccgtctcaatgaagtgaattgagaatgcttctttgtggaaccattagagggaaacgataagagattttgcttcttgaatgtgggcttcccccacttctgaaaaaggggtagcaatggctgcaattgtgacagccttgctatttggaagaattcccgtaaaacctgatttgttggaacgcctgtcaattgtagcatctgttgtgtgtttggcaagaccatgtggaggaggggtccaaatcttagaagggcctgattgatccttggccaatgagctattgatggagtcgtttagccttacttggcggtaattgtccataaaagaactagcctcctcaagaagattgtgatggcacaccatagaaccattatgagtgaacttattcctatcaggccaaataagccaacacatagaaacaaacaattccaattctggtttagttaaaatattagagagatgcattacaataaagtcaaaatattcgatatgtttagaaattttgagatgtgagtagaatatcgtacctttccaaagctggctaacactagtacaaaataataaggcatgaaaaatattttctagcccattgttgcatttggaacaaatcagggaatccattactttccttttatagatatttgaaaaagtagggagtgtacttttggtggccctataggcgaactgttttagtttggagggtaaggaaaaggaccataaagtggactgccaatccgagcgttggtgtaaagcccgcttagtaaatttggaaattagcagttaatcatgattatttatgaaaaattatttatagctattt

SEQ ID NO: 31868 - DNA, 1190 bp, Cannabis sativa
aatttttatttcattctcattttcgaaaatggaataacattgtgaaatactccaaaacatgtttatcattctctgtatataaataaattattatcttggctaaaagacaaaagaatcaaataagagcaaaatgaccaaataaaaacattaaaagtagccaaaaaatcatgaataataattatatgttatatcacccttcatataaatgtagtattgtatactatatatataaataaatcgtatatataaaaagatttgctaaagtatatatatataacaatcatataacactaaagtaattttatagtatttgtactggttctttttatgattgcgtatgagttgtatttttgtaaaaaaaaaaaatcaatgttatatataaatgaaatatttatcaaagaaccgtaagaataaataaaaaaactttgtatatatgaactaataaaaaagcccaaaaaaatatttagttccatatataatttttttagagagagaaaatatagagttaatattaattaatataccaaatatatcaaaaccctaaatttgattattcttaatttcttattagtctcttttccttcacatatgctaaaacacttgaaaatacgcaattaattaatttatagcagaatatgatttttttatgtataaaagtgattacttaccgactattgtttaagttcttttagtaataggaatgatattaataatgactacaagtgatatacattgatgtcatcaactttagatgtagtgatgattgcaattatagatacgatgataacactttaattgtttgattctttttattaatattattttacatttatattttgagtgagtattatttattctttttttaatgtatatttgaagatatattttatgtgctttattttttatatgaaaaattgtacaaatttttttaaaaaaattcttctgagttttctatataaatttatttatttattttaaataaatatatactttttaaaattatacaattttattgttcaattaatatttatacacatataagtaaatctagatctcggtgaaatttggatagatcatcgttcttttctctcgttttaggtcttgcagctcctgttgaagccatggcgaaaacaatgtccaaaacgatgggaaaaaccaaaccagctaccaagaaactaaagaagaaaggt

SEQ ID NO: 31869 - DNA, 1857 bp, Cannabis sativa
  modified_base (49)..(50): a, c, t, g, unknown or other
gattccgatgatggtgatgagttgggtaaagatggtggtgatgctgctnnagttgataaggttgtttgtgatgttcctgctgatgatgcgattttttcttactgatgaggcttagaaattattatagaatgtgtatgcaggtgttctggaagctatggttgaatttggggaagttttgaccgaattctggaatttttgggatttttaatgcaaacaggtctactgattttacaggacctataaaaccagttaattcacaagcaagactcccaaaaattccatttttccagtttgtgtaattttcagagcgtgtagttgggtgtttccccttgtatttagggcaatagtatgctgcgtgtctttaaggttacccttggttgtaagtttagggttttgggaaaggtttactcaagttattaacccaaatatataatgtgacataggatctccgtttagctcgggaattttccattcaagtcgatcggcacgcttgaatcttgaagcgaggtaagattaacataaattatgtatatgtatgtgtgtatgcaagtgaatgcatactattatattgttttacactaccaaccataggataattataatattgagggtgttggtacactatataacgtttagggttatgttacgatgttaccaacacgagtacaagtgagtacggagtgcatgtgatacaacacccagtagctcccggaagtacaatatggccctaccaacactagtacagagttggtacttcagtgcatgtggtacagaggtcgtacttccattaagaacgttcttaatcatttggtgagcagacctcatcgtgtaggccttaggcagccagacctcccctgtaggtctatgggcggtcaggattaacctggcaggactataagtattggcccaaacatggacaacaagctacttgcgaattgggccattaatgccccaacaaactaatggaacatatctactttagaggggcagtttacttgaagaggccattgcttcctcaaatgggtctgaaggactgagcagactcatttgaggtctaaataaaggagggctaaagatgtgtcgtacccaagtgatcttacacgcatgaaaaacatcatgcatgcgagagttatgttgaatttttatgaggcaagcttcggcttccgcaaggaaaggcttacgtttcataaaaattcaagcgatgacttcatttgaaaagacctaaggttgaaaacattactaggagtgagacagacctcaagtagtccttccattctgggaaggagggttgaagaaatgtcgtacccccaatgatctttaacgcacaaaaaacatcgtccatgcgagagtcatgttgaattttgatgaggcaagctacggcttccgcgagggaaggatgaagttgcttaaaaattcaagagatgactttgcttaaaaagatcaaagggtgaaaacatcactaggagtgagacaaacatcaagagtccttccatatcgggaaggaatgttcaagatgtgtcgtaaccccagtgatctttcacgcacaaaaaacatcgtgcatgcgagagtcataattttatgaggcaagcttgagcttccacaagagaaggctgaagttgcataaaaattcaagagatgattttgcttgaaacgatcaaagggtgaaaacatcacaaggagtgatacagacttctagcagtctttccattctggaaaggagggtgaagacgtgtcgtatgcctagtgatctttcatgcacaaaaacatcgtgcacacgagagtcatgtggaatttttataaagcaagctctgactttcgtgagggaaggctaaagttgcataaaaattcaagcgatga

SEQ ID NO: 31870 - DNA, 1212 bp, Cannabis sativa
taaaaatatggagtgtcactatagagtaaaacccaaaattatttaatttttattactttaaaaaatattactctatagtgacatgccaaacgtgactaggtaaatattttccaacgcacttgacgtgtcactatatcataattttactttttttttaataaaaaatataaatattattaatatgtaaagaaaaaaaataagtaataaataataaaaggaactatttaatgaaaatacagtatctttctttaaaaaaaaaagaaacaaaataaaaaaaaatgaaaaaggcagtatatgtactgcttctctctctctctctctctctttaataaaaaataaaaccctaatatctatctcattctttctgtcattctcccctctctcattcacgcctccctctctctttctttctgtcaatcaaagcctctttctttctctcaattggagctattgctttttttctccgccgacctcagccaatcttcgacgaagtgcaacataaaccccattttctctctacctcagcttctctgcctaccacgacagaagttcaacctccagatctgagataacgactcaacctctgcctcgacttctctctacctcgacttctcttcgcctcccccagtcgtgggtgctgttatatggctttttatttttcccttttctttatttgtgtttctcagtctctctctcttatgcaggtggctgtgttcgaaggcttgaagctcgagtagatctcgcctgtctgtgttcgaaagcttggtggctgacgggatgctgggttggtgatttaagtgggatggggcttggtgttcgacgggcataggaaatttgaagcatttatctgaatttttttgataagtttgaaacattgtccagtaatttagtatgtgattaaattgaatgttttagttcaatttttcttaatgtattttttgggttttgtaaatgctttttactgctaaatttttcattgtatattaaatttttttaaaaaagaaataaatgtataaaattaacattcttgttatattattgttcttgtcatcatcaaaaataaatattattttgcaagctaaatttaatatttataactaataatagtatatttgtaattaaattgataattattctcaatttaaatttttaatacagatttgtattaaattaaattaaatattatttcttttagaaaaatatttaatatag

SEQ ID NO: 31871 - DNA, 4810 bp, Cannabis sativa
aaaacacaagtaaatagaaaggaagactactaaatcataaacacattaaaaaacaaagaaactaaaatataccatacattaagaaactgtacagtaaaagtaacatttgaataacaatacaaaataccaaaaaaataaactactcagtaaattatagaactcggtaaacaaaaaaactactaaaaaaaccaagaaactatactaacatataaaatattcacttaaaaggctacacatagatctctaaacaacacacaaacaaaatgtgaacaacttagtatactaaacaactctgtatacaaaaaaaacaactaccatataaatgtgcatccacattaacaagaatcaaaatcagaatatagaaacaatatactaaccttcaatttttttggcaacacaataggtgcttcatcacattctgaatcaaaatcatcctcatcttcaacaacactcttcaatttcttagagcgccgatcgtcagaggtagcttcagaaacaccactcctcttcgaaatggagagattcttgttcttcttctccttatcagactcaacgaccttcgaaccagaaccaaccatgtttttcgaaacctcctctgctttttcaaccttcttcttcgaaccagacacctccggtgatggagacattgaacccctagtacgcaccattgaatgttttaactatgaaacgaaatgccaaaccctagcagagagaaacccttacactatgataaaatgagggaaaataagagaatggaagatgaaatgaaaagagaaatggaagtgattgagtgagaaatggtttgacagtgcaaaagaacgtggaatcgtgtttaacactcaaccaccctcaaaaacagtaaccgtgtacacgtgtaaaaaaaagttaaaaaaaaatcgttactttttaccaaatataaatatattcggtatatacagtatttaattgcaaaaagtgtctcccagcataattttctctaaaaatatggttttggaatcggattcatacctagtgctgctgtgtgcatgatcacctaaaccatcatatcatcaagtagggtaggtcggatgtacaaagcatcaaaatagcatatattgaaaactgaaggacctaatccaattttatcattttcattcttttctttttcaataggctatcaataccattaatattattgtacgtagtttgatactaaagttttggaatccaactttcgttggattttcttaatctttgtaatggttacaagaccaaaaataattttagtttcttatattagggttcttctagtagtacactggtgtaaactgaggaggctgaaaataaattttggggaaagaatttatttagggccaagttaatatatactaaaaaaataaaagaactgggagggctgcaacccttatgtttatatgtggcttcatgaaatttgaacacttttctatccaatatgatatctagcttaaccattacactaaaattaatattatgtaatataattttttattacaaatatatatcgtaacaaattaaaatgtatatagatttttttctcatttttttcttcaaaagaacgactaccttaccttatttcaatgtgggtctgcccctgctcatggacctaaatggctgaccccatcaaatttgaaaagaataaagaaatttaattttctatgtttaatgtgtattacgatgatttaaaaaaatctcacataatactctttgttgtgttatttgataatataatatgtataaattaaaatgtgataaatatattattacgagaataatatatatcaagtgtatggtaaacaaattatgtaatatatgatttatttaacctacacattgtaacttagagaggagttacaatatattatcacttgtaactcttctttggttgatcacaatttaagtgtaataaaaaaagttattacacaaatgagatgttggaatttaaatttatctttatatggatgttaggattggattaatattcatttatatgagagaaatgagttggaaaaagtttggttttagtttggtcaaaatgggagttacaaaactcaaaacaaggtgttgttgaaattacaccaggtgacatatcgcctagattcaagcatcattaatagttttattgtgtataattagtgattagttaaggtattattgtctgtattgtcaataccgttagttggtttattattggcctttagcttttgttgattcaattagtttagttagagttagtttgtctaactctagtcgtgttctttcttgattcttgattagtttgctaactctgtttagcccaaatctgttagtatatatattgatcttgtatcatttttggtcaatgggttaatttcattttctataatgaaaccttgttcttctcttgattcattttgcaatatggtatcagagtgggaagctttccctcaagatcatgctcttcttttcctttcttgttgtgtctttttctctgacaaaggcggtgttctctatcgttcttctccttttcctggtttttttggtttcctcgaagtcttcttctctagctcagttcaacactgtcaaatgatgatcagtatgtccattctaaagttcaatccacaaatccacaagttccttccgctcaagacaaccagaatcttcaagcaatcaatccaatagatccttttgaagatccagctaatccatattaccttcatcttggtgtcttggagtagagcaatgcagctttcaatctcagtcaagaataagcttaggttcctcgacaattctatccctaaaccttcacctactgattatattctatacaaggcttgggttaaaaataacaatattgtcatttcttggattctgaattctatttctaaagaaattttttctagtattctttatgatgacagtgctgcagaaatttggaccgatcttaaggtgagatttcaccaaagaaatggccctcacatatacaatctgagaaaatatttgatgaatctaaagcaggaagctcaaaccgtgagaatgtatttcactaaactgaaaatggttttggaagaattgtccaattatagaccttcatcacttcatgtacctacaatggatgttcttgtggtggaatcaactccaagaacatcatcacatgaagtatataatttcttttctcatgggactctcaaaccattacactcaggttcgaagcaacattttgatgggtcctctaccttaaatcaatagattttttcaccttgtgtcttaagataaacatcataaggaagcattgctagaggaactaattcgaacaaattacattctggacagattttatattgaccactgtgttccttattaaccgaaatcctaccccaaatttagcaaacaataccctatgaaattttatttggaactactcctgattacacacatttaagaaactttagttgccttgcttttgcctccactctcactgtacatagaacaaagttttctcctcgagcaaacacatgtgtcttcataggatatccacaaggcataaaaggatacaaaatctatgatctcaataccaaacagttccttatttctagaaatgttgttttccatgaacataaatatcctttccataaactaaatattaacaacactggtattgatccttttgctaacatggtgttcccctcatctcatgtctctctcacacacgtaattgattttaactcacatataccatgcactatcaatgttgacaataccatgcaggtccatatttccaatgatattttagtagattacatatcagaatccacttctccacctaattgagaagcctctattgctagacctatagagcaaactgatgctcctattacaacaaatgatgctacaacaaataatgatgatgatacaataaataatgatgattcgcaagtcacattaagaagaattggaagaattcataaaccaccaagttatcttcaagattattaatgccattccactattcacgatcaatcttctacaccttatctccttcataaattcatgtcctatactaatttatctatagctcacaaagcttttatttgtgcagtccaagctcattataaaccataacattacaatcaagttgtacaacataaagtgtggaaccaagcaatggaaacagaattatatgctcttcttaacaataaaacatggaccattgttaactccctcccaacaaacatgccattgggtttataaaatctaactcaatagtgatggtttagttgaaagatacaaggcatggcttgtagctccaggatatacacaacaagaaggattcaatttttttggaactttcttccccgtggccaaaatggtcaccttcaagatgttgcttgccatctctgtcattaaacaatgacacacacttcaacttgatattaataacgctttcctcaatggagatctccatgaggaagtatatatgtctctcccacaaggactcactcttccttcatctttgtctgcagaaacaggtctagtgtgtaaactctacaaattaatctatggcctcaagcaattatctagaaaatggtacatgaagcttactgaatcactcattcccaagcaaactataccctgtacaccaaaggctccgatagtaccttcattttcctcattgtttatgttgacgatattattatcactagaccaaacatctctcttttacagcagttagaggactccaagcatgcacaatttaaactaggaatgtcagtcggtgttggaaattattttaccaggatcttagatcttctcacaa

SEQ ID NO: 31872 - DNA, 2168 bp, Cannabis sativa
tagcttttcgttgtgattaaaagtcatttagtcagaaaaaattatgctgtgactaaaaggttattactaaaagtaatatttttttgtagtggtcactctgtcactctctcatcgacaactaagtccaagtttgtgttttttttctctcttttttgttgtttatcttgatttgttttaaaccttgaatgaagataaatcttatttgcaatatggattggttcaatgtattacttggttttatgatttacctatatattttgggagttctgtaagattttgtcatagaaaaatttaaacagaaatatagtaaagatacttttttattgatttgttgttgtcttccttctttttttgggctcatttttacaaatttcatttacattactccattttatgcattattttactttgtaagacgaagaaaccagatcgaaaaggaagaagaacgttttcattttcacctagacaaaaatatcactacaagaaaagatagtagtaggggcaacgaaagtcacccctaaaaacctttataatcatccctaaaatgtattagggatgacaagttgcctctagcatgtcgctcctaatgtttcatcccttatgctcatttttagaggtgaccaaataaattgcccctaaaagtgatgattaggggaaactttttttcgcccctcaaagtgttaaaaaatcactcatattttatgcaaattaggaacaaaaaaattgtccataaaagtgtaatgtcacccttattcatatgcaagcatgataatatagcattagtcgaccctacattatttaacatcaataattaaatttaatatattttttccttggcattaaaatcgcaaatactccatttgtaaacagttttgaatttcaattacaaacaaaaagttgtatatcaaataaattactgttattcatttttaaactttctagtatggataccatatgtataaaatagtgtacatatatagtatggtaatctaacaaaaagagataataatgacctacattattcttctatctttgagtacaatggctggcttcgccaacaacttctgatctaaaagcataggaaatttagggggaaaaagtaacttcctattagcaactacattaaaaccagtaaatataagcacactcatcgggtcagataccatagtcaatgaaatttgaaaaaaaaaaagcatttatttagacaatagattgaagacacctataagctaaagtttcagcttaagatgataaaattatgcaactaagtgtcacaatttcaagtgaaacaaaaaatatctagatacaaagatgatggaagcttaccgtagctatgtaataataataagtacataataaaaactacctggttacttctgcgtcatcatcctccctatcctccctctcatcgtgctgacttttttgtttttgtagtggcatcgatgcataggccatgaatacgatgtcatttgctgcaaaaaaaaagatgaagatctaggcatgtctttgtgtcaaggataggcataaggcgacataggctaatgcgactgaggttgttgaggttgctgcagttgagggccatacatgtaaggatagtgatatggcggtggagggtgttgtgatggggctcatacatgtaaggaagatagggtgtaggagtagattattgtgatggtagtggtcgtgaaattcgccactggcatagaaaagttgagtgcatgttggagttgcttcctgaaggttgaaaagaggaactagaaccatctctagacatttgaggatcatgcctcctagttgagtgcttctgaattaagtcatctatctcattgtttggtggcaaaagcttcttttgacttatatgctggaccaatttaactattactcgctccaatcattgtatttcctctgaaaaatcttgagtaggcatcgtctgtgtttggtagtattgattatgactagttggttaattgactcttcacttagcgtcccactcctcgattgtaactggtcctatccccaagcacttgttaaagtatttgcatctgatcaactgaggaagaagtatgagaactagagtcattactttgctattcaaattatgtttcatatacttctttcaatcgttcctatattgaaagaacaagacacataccacaaatgtcatctat

SEQ ID NO: 31873 - DNA, 1456 bp, Cannabis sativa
caatctcattacaagttccaatcgagagaagatagacactcatagcatatgtgggcaaagattgtatgactgttttgagtaaaatttccttcccaacacgagacaggaacttaccatcccagctgttgattcgagaaatgactttatttttaagaaagccaagcacagcattcttgttgcgacctataatattcggaaggcctagataaagactgccttcaagagcttcagacatgtggagtgaggaacaaacctgattacgaatggtagtatcagtattgggactgaagaagatcgaagactttgagtaattgactttcaggccagatgcattttcaaagagatgcatgagattggaaatgctatcagcagcacctcgtgtggcttgacaaaacaagtagctgtcgtccgcaaagaacatatgtgttatagaaggtgcacgttgagcaacacgacatccttgaataagtctattggcttcaaatttctagataaaagctaagaggccttcgacacatataatgaagagataagtagaaagtggatctccttgatgtatgcctctggatggggaaatagaatcaagcacatgcccattatgaacaactttgtagcgaaccgtagagacacagcccataatgaggtcaatccatttgctagcaaagcccatacgattcataaccgctctaagaaagctccattcaacccgatcgtaggctttgctcatgtcgagtttaagagccatgaagccttttttacctcttcttttccgtttcaagtagtacatgacttcaaaagctaccataacattgtctgagataagacggccaagaataaaagtactttaggtttcagagataacacagccaatcagatccctcatgcggttcgccaaaactttcgagatgatcttatagagaacattacacgatgatattggcctaagatcacccataacagcaaagtttttcttctttgggatcaatacaagattggtgtcattaagtccatcaggcataacttaataaacccttttgtcaatgtaaaaacttaatgacattaatcttgtattgactacgtgaaaatatttaccttagaaaggaaaaatatagaaaaaatccttaattggcctaagatcaccttaattgcctattataggaaaattcttatgtttatgtcatgaaacaagttgaagttgcttatatgggaaattaatttcaacgggattaatctaagtagagataataattttttaaatgagaaagttttgtttatgtatttatttatttagtaataagcaacaaaaaatactttttgagcactaattattaaaaaaataaataaagaattcatacttagggcaactttactgatattttcacgtagtctttttttatatttttgataaaatatttattatcctattattaagagagactcaccccttaaaactggc

SEQ ID NO: 31874 - DNA, 4476 bp, Cannabis sativa
  modified_base (1817)..(1818): a, c, t, g, unknown or other
ttgatgtgttttctatagtgtgcattattatgcataaagtgaagaaattatgataaattagaagtaagctctacatatgtgagcaaagtgccgaaatcaaggagcaaccaagtcgagaaacaagctgaatcaggaaaaattggtgccatgcgtgcagggggtaggcgctatagcgcatgtctagagaaaaatattgcaaggaaaaaaaataatttcagcacgtaattatttcaggattttttctctcaggcgctatagcgcatggtgtaggcgttatagcacaacacctacctttttttaaaaaaaaataaatcctaattctaagtagatttatctatctttactggcctatataaacaaagatgtatatcgaattgaaggacgacagagagagaaacaagcaactttgaaattaaaaaacacattgaagagcaaaagagaagagatttgaagcaatcatcatcaactttcatcattagagttcttttcttcttcttcttctttattcttttgtttagttatttaattatgaacatgattattgtggttattatgtttgtgattatgaactaaacactcattctagattgttggtggaactattttagattatgaatttaagtttttaaattattctcatatttattcttgttatttgtttatacaattttatgctaattatcatcttcttaatgattgatcaccattaattagtatagagattttaggttttacacttgagagaggtatctaaaatcaagcttagaattgcatgacataggaaaagtgtgagattgagagatttcactaattctatgagtttcatttaaagagaatcatattgctttatgagtgcttaattgattaacattacaagagatatcttgttagttaatttaagttaaatctatcatcactcgagagaggttaatagattacattagaattcttgaaagttgaaactacaaattataggataaattggaataatcggtaaattgagattcatagtttgaaatagggaaatcaatgctctaggtttttactttctaattaaaaatcgttgtttgtctgtttattttattatttgattcttaattataatttactttgtgttatctaatataagtataaaattaaaaagtataataattagtaaaatttaataatcaatccctatggttcgacaacctttttagtattaaaactttgatataacaacgttgtactcttgtagtaaaaatttgtgtatcaagtttttggcatcgttgtcaaggaagaaaaagtcttaaattattgctaatattattactaaaagtttttgctttaaattagattttattttgatccttattttgtttgttgctttatagttcagtttatgcgaagaaatcaaagtgccacaccactcacaccactgaatcctgagattgaaagaactttaaaacagttgaaagcaaaaaaaaaaattagatttcaccatgtttcaccatttagccattaacaataataacaacaatggccttaataacaatcaaccaacacatgctgcagctgatgtacaactacgggttgttcgtgattattgcttatctgtggtgaatgaaaatctgactggtattgctaatccaatcattgctgctaataattttgaattgaagcctactttaatcaatatggtgcaacataatcagtttggtgggttggctactgaagatcctactatccatctagtcatattttctggaggtatgtgctactatgaagatgaatggtgttactgatgacgccataagactacgactctttcctttctnnttaagggatagagcaagaagttggttgcaatctctacagttaggttctataactacatgggatgaaattgctagaaagttcatggtgaaattcttccctccgtcgaagtctgcatagttgaggagtgagattgtgcaattcagacagtttgattcatagcaactttatgaagcgtgggagcgattcaaagatttattacatcgctgcccacaacatggctatgagagctagatgaaagtttcaattttctataatggcttgaatggtccaactaggactattattgatgctgctgtcggaggagcgttattgtctaaacatatagctgaagctattaatttactggaggagatggccactaatagctataactggcctaatgaaagaaatactccaagaaaggtggctgggttacatgaagtggatcctatgacaaatttagcagcttaaatttctgctttatctaatcaagtagctaccttagctgaccagaagaatacattaactataaaaaatgttgttacaactacatcacaagtgtttgagatgagtatagaacaagcacgttatatggccaataaaccttataataacaactatctggaaaatccaacgcctaactattaccatctgggttgagaaaccatgagaatttttcttatggtaacactaaaaatgtgttgcaaccacctcctgggtttatgcacaacaacaggaagagaagaagtccttagaagacattctaggtactttcatgatagagaccaacaagagatttagcaggaatgaaacaaggttggataacatggagactcacttgtttaataatactgcttccatgaagaacataaaggagcaagtgggacaactggccaatgttatgagtgctttgcagaaaaatagtagtttccctagtgatacaattgtcaatccgatagaacaatgtaatgccacctcactgaggagtggtaaagtacttgatgggggtctagaagacaagtcaaatggtcctgaggttgaagatacagtataagccaaagaagagactccttaagagaagcctactgacaagtctatgaagaaagaagatcttccattgtataaattgtcaattccttattctaaaaaatttatgaagaagaaacttgatgaggactttgctaagttcttagaaattttcagaaatatgaacatcaacattcattttattgatacattagagcagatgcctaattatgttaagtttatgaaggaggtattgacaaagaaaaagaaatttggagattatgaaactgtgagcttagctgaggaatgtagtgccataattcagaagaagcagcttcaaaagcttaaagatccatgtagttttttaattccttgtgagattggtgggttgagatttgaaaagtctttatgtgatcttggggctagtataaatttaatgtcactttcggtattcaaaaagttaggtatttgtgaagtaaagcccacaaaaatttcgttacaattggcggatcgatcattcacttatccaaggagaataatagaagatgtgctaattaaagtgggtaagttagtatttctaactggttttgtagtactagacatggaagaagacaaggatataccattgatccttaagcgccctttcatagtaactggtggtgtgtttatagatgttcaaagaggtcacctaaccttgagtgctaatgatgaagaaatcaagtttgacatttataagtcttttaatcaatccaatactgagaatacatgcaatatgattgagtcttgtaactccaatgaagtcaatcgagagactaaagaagccttgagataaaaataaaccaaatgtggagttttcaatagggaaacgagtgttggtcattcattcaaaattcaaatccttgaaaaatagcgttatttcgaggtggaaaaattcttttaaagtcaaagagttaattccttgtggccttgtaaattatttttgctttgtcaagggaaaattatcattggggtgatgttgtaaaaatgtaaagagtgggaaagatatttgttgcgtttgaaatgtaattactagtataagcatggtaatcttgacacctcatcattaagtcatcaacaacaagattgaagcacagaccacacatacaagtttctaccgtatagccatactgaaacttgagggcaaatatttacctaaagtttgataatggtgatgtggcaaggatgatgacacgtgatctgaggatatcaaaattgagttaatgaagaacatgtagtcacaaccgttaggagggaagtttaacggtcacctctccccctagcataagcaaggtggctactcccggcggagggtggatgagtactttcacagtgggctaaacaatcaccacaccccaatggagtcaaattagtgtagggggtatacactactactcctacccagaaggtaacttatctacccaaggtgatggaaaaatctaggggtatacctcttacccccctacactcctatgggccaagtatcacactctacctacatatgacatggttgatataatacttcacattatcaaggctacatactgttggaaattattttaccaggatcttagatctattcacaagtatgtttattaacatcctaaataagaactt

SEQ ID NO: 31875 - DNA, 2683 bp, Cannabis sativa
aagtttcctcttatattttttgagttgggtctttccttgctgactagttggttagtacgtggttattgttgactgaagagaaccatattgtttgaatggaagatacatatatatatatgtatatatatatatatatatattatgaggagtgttattgttaaccttccgtattcgaaaacacatgttggaatattttttttatggtgttcattatattattcttgtaaatttttgaaatatttcgaatagtttaccatgccgaaaataagttggaagtttttcgaacacacgtggtaaattgaaatatcaagaactctattttcaataccaaaaactatttggaatttttcaaaaatttatagggatattgtaataatatcgaataccactgaaaaaatattttgacatgtgatttcgggtgtgaaaattggttaagaagttgtaattaatacttttcatatattattaggtaataaatattgaagagtacttataattaggttttgaatattccctacaccactttcagtaaaatatttgaatagtgttgtaagtaatgaatgagggtagttcattcatacataccattataagtgtcatgatgatggtgcttggtcctgcagggtcaactcaatttgaggttgaattattggccacaaaataggtaatgagtgaaaacataacacaatctgttttttttttttttctattttcagtgattaaattctttcaagtgaatattcaaatttgtgggttcactttcatgttgaagagaaataatttagttaaggtatgaatttgctaatttttgaagtatctaattcgagaactccattgacgtgcccccaccatagttaattgaaacatttttgacaaaatcaagcaaggataaattttgtcttgtgtaagttaaagttttattattttgtcaagtacatcagctgctaaggaaacactactgccaaaaacgatatttttgttattatatatatttatttattgaataatggcatacacctccaatttgtaggttcaaattacatattttactacgttttttttttttcttgtgtgtgttgtggtgagttatgagttcaagctcttcagtgattagattcaagaggtggaggaaaggtggttagatttcatgtgggtgaagatgaagaaggggaattgaattatgatttggttgaagatgagattgatgcaagttgtgtttggtgggaatgcttttgtttgatgttgctattgatttcttgactttccaacaaaagatggcaatttaggggtgttcatctactctaatctgcattattttgcttatagtgcatccgatccgcactaaatacggattttatattttggatccaatccaatccgcacaatagttcaaattcaattcaatccgcaaaagtacggattagatcggttattttagattggtttctttgttatttaacatttattaaaaaaaaaatcgcacaactaacaaaacaaaataaattattgttcttttgtgtcttcaaaaataaattaaaataaataaaataacaaatttaaaggaagaaaaaaaattgtaggtagaaaaaaatgattaattttgttttaaattatatttttcctatataataatggaatataaattaaatctattaagtttttgaaatatatttatattgtatgtaatatattcttaatagttattttttttttttgcattaaaatagtaattgcatatataattttttttttttaaatatatatagatatgtgtggattaagttcgatcagttacttttacatatcaattaatatctaatccgcacaagtatggatgttgaattttttaatctaactcaatccgcacaagtgcagatattcgcactttgcagattgaattggattagattgtgcagattaaattggatcggatattttataaatatttctaaatggcatctctttggaaaccaaacaggcgaatttacatcgaaaaattagaacctaatttatatatatttgagtaatttgcggcataacctctataagtatttagtttattgcaactaactttcaattctaaaattttggtagtaaaatctcctaaactcgtgttcacagtgtacatagtgtacacgtaacacaattttattggtccacgtaaataaatatttaaaaaaaataaaaaaaaaaattaaaaataatatgaaattaggaaaataaataaattttgaaataaaaaaaatataaatataattaaattataggtgtcaaaaaacttgagattccaaatggtagggttggtgtaattataggtgggagatgcggctgagagggagagcatgaagttagtgggctgtcaaaaaacttgaatagggtaggctcgggataccaagcccaccaaggattatgagcatttttaacaagaattgttgtgggcttgcgagaacccatagactattcaattcctccgggatattactataagcccaattttttgcttctttgtgagacacttagcaaaaagatcgagttgtgatggttaaacgtaagttggggtttaaaggttgtgtcgcagttgattgtgtgggttgcagtaggggtatcgcatttttatggcggtttgagagtgaggcttgccttattcattatgttgttaattatattgatatggtgatttgtt

SEQ ID NO: 31876 - DNA, 2541 bp, Cannabis sativa
cattttattttcttgtaatgtttcttatcatatacattgtctctaaaatgaacaaagttttccaagttgatggcattggtcatagtagtagtagtattagatatatactttaattatatgatttctacatggaattcttctcccagaaaggaaattggtataaattgttctttcagagtaattgtggtcttttttaatattatagtttgtttcttagttagtcttattttatatttatatatataaaaatatatatatatttaatgttataaatattgtgaggtcctccaaatatgattctagaatgaagcaaattgtatactatatttctaactagtttttttttttttcaaaatcaacagctatggatccagatatgcgatatagattggcatcacaagactgtggagaatcatatacaaatatgttgacaaatgatattagtgagaagaaaactcgaggtcccacagaaatgcgtaaaatttggggaaaccatgatgatgggaagattaaaattacatgtaataattttggacagtcctgtgataaaaatgctgactaactttcaagctttattgggacattagtaagagatggaaaaaatgctccagttaattataaaagtttgcataaggtacctgttaaatacaaatatggaatgtggaagatcatacatgtattaattattatttaatgggaagtttagataaatctatttttaatattggtctttattattattgttatgtttattattattattgttattgttgttgttattattattatttattaataagaagtgttttattattgtagaaaaaatttaacattcttcttgatgttaagatttggactttcagaatgtttagtaagaaacatagatagtggaaatcttctcttaaaaatacttattatttggagaacttatcatttgaggagcaaaaaaaatgtaaagataaaggagtatatgatgatcaatgggaagacttttttttttgataaattagagaattgcacaaaccaatctttacatcctactagcaccctataaacaaggcctaagaaaatctatacaaatttgattgcctctttctatacctttttttttttacatctataaagcatgaaaccaatctttatctacaatcttaattttctttggcaaagatagagcaattcgaaactttaaactccatttaatgtcctcgatcaacttggtggaatttaaaggattctcttgccaaataatgacattccttgtcctccaaatgctataaaccagtgtagcagttgctgcaggataaaatttcttcttgaatttggtaatttttgccttgccgatccatctcatcaattgaggaagactattgattcttgcatttcaatccaacaatcttttaatctccatcagacagtaatcaacaacactgcatttaaagaatcagtgctacccattttcattttgaacattacaaaggctgcacctttcattctcttgtgtaccatatttaaccgatctatccttggtttttaatctattgagcactgccaaccatagtattagactatgctttagagtattcaatctagcccacacttcatgactccaaactaacctaattcgaggaggagtaagcagcttgtatccagctacaatggtgtatttctatctctgaaattctgtaacatcagttatattttttatctggtcttttagagctaccagcttcttccaataacagttggaatggacagaatcagagtagctccaccaatcttgccttttgaagcatacactatatatgcacccatcttaaccacaagctctcctgtttatttgaaatgacccaaacatacttacaaatggttgccttgttccactcctctagctttttgattcccaagccacttgctatttttgatcaatgggaagaattgatcaagtattgggctgtagaaagtatacaggtaatttttgttcaagtttaaattaacttggtttgtttttactatcttttcagaaattttaattaactaaattgtactttataatattgttctagagaaaaagtgctaaaaacaaaagtagtcatgcgaaaaacaaatataatcatacaacaggcaggaagaatttcgcacaacttagagcattacaggtaaaatttgaaaactattttaacattaaaagtcgaatcttgtttccaaattagatatagttttattactctttaattatgttcttttgtagaaagcaggtggtgcgagtacgccaacacgtgcaactatgttcaaaatttgttatgcaaagaaaaagaagagtatcataaatgagaagacaaaagaggttatggtatgattcaattattcttaaattatgtattatatattgctagctagtttagtttaatcttaattgacatgtctacaatgtgaaattaatgatagttacaattacaagagagagaagaaaagaatgaggattcatcaaaagaaaagactatgaatgattcattttctgaaattatgggtggggaaaaa

SEQ ID NO: 31877 - DNA, 2093 bp, Cannabis sativa
ttgtaccttgtgttgtgtaacattaattatttaattatagtgaaaaatattattactattatatttttgtagtactgttcatttatttattattagagaattttttttcttttctcatcaaacttattagagttgaaggatagttataacatgggagctaacattaatgacgcattatgattagttagcaatatttttttaaaaattattttcttaaattatataagacttaatgtttaattatattaataagtatttagtattattttttaatatttctttttaactaataacatttactttaaataccactcaaaaaaaattgagtaaataattttgatgtacactatatatatatcattagtcattatattatattattatatatatttgagcctggcatgaatttccaattgagtttcatcagcttattaatttgtaatgttgttgaccccccaacagcaacattaaagttttttttttcataataaataaataaataaataaaaaactttggaaattgacgaagtcgtgattggtattgaagtggccaaccattcatcatcaccatattcatgggaattgaacgaaaaatcacaccattcaacatcaccaaccacaatttcaattttagtatggatgatataaatatatatatatatatatttatatatattagttgtcatgttatgctgacaaaattaaatattatttcctcaatcttctatcatatttttagttaatttttatatttaaaaatatatgtatcaatgaatgaaaaagtattttgttggaacacatgaaatatttaatttttaattatgatattacaatattattcttgtaaattttaaaaaatatcaaatagtttagagtattaaaattatgtttaaaatttttttgaacgtgtgacaaactgtaatatattaaaaacttttcggtactgtaaattaaattcaaaaaatttataaggctataacaaataccgctataaaaaaatattttgacatttgattttgaacacgtgtgacaaactgtaatattaaaaattctgttttcggtactgtaaattaaatttaaaatttttaaaaaatttacaagactataacaaataccgctatgaaaaaaatattctggcatgtgattttgaacgtagagattgattaaaagattgtaattagcgttccttaatcgttttgatatataatgtatatatatattgttagtgagtcttacatttctaacgtgtagaaagataatatagaatctataagacttgtgagttatttatctcctaatcaaatggttttgagatggaaccccatacatcttacaattcaaataaaatatcataagaccaaaacaaaaacaaaaatctggataaaaaaaaatagtgataagtaaaaaaaagccactaaaaatctaaaaaaaacttataattcgagattaacttttgaaatgaaacttcatgcatattacaattctctgctaattgtatttattaatattattttggtcaattaaaactggtgcagtgaaatggccaatatttatatattcaactaaaaatgataatatatatttaaatgttggaaaatgtgctaaaaagtttgtattaaattctgtgacagaaggaggcttaaattattggaactaatattgcaataataataaatacaattagcagagaagaagatgatccctatagacacaccgaaaaaccctagatttagacctagaaaaagaaactaaccgctccattaatttttcactttaatcataaaaataaataattatggtcaaaattgctaatttatgagacttgtataatagtgttaataatacttattatgtgaaagtcttttgaccattttaatgtgtggtgtgttgtgtgggtagaaattaattactttatgataaaattgaaatatttaaataaaaaaagaaaaatgttaaaaaatattagtgatgtctagtatttttttatatgttaatattgttattggtcctattaaatattgggtccaattaaaaggcaccactaatactcaataacaacgtccaacaacaaaaaaataatgagaattaatgca

SEQ ID NO: 31878 - DNA, 1925 bp, Cannabis sativa
  modified_base (1176)..(1178): a, c, t, g, unknown or other
cttatagtgatataattaacataattaatgagatgaaaataataacttcttagggcattatataagctaagaataagataggttgtctcaacatgtataaataaataaacaaataatgcataatatcattatgaagttttatttggcatgttggttcattacaccactttttgttttttttttttttttttaaatatatttagtcatgtatgtccaagttcccaacagagcttgtggggtccacgtccactataaagttactaaaatccaattttatttattcaatattccttaataaaaaaatatatgaattatattatatatatgtatagtataggaaatttttaagatatatatttattatagaatatggtagctaggaggtagagaatgtgacaatgtgaaaataaaaatatccacatttattggaccctaccctacttatatatataaaaaataataagttatgtatttatttattattattattattattattattattaattggcaagttcaaccgtcacgacgtgatagaatcatcaaatctactgtctttgttttagagagttttctttgatgtgattaaatgttgaatagcattaaggccaatatcaaaaactcctcttttgatctttttcttatattaaatacccaaaaataatatattcaaaccccacctataataattgttcctatattaattctgtttttaccgtttcattatttgcattatataatatatgtttttattatttttattactatataaatataattttaaaattaacattgagctggtttatttgtctctcttgcattaaataagttgtgtattataaaatatagaatgaggtgtcacattaacccacaattactaacatgtcataaattaaaggcctctcctttccaacaaaaatgaaaaaaaattactaattacttacccgacaagtgtaaaattaaaagaaatttatatataaataatataatgaagaaacccgttcaaaatttaattaaggaagattcaatgtatatataaaaaagtaaatattattttggattatgtgtttttgtaaaagttattaattagactttctattttattaaatgacaaaatagattttgtattttctaaaatggtacaaataagaccttgaactgattttttgtcaaaannnaatttaataataatccgatcttatgacaaaactgtttacattttttatatctgttcgtattaagaattgttttcaagttagttataatgaaaaaaagttgttaaaaattaaactcagggtcctatttttaccattttagaaaatacatggtctattttgttatttaacaaaacagagagttcaaccgataatttttacataatacaggattcaaaatagcatttaccctataaaaaaactatcaaatctataacaaatgagttacaggctatgcaacattgaaaaatgtttcgtttttgttggtcaggtgaactagggatgtaaaagacaacacaaatgatatataggagattcaaacttacggtcttgtcacttatgttaaaaatttaaatgaatgatatgaaacatatataattatatatgaaatgtaaaattaatcgaaaaatatatgtattatggataaaagattaaaatatctcaagccataagccattaattctttgagttttaattctacacaaacatatgcaaaaaaaaaaaaaattattagtgtggataatcaagttttcaaactctttccactctctttatatataatttgacaagtataaaatactattattttggttgaatatataatgtactcccaaagaaaataaattgaatttttacgtgtaatattaatttatttgtctttggctcacgtgaactcctctctcctcctagtcatagttttttttttttttt

SEQ ID NO: 31879 - DNA, 8619 bp, Cannabis sativa
ttttgtttcttatctttggacaaccttttagagtcgtttttcctctttgaccatgaagcttctgactcgaattcttcaacagaatcacatcccgattgttttcttgactccccgacttgatgtctcctgaacttattctccaactcgtctattcacaaatggattgaatccttttgctttggaccaagttgttaacgaagatcaggttttttctggttcaagtgttcccataggtccgattggccatgacggctggatcttgttccacccatagaccgtattctaccttcttgatcatcgctttgatgagtattctcttctcctcgcattgatcgactataagttacaatgcaccttgcagtaacactcgcctcttcacgccctgctcttctccctcgggtttgattcattccccctattgggatttgtgcgagctcctttcctatgagcttggagagaaggttggcgatcccttaacgatgacccatgtacccctggttgtgtccctagatttcccttattcctacggggaactttcggttccttagttcctagttgatcgtatggcatctcgccttcaaggtatcccctggttgtgtcccacatatgtgttttgaattaaaatcacacacactatattatagtgtatagtaaattgtacttagtaattctatattaaagattccttactttaatacactaccaacttattttattcatattgtataatcttaattctcttgtacgaccttacaagattataccatctctatatgaataaggaattttcaaatatttattaattatacttctataattaatatattcattaatttttcttgaccttagaatttggccaatcgacagcggagtcgtatttaatgatgatgcttgtcacgcattacacaataaaaacaataaagtaagtgagacacatgatcttatagaggttcgatcctcttagttaacaggtaatgacctactccccttttagttgtattgatattgagagataatactactcagatcactatagttataggatctgaagtagctctcttaagattacaatgtacgaatcaataggcaaatctctagtgaaagagatagagtcttgggcatgtagaagagaggagaagagagagttagggtttttagacttgagttaagagcttagggagtttggaggcttaatgacttaggattttagagtgaggctaaagctctttatatagtagaccttacttgcctaatatcccttagatataggtaaataaattcattatttacataattaattaataaaatacaaatgaataaatttcccttcaaaaatagatatcttctctctatttttatgggctttcaaggcccaaactgttgcttgacttgctgtccacatatgagagctacttatcaaaatcttgccaagtcaaaggctagctggtcggccatacaatgcctgtaggtagaggtctggcctgtcatgttcctgccagggtctggcagatcatgttccttctagcattgtcaagagttggccaggtctttgcatgtgttggccatccttagtaggtgatggctagccttgatgatggccaaccttggtgatggccaacctctgtagatggaggccaacctttataggtggaggccaacctttgtacaccttttccttgcagaggttaggctttcttggtcgaacagacccttccttagtctaaaagtcaccttttggccggctagcttgtgcccaagccctggctagccatataagctcatcttggccaacctatatgccccttggccggccagacatggtggtatagctccttgacgactcgcttatctccttttgcttgttgcttgacagtttttccataccttgtaaggagactttgtcctgctattgggaaggctgtattccgtgtgtacttgtccttggcatacgtggacatgctacgttaggtggaaaatattttggataatatttacccccaagtccctgttcaaacatctggtcggctagggactttccaactcttctcttgcttgtagtagcttctgtcgagtagccttatctcgcaaagtgttggttttttgcatgagatgcttttagatcattgatcttctctctccatatatgccccatcttctcttctttgaaccttccattgataagtttcaagctctttaagcttttacttactttttgattctcatgttagattgtaatctttttggtattttgatccacatgacaattttagaatgtataatttgtgatttcctgatggaaaagattctattttggccttggttgtgattcttgactctttgagtcatcaagaacatgaggcacatagtctagttttgagaaaaacacacattttgattcaaaactaaccttggtcgaccctaggggtcttgtttgagacctagctgaccctaagatttaatcatgggaattagccaactctggggtttcaccctaggaagttagtcgattcatgttcaggtttggtgaccctagtcaattcttcactgagtcatgggaccctagccgacactctcaaggcttgggaaccttagccaacctaggccatggttccaagcaggtggccagttttatatcctctttttaccttggcaagaatcttgtcatggcttcgtaggcatatacaaccttagtctcatacgtggttacctttgaaactctgtataaaacttaatggtgagtctattatagtcgaatgctcaacttaagactcaatatttgtccaagctattatacttgagactatacttcactgatactcagccttgtacaatgacattatctagcaagtacccttgggtacggctgcccagatttttgtgtatggcttgggaccagcaaggaactaccttttggcttggaacataccaggaactctgccttgccttggagatttagcccagtacatggttcctatgggaactttgttcggttcttctctagctgtatagttctcacggggcctcaaccttatgcattttgaactatacagttcttctgtggccccgaccttatgcatttgaaccagttttttatttatatttggccttaaggctttcatgttcttgattttggcttataggcactctattttcgaacactacttttgttcaaccttaaagcatttcactatggacattgattatcctggctatcttcttattgtcttgacatgtaaatatctaaatttacttttcttatgccaagctaaagtatgtctgcacttgacttaaaggcaggtttagtagcttattctaagcgtttaaatttctctgcataagttctttatgttagtttgatgcattgtacggtgtaggtgcccgcaagtgagcatgcatgcttacaatctcttggtcacttgcaatcagttaagtttcatagaccttgcctgagaattttcttggggtgctattgggttatacgcatgtggaactgaaaaagaataactttaagaagttatctttgttagcaagtggcttagacacatttggtcttacgtgtaacaaaagcttacaacttggtgtttgcttttgaaatcacgttgtggctacccctgcttgagatgtcaggcagaggccattgttaaagagcgatgggaggccatgctgaaaagaaatgggtactaactcttttatatttggctacctctacacgacttaccgtgcaaaggccatcactgaagaatgatgggaggccatcgctggagggcaatgggtactagctcttttatggattcctgcaaggtgaaacattaaagggaaccattatacaagttagctagtgagagcacttaccgagatgttctctattctagtattttggtaaaagaaccaactctaagttgtcattgtactcgacaggcttgtatggaccttttcttcttatcttgtaacttggtgcggaccttttcagttgggtccaaacatgcttgctccaggatctttggtatcaaggagtattcttcggagcactgggtcttttatgaagaatttctttccttgatttgtatgtcaaagggcatggtaactctttgtgggcagacatgctgctttgagttggcttggtctcttcttattcccttttgccaagggattctactagcaaaatgtggtttacttcttggtcaaagtagaccagaagtgtgagagtagactattggcggatcgggccagctaggatataaaccaggtggccagccacgttggagcatttcccgatcatttggatgaggctctgaccagcgagcctgtggaggtagtggtcggctaggttattgactctatggccgaccagcctactgaggtcatggtcagccagccttttggaggccaagtcgatgttgtagtttgatcccatctacactcggatggctttgctcccagcgtgattgttggagtccaagtcaataccagttcaacttctttcttggtaacacttcttagaggtgttattagggtaccacagggtaccatatctataagttatgctatccaggattggccacctagcagctatcccctttacccctactttctagcaaggtttttgtttggaggtatgctgctataagtgtatccatgttggttgtctagtatgtcttttccttttaaagaactgggtgggtaccaagtttgccttggttgtcaaagtgtagctggctagttgagcgagtgtgtcggctattgcgttgtctttgaggacttgccttttagtacaacctttgagctgacttgacaggtcatagctcaaataggccatcatcttttttcattgacctgtatattcacctaggacatgacctacgactttttgagaatcgtggtgtatgtttaggtgttcatcccgcgcttcgtgtgctagcctgaggccagcattcagagcttcatgttcagcctcgttcttagaagctttgaaactgacctttgttgcctcatgcagccattgcccccaggtgttctgagggccaggcctatatcgagcaagtgatcaagcaccttttaggttgagtcatcttgctcttactctcacttcatctctggcttttgcttttctcccgaaccttgcaagatttagggagatatgcttctatgtttagccatgaagctgacgagagcttggactttgatggccatgtttagttgataggtggccttatatcagctgagcctcagtggttcacttgagtggttggtcaggtgctttaggttttgaagacacctgtcgccatagctggttggcatgcatttctttgggagttttggcaggagagtgaagcatgcacacttcttctccttctcccttagatgtcatggcataagggaatcattgaatttcccttttttgccattattttggtcaaagctgtcgtggttgcatcgcctccaattctcattattggaggaattggtggagatcgtctgcactggttggcatgtcaggcaacacttatggcaatatgatgtcatgtgtttgttgtttttgtgggagtcatcacgtcccatatagtgaccgggtaggacttgtacatcaacagggagcgagctattgttgttgcggggaaccttattggagggatgactcctagccctctcttggttctttgcgcgttcttcaggtccgtagaccaccctctcccattggtttctcggggtagggacttcctatgtataggttcagttgtcttgaggtatctgttggttgtgggcgtagtacccaacccttgtgtgtttttgttaaagtagcttcgtgttaagtcaacaacctcttgagtgcgacggtcgtggtcgtcttggcgcctcctcatttctcgagcatgatcttccagccaagattagaattctctcctttgttagcaagacttattgcaattgacctttcattcggcctatcacatctcgtaattgatccatctcttggtcaattccttcgatatccacatggggttcattatgtggcctaaacacgccagggcctcgacctatttgtgcttggcccgtgccatcattaggtgggacaaaatttctagtattaccccttctggtggcgccatcagtagggccgcctctaacagtggtggaattggtggtacgcccaacagttgtctccccagcagaagtagtttcgccagttgtcccatgacaagcagtagtctggacagtggtgtgggtggtggctgcaccaccattaccaggatgcgggggtcgctatccattgtttccggcaagattacttgctgatggaacttgctgggcattatccatctcctcatcaggtcgttcttgtgatcttctggttagcatcatttttttcgataaaaaacttgaagattttggtgaaagctctcaatgaaagcactaaaatattgaatggatttttttccaatcgacgtgtagtcataataaatgaaattaaactaaaatcatcacaataaatgtaattaatgacactaaaatttgcaataaatgtaaagaaagacaataaaatttaaagagattcggcccccgacgtcggtaatagcctactccctttgggttttattaatcagagttgcaaaagtcaagaacaggctcttgaatgcaaagaataaaagagttttttctctaagtgctcaaaatcttagacccctttcccaggtcatgagtgatcccttatatacgggaaaaagtcagtgcttctcgtttcaggagacgcgaccaatgcagagctatctcaaccgtctctttgattttcggaggtagttgaagtctgatttttatgataatattctgctatttttgtgggttgataactatctttgagctttttgtgggatttgaatatttgaactagtcattcacaatgaaggtctcccaatggtgtgacacggtcgttgaccaccttcgggaattgaaactaacacatgggggtgacatccccgagacccaactagaggagggtgacaattgtcatctctgggtaatcccctgagaccccttgtatgttgtgagtagtcatactgttgtgcggatgtcttcatatatctttgagaatgttattatgtttatggtgggggtagtgtcatctaccccttagactaatttggcttgtaggtgtgtggtgattgtttattccacttatgaaggtgttagtccatcattttcccttcttggagacattcaccttactcaagttaggggtaaaggtgaccgtcagacttccattctaacggtcatgaccacccatcacgattaacggtcactccatcggtcatgaatttacatattcttcattaattcagtctcgatatttttcatgccacgtgttgttactcttgacatgtcatcgtcatcaaaatttggataaccaaaatatatgagagtataagatagagtaggaaatagaatgtttttgagggcatgtttagaaagccaatatagatttagacttggatgtatttgaaagtaattatatagtcttgtatgtttgactgaccacatacaatgtaaccatacaatttgaggtgattaagagatttcattaacactctccaattcttatacttctatgataatgtactttctattttaaatagaaaaaagtatacaatgcacttaaaattagatttttatatatatatatatatatatagatttttacgaatttttcttctttttctttttttttttaattatttttttttatattttttcaaattctatttttctacaatttttttgttacttatttatatttaaaaaaaaaacgtttttttcacgttggtttctcataacagcaacatgaaaatatttatccataaaaatataaatattatatcatttttaagtatttttaaaatcatacctaaaaaatattaagtactaaaagttattatttattactaacgatttttccaaacaaaacataagaaatttataattaattacttcatatcgaaatacacatattttaaaatagagttttttacggttaaactctttcaattatcactccatttacacttaacctctaggctcaaattttgacagtaaaatcctccaaactactaaattggtagcaaatttaaagtgacatattcatgtttcacagttaattgccaatatatttgtatacttaatattattatttaaaaaataaaaaaattattttaaaatttatagtactttattttttttaaacgttttattttttattttataattttataattttaggtgtacaaatataaacgtgtcatgtgtacaagagtgtatacataagcagtctatcgtgacacttaatcagatgacatcttaaatttgctaccagttagtagttcggagggttttactgctaaaatttaaacttggagggctaaatacaagtgaaacgacagttgaaaaggtttaactgctaaaaactctttaaaatgtaatataatttaggggtgtgcagaaagtcatccaatccaattacaaccgatcgatcaaatcccaaccgatccgatagaattggatatccaatcataattggatcggatcagatgtaaattttgaaaatccaatcagattggatcggttgttgga

SEQ ID NO: 31880 - DNA, 1584 bp, Cannabis sativa
  modified_base (396)..(403): a, c, t, g, unknown or other
gcctctaaaattcaatttcattagatatgtattattttcaggtgatacacatcgtggccgagtgaaattattattacttcatcaactataaaaaattatatatgaatctagctactatcaaggaaaaccatctattgagagtgaacagtagatgtctttttaccaaaaaaggaaataaataaataacaaaagtacataaagaaagtgaacagtagatgtcttttacaactcatcgatcttgttgtccacatatttctttttgaaaaatgttgtccacaatattattattagctggtattggtcaaattattatattgagagtattgttattaggtactattggtggttagcacttctcgacatatcacgttacgattagttagcgatactctttannnnnnnntatattaaattatatgagacctgacatttaattagatttataacgatattaacacataggaagatagtagacaccactagtaccctttagtatttatcttctattaattgtaccgacagtctctaccacactttatagatatgtattttaacgtttagttagcttactctctattatattatattaattgaagacatgatattttattataccaatcacaaaatcacactaaaaacacacttttgccatttctcatattatatacatcatcgttaaatatatattggtaaggtaaggtctttatataaaataaaactaggccaaattatatagaattgtttgcaaaagtacttctctttctttcttgatctatctgttacaaaagatggcaaagctgaaaattatagaagtgtgcaaggtagctccctcgcctgctagtatggcaactacctcttcctcctctccaaactctctccctcttacttgtttggacctaatctggctaaggttgccaccagttcaacgtatctttttctacgagcttccaaacttagaggatccaaatagagatacaactctatttttccattcagacattcttccaaggctcaaacactccttatctctcaccctcaaacactttccggtaacctcatttggcccgaatcctcctataaacctctcattcattacaacgatggcgatgaggacgccgtttcttttactgtggctgagacagacgctgattttcaccatctatcagggacaaatgaattcttagaagcaacagaataccatcctcttatccccaacttggcagtgtctcccgaacgagccgcaatcttggcattccaagtcactttgttccccaactttggattttccattggaatggtcaatcaccatgcggcaatagatggaaaatcagtacacatgtttctgaaaacatggacacatatttgccaatcccaacaacaagagtacaactacagttatagtcctttagagttgaaaccttttttcgacagaactgtgattgtggactcgaaagggattgatgcaatcatagccgaacaacttcaagaattagacggaggacctcacaatagaagcttaataccatggaagatagaagttccaacaggtgcagttaggggcagtttccaattgacacgagagaa

SEQ ID NO: 31881 - DNA, 1233 bp, Cannabis sativa
ggtggttggaacttggattgtgtaatatggtagctgcactacttgtcagtcaaaaaataggatgatatatatatccctttttgtaatacaagtatatgatccacaatgcacatgcatgcatatgttgctttatatatacaagtcccaagtctatatactttcaaattacattaggttcttaatttatgagtaaatatggattggggttttttgacacggtaacgaacattatttgacacgaaaaaatatgtgtttatgtatataatatggtatgatacaaaaaaaaatataaacatatatacacgaagcagtaggacaagcctgaaactatggcatataaatacaaataaattatctcgatggcattagacattaaaaaactcaataatttaataataataataatgataaatattttatttatcaattaaaatgataataactataattattttttatataattatgtgtaattattattgagaaaaaacataaaagtaattaaaattataaaatacatgtataatttagtatttagatcatcaattataataaaaatacaaatatatagagcacggatttgaacctgtataataaaataagttgatctatttaagaaaaacggatcgacccgaataaaacacgacatgaatccaaacacgacaagaaattaccgaacttacgggccgcgccgtgtctttcatataaaattgttacacgatacggcatgatctatattttttttttataacactattcatattttttatgacctggcatgactcttattttaaaaagtatgccagcatccaaacaacctatatatattaaattaaattaatattatattcataattgtgacatgttgagtgaaaaaagaaaagataaaatctcttgctaaaataataattgtgttttatttttaatttaaaaatttataatattatcattgtatagtgtgctaatccactttcttatatttatttattttgtaagtagttttggtccaattggttatattggatgcctcttgaaggtggtctcaagttgttttgtctaaatttcttagataacttagtcttatataaattgttttgcttacagtgagtcagtgactcatattttaactttgtatatctttagctagacaattagcttgttgattggatgtttctttgcgtcaacaattatgatagtgtatgatttaagtcactctctcaaaaaaaaaaaaaa

SEQ ID NO: 31882 - DNA, 2613 bp, Cannabis sativa
  modified_base (686)..(687): a, c, t, g, unknown or other
  modified_base (2544)..(2574): a, c, t, g, unknown or other
ttgttataaagtcatgccttttggtttgtagaacgctggggcaacatatcagcgactagtgaatgaaatgtttgaaaaacaaatagggaggaacatggaggtctgtgtcgacgatatattgatgaaatcgataaaaagtggagaccacacaaaagacctcgcgaagttctttgaaatactaaaaaactacaatatgaaactcaacccaaagaaatgttcctttggagtctcctcaagaaaattttggggattcatagtcttcactatgggcattgaggcaaatccagaaaaaattaaggctttgatagaaatgccatcaccaacaaatccaaaggaagtacatgccttagcaggaagaatggcaactcttaacagatttatctcaaagtcaactgataagtgcctagcattcttcaatatattgcgaggcaacagaaaatttgaatggacggatgaatgccaggaagccttcgcaaacataaagaaacatttatcaacccctcatgttttggctaaaccaataactggagagactttacttatctacctggctatcttggagagtgcaattagtgcagcattagtgtgagaagaggggaagcaccagcaactagtttactatgaaagtaataggttactaagggcagaatcaagatatccacctcttgaaaaacttgccctatgcnnaattcatgcatctcgcaaattaagaccttacttttaggaacatccgataaaggtattaactgatcaacccctgagacaagttttgtcaaaaccagatgcttctagaagattgataaaatggtctattgaactgggcagttcgacataacttatcccccaagcacatccatcaagggccaagctttggcagatatcttgatagaagggataattctagatgaaaattcacttatccgcgagatgcagacacttggaaattgtacgtggatggaacatccaatgaacatggctcggatgcaggggtgatactaatgtcaccagaaggctttaagtttcactatgccctcaaattccaatttggcacttcaaacagcgaggctgagtatgaagcattgatagctggtttgaaaatagctaaagtgttaaaagtcaagattctagtatgttacagtgactcgcagttaattgtgaaacaagttctaggcgaataccaggcaaagggcttaaaaatggcaaaatacctagagaaagttcaaaagaacttagaaaattttgattatttcaaaattgaacaaattttgagagagccaaactcttatgtcgatgccttagaaaaactggcctcgcagaacaaacttgattaattgaatttggtcgtggtggaagtattaaacgaaccaagtatatgtgaaaaggaggaagctgcgatgattgatagctcgcctacttggatgacacccatagtcaactatcttctcaacgagtaacttccagcggacaaaaacgagacacgaaaactcttgtattcagtacctcgatacacgatagtagaaggcaaattgtatcggagggggtattcaatgcctctcctacggtgtgttctcttcacaagcgagaagataatcagagaaaatccacgggcttttttgagatcgcaaagcttgtcaaagaaaataatttgacaaggatattactggccaactattaataagaatacacacgaatttgtcaaaaaaatgcgataagtgtccaagattttcacatatacctcgcgtaccacaaacacaactaagactgatgacctcaccatacgtgtttgcaatatgggggattgacttgattggggaactccccacagggcgaggaggagcaaagtacgcagtggtggctgttgacttccttacaaagtggacagaggctgaacctttggtttccataacctgcaaaaaaattcttgactttgttgtcaagaacataatttgcagatttggaatacccattaagatagtatctgataatggaactcagtttgatggtgaattatttattgagttctgccagaggaacaagattattaagagcttcttgtcagtgtcgaggcctcaagtgaatgggcaagtagaagttgttaataaaaccttgaaggatactatcaaaaagaagttggatgctggaaaaggtagatgggtaaacaaactaccacaagtgctttgggctcatagaacgactgagaaaatggaaacagggcatactctattctcgctgacatttggctcagaggcaatgctgccaatggaagtcaatatcgcgacccatagacaagatttctataatcaagaagaaaacaagaactctttaaactgtacttggatctacttgaagaaaaacgtactgagtcgcaaattactaacgcatcataccaacaccgagttacaagatatttcaataagaaagtaaagaaaagactctttaacgtcggtgacttggtgttaagatgagtatttacaaacacgggagatgcatctgcatgagtatttcacccaaatagggaaggtccttattgttgggttttatgcnnnnnnnnnnnnnnnnnnnnnnnnnnnnnnntttacttattaatatagataagaaataacatttaatgtt

SEQ ID NO: 31883 - DNA, 1976 bp, Cannabis sativa
agaaaaggatttagctcagtcaccaaaaatattttaagcgattcaaatagtatgtaacaactttataagaccattttctaatgtaaatattttcttttaaactgtgtcaagcatatgtatatgaaagtgaaagcatggaacattgcccaaattgtcaaaaagactttttctgagtaaatgtaaccaatggaggcgctattacactacctcaatgctaaccctttttaatgacagcatatcctctacatagctcctaattacatagtaccaatttactcaaagacattttttacacattgagataggtagctctattcttccaatggagttgaaaatggtagcttatataacattgtttaaagaactcaaatattcctagcgggagtgaaaaacttttcctggactaaacctgtatgaaatcatgacactaaaagcattagcaataaaaacaatgatgtaattctcttaagtttaagattttcttctggaacaaaaacaaagacaaatcattatgaccattgagtcaaagcaaaaattcaaggaccgttaagcacaccaaaattagacagtgcaaacccctaaggatttccttagagagataaaatgaactgagtcaagagctttagtaaaaatatctgttatttattttctagtttcaatatattctaagaagaattttatttttcacaagctctctaataaaatgatgtcatatgtcaatgtgcttagtgcgagaatgttgaaaacgatgttttaaaatatttatagcactagtattatcacaaaaaattgttaaagtttttaaatcaaatccataatcttccatcacttgtttcatccataacagttgggttcaataactacccgctgcaatgtactcagtctctgcagcagacaaagagattgagttttacttcttactgtgccatgaaacgagaatgtttccatgatagaaacaactaccactagtgcttttcctatcatctacattacctgcctaatcaacatcactaaaacaagctagattagaataagtgtccttagaaaatcaaattccaaaaattacaatattatttacatagcaaataattcatttcatagcaaaaatatgagatttcataggattttctagatagtgggcacacacacagacattataactaatatcaagatgactagcagtaggataaagtaaactaccaatcatactacgatacaaagtaggatctatctttacaccttgttcatctttagataatttcaagactgtgctcatagaagtattatcattgtaggatttttgaccaaactgacctacacaacaaaacacttaatatcagtatacaaggtcgaaaccgaccttttctttgtctaatttaagtttagacaaaaacggcaatgtttaaaccccacgacactaaactttgtgtcgtattgaacctaggcttaaagacttctcaggaagagtctcgaagcccaaacactcaaacactcagcctctcagattcgaaactagaaaccctagcagagcaagttattcaaaagaacttgctcgatcccagtagaaaccttaggatccttacccacacacacagatttgagtttagtaaatgaaaaacaaattaaaggaaagaaaacactagaaaatattttagagttcacccaaaattagggctacgtctctgtcaagctcgtctcagagattagcttgatatccactatcaaacaatgtcaatttgcaagttttcgagcttcctgtcacataagattgaccaggtaaactcagttctcttttgtacaatttctgtatttgtttttcttctaattttgttctcgatctaactctagttcttgttgttgtgcatgtacatccttccctctgattcctcaccacgagaactccattcttgtctctggatctcggagctgaggtcttcaaagaactagggtttactctttttctctctctctctctc

SEQ ID NO: 31884 - DNA, 2391 bp, Cannabis sativa
tttcgataagtaattataaagcaaagtaattataaagcatggtaattataaagcatgaccattataaagcatgaccctttaaagcatgaccctttaaaattatgaccctttaaaattacttgaggggcatatatgtatgattaactggaattcatttggaaaagttataaatgacatataactcataactcgcatataaagttgaatactaacggctcgcactgaaggaaagtattaaacgagacatcaaggtgtcttgaaaaaagtacttaaacctaacacgtgggtagaagatctaactactcatgtaagcaataaaaatatatacaaagtgacaaggtcattaaaaatatatttaagttttcttgaaacagattactactgattactgcgaggcgaaatcaatgactgctcgcgaatcgagtgcagggtagatgataaactgctcgcgcgtgaagtagactattaaccactcaatgctaaagaaatatgcgagcgatggaaacccctaaaatactatttacatgatcaaaatatgattatttaaattgtgaatgaaacgcaagcaaacaactacatattgaagttcaaacataaaagtacaaggcattaaaagataaaataaaaagcaaagttggccatccaacttcgcaaatttgtctttacaaaaagtgccacaaggggaaaactattgtctcggctttaaggccatttccttatatgtatatataaaaaaaaggagataaataaaaaccaagcctacattgtgggagacttggatagatcttcttcttccagtgcctcgacctcttcctcctccttcctggctttttcacagtaagccaaagtttcctcttcatcctcctccaagaagcttgtgtccatgttgggattcgccatcagggctcgataaacattgcaaaggccgaccctattgcattgctctgtggtttcggcctctttcccttcgagctcggcctctttccctttgatttcagcatctttctccgcgagcgctttcttaagttcattgcattcatcagttttggtctttgtggcattctcggcatctttaaagcttttattcgacctctcggcttcctgtttgagatgagtgatttcctactgagcgtcgttccattatttaatcacggcctcgtgttgggctagtgactttttgacctcgccttccaggtattcgaaccgctccaggaatcgctgatgggaggaaaaagaaaggaaagaagtctagagaattacgagcaaatgaatataagaaacaaggagataaatgaaagaagaaataatatagacaaatacagtaaatttaccatgagggcataatgcaagttcctcgaaagcgtctattttggatccccaggattgattaaatcccaatcgtgggggaggagggccttgagttagcgcaagcaggcagtcccaaacacctgggaaaattctgaaccagccttccctgctacaccagacaatgtttcaatggcctggctcgaggaggcggaggcatgagttgtctcgggaggaggttctttggtgttgggattaaccggaggaggagtcagcctgtgggtctcagtttcagagacctcgaggtcaataggctcagacactttcttctttttgtgggtagtggttttcttttgccttttggaaggctccacttcgatatttgtaggaacccctaagttggttccccttttgttcctttttcggtccataacatcttcaaaacgcatgtctgcgaggcgaaataaagtgttaaaattatttaaagataaatgaaagggaagcgtggagtgtaattttccacctaagaaatttaccaaaaccactagaaggcgagctatcactagaggagggagtagaaggaccgtaatatccgctaaaatccctatagcctgtaatcttgaatatatcaaatggctcgattggttctaaatcccaactcgcatctatatgacttgccctatctgtcatggtgccgtattgctcggctataccataatatgactcattacagttaatctagacgtggaatctaggtaccagctttcaaacctacgagcaattaaatctacgagaagggaattccaaacataaaaattaaggcggttatctcaaaatgtaactaatgtgttacgttcagccctaagtattgtgggtgaccaagcacattgattacctcaggatgctccttcatcggcttcccgagggactgtgttttgaaggtattatgcccgagccacacgattccaggccttatccacctctggaacaggaacctgctgccaagaagaatacttgggaaacttataatcataagtatactccttgtcagtaaggaaatccatagatctcaaattggcctcgttt

SEQ ID NO: 31885 - DNA, 1597 bp, Cannabis sativa
aagtattttacatttttatttgtgttcggtatttttttcttttgtacagttcattatttacatcattactttttaacttttcattaattacatttttacgatttggacttacatcaaaatttttgtctatctctctctccccactttttgtttttttgtttattttctatgtacattctttctctcaatataattactctctacaagcacgtcattcaactttttcttcttttttttttttttttttaaaaatcactttatatagttaatatataccaatttcacatacattgtttacaacctatagttgtaactagtctagttcatcttcccctttttttttaatatttttttttcaaaaaggctaaaaaaaaattccaaaattgttcttgttatgggtaaaaaatttcttttaaccttcaaagctaactgtaattgaagaaggaagccttcttatttctgaaaatattttttttggtgagaaggttgaatctcaaatggctaagcaccataaaaatcatatagaagtggaggtcctatcctattttagtattctatagttgattttttttatattattatttttatctatagttttaaaaatataaatttatatgctaaaaatgatttgggtccaactgattgtatttgaaatattacataaaatttatttgcatccacacgcattaaaaaatttattaagctaattcaatagtactcacctttcagctcccacccccacttgaaaaaaaaaatagaaaaattacttgtcacttaatctaagacacaaagaatctccattatagttattttaaattatttttttttctaaattatttgcgtgttattttagttttttttgagttgacacaacgtgttgatgcttaattatttaaattccatattaaattcaggttattattcattatttgtacatagagatttagttgttcaacaaagatcaaattgagtatgtgtttatttgtcatggtataagtgatttgtagttatttttttttattgagataaattttatgttgttcttacgtttcttttaggttgtcaacaaaatatattgatatttagctaatttacatattaaaacagtgttgttgtctagttgttttttaattatacttgagtagtccaaaaaagataaacaaaatgagtatatatttagttttttagatatatttttgagtagttatttagttgttttgtaggttattttcagttgttgtgcaattattttgatgtatattttaatttatttttttatatttttttgttgtatcatggtgttgtataagtaatttgtcgttgtttttgatttattgaaattgatatttagttaatttacatattaaagtagtgttgttgtctagttgtttctcaattgtaattgagttgtctaaaagagaaaataaatatgagtatatatttagtttttcagacatattttgagaggttgtccagttgttttgtagttagttttaagttattttgctgtatattttagtttatttttgatatttttttagttgtgtttgtataagtgatttgtaattatttttgttttattaaaattaattttatg

SEQ ID NO: 31886 - DNA, 3927 bp, Cannabis sativa
atataacgaagaatccgttttactgctgtccaatgttgcagcagtggcttgtgcatgtattggcatactttattcacacagtaggctagttcaggccgagtgatggtggcatattgaagaccacctacaatagacctgtagagagtggggtcatccattggctcacttccatagttggagagtttcagaccactgttcatgggagtactttgagtgtttacattttgcatttcagctttgcataataaatcttggagatacttggtttgagtaagtaagagaccattatctgtgtggagagtctggatgccaagaaagtaatcaagttcaccaagatctttaagtgcaaaagtgttgctgagttcttggatgagtaagtgtactgtgtgatcattgttgcccatgaccaagatgtcatctacataaactaggatgtagatacaggttgttgaggtgatcttgataaaaagtgaggtgtctgctggagaggaatgaaacccgagacgaattaatacagtggataatcaaaccaagctctaggggcttgtttgagaccgtagatagctttgttaagtttacacacataatcaggatgagtagaactaacaaagcctggaggttgctgcatgtatatatcttctttaagatcaccatttaaaaatgcattattgacatccaattgtcgaattttccacccttttgttaaagcaatggtaaggacgactctgatggttattggcttaaccacaggactgaaagtttcagagtaatcgaaaccactttgctgatgaaaccccttagcaactagtctggctttaaacctctcaactgagccatccttgttgtgtttgacccggagaacccacttacacccaattggttgtctggttggtggaagtctaaccaatagccaggtattgttcttcttgagtgcttgatattcagtattgatagcattattccattttggaattttaagagctgcttgcacagttcttggtgtagtcgatgctaggagagcttttggcttcctgatacttgctttaagtctagtgatcatggggtgagaagctgtagtagtattattattattagtgggtgcagattgagctggagccgaggtgacatttggggaaacagtggtgtcaacaccagcaatagtagatgcatgaggtgcaacagtgacaggtataggttcggtggtggtgagtctaggcatatcaggtgtagtgtgaattgggacatcaagcatgacatcattggtgggagggttggtaggggagttggaggagttggtggataaggttggagactcgggtactgtagtgacagtgggagtggttgggaagttgttgggagggggaatggggttatgttgaaggacattgagaagagatgacagaggtggtgtattgagagtagatgtaggaaaatgagtgaggtttttatgatgcaatgtttcagcatatggaaaacatgactcatgaaacactacatctctagagatatagagtcttttatcttttgacatgcatttaaatcccttatgagacatactgtagcctaaaaagacacatggtgtagacctatattgaagcttgtttttgttgtaaggtcttagattaggatagcatagacaaccaaatactttgagggtgttgtaatcgggttgagtatgaaagagcttttctaagggagataaatgctgaattgtagcagtgggcattctattgatgagatagacactagttctaaaagcttcatcccaataggataagggaagtgaagcttgagcaagtaaggtaagtccagtttcaactatatgtctatgttttctctctactatccattctgttcatgtgtatgaggacaagctagtctatgaacaattccacattgctctagaaggttggtaaaggctcgaaattccccaccccaatcagattgtaatgttttgattttaaagcctagttgtagttcaatttgggttttaaatttggtgaaagttggtaaggcctcatctctagtccttagcatatatatccatgtatacctagagtaagcatccacaaaactgatataatatctatagccattggtggagtttattggagctgggccccaaagatcagagtgaataagttggagtggctcatgatatgtggtagtagaaaagagaaaaggtaatttgtgatgtttgccaagacaacaagctgaacagaaatctgcatcatttttatttgaaaaaggtatattacaaagaattaagagccatttttacaactttggcagtagggtggccaagcctactatgccataaagaaaaattggaagtagatgaatgcacttgatgactaagacagtgagatgcagatgacatatgcggctgaggggagacagaaggtggaagttgattgagggttgtgggagtgaacttgtaaagcccattgtcaagcttcccagccaataatatcttcttggtaccctgttccttaaccaaacaatgggaggggtgaaactcaaaaaagacattgttatctaatgcaaattgagagacacttagtaaatttttggtgattaaggggacatgaagaagattgtttatggacagagtttttgaagtaaagggagagataagagtggagttacctatactgtcaatgttgagacctgtgccattccccatgagcacttgttcagaacctgtgtagttgctgcttgaagcaagattagaggcatctggtgtgaggtggtgtgtggctcctgtatccgggtaccaactgtcatcagctacagtttctgaggaggcaacataggcttgcatttcagcaagattagcagctggattcatttgattaaatgactcaggtccagagaaggttttatcaaacctatagaagcattgcttcacagtgtgtcccatcttgtggcacaattgacattgaggctttgaatttgttgaggctgtttgtccacggccagatggaaaatgacctcgatttcctccattgttgtggttgcctcttcctggttggtacattcctctattcatttgttgcatagattcatattggcgagattggaagccacgattgaaacctggtggtgttccaaagaattgatttctgttgggaaaaccagattggaagggtctggtgtgagcaagattggcctcacttttgctgatgtcgagagccttggcatttttgtctatgcgagctgattgagccatgaggagagcctccatttctggtacagtataaagatcttttctggttgtgacagaggttacaaacacatcatattcagcagggagtccattgaaaatggcctcgatgtgatcttgaggagattgtttgtgacctattgttgcaagaagatcaaccagatttttgatctttaacagataatcattcaaagaacctgtcatcttggtatttctgagttgcgttttgtagagactgacgtttgcagcatttagagcagtgtaatattcatttagagttgtccagatctgagccgttgtatcgcatccaaccatgcgattcgtggttttctcggacatggacgataagagccaagatacaagaagattatcctgctgttcccaatcttcgaattctgggttgattttcttttgagcttcatcttcaacagagagatatcgtgagggagcttgagttgaatcaagatatttttgaagtttgctgcctttgatcgaggcgaggacttgatgtttccacggtaaaaaattgtgttcatcgagctttattgacagagagtgggtaaacgaaactggaaatgatcttggaagaagagtttgcatctgattttgaccttgagcctggttcaatcttgaggctccaccattgccggccgtttggtgctccattgctgtggacgattacagctctgataccatgttat

SEQ ID NO: 31887 - DNA, 2004 bp, Cannabis sativa
  modified_base (339)..(341): a, c, t, g, unknown or other
  modified_base (1915)..(1916): a, c, t, g, unknown or other
  modified_base (1946)..(1956): a, c, t, g, unknown or other
ttaagtaaaatagaaaaataaaacacaaagagttgggtgaaagaggtgcataacatgattttagtatacaaaaagtattttttagataaaatggttggccaaaccgccatggactgtttgggatgcgtagaacgcgaaaagatactcaagttcaaaaaaaaattgcctcaaacggacaatcagaccaaaaattattaatgttcaaagttttcaaaaaatttcatgcaaagttcaactctttctctaattttttctatttattttggtctttaaattattattttattttattggtcttgaaatattaaattacacattatttattatttaatatactannnattatacaaaacataacttaaaaaattataaaaatgatattagcagttcggtaatagcctactccccttaatttgtattgacttaagaacaaagaatataatgattctttttcttaaagctcttacaataatatctctgaatatgaattcttagatccgtttcgaccctcttgcctagtgagaatggatcactatttatagggctagaaactttagggaaaaagtttcccttctgtttacaatagatataattggcaagattgcatattaaatacaaaatacactgatcaagggatttggacagcttgtcatatctctgtgatatgatcccaaaattatagggatttcttctgtgattcacgatgcgagtgctgaaactgctaactgttggcatgctgttcggactgcttactgcccggttaagaaggcttcatccgagcgagtatatgtggtactctatttggcatatcccttgcgagtagatatgtgaagttgattccacgtgtcaccatcgtgtgattccacgtcagagtacaaaaattgggataacacttaaattaatgtaaatgtgtatttacttgacttttcaatttaattttcatttatgttttttatatataatttgtacttaatttaattatattaataataatataatatattcatcaaaaaaataatagtataatgtatatatataaataaaattagatttttaataaaaataaaaaaaatattaaaacacaaaattgtatagctgaaaaaaaaattatagaaaacttatatggagtcggtcatttcataataaccgacgccgtagggaccatatagaggcagttttttcataataaccaacgtcgtagggtccctacaatgttggttgtttttaacccttttagcgtcacttggaacaacatcagtggcaaattttgccaaaactgacgttgaatggccttaaaaactgcctctaaagcctaattttgtagtagtgattgttgattatgttggctcgagttagtaaattaatgagtgttgagggattacaccatggataacttgctctgattattttcttgtagctcctgagattgatatcttttattctcattatcaataaaaattggtggcaatgctttcaaactggagtatgactaagttcacattgaacttaggatgggaaccagcataaatctcttgtgttattgtgtctggcagtcatttagattcatcagtgttatatttttctggtttaatgtgtttgctagttttttgttcttgatttgttttttgatttaacttttgtttgtttaagtgtgatcttgaagcttgaattatagaggttaattcctatgtatcagagttaaatttccttcaaatcatagcttaattctttgatcatcaagaaaaattcaaagatcacttgctttcgcaccaagaactcattaagaatttatcaagaaattctacaagaacacagattgaaggaggatgtcaatggcaaggttcgaactgttggaatatcttttatcaggacctatatttactaagaagtatattttaacatcctaaatatgaanntctaaaacgataaaaataaacacataaaannnnnnnnnnnccttacattggttgcagcggaattgaatgactccttccactcagatct

SEQ ID NO: 31888 - DNA, 2251 bp, Cannabis sativa
  modified_base (979)..(979): a, c, t, g, unknown or other
tttaatacaatcttatttgttatcaatagaagatgttaacgtagattttcgttaaataaaattgagcctcacaatattaatctcacatagattgaataaaagttatagaaaaataatgtatgaacacagggttttttacatgtttttgcagttaaaattctacatagtccacaagtcaatcatattcagatttctaattgttactatttttaggaactctcttgtatgagttcttttgtccccctcctttttcttgatcttgtcagccactatttataattacatagttgtttgtaaattacaaaagttgactgtaattgttacaacaattattccctcaaataacaggattcgattataaatcaagctaagtaaatgaggtaatttacacagctatgagtatcctacttttattgggcggaaatgaacccacatttaagggtatacagtaagccttatctcttaggggtgcctcgctgggaatggaaccaagttatctatgatgacgagcagttgctcgtcatctgtcttcccgagactaatattattttgactttgataaccatattttttggtgtcgagatgatttttctcgcatgcatgccaccttctaccgagataaatacctcgctgtttgttatcttgactcgcctgactatctacacctaatttgtatattgtgtaatatacgctaagtgtttttatcattattgattgtctttcaggcagtgaggttaaagcctcctcatgcacacttacctcgtatggtttctcatcgatacataagttagcagttcatacgtttctgtcttgcagaagggtattcagtcatccgacttatttacatactttgcgaattatgtttctaaaaagttgttccatgctaagtgtacttttgtttgcgtgtttaagttctttgttcttcccagcttgacacatgtcttcctctaatgtgcttaccgaatttcaggtataacanttgccccttaaaaagttcttttaatttaaaagagctttttaatgattagaaagggtatttctattatgttcctctttttgaaagacgcatatcctccaatttcggaagttgtgtagtttcgaggtacattagaattaaatgaccatcttttccacttctgctttgaatcatgtccataggatcaaatctatttctgatctaacgaagccactatcacgggtataaaattagaaaaaaggagtcacctttgcctcattttctccatttcaaaaagtctgagaaaaaccttaaacttcttcatcaaggatcaccattaattttatccaagaattttcatgccatctctgtccttaacttttttcctgcgagtttcctctgacttcatcctctcaaagcgatccttgcttctttcgaagatttgcggacgaaattaccaggcattgccccaagccctaacttcaaactgtaagttgctttcttctttctcatgtttgttacattgtgtggattagttacttaatttgtttatatcgttatcatctcatctggttttggtagtttcttagggtttaaactgttcataccagggttcaggcaatatgtaggttgttttaacatctctaactcattaccttctggtttgataaaattctctccaaggactaggactacttttgcttgcaataatgtccaactctggttcaggattttatcgtccagaagtcttagagttggagttccctacagaatcagccatcctgtataaaaccaacccttcaaaacctacctccaaattagagttgaatgatgctaggattagggaacacgtagtgaaaacccagtaggaagatattggtagtcgctataggcatttcttgaaagaaatatccaaaggcaaacgccgattcttgcgagaagcagcctggctagaacctcccagcgtgtcctttattcctatagcaaagcctttgtttttactcaacgtcacaatttctttagaaccaggtgacttggattttgaaattatgcctcccaagccacgtacatcaaaaattccttaggatcctaatgtgacctttgaggctgagttgatagaatcgaaggtgcgatctatctcaggctacacggtcgaggtgctgaagacctgcgaaattgaacttgggcaatcatgccaagttagatcagtgtgagaggttgagtttatcttctaccccctgtgcattttacaagtagtgttccggggatcgatggtgagactagtactagtggctc

SEQ ID NO: 31889 - DNA, 2346 bp, Cannabis sativa
tccatctacaaaggctggcctccatctcttaccaagcacacaagcatttgccgataacttagcctaaacctccagcggcaggacacttaggggtcatcattaccggaccccatattgcaggcaagaccagtaaagcttgggagggctatgctcggacactctgtcacgagcccaaaagagacgtcctgactggcaaagaacgagactctaagcaaccaaagcttggagagcccacgatctctttctcaaaaggagatcctgtccaagtcgatttcccacacaacgactccctaatcgatactgcacaaaattaggaatatgactgtagcaatatacatggtggacaatggagcctccttcaacattcttttcaaataaaatatgaaaagacgaggctctagcttgctgacttggcaccctgtagtcaaatgatgtatggcctctttggccaaggcattgcacccatcaggtatatcagattactcctcactgttggagaaaatccaaccaccaaaactctgatggcacagtttgttgtaatcgatgttctctcggcttccaacgccatgatgggctgaccggccttatacaacctgaaggcggtaacatctatctacgacccctacctgaaatgcccaataaggtaggggtttggatgttgagagaagaccaacaatctgcccatcactgttataatttcgctttatccaaagccaaggaaaagaagatgcatccataagacaggagcatacaagctttgtgacagacttaggcttgtactgctgcaaagtcacgcccttaagggctaaagaatgcagaggccacatatcagaagcttgtgaacaacatgttcaatgatcatatcagccgtaacatggaggtgtgtgtggttggcatgcttgtcaagtccaaaaaggttgggggcatatggaggacctaaaagaatgcttcaaaatcaaagccattttggatatgaagttacccacaaccatcaaggaagtacaaagccaaacaggacgcactgttgcactaagcaaatttgtgtccaagtctacagacaaatgtgtatccttttttcaacattcttagaggcaacaaaaatttgagtggataaaggaatgtggaactgcattctaggagctaaagaaaaaaattagctcgaccacctgtgttggctaaatcattagacaaagaagagctaggcgtgtacctagcagtcagagaacatgttgtgagtactcacaagagaagaagatggtacaacgccttgtatactacattagcaagagactgatcgacgctaaaagtcagtacccactcatggagaagctcacccacaggttgctcttgccttctaaaaagctaggccatactttcaactacatcgatcaacagttgcggaaggttctacagaaacttgaagcatcaggtcgaccacccaagggaacaaatgccaagctctcaccagcttcatggctaatcatagaggtatatctctccaaatctcttaaaattcaagagaaaagcaggagctagtgaagaagcaagagcaaaataactcaacccaagaggtgcattgactacctgcccaatccaggaatggtcctcagggcacctgatgcacgaggcaataaggtcagtctcaaaggttctaacaatgaggctgaagctccaaatgctggccttgggctagcacacgaagcgtgagctaaccacctagacatacaccacgactctcaactagtcgtaggttatgtcctaggcaaatacacatctcaatacaagaagatgatggcctacttgagctgttaagtcagctcaaaggctggactaaaaggcaagcccccaaagatgacacaacatcaaacgtactcactcgactacccagctatgccttgacaaccacgacaaacttggtacccgcttagttcctcaaagaactaagcatctctatttaaaaaaaatagacttgttagacaatcaacatggatacacctacagcagcatacctcaaataaaaaccttgccagaaagtagggactagggggatggttgtagggtgtccaaccttacatagcataacacacaaaagtggtatcccaacacgacctctaaggagcgttaccaagaaagaagctgaatagctatggacagaagtgcacaaaggctctacggcagttacaccagaggcaaagccaaccgattgtagatgggatcaaattgcagcatggacctagccttcaaaaggttggctaaccctggcctacatggtttcttggggagcacccatatcgtacaatgcatcgaactagcacaaagaacttatgtagagaaattttaacgctt

SEQ ID NO: 31890 - DNA, 4052 bp, Cannabis sativa
  modified_base (993)..(1000): a, c, t, g, unknown or other
  modified_base (1062)..(1065): a, c, t, g, unknown or other
  modified_base (1257)..(1260): a, c, t, g, unknown or other
atgcacgcattcttaaaatagcatatatatccacataataatatagtatattaacattttattgttttataaactaccttgtaaacatatatacatatatttcattttatcaacttattggtttattaatgcatattgacaaataatacatgttaatctaatttcataaacaattaaacaaaaacattgctcatttataacttcaactaaaatatttatttttacaggtagaaacgtcaaacctgcttgtatacaaagtacatgattgtaccgactattacatagtaaacctagataacaaaacttacagatgttagaaatttgaatatgattaaatgccttgctcacatgcaatgcttgtataaagctcaacacacatcttcttcctagtaaactctgaaccaaatccataaccattaaactccttcctcataccatgcacaaaaagctcaacacacatcttcttccgaacaacattcatattcaaacatttggggacatggttgataatttcatgtataaagtattcagcatactttataacgaatacaccacagtcacaacaaaaaatacaaaaacaacacacatataatatcgtaaactatataattaataaatatatatatatataaagtaaacaacatagttaccactgatcttgttgtgacagtatatccacaaacacaacttccaacgaatctgtctcacttactccctaaaaatactttgtgtttctgtcaatattcgacctctgaccatagaagttcacatgagatagcaaaatggacagaagaatagcaaaagctttcacaaaactagtattcccactctgacaaaaatattgttattagggaagaaaatcaacttaccctaaacacgattctctggtttattaaaatatttctcccacgcctgtaaaaacataaaaaaagataacacaacaatataaaatattataaactatcttgtatacatattcaacaaatacattannnnnnnncaatctatctaagtatacatcgtaaattgaattatacaatatacattatctaatacgatttnnnnaaaaaattaaatcggtataaacaatataccttattgtatactatatatacgcaaaattcaagtcagtctcataatgcaaacaaacactcaaaaaactaacctaataaataacacttgcaatatacatatattctaaattattacatataaaatttacaaacatacactcctacacctaatctaagtatacannnnaaatcagagaacataatatacattaatttatacaatatatacacattctatttacaaaaatatgcacaatatatactaatttatacaacacatataaacataaatctttatagacaacacaccttattgtatactatatacacacaaaatgcgaaacaattacatagtacaaaccaaaataaaaaaacttaaactagcgaaccgcaaatcaaataataactattataaatatattttaataataatacattacagcaactacatataattatacatcaatatatacaataaacgttaattatacaatctgtatgtaaacaaaaatattatatacaatacagtttaccgtatattatgtatacatatttaatggacaaatcaaatacataactaaccccaaagctaacgaacataaaccaaaaaacacaaaaacaaaagcaatctatatataatcatacttaaaattcgataaaacactaataaatactaacaaatcaaaaaataaaacagcaaataaattaaaataatcacaaaaacaacactatcttagaccaaacgcttacaagaattcaaagacatactaaaccctaaacaatcgaaccatcactacaccgatccaaacaaaaatgaaccaaaaaaattataaaaaaataacactaccttaacctaaacgcttacaagaattcaaacacatagcaaatcctaaaaaatcgaaccatcaatacactgatccaaacaaaaataaaccaaaaaaattataagaaaacaaacttataaataccttaatgttatttagaactagaatctcttcatcactattaacatactcagcttcatcttcctccaccacttgcttcatccttttcgaagctcgatctacatttctcccttcttaattaaatccatttacattcttcttcctcttccttgaaacatctgattccctactactactatccttagatattgtttccttcatttttctctccggatttatcgccttagaagatatatagagagagaatgtgatgaatgtgtgttcaccattactaagaaataacatgaaaaaaaaaataaataaatgcaatgggtaccatgttttataaggcagctttacaaaatatgtttacaaaggaggtttgcaaaaggagggttacaaaaagaggtattaaaaaattatagaaaatttaaaaaacagtgatcatgtgctctgcacctcctgacgcacatcccatccaattgtcactgacgtcatccctctcttcaacgtgttcaaaaagcaacagaaatggattaaatttaaaaaaactaagttattattggattaaatacacaaatacgtgtctacatgtaaattttcctaaaaaatacatacatatatatatattcctcttgaattaatgggtaaccacacacacattatttatttttcattgtttctaagctctccctctccactgttcatcttcttctttcttttttttttggcccaattttatttcttattcagttctttttcttcatcttcttttcattattttagtttttaaattaaattttcagtcacgtttttgggaaagataagagtatggtttttcattcttattttccagaactgggcttgcaaatatagcctctgctattagatctggtattgaggttgtgcagaagatgattagtttttttttttaatcctttttttcttttctgttctttttatttgatttagtattgttttacagttgtttttccatgatttatttatttgacgttgattttactgttcttgctccatctagctagaattaatggttgttttataattgttctcgtgtttctatgatggttctgtccgtgggtgtggaagatagatattataaatacatttcttcttccttctctatggttgtttttgtagactttaaattttgattctcttataaatacatgtaacaaccttagtggccaaataattttgaggtgtgcggttcttttatattttctaagtggttatatctgcttcattattttacatttgtttttgtgttgttttagttttattttagtagctttttttattctaatttttcaagatcgggcttgcaaatatagccactattgcatctagtgttgaggctgtgcagaagatggttagtttttttaatccttttgtctttttgttttgtttgagtagatttaatgttgttttacagttatttggccttgattatttatttggcgttgatttcactatttttgctcaatcttgtcgaaattaatggttgttttctgagtattttcatgtttgctgtggtggttctgtgcatgggtgttgaagatggaggcattgttttttatattcagtgtctacaatataaaaagaaaaaaaaattaagacagtataaatgtaatttttgttgtgtggcagtaaaattgtatatatttatctaaaatttaatatttttgtaagtttccctatttaaattgaaatgatatatttctaaatcttaacaaaaaaaaaaaaaataaataaagtttggtagaaaaaaagtcaaaagaaaattaggatgaacattggaaacataaaatttttatattgcaaaagagaatttagcgatgaatagttttctacaagttttaaaatgagtgcacctacgttaatgtaatactgtaatgaattttggttcatttattatttgctgtcctaacccttatatgtctatatacagtagaagctctatttaagaatactctatttaagaataacatttaatttgttataaaaaaaaaaa

SEQ ID NO: 31891 - DNA, 2212 bp, Cannabis sativa
taaaaggttactagggacagaatcgagatatccccctcttgaaaaaaatgccctatgcctaatccatgcatctcgcaaactaaggccttacatccaagcacataccataaaggtcttaaccggtcaaccactaagagaagtcttgtcaaaacaagacgcttctggaaggttgataaaatggtctattaaactagggcagtttgacagaacctatcacccaagaacatccatcaagggccaagctttggcagaattcttgatagaaggaatagttcaagatgaagatcctcttttccagtgagacacagagacttgaaagttatacgtggatggagcatctaatgaaaatggctcgggtgcaggggtgacactgatctcaccagataactttaagtatcattacgccctaagattccaatttgacacctcaatcaacgaggccgagtatgaagctttgatagcttgtttgaaaatagctgaagttttaaaagtcaagaatcttatgtgctacagtgactcacaatttattaagaatcaagttctaggagaatactaggcgaatggtttaaaaatggaaaaatatttggagaaggttcagaagaacttggaaaagtttgattaatgaaaaattgaacaaaacccaagagaacataactccaatgctgacgtctttattaaactggcgtcgcaaaatgaacttgataacttaaatttcgtaggggtggaagtgttaagcaagccaagtatatgtgaaaaggaataagttgagatgattgatgcctcacctacatggatgacgcctatagttcactacctactcaacggacaacttccagccgacaaaaactcttgttgccaataccttgctacacgatagtaggggttattcaatgcctctcctacggtgtgtgctccgcactgatgcaagcaagataatcaaagagattgtcaaagaaaataatctgacaaggatagtattggccaacaataaataaatacacacatgaatttatcaagaggtgcgataaatgttagagattttcacatatacctcgcgtaccaccaacagactaagaatgatgaacttactgtacccacttgtaatatgcggaatcaatttgattggggcatttccctcaggtcgaggaggaggctgaacctctagtttccataacttgcaagaagattctcaattttgttgtcaagaacataatttgcagatttggaatacccattacaataatgtctgataatggaactcagtttgatggtgaatttttaactaagttctatgaaagtaacaaaattattaagagcttctcgtcagtttcaaggccttaagcaaatggacaagtagaagctgttaataaaaccttgaatgatcctattaaaaagaagttggatgctgaaaaaggtagatgggtagatgaactaccacaagtactttaggctcacagaacgactgaaaaaacaacaacagggcacactctgttctcgttaggacttggcttagaagcaatgctgccagtagaagttaatattgcgacccacagacgagatttctataatcaagaagaaaaccaagaacttctgaagttttcattggatctacttgatgaaaaacgtacggagtcgcaaattagtaatgcaacatatgaacatcgaattatgagatatttcagtaaggcagtgaataagaagctctttaatgttggagatttagtgttaagacaagtatttgcaaacacgaaagatgcatctggaggagtatttaacccaaacttggaagatccatatgttatggaggaaaaagttggaattggggtttataaattttcctagcttaacgactcaataataaagaaccagtggaatgttgaacatttgcgaccttattaccagtagacttatgtaattgtcgtattttctctttgtgatgtaaatttttattatcaataaaggtgaagtatttttttcaagtaattacaaattttactctttaaaattagttgaggggcttatatatttgtatgattaactgtaatttatctacactactacaaaagtcaaaattcgcgacggtttataatagtaattagaggaataggcgattgttttaattggaattcaaaaatttatttggctcttatacctgacggtttaaaacagttacctatagtataggcggaaattgtcgcctatactataggcg

SEQ ID NO: 31892 - DNA, 1615 bp, Cannabis sativa
ttaaattttacttcttttaaaaaattctttaacgtcaattaaagtgtattttaataacacttttgctttttaattttaagtaaaatttttaaaaattttattttttaaaaataaaaatattttgtaataaattttatttttcaattttaataataaaaaataaaagtgtattctgtaaaatttatttttatttttattttttgatttatttgaatccatgggtgaagtctaaaatattgattaaaaaaaattgttttataataatattgaaagtgatttttttttgttttcaaaattttgattctccattaaaaaaattaaaaagtgaaaaaagttttataaaatatatttttaaaaaatatttttattttttaaattataaaaagctaattaaaaaaatattactaaacgttacctaaattaaaaaaagttagagtttcttgtttttaaatttatagctataggaggttgtctttttttttttttcccggccaggttgttgacttttctaaggcataggtgcaatattgttgggtcgggttatgttttgctattgcgattcgattttttttactatgacataatttgaagtgttttaatcttgtctgtgtcatattgttttgttttgtttttggctattctttgttttccgttggtttaccatcaaattgttgttaataattaaaaataacaagttctttgcgcttaatgggttgctgaacagttacgtattttgcacaatagttgagtgcttaaattacaagattgaataattgtatgcaatatatgaaactaagtataatataagtgttcttaaggttaattgtaatgttacaattttttatttaattttattttaagtttttaaaccaaatgatatgagaataagatattgggtttattattttagctaagtgttattaataaaattgtatggtttatttaaaaaaaaattcttttaagagaagctacaaatattaattcttcctaattaaatttaaactaaaaaacatcttttttcttatccaaacattcaagtattttttaatgtacttacaataatttttttttttcaaaaaaaaaaaagtacttacaatagatcacagcatatgttttaaattatttttttatttcaaagtttttttaaaatttactatttatactttacaagaatattataaattgttttaaatatattttattaattattttaagttttaaatattatttttatatgaaaatgagtgtatatattaatgttatatatttgaattaaataaaatatattaaaatttaaaagggtatttttttggcttgaagaaattgatttatgatttaatgtaaaaatgtgttataaaataaaaaaaaaaataaattaatgaatattttgagagatagaatagataagttggtaggagtgcaattaaatggaaccattgtggttattaatactttttgtttgaaattctaggaaaaaaaaacatttttacttgaataaataaactgacatgtgtgactgggatagtgctattcatccgtacaatttgagtagtgagcaagctaagcaaagtttgtcatatttgattgccgttgtcacatgggctattatttttga

SEQ ID NO: 31893 - DNA, 1409 bp, Cannabis sativa
ttgcattcattggagtcgtggccgtagtgcccatgaaactgacaaaacttggtgatgtctctcttgctgacatttttttcatgggcgcgggcttcttgtacagggctagtgattgagtggccctgtaaacactttctatatcctcagtcaagatggtaaatgcagtgtacttggcttgattttctcggggagcttgctcgattttgccaatgaactttcccttcttcccattcccttgtctattgttgttgctagaacgtttaccgtttgagcttgaattacttgggtaatgggggagttgggcggacgttccagtggaaggagcttttgacttatcaggtttttgctcaccttctgctcgctgaatagcctcttcaagtttgatgacgccttcagcacggttgagaaaatcgctcattgaatctaccagaccgttcttccttatgtctttctagagctcactgaggacttcaatacccccattatcgcggagaactttccatcttcagttacccgtgaaaccttagtcgcctccgtcgtgaatctgctgatgtaggctcggagaggctcgcctggtctttgcttgacttcaaccaggtctcctaggtgcaacaaaagttggcgagaggaggagaattgtgcatggaactcttaggagaaagctttccatgagttgattctaggcgccagcttgaaataccattgctgggcggctttcgagatggtggcaggaaaaattctgcaacatacgtcacctcgtaccccctgcagatccatttgcatctcaaaataattgaggtgggaaagagtatcttctcttccagtgtacatcttgcaggttggcattttaaacttgtggggcaatgccagtagattgatctcgggggagaaaagggttccacgtgctcggtccaactcgagatcattgtttctctgcttggccatgccttggaacatattctttaatttgtccaactgtgcctgcacaactaactaacctgttcggcattttgaccgatctgagttacgccagtatctttctgagcgagaatttaagcacgggttttgggctgcacgatcggcgtgtcaagctgatcgtttactcctcttctcctattcaggtcgtttctgagatcatgagtcatccctaacctatcgaatacggaagcgcctggttgtctcagtgattggctggtttggctaatgtgctgaccgacaccattaacctggttggaattaccgggtatgacttctcccgatgaattactagacaaggtctgcccacctactgcttagcccacaggtggaacctgtgactgtagaattggtggctgaccatttatagtctgagaagtattcatcactggatcttcgtccgtttcacccagggggatgacattcgggggttg

SEQ ID NO: 31894 - DNA, 1318 bp, Cannabis sativa
ctaccaaatctgattcctcaagtttatgaaccttagaagtaacaaaacgacaaaccagaagctctgagagcacccaacacccaggttgatagttggcctggtgagttgggttctacttatctgattctaattctatttcagttgtttgtctagtttttcacaataattaagatccatgaagttagagaagtgaaattcacaacttcacaattctcatttccaacatggaaaactcactcgaaaatgaagagttcgtgtctctcatttctgcagaacaacaacatctctgagaactggtgaccgacttcaccagaatacagaaatagactaagtgttgttaaaataccacttaggcatcttaaactacatcccttggatgtttttctacttacccagcatctaggtcgacgtcatatgtcaacttgggtgctgggatgtcaacttgggcactggatgtcaacctgggcgctacgtcatgaactgccttcagtaaaacatccatcactcactcaatattgatttgaatgatacaatttaacatgattttttaagctatttcaatgctctatgagacatgtctcacacttcaatcacaattctgaagttatctacctcaaatttcatccctaaagaagttacaaaaataagctctagattacccgcagcgggtcccgcctggcttcgaaaaagactatcaccttcaagttgattttatcattacatcatcatatagagtcagaaatagctaatttttagttttcattattttattcctatttttgtgggcctccacctataaaaggagagctccttagctcattttctaaatttagaaaactacccacaaggtcaaagcttctctctctagaagtgggagctttgatgcttagcctatttctgtaataccatctcgtaagaaataaaaattcaaagtaaacgtagcttcattactatcgcgataaaaggagtgacctactataaattgttatgtctctcttataattacttaataactatttcattcttgccaatctagcgagcgggtgtggcttagaagtcttagtctagatttttgagtcactatttttgtgctttcattaagatccacagctcaagaaagttactaacaagatggtggaaacacactttacaagtgttgatagaggaatcccaacatttggccaaataaggcacgctagttaatggagttggaattgggaaaactcctatgccccaggtgttggaattattttaccaggatctagagttacagccatgtatgttgtttaacatcctaatatgaattctctaaaacaat

SEQ ID NO: 31895 - DNA, 4356 bp, Cannabis sativa
  modified_base (926)..(929): a, c, t, g, unknown or other
  modified_base (987)..(987): a, c, t, g, unknown or other
  modified_base (4283)..(4307): a, c, t, g, unknown or other
ttatccttttattggcgagttgaattgtaaccaccaatggatcgacatgaggatatctcacgtttttcatgtcgtcctccgtgaatatgattggaggttcctcggtttttaccttcttagaaggttctggggtgaatgccgactgctcgttctttatctctttcacatatctcttttgggagttattgctctcccctgcgatatgtggccctccgaaataactaggatgtcctctccttcaacaggaagaggttgtaacccctggttgtttgggttattaggcagactgggctggttgtgtccattaccctgtctcgtcacgtaatgtttaaagtggcctcgagcgatgagactttctatcttatccttcaattggcgagatttgttggtcgtgtgcccaatatccttatggaatttacaatgcctgttaggatgtcttttgttccttgcatgcctcatgggctcaagcttgccaaagacaaccatttgctcatgtgcgaggtaaatattctcccgagtttcattaagctcggtataaatagtatacaatggcacgaacttatcgtgcttcttttgcttttttttatcctttgacggttccttagaactgtcctttctcttcgagatagaagcccctgagttatcaactctcgttgagacagtacttgccgaaacatcgctgggtttatctcctgagcctattttcaacatcgaaacatcattaggtttacatcccgagcctgttttcaacaaattaatcgaaacatcactgggtttacctcctgagcctattttcaacaaattcattttttttcgggcttcctcttctcgaacgaacacctgagcccttttgttgaactcagagatgtttcttactggacggcctgtaagtcgtcccactgctcgcccccagcggttgatggatnnnnagagattctcgcctgaagggctgtaatttgtgtactatcatctaaatttctaaccctngcagcagtcgtgctaaaacgacttaagtatgccttaagtgtttcgtcgggctgtttccttaagtatgccttaaccatttttcactactaatattgaagttagttgttataaggtgtagtgtattcggttaattacttaggaagtttgttagaggttgttaagttcattatatgtatgaactgtgtatataaagtatgtaatgtactgaactcctcagatgaatgaattccaattttatttctccgtttctggttctctgttcttcttttcttgttctttgttttcctctcatgaaaataaaatggtatcagagccaactatgtgttgagctcctttgctcttgcttctccaattccttctcttcctttcttcttgattgactgttcttccgatcttccatggcacggggagcaagaactcagactcgcacaaaaaataatgaggatggtgaaaactcgaattgattcgatgttcttgatgaatacaacgaatttccttccaacaatccacggagtccgtatttcttatccaatgctgacaatgcatcttcatccttggtctcgaaaattctcactggtgcaaataacttcagttcttggcgaaggtcaatgatggtggcattgttggcaagaaataaaatcaagtttgttgatggaaggctttcagctcccgatgaagatgatgagaattacgactcatggatacgatgcaacaatctgttaatttcatggatcctcaattctttttctcctactatagctgatagtgtcatgtatatggaagatgcttcttgcatctggtttgaattacaggaaagatttcatcaaaaaaatgctcctaggattttcgaagtaaaaagatcaatgcagacccttactcaaggattgaatgatgttacttcttattacacaaagcttaagggactgtgggacttgttgcaagaatataggccacaaccagttttcacttgtggtgcaatgaagattgtacaggaatatcaagatgatgacaaagttcttgaattcctcattggccttaatgaatcatatctaagtgccagatctcaaatcttacttcaagatccactcccaaatgtgaataaagcttatgctagcataatacaagaagaaaagcagagagggatcctcatacctcaaactgagagtaatcaatctcccaatgatagcacagggcaatttgttagaaatactcaagcaaatcgtggcaataatcgttttgacagcaaaaatgacaatcgagataatagacctacgtgttcacattgtggagtgcctggacatacaactatcaagtgctacagaatccatggataccctcttggaaatcgattatatggcagatttccaagggaaacacccaataaactaggaaaccagcagggtcgatcttctgctaactacacatcaggaaatgaaataggtcacaaagcaagagaggagcatgatttggctgctcagtgttaaaagctcatgactatgctagcacagaaaatgcaggaaaccacggttcggcctcagcaaccagaacaacctgtagtgtctaacatatctggtatggtttcttctgtccctaaatttggttggattattgacactggagccacacatctgtgtgatccaatccctctttatttttctctactgaaaataacaccaagatcaccactgttggtttgcctaatggaactaatactagagtttcttttgttggtaaagtcaaaatttctaacattatcttaaccaatgtcctttgtgttgctgaatttcatcataatcttatatctgtttgtgctttgtcagactcttccaattattctttctcattctttcctactaaatgtgtgatccaggatatcaccaagaatcgtgtgattgggatgggtgaaagaattggcaatctttactacttgattgagcagaaatctcttatagcatgttccattttagattccaaaattagtaatgaaacattatggcattatagacttggccatgcatcttgtataaagaaccattctctgaataaagctttgcaatttcaatactctaattgttctgattttcattgctcaatatgccaccttgtcaaacaaagaaaattaccttttgttagcaatcataatattttcaagcattgttttgatttacttcatatcgacatttggggtccatataatacccaaattgttgaaggttttaaatacttcattaccattgttgatgattgctttaggtacacttggattcatcttattaaaaataaatctgatgcacaaacaaccattccttcattttcgcaacttatcaaaactcagtataatgcacatgttaaaggaattaggtcgaacaatgctaaagagcttcaattccctgcattattctcctctttaagcattatccactatcattcttgtgtgcaaaggccacaacagaattttgttgtggaaaggaagcatcaacatttgctaaatgttgctcgtgccttgctattccaatcccacatccctctgccatattggggaggctgtataagcacttctgcttaccttataaataatagtcctaccctaaatcttaaacacaaatcaccctttcaaattctcaaagccaaatcccccagctatgatcatttaaagccttttggctgccttgcttgtgcctctactttaggggctgcaagaacaaaattttctcctagagccactccttgcatttttttagcatatcgcatagggatgaaaacctataagcttctcgaccttaatactaatagggtgttttgttctagggatgttatttttcatgaaaaaaaaatcatttttattgcagggttctgttccctttgattatttttattttttccctgctgatgcttccaaggagcatgttgcagatcctccttgttctcaacctgcaccccattcacctaccatcccagtacaccagttttttctcaacgtgcaccccattcacctatgcaccataccagtacatcaaatttttctcaaccaaatataccagaaccagatctcattactgtacctgaacatgttactagttcacgacctactagaaagatcagaaaaccatcataccttcaggattaccattcctttttatctactaacaatgtccaatctcaggtacaaaatgattccactgctcatcctctttctgctataattaactacagcaggttgtccccaaagtttcgtgcaactgtgctagctatctctagtcatttagaacaagagtttttgttggaaattattttannnnnnnnnnnnnnnnnnnnnnnnntatgttgattaacaacctaaatattaacttctaaaacgattataaataa
